United States Patent Application Publication US 2018/0126003 A1 - sequence listing, part 131

SEQ ID NO: 229275 - DNA, 19863 bp, Artificial Sequence
  derived and/or modified sequence
atggaccagccccagttcagcggcgcccccagattcctgaccagacccaaggccttcgtggtgagcgtgggcaaggacgccaccctgagctgccagatcgtgggcaaccccaccccccaggtgagctgggagaaggaccagcagcccgtggccgccggcgccagattcagactggcccaggacggcgacctgtacagactgaccatcctggacctggccctgggcgacagcggccagtacgtgtgcagagccagaaacgccatcggcgaggccttcgccgccgtgggcctgcaggtggacgccgaggccgcctgcgccgagcaggccccccacttcctgctgagacccaccagcatcagagtgagagagggcagcgaggccaccttcagatgcagagtgggcggcagccccagacccgccgtgagctggagcaaggacggcagaagactgggcgagcccgacggccccagagtgagagtggaggagctgggcgaggccagcgccctgagaatcagagccgccagacccagagacggcggcacctacgaggtgagagccgagaaccccctgggcgccgccagcgccgccgccgccctggtggtggacagcgacgccgccgacaccgccagcagacccggcaccagcaccgccgccctgctggcccacctgcagagaagaagagaggccatgagagccgagggcgcccccgccagcccccccagcaccggcaccagaacctgcaccgtgaccgagggcaagcacgccagactgagctgctacgtgaccggcgagcccaagcccgagaccgtgtggaagaaggacggccagctggtgaccgagggcagaagacacgtggtgtacgaggacgcccaggagaacttcgtgctgaagatcctgttctgcaagcagagcgacagaggcctgtacacctgcaccgccagcaacctggtgggccagacctacagcagcgtgctggtggtggtgagagagcccgccgtgcccttcaagaagagactgcaggacctggaggtgagagagaaggagagcgccaccttcctgtgcgaggtgccccagcccagcaccgaggccgcctggttcaaggaggagaccagactgtgggccagcgccaagtacggcatcgaggaggagggcaccgagagaagactgaccgtgagaaacgtgagcgccgacgacgacgccgtgtacatctgcgagacccccgagggcagcagaaccgtggccgagctggccgtgcagggcaacctgctgagaaagctgcccagaaagaccgccgtgagagtgggcgacaccgccatgttctgcgtggagctggccgtgcccgtgggccccgtgcactggctgagaaaccaggaggaggtggtggccggcggcagagtggccatcagcgccgagggcaccagacacaccctgaccatcagccagtgctgcctggaggacgtgggccaggtggccttcatggccggcgactgccagaccagcacccagttctgcgtgagcgcccccagaaagccccccctgcagccccccgtggaccccgtggtgaaggccagaatggagagcagcgtgatcctgagctggagcccccccccccacggcgagagacccgtgaccatcgacggctacctggtggagaagaagaagctgggcacctacacctggatcagatgccacgaggccgagtgggtggccacccccgagctgaccgtggccgacgtggccgaggagggcaacttccagttcagagtgagcgccctgaacagcttcggccagagcccctacctggagttccccggcaccgtgcacctggcccccaagctggccgtgagaacccccctgaaggccgtgcaggccgtggagggcggcgaggtgaccttcagcgtggacctgaccgtggccagcgccggcgagtggttcctggacggccaggccctgaaggccagcagcgtgtacgagatccactgcgacagaaccagacacaccctgaccatcagagaggtgcccgccagcctgcacggcgcccagctgaagttcgtggccaacggcatcgagagcagcatcagaatggaggtgagagccgcccccggcctgaccgccaacaagccccccgccgccgccgccagagaggtgctggccagactgcacgaggaggcccagctgctggccgagctgagcgaccaggccgccgccgtgacctggctgaaggacggcagaaccctgagccccggccccaagtacgaggtgcaggccagcgccggcagaagagtgctgctggtgagagacgtggccagagacgacgccggcctgtacgagtgcgtgagcagaggcggcagaatcgcctaccagctgagcgtgcagggcctggccagattcctgcacaaggacatggccggcagctgcgtggacgccgtggccggcggccccgcccagttcgagtgcgagaccagcgaggcccacgtgcacgtgcactggtacaaggacggcatggagctgggccacagcggcgagagattcctgcaggaggacgtgggcaccagacacagactggtggccgccaccgtgaccagacaggacgagggcacctacagctgcagagtgggcgaggacagcgtggacttcagactgagagtgagcgagcccaaggtggtgttcgccaaggagcagctggccagaagaaagctgcaggccgaggccggcgccagcgccaccctgagctgcgaggtggcccaggcccagaccgaggtgacctggtacaaggacggcaagaagctgagcagcagcagcaaggtgtgcatggaggccaccggctgcaccagaagactggtggtgcagcaggccggccaggccgacgccggcgagtacagctgcgaggccggcggccagagactgagcttccacctggacgtgaaggagcccaaggtggtgttcgccaaggaccaggtggcccacagcgaggtgcaggccgaggccggcgccagcgccaccctgagctgcgaggtggcccaggcccagaccgaggtgatgtggtacaaggacggcaagaagctgagcagcagcctgaaggtgcacgtggaggccaagggctgcagaagaagactggtggtgcagcaggccggcaagaccgacgccggcgactacagctgcgaggccagaggccagagagtgagcttcagactgcacatcaccgagcccaagatgatgttcgccaaggagcagagcgtgcacaacgaggtgcaggccgaggccggcgccagcgccatgctgagctgcgaggtggcccaggcccagaccgaggtgacctggtacaaggacggcaagaagctgagcagcagcagcaaggtgggcatggaggtgaagggctgcaccagaagactggtgctgccccaggccggcaaggccgacgccggcgagtacagctgcgaggccggcggccagagagtgagcttccacctgcacatcaccgagcccaagggcgtgttcgccaaggagcagagcgtgcacaacgaggtgcaggccgaggccggcaccaccgccatgctgagctgcgaggtggcccagccccagaccgaggtgacctggtacaaggacggcaagaagctgagcagcagcagcaaggtgagaatggaggtgaagggctgcaccagaagactggtggtgcagcaggtgggcaaggccgacgccggcgagtacagctgcgaggccggcggccagagagtgagcttccagctgcacatcaccgagcccaaggccgtgttcgccaaggagcagctggtgcacaacgaggtgagaaccgaggccggcgccagcgccaccctgagctgcgaggtggcccaggcccagaccgaggtgacctggtacaaggacggcaagaagctgagcagcagcagcaaggtgagaatcgaggccgccggctgcatgagacagctggtggtgcagcaggccggccaggccgacgccggcgagtacacctgcgaggccggcggccagagactgagcttccacctggacgtgagcgagcccaaggccgtgttcgccaaggagcagctggcccacagaaaggtgcaggccgaggccggcgccatcgccaccctgagctgcgaggtggcccaggcccagaccgaggtgacctggtacaaggacggcaagaagctgagcagcagcagcaaggtgagaatggaggccgtgggctgcaccagaagactggtggtgcagcaggcctgccaggccgacaccggcgagtacagctgcgaggccggcggccagagactgagcttcagcctggacgtggccgagcccaaggtggtgttcgccaaggagcagcccgtgcacagagaggtgcaggcccaggccggcgccagcaccaccctgagctgcgaggtggcccaggcccagaccgaggtgatgtggtacaaggacggcaagaagctgagcttcagcagcaaggtgagaatggaggccgtgggctgcaccagaagactggtggtgcagcaggccggccaggccgtggccggcgagtacagctgcgaggccggcagccagagactgagcttccacctgcacgtggccgagcccaaggccgtgttcgccaaggagcagcccgccagcagagaggtgcaggccgaggccggcaccagcgccaccctgagctgcgaggtggcccaggcccagaccgaggtgacctggtacaaggacggcaagaagctgagcagcagcagcaaggtgagaatggaggccgtgggctgcaccagaagactggtggtgcaggaggccggccaggccgacgccggcgagtacagctgcaaggccggcgaccagagactgagcttccacctgcacgtggccgagcccaaggtggtgttcgccaaggagcagcccgcccacagagaggtgcaggccgaggccggcgccagcgccaccctgagctgcgaggtggcccaggcccagaccgaggtgacctggtacaaggacggcaagaagctgagcagcagcagcaaggtgagagtggaggccgtgggctgcaccagaagactggtggtgcagcaggccggccaggccgaggccggcgagtacagctgcgaggccggcggccagcagctgagcttcagactgcaggtggccgagctggagccccagatcagcgagagaccctgcagaagagagcccctggtggtgaaggagcacgaggacatcatcctgaccgccaccctggccacccccagcgccgccaccgtgacctggctgaaggacggcgtggagatcagaagaagcaagagacacgagaccgccagccagggcgacacccacaccctgaccgtgcacggcgcccaggtgctggacagcgccatctacagctgcagagtgggcgccgagggccaggacttccccgtgcaggtggaggaggtggccgccaagttctgcagactgctggagcccgtgtgcggcgagctgggcggcaccgtgaccctggcctgcgagctgagccccgcctgcgccgaggtggtgtggagatgcggcaacacccagctgagagtgggcaagagattccagatggtggccgagggccccgtgagaagcctgaccgtgctgggcctgagagccgaggacgccggcgagtacgtgtgcgagagcagagacgaccacaccagcgcccagctgaccgtgagcgtgcccagagtggtgaagttcatgagcggcctgagcaccgtggtggccgaggagggcggcgaggccaccttccagtgcgtggtgagccccagcgacgtggccgtggtgtggttcagagacggcgccctgctgcagcccagcgagaagttcgccatcagccagagcggcgccagccacagcctgaccatcagcgacctggtgctggaggacgccggccagatcaccgtggaggccgagggcgccagcagcagcgccgccctgagagtgagagaggcccccgtgctgttcaagaagaagctggagccccagaccgtggaggagagaagcagcgtgaccctggaggtggagctgaccagaccctggcccgagctgagatggaccagaaacgccaccgccctggcccccggcaagaacgtggagatccacgccgagggcgccagacacagactggtgctgcacaacgtgggcttcgccgacagaggcttcttcggctgcgagacccccgacgacaagacccaggccaagctgaccgtggagatgagacaggtgagactggtgagaggcctgcaggccgtggaggccagagagcagggcaccgccaccatggaggtgcagctgagccacgccgacgtggacggcagctggaccagagacggcctgagattccagcagggccccacctgccacctggccgtgagaggccccatgcacaccctgaccctgagcggcctgagacccgaggacagcggcctgatggtgttcaaggccgagggcgtgcacaccagcgccagactggtggtgaccgagctgcccgtgagcttcagcagacccctgcaggacgtggtgaccaccgagaaggagaaggtgaccctggagtgcgagctgagcagacccaacgtggacgtgagatggctgaaggacggcgtggagctgagagccggcaagaccatggccatcgccgcccagggcgcctgcagaagcctgaccatctacagatgcgagttcgccgaccagggcgtgtacgtgtgcgacgcccacgacgcccagagcagcgccagcgtgaaggtgcagggcagaacctacaccctgatctacagaagagtgctggccgaggacgccggcgagatccagttcgtggccgagaacgccgagagcagagcccagctgagagtgaaggagctgcccgtgaccctggtgagacccctgagagacaagatcgccatggagaagcacagaggcgtgctggagtgccaggtgagcagagccagcgcccaggtgagatggttcaagggcagccaggagctgcagcccggccccaagtacgagctggtgagcgacggcctgtacagaaagctgatcatcagcgacgtgcacgccgaggacgaggacacctacacctgcgacgccggcgacgtgaagaccagcgcccagttcttcgtggaggagcagagcatcaccatcgtgagaggcctgcaggacgtgaccgtgatggagcccgcccccgcctggttcgagtgcgagaccagcatccccagcgtgagaccccccaagtggctgctgggcaagaccgtgctgcaggccggcggcaacgtgggcctggagcaggagggcaccgtgcacagactgatgctgagaagaacctgcagcaccatgaccggccccgtgcacttcaccgtgggcaagagcagaagcagcgccagactggtggtgagcgacatccccgtggtgctgaccagacccctggagcccaagaccggcagagagctgcagagcgtggtgctgagctgcgacttcagacccgcccccaaggccgtgcagtggtacaaggacgacacccccctgagccccagcgagaagttcaagatgagcctggagggccagatggccgagctgagaatcctgagactgatgcccgccgacgccggcgtgtacagatgccaggccggcagcgcccacagcagcaccgaggtgaccgtggaggccagagaggtgaccgtgaccggccccctgcaggacgccgaggccaccgaggagggctgggccagcttcagctgcgagctgagccacgaggacgaggaggtggagtggagcctgaacggcatgcccctgtacaacgacagcttccacgagatcagccacaagggcagaagacacaccctggtgctgaagagcatccagagagccgacgccggcatcgtgagagccagcagcctgaaggtgagcaccagcgccagactggaggtgagagtgaagcccgtggtgttcctgaaggccctggacgacctgagcgccgaggagagaggcaccctggccctgcagtgcgaggtgagcgaccccgaggcccacgtggtgtggagaaaggacggcgtgcagctgggccccagcgacaagtacgacttcctgcacaccgccggcaccagaggcctggtggtgcacgacgtgagccccgaggacgccggcctgtacacctgccacgtgggcagcgaggagaccagagccagagtgagagtgcacgacctgcacgtgggcatcaccaagagactgaagaccatggaggtgctggagggcgagagctgcagcttcgagtgcgtgctgagccacgagagcgccagcgaccccgccatgtggaccgtgggcggcaagaccgtgggcagcagcagcagattccaggccaccagacagggcagaaagtacatcctggtggtgagagaggccgcccccagcgacgccggcgaggtggtgttcagcgtgagaggcctgaccagcaaggccagcctgatcgtgagagagagacccgccgccatcatcaagcccctggaggaccagtgggtggcccccggcgaggacgtggagctgagatgcgagctgagcagagccggcacccccgtgcactggctgaaggacagaaaggccatcagaaagagccagaagtacgacgtggtgtgcgagggcaccatggccatgctggtgatcagaggcgccagcctgaaggacgccggcgagtacacctgcgaggtggaggccagcaagagcaccgccagcctgcacgtggaggagaaggccaactgcttcaccgaggagctgaccaacctgcaggtggaggagaagggcaccgccgtgttcacctgcaagaccgagcaccccgccgccaccgtgacctggagaaagggcctgctggagctgagagccagcggcaagcaccagcccagccaggagggcctgaccctgagactgaccatcagcgccctggagaaggccgacagcgacacctacacctgcgacatcggccaggcccagagcagagcccagctgctggtgcagggcagaagagtgcacatcatcgaggacctggaggacgtggacgtgcaggagggcagcagcgccaccttcagatgcagaatcagccccgccaactacgagcccgtgcactggttcctggacaagacccccctgcacgccaacgagctgaacgagatcgacgcccagcccggcggctaccacgtgctgaccctgagacagctggccctgaaggacagcggcaccatctacttcgaggccggcgaccagagagccagcgccgccctgagagtgaccgagaagcccagcgtgttcagcagagagctgaccgacgccaccatcaccgagggcgaggacctgaccctggtgtgcgagaccagcacctgcgacatccccgtgtgctggaccaaggacggcaagaccctgagaggcagcgccagatgccagctgagccacgagggccacagagcccagctgctgatcaccggcgccaccctgcaggacagcggcagatacaagtgcgaggccggcggcgcctgcagcagcagcatcgtgagagtgcacgccagacccgtgagattccaggaggccctgaaggacctggaggtgctggagggcggcgccgccaccctgagatgcgtgctgagcagcgtggccgcccccgtgaagtggtgctacggcaacaacgtgctgagacccggcgacaagtacagcctgagacaggagggcgccatgctggagctggtggtgagaaacctgagaccccaggacagcggcagatacagctgcagcttcggcgaccagaccaccagcgccaccctgaccgtgaccgccctgcccgcccagttcatcggcaagctgagaaacaaggaggccaccgagggcgccaccgccaccctgagatgcgagctgagcaaggccgcccccgtggagtggagaaagggcagcgagaccctgagagacggcgacagatactgcctgagacaggacggcgccatgtgcgagctgcagatcagaggcctggccatggtggacgccgccgagtacagctgcgtgtgcggcgaggagagaaccagcgccagcctgaccatcagacccatgcccgcccacttcatcggcagactgagacaccaggagagcatcgagggcgccaccgccaccctgagatgcgagctgagcaaggccgcccccgtggagtggagaaagggcagagagagcctgagagacggcgacagacacagcctgagacaggacggcgccgtgtgcgagctgcagatctgcggcctggccgtggccgacgccggcgagtacagctgcgtgtgcggcgaggagagaaccagcgccaccctgaccgtgaaggccctgcccgccaagttcaccgagggcctgagaaacgaggaggccgtggagggcgccaccgccatgctgtggtgcgagctgagcaaggtggcccccgtggagtggagaaagggccccgagaacctgagagacggcgacagatacatcctgagacaggagggcaccagatgcgagctgcagatctgcggcctggccatggccgacgccggcgagtacctgtgcgtgtgcggccaggagagaaccagcgccaccctgaccatcagagccctgcccgccagattcatcgaggacgtgaagaaccaggaggccagagagggcgccaccgccgtgctgcagtgcgagctgaacagcgccgcccccgtggagtggagaaagggcagcgagaccctgagagacggcgacagatacagcctgagacaggacggcaccaagtgcgagctgcagatcagaggcctggccatggccgacaccggcgagtacagctgcgtgtgcggccaggagagaaccagcgccatgctgaccgtgagagccctgcccatcaagttcaccgagggcctgagaaacgaggaggccaccgagggcgccaccgccgtgctgagatgcgagctgagcaagatggcccccgtggagtggtggaagggccacgagaccctgagagacggcgacagacacagcctgagacaggacggcgccagatgcgagctgcagatcagaggcctggtggccgaggacgccggcgagtacctgtgcatgtgcggcaaggagagaaccagcgccatgctgaccgtgagagccatgcccagcaagttcatcgagggcctgagaaacgaggaggccaccgagggcgacaccgccaccctgtggtgcgagctgagcaaggccgcccccgtggagtggagaaagggccacgagaccctgagagacggcgacagacacagcctgagacaggacggcagcagatgcgagctgcagatcagaggcctggccgtggtggacgccggcgagtacagctgcgtgtgcggccaggagagaaccagcgccaccctgaccgtgagagccctgcccgccagattcatcgaggacgtgaagaaccaggaggccagagagggcgccaccgccgtgctgcagtgcgagctgagcaaggccgcccccgtggagtggagaaagggcagcgagaccctgagaggcggcgacagatacagcctgagacaggacggcaccagatgcgagctgcagatccacggcctgagcgtggccgacaccggcgagtacagctgcgtgtgcggccaggagagaaccagcgccaccctgaccgtgagagccccccagcccgtgttcagagagcccctgcagagcctgcaggccgaggagggcagcaccgccaccctgcagtgcgagctgagcgagcccaccgccaccgtggtgtggagcaagggcggcctgcagctgcaggccaacggcagaagagagcccagactgcagggctgcaccgccgagctggtgctgcaggacctgcagagagaggacaccggcgagtacacctgcacctgcggcagccaggccaccagcgccaccctgaccgtgaccgccgcccccgtgagattcctgagagagctgcagcaccaggaggtggacgagggcggcaccgcccacctgtgctgcgagctgagcagagccggcgccagcgtggagtggagaaagggcagcctgcagctgttcccctgcgccaagtaccagatggtgcaggacggcgccgccgccgagctgctggtgagaggcgtggagcaggaggacgccggcgactacacctgcgacaccggccacacccagagcatggccagcctgagcgtgagagtgcccagacccaagttcaagaccagactgcagagcctggagcaggagaccggcgacatcgccagactgtgctgccagctgagcgacgccgagagcggcgccgtggtgcagtggctgaaggagggcgtggagctgcacgccggccccaagtacgagatgagaagccagggcgccaccagagagctgctgatccaccagctggaggccaaggacaccggcgagtacgcctgcgtgaccggcggccagaagaccgccgccagcctgagagtgaccgagcccgaggtgaccatcgtgagaggcctggtggacgccgaggtgaccgccgacgaggacgtggagttcagctgcgaggtgagcagagccggcgccaccggcgtgcagtggtgcctgcagggcctgcccctgcagagcaacgaggtgaccgaggtggccgtgagagacggcagaatccacaccctgagactgaagggcgtgacccccgaggacgccggcaccgtgagcttccacctgggcaaccacgccagcagcgcccagctgaccgtgagagcccccgaggtgaccatcctggagcccctgcaggacgtgcagctgagcgagggccaggacgccagcttccagtgcagactgagcagagccagcggccaggaggccagatgggccctgggcggcgtgcccctgcaggccaacgagatgaacgacatcaccgtggagcagggcaccctgcacctgctgaccctgcacaaggtgaccctggaggacgccggcaccgtgagcttccacgtgggcacctgcagcagcgaggcccagctgaaggtgaccgccaagaacaccgtggtgagaggcctggagaacgtggaggccctggagggcggcgaggccctgttcgagtgccagctgagccagcccgaggtggccgcccacacctggctgctggacgacgagcccgtgcacaccagcgagaacgccgaggtggtgttcttcgagaacggcctgagacacctgctgctgctgaagaacctgagaccccaggacagctgcagagtgaccttcctggccggcgacatggtgaccagcgccttcctgaccgtgagaggctggagactggagatcctggagcccctgaagaacgccgccgtgagagccggcgcccaggcctgcttcacctgcaccctgagcgaggccgtgcccgtgggcgaggccagctggtacatcaacggcgccgccgtgcagcccgacgacagcgactggaccgtgaccgccgacggcagccaccacgccctgctgctgagaagcgcccagccccaccacgccggcgaggtgaccttcgcctgcagagacgccgtggccagcgccagactgaccgtgctgggcctgcccgacccccccgaggacgccgaggtggtggccagaagcagccacaccgtgaccctgagctgggccgcccccatgagcgacggcggcggcggcctgtgcggctacagagtggaggtgaaggagggcgccaccggccagtggagactgtgccacgagctggtgcccggccccgagtgcgtggtggacggcctggcccccggcgagacctacagattcagagtggccgccgtgggccccgtgggcgccggcgagcccgtgcacctgccccagaccgtgagactggccgagccccccaagcccgtgcccccccagcccagcgcccccgagagcagacaggtggccgccggcgaggacgtgagcctggagctggaggtggtggccgaggccggcgaggtgatctggcacaagggcatggagagaatccagcccggcggcagattcgaggtggtgagccagggcagacagcagatgctggtgatcaagggcttcaccgccgaggaccagggcgagtaccactgcggcctggcccagggcagcatctgccccgccgccgccaccttccaggtggccctgagccccgccagcgtggacgaggccccccagcccagcctgccccccgaggccgcccaggagggcgacctgcacctgctgtgggaggccctggccagaaagagaagaatgagcagagagcccaccctggacagcatcagcgagctgcccgaggaggacggcagaagccagagactgccccaggaggccgaggaggtggcccccgacctgagcgagggctacagcaccgccgacgagctggccagaaccggcgacgccgacctgagccacaccagcagcgacgacgagagcagagccggcacccccagcctggtgacctacctgaagaaggccggcagacccggcaccagccccctggccagcaaggtgggcgcccccgccgcccccagcgtgaagccccagcagcagcaggagcccctggccgccgtgagaccccccctgggcgacctgagcaccaaggacctgggcgaccccagcatggacaaggccgccgtgaagatccaggccgccttcaagggctacaaggtgagaaaggagatgaagcagcaggagggccccatgttcagccacaccttcggcgacaccgaggcccaggtgggcgacgccctgagactggagtgcgtggtggccagcaaggccgacgtgagagccagatggctgaaggacggcgtggagctgaccgacggcagacaccaccacatcgaccagctgggcgacggcacctgcagcctgctgatcaccggcctggacagagccgacgccggctgctacacctgccaggtgagcaacaagttcggccaggtgacccacagcgcctgcgtggtggtgagcggcagcgagagcgaggccgagagcagcagcggcggcgagctggacgacgccttcagaagagccgccagaagactgcacagactgttcagaaccaagagccccgccgaggtgagcgacgaggagctgttcctgagcgccgacgagggccccgccgagcccgaggagcccgccgactggcagacctacagagaggacgagcacttcatctgcatcagattcgaggccctgaccgaggccagacaggccgtgaccagattccaggagatgttcgccaccctgggcatcggcgtggagatcaagctggtggagcagggccccagaagagtggagatgtgcatcagcaaggagacccccgcccccgtggtgccccccgagcccctgcccagcctgctgaccagcgacgccgcccccgtgttcctgaccgagctgcagaaccaggaggtgcaggacggctaccccgtgagcttcgactgcgtggtgaccggccagcccatgcccagcgtgagatggttcaaggacggcaagctgctggaggaggacgaccactacatgatcaacgaggaccagcagggcggccaccagctgatcatcaccgccgtggtgcccgccgacatgggcgtgtacagatgcctggccgagaacagcatgggcgtgagcagcaccaaggccgagctgagagtggacctgaccagcaccgactacgacaccgccgccgacgccaccgagagcagcagctacttcagcgcccagggctacctgagcagcagagagcaggagggcaccgagagcaccaccgacgagggccagctgccccaggtggtggaggagctgagagacctgcaggtggcccccggcaccagactggccaagttccagctgaaggtgaagggctaccccgcccccagactgtactggttcaaggacggccagcccctgaccgccagcgcccacatcagaatgaccgacaagaagatcctgcacaccctggagatcatcagcgtgaccagagaggacagcggccagtacgccgcctacatcagcaacgccatgggcgccgcctacagcagcgccagactgctggtgagaggccccgacgagcccgaggagaagcccgccagcgacgtgcacgagcagctggtgccccccagaatgctggagagattcacccccaagaaggtgaagaagggcagcagcatcaccttcagcgtgaaggtggagggcagacccgtgcccaccgtgcactggctgagagaggaggccgagagaggcgtgctgtggatcggccccgacacccccggctacaccgtggccagcagcgcccagcagcacagcctggtgctgctggacgtgggcagacagcaccagggcacctacacctgcatcgccagcaacgccgccggccaggccctgtgcagcgccagcctgcacgtgagcggcctgcccaaggtggaggagcaggagaaggtgaaggaggccctgatcagcaccttcctgcagggcaccacccaggccatcagcgcccagggcctggagaccgccagcttcgccgacctgggcggccagagaaaggaggagcccctggccgccaaggaggccctgggccacctgagcctggccgaggtgggcaccgaggagttcctgcagaagctgaccagccagatcaccgagatggtgagcgccaagatcacccaggccaagctgcaggtgcccggcggcgacagcgacgaggacagcaagacccccagcgccagccccagacacggcagaagcagacccagcagcagcatccaggagagcagcagcgagagcgaggacggcgacgccagaggcgagatcttcgacatctacgtggtgaccgccgactacctgcccctgggcgccgagcaggacgccatcaccctgagagagggccagtacgtggaggtgctggacgccgcccaccccctgagatggctggtgagaaccaagcccaccaagagcagccccagcagacagggctgggtgagccccgcctacctggacagaagactgaagctgagccccgagtggggcgccgccgaggcccccgagttccccggcgaggccgtgagcgaggacgagtacaaggccagactgagcagcgtgatccaggagctgctgagcagcgagcaggccttcgtggaggagctgcagttcctgcagagccaccacctgcagcacctggagagatgcccccacgtgcccatcgccgtggccggccagaaggccgtgatcttcagaaacgtgagagacatcggcagattccacagcagcttcctgcaggagctgcagcagtgcgacaccgacgacgacgtggccatgtgcttcatcaagaaccaggccgccttcgagcagtacctggagttcctggtgggcagagtgcaggccgagagcgtggtggtgagcaccgccatccaggagttctacaagaagtacgccgaggaggccctgctggccggcgaccccagccagcccccccccccccccctgcagcactacctggagcagcccgtggagagagtgcagagataccaggccctgctgaaggagctgatcagaaacaaggccagaaacagacagaactgcgccctgctggagcaggcctacgccgtggtgagcgccctgccccagagagccgagaacaagctgcacgtgagcctgatggagaactaccccggcaccctgcaggccctgggcgagcccatcagacagggccacttcatcgtgtgggagggcgcccccggcgccagaatgccctggaagggccacaacagacacgtgttcctgttcagaaaccacctggtgatctgcaagcccagaagagacagcagaaccgacaccgtgagctacgtgttcagaaacatgatgaagctgagcagcatcgacctgaacgaccaggtggagggcgacgacagagccttcgaggtgtggcaggagagagaggacagcgtgagaaagtacctgctgcaggccagaaccgccatcatcaagagcagctgggtgaaggagatctgcggcatccagcagagactggccctgcccgtgtggagaccccccgacttcgaggaggagctggccgactgcaccgccgagctgggcgagaccgtgaagctggcctgcagagtgaccggcacccccaagcccgtgatcagctggtacaaggacggcaaggccgtgcaggtggacccccaccacatcctgatcgaggaccccgacggcagctgcgccctgatcctggacagcctgaccggcgtggacagcggccagtacatgtgcttcgccgccagcgccgccggcaactgcagcaccctgggcaagatcctggtgcaggtgccccccagattcgtgaacaaggtgagagccagccccttcgtggagggcgaggacgcccagttcacctgcaccatcgagggcgccccctacccccagatcagatggtacaaggacggcgccctgctgaccaccggcaacaagttccagaccctgagcgagcccagaagcggcctgctggtgctggtgatcagagccgccagcaaggaggacctgggcctgtacgagtgcgagctggtgaacagactgggcagcgccagagccagcgccgagctgagaatccagagccccatgctgcaggcccaggagcagtgccacagagagcagctggtggccgccgtggaggtgaccgagcaggagaccaaggtgcccaagaagaccgtgatcatcgaggagaccatcaccaccgtggtgaagagccccagaggccagagaagaagccccagcaagagccccagcagaagccccagcagatgcagcgccagccccctgagacccggcctgctggcccccgacctgctgtacctgcccggcgccggccagcccagaagacccgaggccgagcccggccagaagcccgtggtgcccaccctgtacgtgaccgaggccgaggcccacagccccgccctgcccggcctgagcggcccccagcccaagtgggtggaggtggaggagaccatcgaggtgagagtgaagaagatgggcccccagggcgtgagccccaccaccgaggtgcccagaagcagcagcggccacctgttcaccctgcccggcgccacccccggcggcgaccccaacagcaacaacagcaacaacaagctgctggcccaggaggcctgggcccagggcaccgccatggtgggcgtgagagagcccctggtgttcagagtggacgccagaggcagcgtggactgggccgccagcggcatgggcagcctggaggaggagggcaccatggaggaggccggcgaggaggagggcgaggacggcgacgccttcgtgaccgaggagagccaggacacccacagcctgggcgacagagaccccaagatcctgacccacaacggcagaatgctgaccctggccgacctggaggactacgtgcccggcgagggcgagaccttccactgcggcggccccggccccggcgcccccgacgaccccccctgcgaggtgagcgtgatccagagagagatcggcgagcccaccgtgggccagcccgtgctgctgagcgtgggccacgccctgggccccagaggccccctgggcctgttcagacccgagcccagaggcgccagcccccccggcccccaggtgagaagcctggagggcaccagcttcctgctgagagaggcccccgccagacccgtgggcagcgccccctggacccagagcttctgcaccagaatcagaagaagcgccgacagcggccagagcagcttcaccaccgagctgagcacccagaccgtgaacttcggcaccgtgggcgagaccgtgaccctgcacatctgccccgacagagacggcgacgaggccgcccagccctag

SEQ ID NO: 229276 - protein, 536 aa, Artificial Sequence
  derived and/or modified sequence
MATRAQPGPLSQAGSAGVAALATVGVASGPGPGRPGPLQDETLGVASVPSQWRAVQGIRWETKSCQTASIATASASAQARNHVDAQVQTEAPVPVSVQPPSQYDIPRLAAFLRRVEAMVIRELNKNWQSHAFDGFEVNWTEQQQMVSCLYTLGYPPAQAQGLHVTSISWNSTGSVVACAYGRLDHGDWSTLKSFVCAWNLDRRDLRPQQPSAVVEVPSAVLCLAFHPTQPSHVAGGLYSGEVLVWDLSRLEDPLLWRTGLTDDTHTDPVSQVVWLPEPGHSHRFQVLSVATDGKVLLWQGIGVGQLQLTEGFALVMQQLPRSTKLKKHPRGETEVGATAVAFSSFDPRLFILGTEGGFPLKCSLAAGEAALTRMPSSVPLRAPAQFTFSPHGGPIYSVSCSPFHRNLFLSAGTDGHVHLYSMLQAPPLTSLQLSLKYLFAVRWSPVRPLVFAAASGKGDVQLFDLQKSSQKPTVLIKQTQDESPVYCLEFNSQQTQLLAAGDAQGTVKVWQLSTEFTEQGPREAEDLDCLAAEVAA

SEQ ID NO: 229277 - DNA, 1611 bp, Artificial Sequence
  derived and/or modified sequence
atggccaccagagcccagcccggccccctgagccaggccggcagcgccggcgtggccgccctggccaccgtgggcgtggccagcggccccggccccggcagacccggccccctgcaggacgagaccctgggcgtggccagcgtgcccagccagtggagagccgtgcagggcatcagatgggagaccaagagctgccagaccgccagcatcgccaccgccagcgccagcgcccaggccagaaaccacgtggacgcccaggtgcagaccgaggcccccgtgcccgtgagcgtgcagccccccagccagtacgacatccccagactggccgccttcctgagaagagtggaggccatggtgatcagagagctgaacaagaactggcagagccacgccttcgacggcttcgaggtgaactggaccgagcagcagcagatggtgagctgcctgtacaccctgggctacccccccgcccaggcccagggcctgcacgtgaccagcatcagctggaacagcaccggcagcgtggtggcctgcgcctacggcagactggaccacggcgactggagcaccctgaagagcttcgtgtgcgcctggaacctggacagaagagacctgagaccccagcagcccagcgccgtggtggaggtgcccagcgccgtgctgtgcctggccttccaccccacccagcccagccacgtggccggcggcctgtacagcggcgaggtgctggtgtgggacctgagcagactggaggaccccctgctgtggagaaccggcctgaccgacgacacccacaccgaccccgtgagccaggtggtgtggctgcccgagcccggccacagccacagattccaggtgctgagcgtggccaccgacggcaaggtgctgctgtggcagggcatcggcgtgggccagctgcagctgaccgagggcttcgccctggtgatgcagcagctgcccagaagcaccaagctgaagaagcaccccagaggcgagaccgaggtgggcgccaccgccgtggccttcagcagcttcgaccccagactgttcatcctgggcaccgagggcggcttccccctgaagtgcagcctggccgccggcgaggccgccctgaccagaatgcccagcagcgtgcccctgagagcccccgcccagttcaccttcagcccccacggcggccccatctacagcgtgagctgcagccccttccacagaaacctgttcctgagcgccggcaccgacggccacgtgcacctgtacagcatgctgcaggccccccccctgaccagcctgcagctgagcctgaagtacctgttcgccgtgagatggagccccgtgagacccctggtgttcgccgccgccagcggcaagggcgacgtgcagctgttcgacctgcagaagagcagccagaagcccaccgtgctgatcaagcagacccaggacgagagccccgtgtactgcctggagttcaacagccagcagacccagctgctggccgccggcgacgcccagggcaccgtgaaggtgtggcagctgagcaccgagttcaccgagcagggccccagagaggccgaggacctggactgcctggccgccgaggtggccgcctag

SEQ ID NO: 229278 - DNA, 1611 bp, Artificial Sequence
  derived and/or modified sequence
atggctaccagggcccaacctggcccgctgtcccaggcaggctcggctggcgttgccgctctcgcaaccgtgggtgtggccagcgggccgggtcctgggagacccggtcctctgcaggacgagaccttaggcgttgcatccgtacctagccagtggcgcgccgttcagggaatccggtgggagaccaaatcatgtcagaccgcaagcatcgccacagcctccgcctctgctcaagcgaggaaccacgtggacgcccaagtgcagaccgaggctccagtcccagtatccgtgcagcctccttcacaatacgacataccacgcctggctgcctttctgcgccgggtggaagcaatggtaattcgggagctgaacaagaactggcaatcacacgccttcgacggctttgaggtaaattggactgagcagcaacagatggtgtcatgcctgtacaccctcggttatccgccagcccaggctcaggggcttcatgtgactagcattagctggaactctacgggaagcgtagtcgcttgtgcatacgggagactcgatcacggcgattggtccacactcaagtctttcgtgtgcgcctggaacctcgaccgacgtgacttgaggccccagcagccatcagcagtggtggaggtgccttctgctgtgctctgcttggccttccaccccacccagcctagtcacgtcgcgggcgggctttattctggcgaggtgttggtatgggacctgagcaggctggaggatccattactgtggcgcaccggcctgaccgatgacactcacaccgaccccgtcagccaggtcgtatggctgcccgagcccggccattctcaccgcttccaggttctcagtgttgcaaccgatggtaaagtcctgctctggcagggcatcggcgtcggacagctccagttgaccgaggggttcgcccttgttatgcaacagctgccccggagcaccaagctgaagaagcaccctcgcggggaaacggaggtcggcgccacggccgttgctttcagctctttcgatcctcgcttgttcattctgggcacagaaggaggattcccactcaagtgctcactcgctgcaggcgaagccgccctgactcgcatgccgagttcagtgcctctcagagctcctgcacagtttacttttagcccccacggaggaccaatctatagcgtgagttgctcacccttccaccgcaatctgttcctttccgcggggacagatggacacgttcacctttactctatgctgcaggctcctcccttaacgtctctccagctgtccctgaagtacctcttcgcagtgagatggagtcctgtccggccattggtattcgcagccgcgtctgggaagggagacgtgcaactatttgacctgcagaagagtagtcagaaacccacagttctgattaagcagactcaggatgagtctcctgtgtattgcctcgagttcaacagccagcagacccagctcctagcggccggagacgcccaaggaactgtgaaagtttggcagctcagtacagaatttaccgagcaggggcctcgcgaagctgaggatttggactgtcttgctgcggaggtggccgcctag

SEQ ID NO: 229279 - DNA, 1611 bp, Artificial Sequence
  derived and/or modified sequence
atggccacccgggcccagcccggccccctgagccaggccggcagcgctggggtggccgccctggccaccgtgggcgtggccagcggccctggccctggccggcccggccccctgcaggatgagaccctgggcgtggcctctgtgcccagccagtggagggctgtgcagggcatccgctgggagaccaagagctgccagacagccagcatcgccacagccagcgccagcgcccaggccaggaaccacgtggatgcccaggtgcagacagaggcccctgtgcctgtgtctgtgcagccccccagccagtatgacatcccccggctggccgccttcctgcggcgggtggaggccatggtgatccgggagctgaacaagaactggcagagccacgcctttgatggctttgaggtgaactggacagagcagcagcagatggtgtcctgcctgtacaccctgggctaccccccagcccaggcccagggcctgcacgtgaccagcatctcctggaacagcacaggctctgtggtggcctgtgcctacggccgcctggaccatggagactggagcaccctgaagagctttgtgtgtgcctggaacctggaccggcgggacctgcggccccagcagcccagcgctgtggtggaggtgcccagcgctgtgctgtgcctggccttccaccccacccagcccagccacgtggccggcggcctgtacagcggggaggtgctggtgtgggacctgagccggctggaggaccccctgctgtggaggacaggcctgacagatgacacccacacagatcctgtgtcccaggtggtgtggctgcctgagcccggccacagccaccgcttccaggtgctgtctgtggccacagatggcaaggtgctgctgtggcagggcattggagtgggccagctgcagctgacagagggctttgccctggtgatgcagcagctgcccaggagcaccaagctgaagaagcaccccagaggagaaacagaggtgggcgccacagctgtggccttcagcagctttgaccccaggctcttcatcctgggcacagagggcggcttccccctgaagtgcagcctggccgccggggaggccgccctgaccaggatgcccagctctgtgcccctgcgggccccagcccagttcaccttcagcccccatggaggccccatctacagcgtgtcctgcagccccttccacaggaacctcttcctgtctgctggaacagatggccacgtgcacctgtacagcatgctgcaggccccacccctgaccagcctgcagctgagcctgaagtacctgtttgctgtgcgctggagccctgtgcggcccctggtgtttgctgctgccagcgggaaaggagatgtgcagctgtttgacctgcagaagagcagccagaagcccaccgtgctgatcaagcagacccaggatgagagccctgtgtactgcctggagttcaacagccagcagacccagctgctggccgctggagatgcccagggcaccgtgaaggtgtggcagctgagcacagagttcacagagcagggcccccgggaggccgaggacctggactgcctggccgctgaggtggccgcctag

SEQ ID NO: 229280 - DNA, 1611 bp, Artificial Sequence
  derived and/or modified sequence
atggccacccgggcccagcccggccccctgagccaggccggcagcgcgggagtcgcggcattggctaccgttggggtcgcgagtgggcctggccccggtcgccctggtccactgcaagacgaaactttaggtgttgcttccgtgccctcacagtggcgggctgtacaagggatccggtgggagactaagtcttgccagacagcctcaattgccacagcatccgcatccgctcaggcccgcaatcacgttgatgctcaggtccaaacggaagcacctgtgccagtgtccgtacagcctccatctcaatatgatataccaagactggctgcttttctgcgtagggttgaagccatggttattagagagctgaacaaaaattggcagagtcacgcatttgatggttttgaagtgaactggactgagcagcaacagatggtttcctgcctctacaccctgggctacccacctgcacaggctcagggcttacacgttacaagtatatcctggaactccacaggctctgttgttgcatgcgcatatggtaggctcgaccatggcgactggtcaacgcttaagtccttcgtctgtgcttggaatctggacaggagagatttgaggccacagcagccaagtgccgtcgttgaggtccccagcgccgtgctctgcttggctttccatcctactcaaccatcacatgtggccggaggcctctattccggtgaagtgctggtatgggacctctctcggttagaagaccccctcctctggaggaccggcctaactgacgacacacataccgaccccgtgtcccaggtggtttggcttcctgagccagggcattcacaccgcttccaggtactgtccgttgccaccgatggtaaggtactactgtggcagggtatcggtgtcggccagctgcagttaactgagggcttcgccctggtaatgcaacagctccctagaagcacaaaactgaagaaacatccccgcggagaaactgaagtaggggcaacagctgtggctttctcttcattcgatccccgccttttcatcctcggcactgaaggcggctttcccctcaaatgcagtctggcagccggtgaagcagcgctcacgagaatgccatcttcagtgccactgcgggcgccagcacagttcaccttctctccccacggaggcccaatctactctgtgtcctgttcgcccttccaccggaatctgtttcttagcgccggaactgatgggcatgttcatttgtactccatgctgcaagctccccctctgacttccttacagcttagcctgaaatacctgttcgctgtgcgatggagccccgtcaggcctttggtgttcgccgctgcttccggaaaaggcgacgtgcagctcttcgacttacagaaaagctctcagaagccgactgtcctcataaagcagacccaagacgagagcccggtgtactgcctcgagttcaatagtcaacagacccagctgctggccgcaggagatgctcaaggtaccgtgaaagtgtggcagctgtccactgagtttaccgaacaggggccacgggaagcagaagacttggactgtctggcagccgaggtcgcggcttag

SEQ ID NO: 229281 - DNA, 1611 bp, Artificial Sequence
  derived and/or modified sequence
atggccacacgggctcagcccggacctttgtctcaagcaggttctgcgggagtagccgctttggccactgtgggggtagcctccggtcccggacctggacggcctggccctctccaggatgagactctgggcgtggcctccgtgccatcccagtggcgggcagtccaaggcattaggtgggagaccaaatcttgccagactgcctctattgcaacagcatctgctagcgcccaggcgagaaatcacgtggatgctcaggtccagactgaggctcctgtccctgtgagtgtccagcctccctcccaatacgatattcccaggctggcagctttcctgcggcgagtggaagctatggtgattagagagttgaacaaaaattggcagtcacacgccttcgacggctttgaggtgaactggaccgaacagcagcagatggtgagctgtctctacactcttggctacccccctgcccaggctcaggggttgcatgtgacctcgattagctggaacagcaccgggagcgtcgtggcttgcgcctatgggagacttgatcacggcgactggtcaactttgaagtcgtttgtgtgcgcttggaacctggaccggagggacctgcgccctcagcaaccgtctgccgtcgtggaggtcccgtctgccgtgttgtgcctcgcctttcacccgacccaaccctctcatgttgctggcggactctacagtggcgaagtcttagtgtgggacctgtcccgactggaggatccactgctatggaggactggcctcaccgacgacacccatacggacccggtgagccaggtggtttggctgccagagcccggtcatagccaccgcttccaggtcttgtccgttgcaactgacggcaaagtgttactttggcagggcataggcgtcggccaacttcagctgaccgaaggatttgccctcgtgatgcagcagttgcccagatctacaaagctcaagaagcatccacgcggagagactgaagtgggcgctaccgccgtggcgttctcatcctttgatcctcgcctgttcatcctggggacggagggcggatttccactgaagtgctctctggctgcaggagaagctgctttaactagaatgcccagctcagtgccactgagggctcctgcccagtttaccttttcgcctcacggcggaccgatatactcagtaagttgcagtccatttcatagaaacctgttcctaagcgcaggtactgatggtcacgtgcacctgtatagtatgctgcaggccccaccacttactagcctccagctatctcttaagtacctttttgccgtgcgctggtccccagtgcggcctctggtttttgctgctgcgtcaggcaagggcgatgttcagctcttcgacctccagaaatcatcccagaagccaacggtgctaataaaacagactcaggatgagtctccggtgtactgcctggagtttaattcccagcagacacaattgctcgcggcaggagatgcccaaggcactgtcaaggtctggcaattatccaccgagtttacagaacaagggccaagggaagccgaggatctggactgcctagctgccgaggtagccgcatag

SEQ ID NO: 229282 - DNA, 1755 bp, Artificial Sequence
  derived and/or modified sequence
ggcggcgtaggggcggaggtcgcgcctgagtgcgtccgcacgagagggcggaaccgtctccatggcaacccgcgcgcagccggggccactcagccaggcgggaagcgctggtgttgcggcgctggcgacagtcggggttgcgagcggcccggggccggggcggccagggccgctgcaggacgagaccctgggtgtggcgtccgtgccctcgcagtggagggccgtccagggcatccgctgggagacgaaaagttgccagacggccagcattgccactgccagtgcatccgcccaggccaggaatcatgtggacgcccaggtgcagacggaggcccccgtgcctgtcagcgtgcagcccccgtcccagtatgacatacccaggctcgcagcctttcttcggagagtggaggccatggtcatccgagagctgaacaagaattggcagagccacgcgtttgatggcttcgaggtgaactggaccgagcagcagcagatggtgtcttgtctgtataccctgggctacccgccagcccaagcgcagggtctgcatgtgaccagcatctcctggaactccactggctctgtggtggcctgtgcctacggccggctggaccatggggactggagcacgcttaagtccttcgtgtgtgcctggaacctggaccggcgagacctgcgtccccagcagccgtcggccgtggtggaggtccccagcgctgtcctgtgtctggccttccaccccacgcagccctcccacgtcgcaggagggctgtacagtggtgaggtgttggtgtgggacctgagccgtcttgaggacccgctgctgtggcgcacaggcctgacggatgacacccacacagaccctgtgtcccaggtggtgtggctgcccgagcctgggcacagccaccgcttccaggtgctgagtgtggccaccgacgggaaggtgctactctggcagggcatcggggtaggccagctgcagctcacagagggcttcgccctggtcatgcagcagctgccacggagcaccaagctcaagaagcatccccgcggggagaccgaggtgggcgccacggcagtggccttctccagctttgaccctaggctgttcattctgggcacggaaggcggcttcccgctcaagtgttccctggcagctggagaggcagccctcacgcggatgcccagctccgtgcccctgcgggccccagcacagtttaccttctccccccacggcggtcccatctactctgtgagctgttcccccttccacaggaatctcttcctgagcgctgggactgacgggcatgtccacctgtactccatgctgcaggcccctcccttgacttcgctgcagctctccctcaagtatctgtttgctgtgcgctggtccccagtgcggcccttggtttttgcagctgcctctgggaaaggtgacgtgcagctgtttgatctccagaaaagctcccagaaacccacagttttgatcaagcaaacccaggatgaaagccctgtctactgtctggagttcaacagccagcagactcagctcttggctgcgggcgatgcccagggcacagtgaaggtgtggcagctgagcacagagttcacggaacaagggccccgggaagctgaggacctggactgcctggcagcagaggtggcggcctgaggggtcccgggaggcgggtgcaagccttcgctgtgccgagccttgtgtttctgacgcaagccaaatgaagaaaagcaaagctt

SEQ ID NO: 229283 - DNA, 745 bp, Artificial Sequence
  derived and/or modified sequence
gctggtgttgcggcgctggcgacagtcggggttgcgagcggcccggggccggggcggccagggccgctgcaggacgagaccctgggtgtggcgtccgtgccctcgcagtggagggccgtccagggcatccgctgggagacgaaaagttgccagacggccagcattgccactgccagtgcatccgcccaggccaggaatcatgtggacgcccaggtgcagacggaggcccccgtgcctgtcagcgtgcagcccccgtcccagtatgacatacccaggctcgcagcctttcttcggagagtggaggccatggtcatccgagagctgaacaagaattggcagagccacgcgtttgatggcttcgaggtgaactggaccgagcagcagcagatggctggaccatggggactggagcacgcttaagtccttcgtgtgtgcctggaacctggaccggcgagacctgcgtccccagcagccgtcggccgtggtggaggtccccagcgctgtcctgtgtctggccttccaccccacgcagccctcccacgtcgcaggtgagctgcctgctgtgtccgcctcctctcctctcaggactcagcttcccgccctgcagagggcacaagggagctttccatgggccctttggcccggagacaggaaggcgggccctgaccctctcagtctggagcccaggtgaaggtctgcagtgagccctgaggggtggaactcgggggaggagtctggaaggggg

SEQ ID NO: 229284 - protein, 250 aa, Artificial Sequence
  derived and/or modified sequence
MAVCGLGSRLGLGSRLGLRGCFGAARLLYPRFQSRGPQGVEDGDRPQPSSKTPRIPKIYTKTGDKGFSSTFTGERRPKDDQVFEAVGTTDELSSAIGFALELVTEKGHTFAEELQKIQCTLQDVGSALATPCSSAREAHLKYTTFKAGPILELEQWIDKYTSQLPPLTAFILPSGGKISSALHFCRAVCRRAERRVVPLVQMGETDANVAKFLNRLSDYLFTLARYAAMKEGNQEKIYMKNDPSAESEGL

SEQ ID NO: 229285 - DNA, 753 bp, Artificial Sequence
  derived and/or modified sequence
atggccgtgtgtgggctgggcagtcgcctgggcttggggagtaggttgggtctccgtggatgtttcggagccgcgaggctgctttacccacggtttcaaagccgaggcccgcagggagtcgaagatggggaccggccccagccttccagcaaaacccctagaattcctaagatatacacgaagaccggtgataagggattttcctcgactttcacgggagagcgccgaccaaaagatgatcaagtgtttgaggccgtgggcacaactgatgaactcagctctgccatcggtttcgcgctggaattggtcactgaaaagggacacacattcgcagaggaactgcaaaaaattcagtgtaccctacaagacgtgggcagcgccctcgcaacaccctgttcatccgcgagggaggcacacttaaaatatactaccttcaaagcaggacctatcttagagctcgagcaatggattgataagtatacaagtcagttgcctccgctgaccgccttcatactgcccagcggcggcaaaatttccagcgctctgcacttctgcagagctgtatgccgcagggcggaacgcagggtggtgcctctggttcagatgggcgaaactgatgcaaatgtggctaagttccttaatcgcctgtcagattacttattcaccctcgctcggtatgccgcgatgaaggaggggaatcaggaaaagatctatatgaaaaacgacccctcagctgagagcgagggattatag

SEQ ID NO: 229286 - DNA, 753 bp, Artificial Sequence
  derived and/or modified sequence
atggctgtgtgtggcctgggcagccggctgggcctgggcagccggctgggcctgcggggctgcttcggggccgcccggctgctgtacccccgcttccagagccggggcccccagggcgtggaggatggagaccggccccagcccagcagcaagaccccccgcatccccaagatctacaccaagacaggagacaagggcttcagcagcaccttcaccggggagcggcggcccaaggatgaccaggtgtttgaagctgtgggcaccacagatgagctgagcagcgccatcggctttgccctggagctggtgacagagaagggccacacctttgctgaggagctgcagaagatccagtgcaccctgcaggatgtgggcagcgccctggccaccccctgcagcagcgcccgggaggcccacctgaagtacaccaccttcaaggccggccccatcctggagctggagcagtggattgacaagtacaccagccagctgccccccctgacagccttcatcctgcccagcggcggcaagatcagcagcgccctgcacttctgcagagctgtgtgccggcgggcagagcggcgggtggtgcccctggtgcagatgggagaaacagatgccaacgtggccaagttcctgaaccggctgagtgactacctgttcaccctggcccgctatgctgccatgaaggagggcaaccaggagaagatctacatgaagaatgaccccagcgctgagagcgagggcctgtag

SEQ ID NO: 229287 - DNA, 2725 bp, Artificial Sequence
  derived and/or modified sequence
cctgccgccgccgccgcctccccggccgccgcccctccgcgccgaagccggagcagctccccaactcccacaacccagagcgcccgtgcctcaaggggaggaggcgttgtacttcaggccagccaatcagagcgcgcgagcccggagtacctttaccaataggcttgaacattggtcaataggtgttgcagccaagccgacacgggttttcccgccccgctccttccgttaaaccaatgggaaacaagtccctgggagtgtcccgccctggggtgagaactgcgaaccaataaaaattgaaacctgagcggtggcgcggccagctgtgggtggagtcaccccgcggactggacgggaacctggcggggtcaggtcccgtcaagcagcctggctcatggctgtgtgcggcctggggagccgtcttggcctggggagccgtcttggcctgcgcgggtgcttcggcgccgccaggctcctgtatccccgtttccagagccgcggccctcagggcgtggaagacggggacaggccacagccttcctcgaagacacccaggatccccaagatttacaccaaaacgggagacaaagggttttctagtaccttcacaggagaaaggagacccaaagatgaccaagtgtttgaagccgtgggaactacagatgaattaagttcagctattgggtttgctctggaattagtcacagaaaagggccatacatttgccgaagagcttcagaaaatccagtgcacattgcaggacgtcggctcggccctggcgacaccatgctcctcggcccgggaggctcacttaaagtataccacgttcaaggcggggcccatcctggagctggagcagtggatcgacaagtacaccagccagctcccaccactcacggccttcatcctgccttcgggaggcaagatcagctcggcgctgcatttctgccgggccgtgtgccgccgggccgagagacgtgtggtgcctcttgtccagatgggagagaccgatgcgaacgtggccaagttcttaaacagactcagtgactatctcttcacgctagccagatatgcagccatgaaggaggggaatcaagagaaaatatacatgaaaaatgacccatcggccgagtctgagggactctgaaatcacagaaagtgggagcttggaggatccctccatggcgatggccgtggagagaggagcttgcccttctggggtcctggttcctgaagagctcacccagagaggctcaaagcagccttttgtcccagctcagctttgatctacacctcttgccaccttcctcaagggactgtgaccctttggggattctgtccctgaccctgcttccccaagctctcctgggtcttggagggatgtgggaatgaattggcattgcaggaaagacaggtaaagtgattgctgcaatgagaaggagctgtgcggaaaaggaataaaagttggaaaggctggagccgtgtgtgtgtgtgtgtgtgtgtgtgtgtgtgtgtgtgtgtgtgtgagagagagccctcccactgccagctcaggttgttcacagatttggaatgggaccagaggcccttgaaaatgtaattgtgatttacctgtgccaaaggtgctttaaatgtcacatttgtaaaggggaaggcggacaagatttggaagtttagtcacctctgagccacccatcaccgccaaagtgtgggggaaggatagctgcagattgacaggcgaggctcagaaactcctggcttagattgaagtgtgtgtgatgggggtgcagcttagaggaccccctctgaaagggatggagatgctgatgagaacaacactaccacttgaaggtgaacattccctgtctggttggactgagtcaagggtctgcggtgcagcatcttcagcttgagaaaatgaggttgtcagtttccagcaaggctgacatccaccagactgatttctccgatgttgcacttggctggcttatgcctctgagatcggtgccacggctgtatttatttcagttgtcactgctgctccctcctgctatgaaacgacactgccagtgccagcagtgtccttgggaaaggcaatatttatgaagggcagaagaggcagccccaagaacctaaagactgcaggctgctaattgcaggaaatgactttggaagggcaggctcttgtccagtttcagggctgaaatgcctggcgaactccattcagccatcacatattgactgagtggctgcttagcatgggccaccgcgctaggctcgggacagctggtctttccggccatctttcttgctggcaagtcagcaaacattaccttcttagtcacgtgcatatttttgccttcattcttaccacctggcctgcaaagtttgcaggagggccaggtatattcacttgtgtcttctgggtcctttcattgctgacaggctgtgatggccctcttgagccttgggcagggtgggtgaggtgcagatgaccaggagtgtgtgaatgccttccaggaggtggctttgttccgtgcctccctgcccccatcgtcactaccaggtctggtacggagtcggtgctcagtgtttgcaaaacagagctgaaaacggactttgggaggccgaggcaggcagatcacctgaggtcaggagtttgagaccagcctggtcaacatggtaaaaccccatttctgctaaaaaaaaaaaaaaaaaaaaaaaa

SEQ ID NO: 229288 - DNA, 753 bp, Artificial Sequence
  derived and/or modified sequence
atggccgtgtgcggcctgggcagccggctgggcctgggcagccggcttggcctgcggggttgtttcggcgccgcccggctcctgtaccctcgattccagagtagagggccacagggagtagaagacggcgacagaccacagccaagctctaaaaccccccgcatcccgaagatctacacaaaaactggcgacaaaggctttagtagtaccttcactggagagaggcgcccgaaggatgatcaggtctttgaagcagttgggacaacagacgagttgagctctgcgattggcttcgccttggaactggtgactgaaaaaggtcatacgtttgccgaggagttgcaaaagatccagtgtactttgcaggacgttggtagtgcacttgccactccttgctcttcggcccgggaggcgcacctgaagtatacaacattcaaggctggaccaattcttgagcttgagcagtggatcgataaatacacatcacagctcccacctttaaccgcttttatactcccctcaggcggtaagatcagctctgcattgcacttctgcagagccgtttgtaggagagcagaacggcgcgtggtgcccctggtgcaaatgggtgaaactgatgccaatgtggcaaaatttctgaaccggctgagtgattacctctttactctggcccggtatgctgcaatgaaagaagggaatcaggagaagatctatatgaagaacgatccttccgctgagagcgaaggtctgtag

SEQ ID NO: 229289 - DNA, 753 bp, Artificial Sequence
  derived and/or modified sequence
atggccgtatgcggactaggcagccgactgggcctgggtagccgcttggggcttcggggttgctttggggctgccagactgttataccccagatttcagtcacgcggacctcagggggtggaagatggtgacagaccccagccctcatccaaaaccccgcgtatccctaagatctacacaaagacaggggataaaggttttagcagcacttttaccggggaaaggcgtccaaaagacgatcaggtgttcgaggccgtcgggaccactgacgaacttagcagcgccataggcttcgcgctggagctcgtcacggagaagggacacactttcgctgaggagctgcaaaagatccaatgcacgcttcaggatgtcggatccgcgttagccaccccctgctcctcagctagagaggctcacctcaaatacaccacatttaaggctggccctatactggagctcgagcaatggatcgataaatatacctcccagctccccccactgactgccttcatcctccctagtggtgggaaaattagttcagcgttacacttttgcagagccgtttgtagaagggccgaacgacgagtggttcctcttgtccaaatgggcgagacggacgctaacgttgctaaattcctgaatcgcctcagcgattatctatttacactggcaagatacgccgcaatgaaagaggggaatcaggaaaaaatatacatgaagaacgatcccagcgcagagagcgaaggcctctag

SEQ ID NO: 229290 - DNA, 753 bp, Artificial Sequence
  derived and/or modified sequence
atggccgtgtgcggcctgggcagcagactgggcctgggcagcagactgggcctgagaggctgcttcggcgccgccagactgctgtaccccagattccagagcagaggcccccagggcgtggaggacggcgacagaccccagcccagcagcaagacccccagaatccccaagatctacaccaagaccggcgacaagggcttcagcagcaccttcaccggcgagagaagacccaaggacgaccaggtgttcgaggccgtgggcaccaccgacgagctgagcagcgccatcggcttcgccctggagctggtgaccgagaagggccacaccttcgccgaggagctgcagaagatccagtgcaccctgcaggacgtgggcagcgccctggccaccccctgcagcagcgccagagaggcccacctgaagtacaccaccttcaaggccggccccatcctggagctggagcagtggatcgacaagtacaccagccagctgccccccctgaccgccttcatcctgcccagcggcggcaagatcagcagcgccctgcacttctgcagagccgtgtgcagaagagccgagagaagagtggtgcccctggtgcagatgggcgagaccgacgccaacgtggccaagttcctgaacagactgagcgactacctgttcaccctggccagatacgccgccatgaaggagggcaaccaggagaagatctacatgaagaacgaccccagcgccgagagcgagggcctgtag

SEQ ID NO: 229291 - protein, 766 aa, Artificial Sequence
  derived and/or modified sequence
MGRRRLLVWLCAVAALLSGAQARGTPLLARPAPPGASRYSLYTTGWRPRLRPGPHKALCAYVVHRNVTCILQEGAESYVKAEYRQCRWGPKCPGTVTYRTVLRPKYKVGYKTVTDLAWRCCPGFTGKRCPEHLTDHGAASPQLEPEPQIPSGQLDPGPRPPSYSRAAPSPHGRKGPGLFGERLERLEGDVQRLAQTYGTLSGLVASHEDPNRMTGGPRAPAVPVGFGVIPEGLVGPGDRARGPLTPPLDEILSKVTEVSNTLQTKVQLLDKVHGLALGHEAHLQRLREAPPSPLTSLALLEEYVDRRLHRLWGSLLDGFEQKLQGVQSECDLRVQEVRRQCEEGQAASRRLHQSLDGRELALRQELSQLGSQLQGLSVSGRGSCCGQLALINARMDGLERALQAVTETQRGPGAPAGDELTRLSAAMLEGGVDGLLEGLETLNGTEGGARGCCLRLDMGGWGVGGFGTMLEERVQSLEERLATLAGELSHDSASPGRSARPLVQTELAVLEQRLVSLETSCTPSTTSAILDSLVAEVKAWQSRSEALLRQVASHAALLQQLNGTVAEVQGQLAEGTGSSLQGEITLLKVNLNSVSKSLTGLSDSVSQYSDAFLAANTSLDERERKVEAEVQAIQEQVSSQGSRLQAGHRQVLNLRGELEQLKAGVAKVASGLSRCQDTAQKLQHTVGHFDQRVAQVEGACRRLGLLAAGLDSLPTEPLRPREGLWSHVDQLNRTLAQHTQDIARLRDDLLDCQAQLAEQVRPGQAN

SEQ ID NO: 229292 - DNA, 2301 bp, Artificial Sequence
  derived and/or modified sequence
atggggcgacgaagactcctggtgtggctgtgcgctgttgcagccttgctgtccggggcacaggcccgaggtacccccctgctggctaggccagccccacccggtgcatctaggtattccctgtataccactggatggcgcccaaggctcagacctggaccgcacaaagctctctgcgcctacgtggtgcaccgtaacgtcacatgtatactccaggagggggcagagagctatgtcaaagccgagtacagacagtgtcgttgggggccaaaatgcccaggcacagtgacttatcgtacagttctgcggccaaagtataaggtggggtacaagactgttacggacctcgcttggcgatgttgcccagggttcaccggcaagcgatgccctgagcacctgaccgatcacggcgctgccagcccccagcttgagcccgaaccgcagatcccaagcggacagttagatccaggtccaagaccgccttcctacagcagagccgctccgagtccccatggcagaaagggccctggattgtttggggagcgcctggagcgattggagggcgacgttcaaagacttgcccagacatacggtacactgtctgggctggtagcctctcacgaagatccgaaccgtatgactggcggacccagagcaccggcagtcccagtagggttcggtgtgatccccgaagggttagtgggacccggagatcgagcgagagggcctctaacaccgccactggacgagattctgtctaaagtgaccgaggtttccaacaccttacagacgaaggtgcagctgctggataaggtgcacggtctcgcactggggcacgaggcccacctgcaaagactgcgagaggcaccccctagcccgctaacgtctctggcccttcttgaggaatatgttgaccggaggttgcaccgactgtggggttcacttctggacgggttcgagcaaaaacttcagggtgtgcagtccgaatgcgatctcagagtacaggaggttcgcagacagtgtgaagaggggcaagctgcttccaggcgattgcatcaatcgctagatggacgcgagctagcactccgacaggaactgagccagttggggtcacagctccaaggactatctgtgtcaggtagaggcagttgctgcggccagctggccctgatcaacgcaagaatggacgggttagagagagccctacaggccgtgacggagactcagcgcggacccggagcccctgccggagacgagcttaccagactttccgcagcaatgttagaaggaggggttgacggactgctggagggcctggaaactctgaatggcacagagggcggagctcgcggttgttgcctgcgtctcgatatgggaggctggggggtggggggatttggaaccatgcttgaggaacgagtccagagcctggaagagaggctggcaaccctggctggagagctgtcgcacgatagcgcctcgcctggcagaagtgcgagaccactcgtgcaaacggaactcgcggttcttgagcaacgcttagtgagcttggagacctcatgtacacctagcacaacttccgcaatccttgattccttagtggccgaggttaaggcatggcagagccgcagcgaggccctgcttagacaggttgcttctcatgcggctctgctgcagcagctcaacggcaccgtcgcggaagtacaaggtcaactggctgagggtactggtagcagtctccagggggaaataaccctcctcaaagtcaatctgaatagtgtgtctaagagtcttaccgggttgtctgattctgtctctcaatactccgatgcattccttgccgctaatacaagtttggacgaacgggagagaaaggtggaggcagaggttcaggccatccaggaacaggttagctcacaggggagccgcttgcaggccggtcatcgccaggtgctaaacctccggggtgaactagagcagctgaaggcaggcgtggccaaggtagcctctggattgagtaggtgtcaagacaccgcacagaagctccagcatacagtcggccactttgatcagcgagtagctcaagtggagggcgcttgtcgaaggctggggctcctggccgcaggactggacagcctgccaactgagcctctgagaccacgggaagggttgtggagccatgtcgaccaacttaatagaacccttgctcagcatacccaagacatcgcacgcctcagggacgatttgttagactgccaggcacaactcgctgagcaggtgcggccaggccaggctaactag

SEQ ID NO: 229293 - DNA, 2301 bp, Artificial Sequence
  derived and/or modified sequence
atgggcaggagacggttgttagtatggttgtgcgccgtagccgccctccttagcggcgcccaagccaggggaacaccgttactggctagacctgccccccccggcgcctccagatacagcctctacacaaccggctggagacctaggctcagaccaggccctcataaggccctatgcgcttatgtggtgcatcggaatgtgacatgtattctccaggagggagccgagtcatatgtcaaagcagagtacagacaatgtagatggggcccgaagtgccctggaacagtgacttacaggaccgtcctgaggcctaagtataaggttggttataagacggtgacagacttggcttggcgctgctgccccggctttaccgggaagcgatgcccagaacacctgacagatcatggcgcagcaagtccacagttagaacctgaaccgcagatcccatcgggccaactcgatcccggacctagaccgcccagttactcccgagctgcaccctctccgcacggaagaaagggtcctggcctgtttggagagagacttgaaagactggaaggagacgtccagaggctggcgcaaacatatgggaccctctccgggctggtggcatcccacgaggaccctaaccggatgactggcggacctcgggctcccgccgtgcctgtcgggtttggtgtgattcctgaagggctcgtgggaccgggagatcgtgcaagaggtccgttaacaccacctctcgatgaaatactgtccaaggtgacagaggtttctaatactctgcagaccaaagtgcagctcctagataaggtacatggactggcgctaggccacgaagcacaccttcaaaggctccgcgaggcgccgccttccccccttacctcgctcgccctccttgaggaatacgtagatagacgacttcaccgcctgtggggcagcttgctggatggattcgaacaaaagctgcagggcgtccagagcgagtgtgacctgcgggttcaggaggtgcggagacagtgtgaggaagggcaagccgcttcacgacggctccatcaaagcctggacggcagagagctggctttacgccaggaactgtcccagctggggagccaactccagggtttaagtgtcagtggaaggggttcatgctgtggccagctggccctgattaacgctaggatggatggtctggagagagccctgcaagccgtgactgagacacagcgtggccccggcgcaccggccggcgacgagctcactcgcctctccgcggcaatgttggaaggcggtgtggatggtctcctcgagggcctggaaacgctgaatggaactgaagggggagccagaggttgttgtctgagactcgatatgggcggttggggggtcggcggttttggcaccatgctagaagaacgagtgcagtcactggaggagaggctagcaacactagccggcgagctgagccacgacagtgcctctccaggcagatccgcccggccacttgtccagacggagctagctgtcctggaacagcggctagtgagcctcgaaaccagctgtacacctagcacgacctctgcaatattagacagccttgtagctgaagttaaggcatggcagtctcggtcagaagcactcttaaggcaggtggcatcccacgctgcattactgcagcagctgaacggtactgtcgccgaagtgcagggtcagttagcggagggcactggaagttctttgcagggggaaatcacactactcaaagtgaatctgaatagcgtttcgaagagtctcacaggcctgagcgacagtgtgtcccaatatagcgacgccttccttgcagctaacacttctctggacgaacgcgagagaaaggtagaggcggaagtacaggcaatccaggagcaggtatcttcgcaaggctcacggttacaagccggtcatagacaggttctcaaccttaggggtgagctcgaacagctcaaagctggggtcgctaaggtggcctccggattgagccgttgtcaggacacagcacagaagctacagcacacggttgggcacttcgaccagagagtggcacaggtcgagggcgcctgtagacggctagggttgcttgcagcagggcttgattctttacccaccgaaccgctgcgaccgcgcgagggcttatggtcacatgtggaccagctcaataggaccctggcgcaacacacccaggatatcgctaggctgcgggacgatcttttagattgccaagcccagttggccgaacaggtgcgtcccggtcaggcaaactag

SEQ ID NO: 229294 - DNA, 2301 bp, Artificial Sequence
  derived and/or modified sequence
atgggcaggagacggttgttagtatggttgtgcgccgtagccgccctccttagcggcgcccaagccaggggaacaccgttactggctagacctgccccccccggcgcctccagatacagcctctacacaaccggctggagacctaggctcagaccaggccctcataaggccctatgcgcttatgtggtgcatcggaatgtgacatgtattctccaggagggagccgagtcatatgtcaaagcagagtacagacaatgtagatggggcccgaagtgccctggaacagtgacttacaggaccgtgctacggcccaagtataaggtcggctacaagacggtaactgacctcgcctggcggtgttgtccaggtttcacaggaaaaagatgccccgaacatctaactgaccacggtgcagcttctcctcagcttgaaccagagccacagatccctagcggccagctggaccccggacctcggccaccctcttactcccgtgccgcaccctcccctcacggcagaaaaggccctggattgtttggcgagcggttagagcgtctggagggcgacgtgcaaagactggcccagacatacggaacgctgtcaggcctagtcgcgtcccatgaggatccaaacaggatgacgggcggacctagggctcctgccgttccagtgggattcggcgttatcccagaaggcttggtcgggccaggagacagagccagaggacccctcactccccccttagacgaaattttgagtaaggtaaccgaagtcagcaacacactgcagaccaaggtccaattattggacaaagtccatggcctagccctgggccacgaagctcaccttcagagactgcgagaggctccaccgtcacctctaacctcacttgctctgcttgaggagtacgtagatcgacggctgcatagactatggggatccctgttagacggatttgaacagaagcttcaaggcgtgcagagcgagtgcgacctgagagtccaggaggtacggaggcaatgcgaggagggacaagccgccagtaggcgtctccaccaatctctggacggccgtgaattagcccttcggcaggaactatcacaactggggagtcagctacaggggctcagcgtgtctggaagaggatcttgttgtggccagctcgcactgatcaatgcacgcatggacgggttggaaagggctcttcaggctgtaactgagacacaaagaggccccggggcgccagcgggcgacgagctaactcgcctctctgcagcgatgctggaggggggggtggacggacttttagaaggattggagacactcaacggaacggaaggtggcgcgcgtggctgttgcttgaggctcgatatggggggatggggggttgggggatttggtaccatgctggaggaacgggttcaatctctcgaagaacggctcgctacacttgccggcgagttgagccatgattcagctagcccaggtaggtcagcccgccccctcgtccagaccgagctagccgtgctcgagcagcgtttagtgtctctcgaaacgtcatgtacgccgtctaccaccagcgctatcctggactccctcgtcgccgaagtcaaagcatggcaatctaggtctgaagcattattacggcaggtcgcttctcatgccgccctcctgcagcagctaaacggtactgttgcagaagtacagggtcaactcgcagaagggaccgggtccagtctgcaaggcgagatcactctgctaaaggtaaatctgaattctgtctcaaagtcactcacgggcttgagtgattccgtctcacagtatagcgatgcctttttagcggccaacactagtctggacgagcgggaaaggaaggtcgaggcggaagtgcaggccatccaggaacaggtctcctcacaaggaagcagattacaggctggacatcggcaggtcctgaacctgcgaggcgaactcgaacagctcaaggctggcgtagcaaaggtagctagcggtctttctcgctgccaggacaccgcacagaagctccaacacactgtagggcacttcgatcaaagggttgcgcaggtagagggcgcatgccggagactgggtctgttagccgccggccttgattcactaccaacagagccactgagaccacgagaagggctttggagtcacgtcgaccaactgaaccgcacgttggctcaacacactcaagacatagcacgcttgcgagatgacctgctggactgccaggcccagttagctgagcaagtgcgcccgggtcaggccaactag

SEQ ID NO: 229295 - DNA, 2301 bp, Artificial Sequence
  derived and/or modified sequence
atgggcagaagaagactgctggtgtggctgtgcgccgtggccgccctgctgagcggcgcccaggccagaggcacccccctgctggccagacccgccccccccggcgccagcagatacagcctgtacaccaccggctggagacccagactgagacccggcccccacaaggccctgtgcgcctacgtggtgcacagaaacgtgacctgcatcctgcaggagggcgccgagagctacgtgaaggccgagtacagacagtgcagatggggccccaagtgccccggcaccgtgacctacagaaccgtgctgagacccaagtacaaggtgggctacaagaccgtgaccgacctggcctggagatgctgccccggcttcaccggcaagagatgccccgagcacctgaccgaccacggcgccgccagcccccagctggagcccgagccccagatccccagcggccagctggaccccggccccagaccccccagctacagcagagccgcccccagcccccacggcagaaagggccccggcctgttcggcgagagactggagagactggagggcgacgtgcagagactggcccagacctacggcaccctgagcggcctggtggccagccacgaggaccccaacagaatgaccggcggccccagagcccccgccgtgcccgtgggcttcggcgtgatccccgagggcctggtgggccccggcgacagagccagaggccccctgaccccccccctggacgagatcctgagcaaggtgaccgaggtgagcaacaccctgcagaccaaggtgcagctgctggacaaggtgcacggcctggccctgggccacgaggcccacctgcagagactgagagaggccccccccagccccctgaccagcctggccctgctggaggagtacgtggacagaagactgcacagactgtggggcagcctgctggacggcttcgagcagaagctgcagggcgtgcagagcgagtgcgacctgagagtgcaggaggtgagaagacagtgcgaggagggccaggccgccagcagaagactgcaccagagcctggacggcagagagctggccctgagacaggagctgagccagctgggcagccagctgcagggcctgagcgtgagcggcagaggcagctgctgcggccagctggccctgatcaacgccagaatggacggcctggagagagccctgcaggccgtgaccgagacccagagaggccccggcgcccccgccggcgacgagctgaccagactgagcgccgccatgctggagggcggcgtggacggcctgctggagggcctggagaccctgaacggcaccgagggcggcgccagaggctgctgcctgagactggacatgggcggctggggcgtgggcggcttcggcaccatgctggaggagagagtgcagagcctggaggagagactggccaccctggccggcgagctgagccacgacagcgccagccccggcagaagcgccagacccctggtgcagaccgagctggccgtgctggagcagagactggtgagcctggagaccagctgcacccccagcaccaccagcgccatcctggacagcctggtggccgaggtgaaggcctggcagagcagaagcgaggccctgctgagacaggtggccagccacgccgccctgctgcagcagctgaacggcaccgtggccgaggtgcagggccagctggccgagggcaccggcagcagcctgcagggcgagatcaccctgctgaaggtgaacctgaacagcgtgagcaagagcctgaccggcctgagcgacagcgtgagccagtacagcgacgccttcctggccgccaacaccagcctggacgagagagagagaaaggtggaggccgaggtgcaggccatccaggagcaggtgagcagccagggcagcagactgcaggccggccacagacaggtgctgaacctgagaggcgagctggagcagctgaaggccggcgtggccaaggtggccagcggcctgagcagatgccaggacaccgcccagaagctgcagcacaccgtgggccacttcgaccagagagtggcccaggtggagggcgcctgcagaagactgggcctgctggccgccggcctggacagcctgcccaccgagcccctgagacccagagagggcctgtggagccacgtggaccagctgaacagaaccctggcccagcacacccaggacatcgccagactgagagacgacctgctggactgccaggcccagctggccgagcaggtgagacccggccaggccaactag

SEQ ID NO: 229296 - DNA, 3796 bp, Artificial Sequence
  derived and/or modified sequence
gcgccggccactccgcgggacgcagccgccgcgaagcgccaggcggccgggccagcgagctcgggggccgaaggggaccccgggaccctcggggcgggacccgggccgaccagcggcgggggcggcgcggcgctgcaggcggacacccggcggggggcaccgcgcggggccgggcagaggcgcgggggccgctatgggccgccgccgcctgctcgtctggctgtgcgccgtcgcggcgctgctctcgggggcgcaggccaggggcaccccgctcctggcgcggcctgcgccgcccggtgcctcccgctacagtctctacacgacgggatggcgcccgcggctgcgcccggggccgcacaaggccctctgtgcctatgtggtgcacaggaatgtgacctgcatcctacaggagggagcggagagctacgtaaaggctgaataccggcagtgtagatgggggcccaagtgccccgggacagtcacgtaccgcacagtactcagacccaaatacaaggttggctacaagacagtgacagacctcgcctggcgttgctgtcccggcttcactgggaaacgctgccctgagcacctcacggaccatggggctgcctcaccccagctggagcctgagcctcagattccttcagggcagctggacccaggccccaggcccccttcctacagcagagcagcccccagccctcatggaaggaaaggcccagggctgtttggtgagcggctggaacgcctggagggtgatgtccagcgcctggctcaaacatatggtaccctcagtggcctggtggctagccacgaggatcccaacaggatgactggtggccccagggctcctgctgtccctgtgggctttggggtcatccctgaggggcttgtgggcccaggagacagagccagagggccactaacacctcccttagacgagatcctaagcaaggtgacagaggtgagcaacactcttcagaccaaggtgcagcttctagacaaggtgcatgggctggcacttggccatgaggcccacctgcagcggctgcgggaagccccaccatccccgctcacctccctggccctgctggaggagtacgtggaccgacggctgcaccgactctgggggagcctgctggatggctttgagcagaagctgcaaggcgtccagagtgagtgtgacctgcgggtgcaggaggtacggcggcaatgtgaggagggtcaggccgccagccggaggctgcaccagagccttgatggccgggagctggccctgcgccaggagctgtcacagctgggcagccagctgcagggcctgagcgtgtctggcaggggcagctgctgtgggcaactagccttgatcaatgcccgtatggatggccttgagagggccctgcaggcagtcaccgagacccaaaggggccccggtgccccggccggggatgagcttacgaggctctctgctgccatgctcgagggaggtgtggacgggctgcttgagggtctggagacgctcaatgggacagagggtggagcaaggggatgctgtctgaggttggacatgggggggtggggagtgggcggctttgggaccatgctggaagagcgcgtgcagagcctcgaggagcgcctagcaacattggctggggagctaagccatgacagcgcctctccgggcaggtcagctcggccccttgtacagacagagctggctgtgctagagcaacggttggtctcactggagacttcgtgcaccccgagcaccacctcagccatcctggacagcctcgtggcagaggtgaaggcctggcagagccggagcgaggccctcctacgccaggtggccagccacgcagcactgctccagcagctcaatggcactgtggccgaggtccagggacagctggcagaagggacgggcagctcacttcaaggcgagatcactctgctcaaggtcaatctgaactcagtgagcaagtcgctcacaggcctcagtgactctgtcagccagtactctgatgccttcttggctgccaacacgtccctggatgagcgggaacgcaaggtggaagccgaagtccaggccatccaggagcaggtcagcagccaaggctccaggcttcaggctggccacaggcaggtcctgaacctgcgtggggagctggagcaactcaaggctggtgtggccaaggtggccagtgggctgagccgctgccaggacacagcccagaaacttcagcacacagtgggacactttgaccagcgggtggcacaagtggagggtgcgtgcaggaggctgggcctgctggccgcgggcctggacagcttgcccactgagccactgaggcccagagagggcctgtggagccatgtggaccagctgaatcgtacgctggcccagcacacgcaggacattgcccgcctccgggatgacctactggactgccaggcccagctggctgagcaggtgcggccagggcaagccaactagacaggctggccaggacccaacccctagatcccaccaactcggggaacatcaccccagagcccagccttatccagcagcgccttccagccttccctggctagcccaaatggcactaaggaggccactgagggaatcctccacgtggctgtcccagccaccaaaacccatgcacagtgctgcagaaactggacagttccggacagcggtcaaggcaaggatgtcatgcttgaaggccagggtagacttgagagagttcacattccactgtcagcaaatcagtgtctggacagccagctgcagggcctgagcatggctggcaggggcagctgctgtggcaaactggccttgatcagtgtccgtatgtaaggccttgagaggaccctgcaggcagtcagcaccagcctcagcaactgtgcagagacctacaggcccacagccagtggcctgtccgcattgccctgtgcccacaagcaacagtccacagcccttggtggcttctgttccttgtcccctcggcttctcttcgcagccatcaggactaggtttgtgcaggaaggtgatgcccactggaactctcctcacacctggcagcttcatggatgttgtatctgaactaaggaccagaggctgccagatgtttctggctcctcacgtgtccttcaggacagaacagaagcacaaagactcagccaagagttctctttattccctttgatcctcccccaaggtgagggcttaggcagctgtagaaccccaggaaagaacggaatccaggcaatctgtttagagaccccccactccaaatttatccttttcctttccttcccctaagatgtttccagggccctctggtgcccacactgtcctcttccttccacttgggggtggggaaatccttcctgcgaggtcagggcatttctctacaaagtggcctgaatgaggccaggccctgagaaggagccaccagctggaggaaaggggctccaagccttgcttttaacacccctgcaaaacccccaccctcccaagatgttcacaaaaggtgagaaattcaggtacgaaaccatcaatggacaacttgaaaatgcatgttcctcaggcctatgcagttcccagagactcttgacaccggtctctgctgaggctcccagcctcagtttcccccacagcagcacgggccccactgtgctgctcttcaggtccccacagccctgcctttggttcctggacatttggtattctgccctccactctggtactatcagagtagggcaggctctggattaaagcttttagccggtc

SEQ ID NO: 229297 - DNA, 2301 bp, Artificial Sequence
  derived and/or modified sequence
atgggccgaagaaggctgttagtttggctgtgtgcagtcgccgcattactctcgggtgcccaggccaggggtaccccattgctcgcccggcctgctccccctggcgcctcacgatacagcctttataccacaggctggaggccccgcttaaggcccgggccgcacaaggctctgtgtgcgtacgttgtccaccgaaatgttacttgcattctgcaggaaggcgcagaatcctatgtgaaagctgagtatagacagtgccgctggggcccaaagtgccccggaacagtaacctaccgcaccgtgcttagacctaagtacaaggtggggtacaagactgtaaccgatctcgcttggaggtgttgccctggcttcactggaaagaggtgtcccgagcacctgaccgatcacggcgcagctagtccacagttagaacctgagccgcagatcccatctggccagctggatccaggcccaaggcctcctagctattcacgcgccgctcctagcccccacggtcgcaaggggcccggtcttttcggagagcggctggagcggctcgagggcgatgtccagaggttggcgcagacctacgggaccctgagcggactcgtcgcatcccacgaggatccgaacagaatgactggaggcccccgagctcctgctgttcctgtaggcttcggggtcattcctgaggggctagtgggaccaggagaccgagcgaggggcccgcttactccacccctggatgaaattctgtcaaaggttacggaggtgagcaataccctccagaccaaagtacagctgctggacaaggtacatggattagcattgggccacgaggctcatctgcagaggctgagggaagcccctccctccccattgaccagtctggcactcctagaggagtacgttgatcgaagattgcacaggctatggggaagtctgttagatggttttgagcagaaattacaaggcgtccagagtgagtgcgacctgagggttcaggaggtccggcgtcagtgtgaagagggacaggcggcctccaggagactgcatcagtctctcgacggcagagagctggcactgcgccaggaactttcccagctgggctctcaactccagggattgagcgtatctgggcgcggttcttgctgtgggcagcttgccctaatcaacgcaagaatggatggactggaaagggctctgcaggcagtcactgaaacccagcgaggcccaggggcacctgctggagacgaactcacgcgactgtctgcagccatgctggaggggggggtggacggacttctagagggccttgaaactttgaatggcacggagggaggagcaaggggctgctgccttcgcctggacatgggcggctggggagtcggtgggttcggcactatgctggaagagcgcgttcagtctttggaagagcgcctggccacgctcgccggggagctcagtcatgactccgcttctcctggccgcagcgcaaggccgctggtgcagaccgaattggcagtcttagaacaaagactggtgagcttggagacatcatgcactccctcaaccacctcagcaattttggacagtctagtcgctgaggtcaaagcgtggcaatcccgctctgaggcccttctgcgacaggtggcatcccacgcagcccttctacaacagctcaatggaaccgtggcagaggtgcagggacaacttgctgagggtaccggttcttcactgcagggggagattaccctgctcaaagtcaaccttaacagcgttagcaaaagtttaaccgggctgtctgattccgtgtcccagtatagtgacgctttcctggccgcgaatacctcactcgatgagcgcgagcgcaaagtagaagccgaggtgcaagccatccaagagcaggtgtcttcccagggttccagactccaggcaggtcacagacaggtgctcaacctgagaggcgagctcgaacagttaaaagccggggtggccaaggtagcaagcggactctctagatgccaggacaccgcacagaagctccagcataccgtgggccacttcgatcaacgcgttgcccaagtggagggtgcctgtcgtcggttagggctgctcgccgcgggactcgattcactgcctacagagcctctgagaccccgcgaggggctctggagccatgtggatcagcttaacaggacccttgcccagcatactcaagacatcgcaaggttgagggacgacttactggattgccaagcacagttggcagaacaggtgaggccaggccaggcgaactag

SEQ ID NO: 229298 - DNA, 2301 bp, Artificial Sequence
  derived and/or modified sequence
atgggcagaagaaggctgctggtgtggctgtgtgctgtggccgccctgctgagcggggcccaggcccggggcacccccctgctggcccggcctgcccctcctggggccagccgctacagcctgtacaccaccggctggaggccccggctgcggcccggcccccacaaggccctgtgtgcctacgtggtgcacagaaatgtgacctgcatcctgcaggagggcgctgagagctatgtgaaggccgagtaccggcagtgccgctggggccccaagtgccccggcaccgtgacctacagaacagtgctgcggcccaagtacaaggtgggctacaagacagtgacagacctggcctggcgctgctgccccggcttcaccgggaagcgctgcccagagcacctgacagaccacggggccgccagcccccagctggagcctgagccccagatccccagcggccagctggaccccggcccccggccccccagctacagccgggccgcccccagcccccacggcaggaagggccctggcctgtttggagagcggctggagcggctggagggagatgtgcagaggctggcccagacctacggcaccctgagcggcctggtggccagccatgaggaccccaacaggatgactggaggcccccgggccccagctgtgcctgtgggctttggagtcatccctgagggcctggtgggccctggggaccgggcccggggccccctgaccccacccctggatgagatcctgagcaaggtgacagaggtgagcaacaccctgcagaccaaggtgcagctgctggacaaggtgcacggcctggccctgggccacgaggcccacctgcagaggctgcgggaggccccacccagccccctgaccagcctggccctgctggaggagtatgtggaccggcggctgcaccggctgtggggcagcctgctggatggctttgagcagaagctgcagggcgtgcagagtgaatgtgacctgcgggtgcaggaggtgcggcggcagtgtgaggagggccaggccgccagccggcggctgcaccagagcctggatggccgggagctggccctgcggcaggagctgagccagctgggcagccagctgcagggcctgtctgtgtctggccggggcagctgctgcggccagctggccctgatcaatgccaggatggatggcctggagcgggccctgcaggccgtgacagagacccagaggggccctggggccccagctggagatgagctgacccggctgtctgctgccatgctggagggcggcgtggatggcctgctggagggcctggagaccctgaatggaacagaaggaggagcccggggctgctgcctgcggctggacatgggcggctggggcgtgggcggcttcggcaccatgctggaggagcgggtgcagagcctggaggagcggctggccaccctggccggggagctgagccatgacagcgccagccctggccgcagcgcccggcccctggtgcagacagagctggccgtgctggagcagaggctggtgtccctggagaccagctgcacccccagcaccaccagcgccatcctggacagcctggtggccgaggtgaaggcctggcagagccgctctgaggccctgctgcggcaggtggccagccatgctgccctgctgcagcagctgaatggcaccgtggccgaggtgcagggccagctggccgagggcaccggcagcagcctgcagggcgagatcaccctgctgaaggtgaacctgaacagcgtgtccaagagcctgaccggcctgagtgacagcgtgtcccagtacagtgatgccttcctggccgccaacaccagcctggatgagcgggagaggaaggtggaggccgaggtgcaggccatccaggagcaggtgagcagccagggcagccggctgcaggccggccaccggcaggtgctgaacctgcggggggagctggagcagctgaaggccggcgtggccaaggtggccagcggcctgagccgctgccaggacacagcccagaagctgcagcacacagtgggccactttgaccagagggtggcccaggtggagggcgcctgccggcggctgggcctgctggccgccggcctggacagcctgcccacagagcccctgcggccccgggagggcctgtggagccacgtggaccagctgaacagaaccctggcccagcacacccaggacatcgcccggctgagagatgacctgctggactgccaggcccagctggccgagcaggtgcggcccggccaggccaactag

SEQ ID NO: 229299 - DNA, 2301 bp, Artificial Sequence
  derived and/or modified sequence
atgggccggcggcggctgctggtgtggctgtgcgccgtggccgccctgctgagcggcgctcaagcacgcgggactcccctgctcgcacgccccgccccacctggtgccagccgttactccctttacactaccgggtggaggccacgactgagaccaggaccccataaggccctgtgtgcttatgtggtacatagaaacgtgacctgtatactacaggagggcgcagagagttacgttaaggccgagtatcgtcagtgtcgttggggacctaagtgtcctggaactgtgacataccgcacggttctgagacctaagtataaggtcggatacaagactgtgactgatctggcttggcgatgctgccctggattcaccggcaaaaggtgccctgaacacctgactgatcacggtgctgctagcccacaactcgagcctgaaccacagatcccgagcggtcagcttgatcccgggccacgcccaccaagctatagcagggctgccccgagcccacatggaagaaagggcccaggcctgttcggggaacgactcgagcgactggagggagatgttcagcggttggcgcagacctacggcacactctccggccttgtagcttcccacgaggaccctaaccggatgaccgggggacctagggctcccgcggtccccgtgggattcggtgtgattcctgagggccttgtggggccaggagaccgagcacggggcccactcactccacctcttgacgaaatcctttccaaggtgacagaggtctccaataccctgcagaccaaggtgcagctgctggacaaggtccatggactcgcccttggccacgaagcccatcttcagaggctccgggaagctccgccctccccccttacctccctcgcactattggaagagtatgttgatcggagactccatcgcctgtgggggagcctcctggatggattcgagcagaagcttcagggcgtgcagtcggagtgcgatctgcgcgttcaagaagttaggcgccagtgcgaggagggacaggccgcctcaaggaggcttcatcagagtttggatggccgggaattagccctgcgccaggagctgtcccagctgggaagccagttacaaggcctgagtgtgtcaggtaggggatcttgttgcgggcagctagcactaattaatgcgcggatggacggattagaacgcgccttacaggccgtcaccgaaacacaaaggggacctggcgctcccgccggagatgaacttactcgcctatccgcggccatgttggaggggggggtggacggcctgctggaaggtctcgaaacattaaacgggaccgagggaggcgctcgcggctgctgtctgagactcgatatgggtgggtggggcgtgggcggtttcggcacaatgctggaagaaagagtgcagagcctggaagaaaggttggctacacttgccggcgaactcagtcatgactctgcatccccaggccgcagcgctcggccactcgtccagaccgaactggccgtgttggaacagcgcctggtgtctctcgagacctcctgtaccccttccaccacctctgcaatcttggacagtctcgtcgcggaggtgaaagcctggcagtccagatccgaagccctgttgcgacaggttgcatcccacgccgcactactccagcagctcaatggcactgtcgcggaggtgcaaggacagctcgctgagggtaccgggtccagtctgcagggggagataaccctgctgaaagtaaacctgaattccgtcagcaaatcactaacgggactgagcgattccgtgagtcagtactccgatgcttttttggctgcgaatacttccctggatgaaagggagaggaaggtggaagccgaagttcaagctattcaggagcaggtttctagtcagggcagccggttacaggctggccacaggcaggttttaaatcttcgcggcgagttagagcagctgaaagctggggtagccaaagtcgcctctggtctcagccgttgccaggacacagctcagaagctccagcatacagtcgggcattttgaccaacgagttgcacaggtcgaaggggcctgtagaagactcggtctcttagccgcaggactcgatagtttgcccacagagcctctcagaccaagagagggtctgtggtctcacgttgatcagctcaaccgcactttggcccagcatacccaagacatcgcccgattgcgggacgatctcctggattgccaggctcagctggccgagcaggtaagacccggccaggctaactag

SEQ ID NO: 229300 - RNA, 2301 nt, Artificial Sequence
  derived and/or modified sequence
augggcaggagacgguuguuaguaugguugugcgccguagccgcccuccuuagcggcgcccaagccaggggaacaccguuacuggcuagaccugccccccccggcgccuccagauacagccucuacacaaccggcuggagaccuaggcucagaccaggcccucauaaggcccuaugcgcuuauguggugcaucggaaugugacauguauucuccaggagggagccgagucauaugucaaagcagaguacagacaauguagauggggcccgaagugcccuggaacagugacuuacaggaccguccugaggccuaaguauaagguugguuauaagacggugacagacuuggcuuggcgcugcugccccggcuuuaccgggaagcgaugcccagaacaccugacagaucauggcgcagcaaguccacaguuagaaccugaaccgcagaucccaucgggccaacucgaucccggaccuagaccgcccaguuacucccgagcugcacccucuccgcacggaagaaaggguccuggccuguuuggagagagacuugaaagacuggaaggagacguccagaggcuggcgcaaacauaugggacccucuccgggcugguggcaucccacgaggacccuaaccggaugacuggcggaccucgggcucccgccgugccugucggguuuggugugauuccugaagggcucgugggaccgggagaucgugcaagagguccguuaacaccaccucucgaugaaauacuguccaaggugacagagguuucuaauacucugcagaccaaagugcagcuccuagauaagguacauggacuggcgcuaggccacgaagcacaccuucaaaggcuccgcgaggcgccgccuuccccccuuaccucgcucgcccuccuugaggaauacguagauagacgacuucaccgccuguggggcagcuugcuggauggauucgaacaaaagcugcagggcguccagagcgagugugaccugcggguucaggaggugcggagacagugugaggaagggcaagccgcuucacgacggcuccaucaaagccuggacggcagagagcuggcuuuacgccaggaacugucccagcuggggagccaacuccaggguuuaagugucaguggaagggguucaugcuguggccagcuggcccugauuaacgcuaggauggauggucuggagagagcccugcaagccgugacugagacacagcguggccccggcgcaccggccggcgacgagcucacucgccucuccgcggcaauguuggaaggcgguguggauggucuccucgagggccuggaaacgcugaauggaacugaagggggagccagagguuguugucugagacucgauaugggcgguuggggggucggcgguuuuggcaccaugcuagaagaacgagugcagucacuggaggagaggcuagcaacacuagccggcgagcugagccacgacagugccucuccaggcagauccgcccggccacuuguccagacggagcuagcuguccuggaacagcggcuagugagccucgaaaccagcuguacaccuagcacgaccucugcaauauuagacagccuuguagcugaaguuaaggcauggcagucucggucagaagcacucuuaaggcagguggcaucccacgcugcauuacugcagcagcugaacgguacugucgccgaagugcagggucaguuagcggagggcacuggaaguucuuugcagggggaaaucacacuacucaaagugaaucugaauagcguuucgaagagucucacaggccugagcgacagugugucccaauauagcgacgccuuccuugcagcuaacacuucucuggacgaacgcgagagaaagguagaggcggaaguacaggcaauccaggagcagguaucuucgcaaggcucacgguuacaagccggucauagacagguucucaaccuuaggggugagcucgaacagcucaaagcuggggucgcuaagguggccuccggauugagccguugucaggacacagcacagaagcuacagcacacgguugggcacuucgaccagagaguggcacaggucgagggcgccuguagacggcuaggguugcuugcagcagggcuugauucuuuacccaccgaaccgcugcgaccgcgcgagggcuuauggucacauguggaccagcucaauaggacccuggcgcaacacacccaggauaucgcuaggcugcgggacgaucuuuuagauugccaagcccaguuggccgaacaggugcgucccggucaggcaaacuag

SEQ ID NO: 229301 - RNA, 2301 nt, Artificial Sequence
  derived and/or modified sequence
augggcaggagacgguuguuaguaugguugugcgccguagccgcccuccuuagcggcgcccaagccaggggaacaccguuacuggcuagaccugccccccccggcgccuccagauacagccucuacacaaccggcuggagaccuaggcucagaccaggcccucauaaggcccuaugcgcuuauguggugcaucggaaugugacauguauucuccaggagggagccgagucauaugucaaagcagaguacagacaauguagauggggcccgaagugcccuggaacagugacuuacaggaccgugcuacggcccaaguauaaggucggcuacaagacgguaacugaccucgccuggcgguguuguccagguuucacaggaaaaagaugccccgaacaucuaacugaccacggugcagcuucuccucagcuugaaccagagccacagaucccuagcggccagcuggaccccggaccucggccacccucuuacucccgugccgcacccuccccucacggcagaaaaggcccuggauuguuuggcgagcgguuagagcgucuggagggcgacgugcaaagacuggcccagacauacggaacgcugucaggccuagucgcgucccaugaggauccaaacaggaugacgggcggaccuagggcuccugccguuccagugggauucggcguuaucccagaaggcuuggucgggccaggagacagagccagaggaccccucacuccccccuuagacgaaauuuugaguaagguaaccgaagucagcaacacacugcagaccaagguccaauuauuggacaaaguccauggccuagcccugggccacgaagcucaccuucagagacugcgagaggcuccaccgucaccucuaaccucacuugcucugcuugaggaguacguagaucgacggcugcauagacuauggggaucccuguuagacggauuugaacagaagcuucaaggcgugcagagcgagugcgaccugagaguccaggagguacggaggcaaugcgaggagggacaagccgccaguaggcgucuccaccaaucucuggacggccgugaauuagcccuucggcaggaacuaucacaacuggggagucagcuacaggggcucagcgugucuggaagaggaucuuguuguggccagcucgcacugaucaaugcacgcauggacggguuggaaagggcucuucaggcuguaacugagacacaaagaggccccggggcgccagcgggcgacgagcuaacucgccucucugcagcgaugcuggagggggggguggacggacuuuuagaaggauuggagacacucaacggaacggaagguggcgcgcguggcuguugcuugaggcucgauauggggggaugggggguugggggauuugguaccaugcuggaggaacggguucaaucucucgaagaacggcucgcuacacuugccggcgaguugagccaugauucagcuagcccagguaggucagcccgcccccucguccagaccgagcuagccgugcucgagcagcguuuagugucucucgaaacgucauguacgccgucuaccaccagcgcuauccuggacucccucgucgccgaagucaaagcauggcaaucuaggucugaagcauuauuacggcaggucgcuucucaugccgcccuccugcagcagcuaaacgguacuguugcagaaguacagggucaacucgcagaagggaccggguccagucugcaaggcgagaucacucugcuaaagguaaaucugaauucugucucaaagucacucacgggcuugagugauuccgucucacaguauagcgaugccuuuuuagcggccaacacuagucuggacgagcgggaaaggaaggucgaggcggaagugcaggccauccaggaacaggucuccucacaaggaagcagauuacaggcuggacaucggcagguccugaaccugcgaggcgaacucgaacagcucaaggcuggcguagcaaagguagcuagcggucuuucucgcugccaggacaccgcacagaagcuccaacacacuguagggcacuucgaucaaaggguugcgcagguagagggcgcaugccggagacugggucuguuagccgccggccuugauucacuaccaacagagccacugagaccacgagaagggcuuuggagucacgucgaccaacugaaccgcacguuggcucaacacacucaagacauagcacgcuugcgagaugaccugcuggacugccaggcccaguuagcugagcaagugcgcccgggucaggccaacuag

SEQ ID NO: 229302 - protein, 68 aa, Artificial Sequence
  derived and/or modified sequence
MSATNNIAQARKLVEQLRIEAGIERIKVSKAASDLMSYCEQHARNDPLLVGVPASENPFKDKKPCIIL

SEQ ID NO: 229303 - DNA, 207 bp, Artificial Sequence
  derived and/or modified sequence
atgagcgccaccaacaacatcgcccaggccagaaagctggtggagcagctgagaatcgaggccggcatcgagagaatcaaggtgagcaaggccgccagcgacctgatgagctactgcgagcagcacgccagaaacgaccccctgctggtgggcgtgcccgccagcgagaaccccttcaaggacaagaagccctgcatcatcctgtag

SEQ ID NO: 229304 - DNA, 207 bp, Artificial Sequence
  derived and/or modified sequence
atgtcagcaaccaacaacatcgctcaggcacgcaagctggtggagcagttacgcattgaggccggcattgaaaggattaaggtgtcaaaagcagcaagtgacttgatgtcttattgcgagcagcatgctcgtaatgacccattgctggtaggggtccccgcaagcgaaaacccctttaaagacaaaaaaccttgcattatcctctag

SEQ ID NO: 229305 - DNA, 207 bp, Artificial Sequence
  derived and/or modified sequence
atgtctgccaccaacaacatcgcccaggccaggaagctggtggagcagctgagaattgaagctggcatcgagcgcatcaaggtgtccaaggccgccagtgacctgatgagctactgtgagcagcacgccagaaatgaccccctgctggtgggcgtgcctgccagcgagaaccccttcaaggacaagaagccctgcatcatcctgtag

SEQ ID NO: 229306 - DNA, 207 bp, Artificial Sequence
  derived and/or modified sequence
atgagcgccaccaacaacatcgcccaggcccggaagctggtggagcagttacgcatcgaagcgggaattgaacgtatcaaagtctcaaaggcagcctcagacctcatgagttactgtgagcagcatgcccggaatgatcccctgctggtcggggtacccgcttctgaaaaccctttcaaagacaagaagccttgtataattctgtag

SEQ ID NO: 229307 - DNA, 207 bp, Artificial Sequence
  derived and/or modified sequence
atgtctgccacgaacaatatcgcccaggcacgaaagttggtcgagcagctgcgaatcgaggccggaattgagcgcattaaggtctccaaggcggcttctgacctgatgagctactgtgaacagcacgcaaggaacgaccccctgttagtgggagttcccgcttcagaaaatccttttaaagataaaaagccatgcataatcctttag

SEQ ID NO: 229308 - protein, 343 aa, Artificial Sequence
  derived and/or modified sequence
MEAVATATAAKEPDKGCIEPGPGHWGELSRTPVPSKPQDKVEAAEATPVALDSDTSGAENAAVSAMLHAVAASRLPVCSQQQGEPDLTEHEKVAILAQLYHEKPLVFLERFRTGLREEHLACFGHVRGDHRADFYCAEVARQGTARPRTLRTRLRNRRYAALRELIQGGEYFSDEQMRFRAPLLYEQYIGQYLTQEELSARTPTHQPPKPGSPGRPACPLSNLLLQSYEERELQQRLLQQQEEEEACLEEEEEEEDSDEEDQRSGKDSEAWVPDSEERLILREEFTSRMHQRFLDGKDGDFDYSTVDDNPDFDNLDIVARDEEERYFDEEEPEDAPSPELDGD

SEQ ID NO: 229309 - DNA, 1032 bp, Artificial Sequence
  derived and/or modified sequence
atggaggccgtggccaccgccaccgccgccaaggagcccgacaagggctgcatcgagcccggccccggccactggggcgagctgagcagaacccccgtgcccagcaagccccaggacaaggtggaggccgccgaggccacccccgtggccctggacagcgacaccagcggcgccgagaacgccgccgtgagcgccatgctgcacgccgtggccgccagcagactgcccgtgtgcagccagcagcagggcgagcccgacctgaccgagcacgagaaggtggccatcctggcccagctgtaccacgagaagcccctggtgttcctggagagattcagaaccggcctgagagaggagcacctggcctgcttcggccacgtgagaggcgaccacagagccgacttctactgcgccgaggtggccagacagggcaccgccagacccagaaccctgagaaccagactgagaaacagaagatacgccgccctgagagagctgatccagggcggcgagtacttcagcgacgagcagatgagattcagagcccccctgctgtacgagcagtacatcggccagtacctgacccaggaggagctgagcgccagaacccccacccaccagccccccaagcccggcagccccggcagacccgcctgccccctgagcaacctgctgctgcagagctacgaggagagagagctgcagcagagactgctgcagcagcaggaggaggaggaggcctgcctggaggaggaggaggaggaggaggacagcgacgaggaggaccagagaagcggcaaggacagcgaggcctgggtgcccgacagcgaggagagactgatcctgagagaggagttcaccagcagaatgcaccagagattcctggacggcaaggacggcgacttcgactacagcaccgtggacgacaaccccgacttcgacaacctggacatcgtggccagagacgaggaggagagatacttcgacgaggaggagcccgaggacgcccccagccccgagctggacggcgactag

SEQ ID NO: 229310 - DNA, 3319 bp, Artificial Sequence
  derived and/or modified sequence
gcctgggcgcagcggtgcacccggacccggaacattctcaggcgaaagtgtctcttgcgtgcgtgggccggaggttagtgtgcggggcccgccgggcggttgaaaagtccgagagaatcaggatggaggccgtggcgacggcgacggcggcgaaggaacccgataagggctgcatagagcctggacctgggcactggggtgagctgagccggacaccagtcccatctaaaccccaggacaaagtggaagcagctgaggcaacaccagtggccctggacagtgacacctccggggctgaaaatgcagcagtgagtgctatgctgcacgctgtagccgccagccgcctgcctgtttgcagccagcagcagggtgaacccgacttgacagagcatgagaaagtggccatcctggcccagctgtaccacgagaagccactggtgttcctggagcgcttccgcacaggcctccgtgaggagcatctggcctgctttggccacgtgcgtggcgaccaccgtgcagacttctactgtgctgaggtggcccggcagggcactgcccggccccgcaccctgcgtacccgcctgcgtaaccggcgctatgctgccctgcgagagctgatccaagggggcgagtacttcagtgatgagcagatgcggttccgggcccccctgctatatgagcagtacatcgggcagtatctcacccaggaggagctcagtgcccgcaccccaacccaccagccccccaagcccgggtcccccgggagacctgcttgcccgctctccaacttgctgctccagtcctacgaggagcgggagctacagcagcgtctgctccaacagcaggaggaggaggaggcctgcttggaggaagaggaagaggaggaggacagtgacgaggaagaccagaggtcaggcaaggactcggaggcctgggttcccgactcggaggagaggctgatcctgcgagaggagttcaccagccgcatgcaccagcgcttcctagatggcaaggacggggactttgactacagcacagtagacgacaaccccgacttcgacaacctcgacatcgtggcacgggatgaggaggagaggtactttgatgaggaagaacctgaggatgcgcccagcccagagctggatggggactgatggccgccacccttcccaccgcctgccccatccccatccccaacaaggcagctgattccaggcctgctcagtgaccctttctctagggggacatcagggcagtgccccacaacccacacacaccaccatctcactgggtctagtctcatctcagacaacccccacccccactgtttctggggttccctttctcatctctcccaccctgtctcctgcctctgtctttcttggtgtctgtctgggcttctttctgtctctttctgtctttctgtctctctccctacccccgctccctctttccagtgctctggctggctgtctctccctttctccccctctctctctgccttaggctctgtctccaccgcagggcccaaggtgaaagtcctccccttgccggaggccagctggcagggcctttcgtggctggaagtggccagtttggttccggtgctgacccctaggccccagcgcagctgcctcccgtgctgtctgtctccccctctctgtttatgtctgcgctgtgtctcacactcagagcctccttgcttctgttaggttcccatctctccttctgcctcactctgggcctcttctttctacttgtacatttccacctctctaggcctctgctctcactgtccctctctgtctgtctctcagcctttatctctgggttttgatcccccactccaggctctgggccccttcttcccccttccctcaaacctggctgctataggcagcagaaccctgaccactgagtaatacagccccaggggagggaggagaccccaggcagggaggatgggggcagctctcttctctccccaggacccaggctgtggatcacggggcctgccagcttgagtgtagagggaggggggactctacccttctcagccccaccagcccccctctgcccaaccacaattttcccttcctccgccttcctctccctctcctgtttacactccccaaatgcgcacaggctgttatcatgggtcctgagtcatcccacacacagcctgccccagcgtccctgcccccagctggccgcagggcccgccccatggagccccctgccgccctgggctaatgggagccagatggccgcctggtgactcagccaccgggcctgtgggaacccaggcgtcccgccttcccatgcccccacacccggctcctgctcccccagcagacacacacaggagggcctggccactgttgagggggcacacagggcaagggtcaccaagtcggggcctagggactcctcatgcctctgagatggaatggtggtatcctgccgtggccaagcctgaaggaccctcaaaactgcctcctggagtccacggttcctgacctccgagcctcagctatgccctctgggtcaaccagaattagagccagacagggaaagtgagagctggatggaggcagacaagatgctcagagcgactattaaagaacgaaagcctctgctacggagcgcttctgtcctctgtcaggcccgagcgaagtgcctgacaccgggttggatcctcagatggccccatgaactagtgaagtgggtcaaaggaggcctggaaagatgttgcttcctcaaggccactcggccatcagaggcagaaatgaaacaggaacccaggcctagaatcacaaaggtcctagaaaccacttggctgtctggcctctcaggtgtcagggccatccagagtgagacagcattggagggacaagtgtgcatgcagatgtcctcagacgggaaggtttgagaagggtcagatggtaggcgggcctaacaagggctccgtgctagccactgtcccgcacacagacaggatcaggtcatcttgatatggagatcagtccccaaatcactgaattgtcccagcagtgctatgccctaggtactaccaatatcactcctctatttcccagaggaggaagcagcagctagactccaggaccttggggtcatatctctcagaaagccaagagtgcaggatgagagctgtctgtctcttacctgcctgtatttgtgccccatttttaaagagcagagggcctgggccacaggaaaggtatcagcccttggtgataggcacattttttaccagtctatcatttggtcattaaatttgtttacaatatactttgct

SEQ ID NO: 229311 - DNA, 1032 bp, Artificial Sequence
  derived and/or modified sequence
atggaggcggttgcaactgcgacagccgctaaggagcctgacaaagggtgtatcgagccaggaccagggcactggggtgaactaagcaggaccccagtgccctcaaagcctcaggacaaagtggaagctgccgaggctacacctgttgccctcgatagtgatacttcaggagctgaaaatgctgccgtgtcagccatgcttcacgctgtggccgctagcaggctgcccgtgtgctcccaacagcagggagagcctgacctgacggaacacgaaaaagtggctattcttgctcagctctatcatgagaagcccctggtgtttctcgaaaggtttaggactgggctgagagaggaacatctggcttgcttcggccacgtcagaggagaccacagagccgatttttactgcgcagaggtcgcgcgccaaggcacagcccgccccaggaccttgagaacaaggcttcgcaacaggagatatgcagccctcagggagctgatacagggtggagagtatttctccgatgaacaaatgcgctttagggcccccttgctgtacgagcagtatatcggtcagtacctgacacaggaagagttatcggcgcggacccctactcaccagcctcccaaaccaggatcaccgggacgcccggcatgccctctgtcgaatctcttgctgcagagttacgaagagcgagagctgcagcaacgtctcctacagcagcaggaggaggaggaggcttgtctagaagaggaagaagaggaggaggactccgatgaagaggatcaaaggtctggaaaggatagtgaagcttgggtgcccgattccgaggaaagactaattctgcgagaggagtttacaagtagaatgcatcagcgcttcctggatggcaaggacggcgacttcgactacagcacggtggacgacaatcccgacttcgacaatcttgatattgttgcccgcgatgaggaggaaaggtacttcgacgaggaagaaccagaagatgccccttcaccagagctggacggagactag

SEQ ID NO: 229312 - DNA, 1032 bp, Artificial Sequence
  derived and/or modified sequence
atggaggccgtggccacagccacagctgccaaggagccagacaagggctgcatcgagcccggccctggccactggggcgagctgagcaggacccctgtgcccagcaagccccaggacaaggtggaggccgctgaggccacccctgtggccctggacagcgacaccagcggggctgaaaatgctgctgtgtctgccatgctgcatgctgtggccgccagccggctgcctgtgtgcagccagcagcagggcgagccagacctgacagagcacgagaaggtggccatcctggcccagctgtaccacgagaagcccctggtgttcctggagcgcttcagaacaggcctgcgggaggagcacctggcctgctttggacatgtgcggggggaccacagagctgacttctactgtgccgaggtggcccggcagggcacagcccggcccaggaccctgcggacccggctgaggaacagaagatatgctgccctgcgggagctgatccagggcggggagtacttcagtgatgagcagatgaggttccgggcccccctgctgtatgagcagtacatcggccagtacctgacccaggaggagctgagcgcccggacccccacccaccagccccccaagccaggcagccctggccggcctgcctgccccctgagcaacctgctgctgcagagctatgaggagcgggagctgcagcagaggctgctgcagcagcaggaggaggaggaggcctgcctggaggaggaggaggaggaggaggacagtgatgaggaggaccagaggtctgggaaggacagcgaggcctgggtgcctgattctgaggagcggctcatcctgcgggaggagttcaccagcaggatgcaccagcgcttcctggatggcaaggatggagactttgactacagcacagtggatgacaacccagactttgacaacctggacatcgtggccagagatgaggaggagcgctactttgatgaggaggagccagaagatgcccccagccctgagctggatggagactag

SEQ ID NO: 229313 - DNA, 1032 bp, Artificial Sequence
  derived and/or modified sequence
atggaggccgtggccaccgccaccgccgccaaggagcccgacaaggggtgtatagaaccgggcccgggccattggggggagctcagccgcacaccggtgccatccaagccccaggataaggtggaagccgctgaagccacccccgtggcgctcgactccgacactagcggcgctgagaacgccgccgtatctgctatgcttcacgctgtggcagccagtcggttgccggtgtgcagccagcaacaaggcgagccagacctcacagagcacgagaaggtggctattttagcacagttgtatcacgagaagcccttggtattcttagaacggtttaggacaggtctccgcgaggaacatttagcctgcttcgggcacgtgagaggagatcatagggctgacttttattgcgccgaggttgcccgccagggcacggcaaggccccgcactctgaggacgaggctcagaaaccggcggtatgccgccctgagagagctaatccagggaggcgaatatttcagcgatgagcagatgcggttcagagcacccctgttgtacgaacaatatatcggacagtacctcacccaggaggagctaagtgcccggacacccacccatcagccacccaagcctggtagtccaggccgccccgcttgcccccttagtaatctgctgctgcaaagctacgaggaacgtgagctccagcaaagactcctgcagcagcaggaggaagaggaggcctgcctggaggaggaagaagaggaggaggactcagatgaggaggaccagcggtccgggaaagactctgaggcatgggtgccagattctgaagaacgcctgattctgagagaagagttcacctcacggatgcatcaacgcttcctagacggaaaagacggggacttcgattacagcaccgttgatgacaaccccgatttcgacaacttggatatcgtcgctcgcgatgaggaggagcggtattttgatgaagaggaacctgaggatgccccatcccctgagcttgacggagattag

SEQ ID NO: 229314 - DNA, 1032 bp, Artificial Sequence
  derived and/or modified sequence
atggaggccgtcgctacagccactgccgctaaagaacctgacaagggctgcatcgagcctggcccaggccactggggggaactgtcccgcactcctgtgccttctaagcctcaggacaaagtggaggcagccgaggccacccccgttgcgctagacagtgacacgtcgggagccgagaatgcagctgtgagcgccatgctccatgccgtggctgcgtcaaggctccctgtgtgctctcagcaacaaggcgaaccagatcttaccgaacacgagaaggtggcaattctggcccaactatatcatgagaagcccttggtattcttggagcgcttccgcaccggtctgcgcgaggaacacctcgcctgctttggccatgtgaggggggatcacagagcagatttctactgcgccgaggttgcgaggcaaggcaccgcacggccacgtaccctgcgcacacgcctccggaacaggcgatatgctgccctcagggagctaattcagggaggtgagtatttctcagatgagcagatgcgattcagggctcctttgctctatgaacagtatattggtcaatacctgactcaagaggagctcagtgctcgcacaccaacacatcagccaccaaagccaggttcccccggtcggccagcctgccccctgtcaaacttgctccttcaaagttacgaggagcgcgagctccagcaacgcctcctgcaacagcaagaagaggaggaggcgtgcctggaagaggaggaggaagaagaagacagcgacgaggaggatcagcgctcaggcaaagatagcgaggcatgggttcccgactccgaggaacggcttatcttaagggaggagttcactagtcgaatgcaccagaggttcttggacggtaaggacggggatttcgactatagtaccgtggatgataatccagatttcgacaatctggacattgtggctcgagacgaggaggaacggtactttgatgaggaggaaccagaggacgcaccttcccccgaacttgatggggactag

SEQ ID NO: 229315 - protein, 222 aa, Artificial Sequence
  derived and/or modified sequence
MAASVRQARSLLGVAATLAPGSRGYRARPPPRRRPGPRWPDPEDLLTPRWQLGPRYAAKQFARYGAASGVVPGSLWPSPEQLRELEAEEREWYPSLATMQESLRVKQLAEEQKRREREQHIAECMAKMPQMIVNWQQQQRENWEKAQADKERRARLQAEAQELLGYQVDPRSARFQELLQDLEKKERKRLKEEKQKRKKEARAAALAAAVAQDPAASGAPSS

SEQ ID NO: 229316 - DNA, 528 bp, Artificial Sequence
  derived and/or modified sequence
atgcacggcgagaagagccacggcagaggccaggccggcagacaggtgcccctgaagcagcagagcgtgagcggcgagagccagcagggcgccagacagggcgccggccagagcacctgctacctgagcagcgccttcctgtgcaacggcagcttccccgccggcagcatgagcctgtgggacccccagcccaagcaggccttccccagcgtgctgtggtgcagctgggccggcgtgcccggcagaagaaccggccagagagaccccagagtgcaggagagaagaggcgacttcgtgagcaagctgggcgccgccgtgggcggcgagcccctggccctgttcggcccccacagctggcccggcatgggccacagagtgcccggcctgggcgccggcttcctgctgttcgccggcttcgccctggagccctgggacagctaccacgtggtgttcgagggctggaccatcgacatgagaagaaacgagcccgagagaaccagaagcctgagcgcccccggccccctgtag

SEQ ID NO: 229317 - DNA, 669 bp, Artificial Sequence
  derived and/or modified sequence
atggctgcatccgttaggcaggcacggtctctgctcggggtagccgctacgctggccccggggtccaggggttatagagcacggccgcctcccagaagaagacccggcccacggtggccagatcccgaggatctgctgacaccccggtggcaactgggcccccgctacgccgcgaaacagtttgcacgctatggagctgcctccggcgtcgtcccgggctccctgtggccatctccagagcagctgcgggagttagaggctgaagagcgtgagtggtatcctagcctggccactatgcaggagagcttgcgcgttaagcagcttgccgaagagcagaagcgaagagagcgggaacagcacattgcagagtgcatggccaaaatgccacaaatgatcgttaactggcagcagcagcaacgggaaaattgggagaaagctcaagcagataaggaacggcgggcacggctgcaggccgaggcccaggagctgttaggataccaagtcgatccccgatctgctaggttccaggagctgctgcaggacctagagaaaaaggaacgtaaacggcttaaagaagagaaacagaagagaaaaaaagaagcccgagcagcagccctggccgccgccgtagcacaggatcccgcggcttctggggcgccatctagctag

SEQ ID NO: 229318 - DNA, 743 bp, Artificial Sequence
  derived and/or modified sequence
ctgtgaggaccccgcacagccaagatggcggcgtccgtgcgacaggcacgcagcctactaggtgtggcggcgaccctggccccgggttcccgtggctaccgggcgcggccgcccccgcgccgcaggccgggaccccggtggccagaccccgaggacctcctgaccccgcggtggcagctgggaccgcgctacgcggctaagcagttcgcgcgttacggcgccgcctccggggtggtccccggttcgttatggccgtcgccggagcagctgcgggagctggaggccgaagaacgcgaatggtacccgagcctggcgaccatgcaggagtcgctgcgggtgaagcagctggccgaagagcagaagcgtcgggagagggagcagcacatcgcagagtgcatggccaagatgccacagatgattgtgaactggcagcagcagcagcgggagaactgggagaaggcccaggctgacaaggagaggagggcccgactgcaggctgaggcccaggagctcctgggctaccaggtggacccaaggagtgcccgcttccaggagctgctccaggacctagagaagaaggagcgcaagcgcctcaaggaggaaaaacagaaacggaagaaggaggcgcgagctgctgcattggctgcagctgtggctcaagacccagcagcctctggggcacccagctcctgaggctttgtcccttcccaataaagcctgctacctggcagtacccctgaaga

SEQ ID NO: 229319 - DNA, 669 bp, Artificial Sequence
  derived and/or modified sequence
atggccgcctctgtgcggcaggcccggagcctgctgggcgtggccgccaccctggcccctggcagccggggctaccgggcccggcccccacccaggagaagacctggcccccgctggccagaccctgaggacctgctgaccccccgctggcagctgggccccaggtatgctgccaagcagtttgcccgctacggggccgccagcggcgtggtgcccggcagcctgtggcccagccctgagcagctgcgggagctggaggccgaggagcgggagtggtaccccagcctggccaccatgcaggagagcctgcgggtgaagcagctggccgaggagcagaagaggcgggagcgggagcagcacatcgccgagtgcatggccaagatgccccagatgattgtgaactggcagcagcagcagcgggagaactgggagaaggcccaggccgacaaggagcggcgggcccggctgcaggccgaggcccaggagctgctgggctaccaggtggaccccaggtctgcccgcttccaggagctgctgcaggacctggagaagaaggagaggaagaggctgaaggaggagaagcagaagaggaagaaggaggcccgggccgccgccctggccgctgctgtggcccaggaccctgctgccagcggggcccccagcagctag

SEQ ID NO: 229320 - DNA, 669 bp, Artificial Sequence
  derived and/or modified sequence
atggccgccagcgtgcggcaggcccggagcctgctgggcgtggccgccactcttgcccccgggtctagaggatatagggccaggccaccaccaaggaggcgcccaggaccccgatggcctgatcctgaagaccttctgaccccacggtggcagctcggcccaagatacgctgccaagcagtttgcccgctacggcgctgcctctggggtggtccccgggtctctatggccttcccccgaacagttgcgggaacttgaagccgaggagcgcgagtggtatccgtcccttgctacgatgcaggaatcactgagggtgaaacagctggccgaggagcagaaacgtcgtgagcgcgaacagcatatcgctgagtgtatggccaagatgccacagatgatcgtgaactggcaacagcagcaaagagagaactgggagaaggctcaagcggataaggaacgacgggcaagactgcaggcagaagcccaggagctgctggggtaccaggtagatcccagaagcgcacgctttcaggaactgttacaggacctggaaaagaaggagaggaagcgcctgaaagaggaaaagcaaaagcggaaaaaggaggctagagccgcggcactcgctgccgcagtggctcaggacccagctgcctcaggagcacccagttcctag

SEQ ID NO: 229321 - DNA, 669 bp, Artificial Sequence
  derived and/or modified sequence
atggccgcaagtgtgaggcaggctcggagcttactcggtgttgccgctacactggcaccaggttctcgtgggtatagggccagaccccctcctagacgtaggccaggcccacgttggccagacccggaagacctgcttactccacgatggcagctggggccaagatatgccgctaaacaatttgcgaggtatggggctgcaagtggcgtggtcccaggcagtctctggccaagcccggaacaacttcgcgaattggaagccgaggagcgtgaatggtacccttcactggccacaatgcaagagtcccttagggttaaacagttggcagaggagcaaaagcggagggaacgcgaacagcatatcgcagagtgtatggccaagatgccccagatgatcgttaactggcagcaacagcagcgcgaaaattgggaaaaggcccaagctgacaaggagcgcagagcacggcttcaggccgaggctcaggagttactgggctaccaggtggacccccgatccgccagattccaggaactgcttcaggacctcgaaaaaaaggaaaggaagaggctgaaggaagaaaagcagaaacggaagaaagaggccagagccgctgccttagctgctgccgtagcccaggacccagccgcttccggtgcccctagcagttag

SEQ ID NO: 229322 - DNA, 669 bp, Artificial Sequence
  derived and/or modified sequence
atggccgccagcgtgagacaggccagaagcctgctgggcgtggccgccaccctggcccccggcagcagaggctacagagccagacccccccccagaagaagacccggccccagatggcccgaccccgaggacctgctgacccccagatggcagctgggccccagatacgccgccaagcagttcgccagatacggcgccgccagcggcgtggtgcccggcagcctgtggcccagccccgagcagctgagagagctggaggccgaggagagagagtggtaccccagcctggccaccatgcaggagagcctgagagtgaagcagctggccgaggagcagaagagaagagagagagagcagcacatcgccgagtgcatggccaagatgccccagatgatcgtgaactggcagcagcagcagagagagaactgggagaaggcccaggccgacaaggagagaagagccagactgcaggccgaggcccaggagctgctgggctaccaggtggaccccagaagcgccagattccaggagctgctgcaggacctggagaagaaggagagaaagagactgaaggaggagaagcagaagagaaagaaggaggccagagccgccgccctggccgccgccgtggcccaggaccccgccgccagcggcgcccccagcagctag

SEQ ID NO: 229323 - protein, 519 aa, Artificial Sequence
  derived and/or modified sequence
MDAVLEPFPADRLFPGSSFLDLGDLNESDFLNNAHFPEHLDHFTENMEDFSNDLFSSFFDDPVLDEKSPLLDMELDSPTPGIQAEHSYSLSGDSAPQSPLVPIKMEDTTQDAEHGAWALGHKLCSIMVKQEQSPELPVDPLAAPSAMAAAAAMATTPLLGLSPLSRLPIPHQAPGEMTQLPVIKAEPLEVNQFLKVTPEDLVQMPPTPPSSHGSDSDGSQSPRSLPPSSPVRPMARSSTAISTSPLLTAPHKLQGTSGPLLLTEEEKRTLIAEGYPIPTKLPLTKAEEKALKRVRRKIKNKISAQESRRKKKEYVECLEKKVETFTSENNELWKKVETLENANRTLLQQLQKLQTLVTNKISRPYKMAATQTGTCLMVAALCFVLVLGSLVPCLPEFSSGSQTVKEDPLAADGVYTASQMPSRSLLFYDDGAGLWEDGRSTLLPMEPPDGWEINPGGPAEQRPRDHLQHDHLDSTHETTKYLSEAWPKDGGNGTSPDFSHSKEWFHDRDLGPNTTIKLS

SEQ ID NO: 229324 - protein, 431 aa, Artificial Sequence
  derived and/or modified sequence
MDAVLEPFPADRLFPGSSFLDLGDLNESDFLNNAHFPEHLDHFTENMEDFSNDLFSSFFDDPVLDEKSPLLDMELDSPTPGIQAEHSYSLSGDSAPQSPLVPIKMEDTTQEDLVQMPPTPPSSHGSDSDGSQSPRSLPPSSPVRPMARSSTAISTSPLLTAPHKLQGTSGPLLLTEEEKRTLIAEGYPIPTKLPLTKAEEKALKRVRRKIKNKISAQESRRKKKEYVECLEKKVETFTSENNELWKKVETLENANRTLLQQLQKLQTLVTNKISRPYKMAATQTGTCLMVAALCFVLVLGSLVPCLPEFSSGSQTVKEDPLAADGVYTASQMPSRSLLFYDDGAGLWEDGRSTLLPMEPPDGWEINPGGPAEQRPRDHLQHDHLDSTHETTKYLSEAWPKDGGNGTSPDFSHSKEWFHDRDLGPNTTIKLS

SEQ ID NO: 229325 - DNA, 2702 bp, Artificial Sequence
  derived and/or modified sequence
agaagacgtgcggagggagacgcagagacagaggagaggccggcagccacccagtctcgggggagcacttagctcccccgccccggctcccaccctgtccggggggctcctgaagccctcagccccaaccccgggctccccatggaagccagctgtgccccaggaggagcaggaggaggtggagtcggctgaatgcccacggtgcgcccggggcccctgagcccatcccgctcctagccgctgccctaaggcccccgcgcgccccgcgccccccacccggggccgcgccgcctccgtccgcccctcccccggggcttcgccccggacctgccccccgcccgtttgccagcgctcaggcaggagctctggactgggcgcgccgccgccctggagtgagggaagcccagtggaagggggtcccgggagccggctgcgatggacgccgtcttggaacccttcccggccgacaggctgttccccggatccagcttcctggacttgggggatctgaacgagtcggacttcctcaacaatgcgcactttcctgagcacctggaccactttacggagaacatggaggacttctccaatgacctgttcagcagcttctttgatgaccctgtgctggatgagaagagccctctattggacatggaactggactcccctacgccaggcatccaggcggagcacagctactccctgagcggcgactcagcgccccagagcccccttgtgcccatcaagatggaggacaccacccaagatgcagagcatggagcatgggcgctgggacacaaactgtgctccatcatggtgaagcaggagcagagcccggagctgcccgtggaccctctggctgccccctcggccatggctgccgcggccgccatggccaccaccccgctgctgggcctcagccccttgtccaggctgcccatcccccaccaggccccgggagagatgactcagctgccagtgatcaaagcagagcctctggaggtgaaccagttcctcaaagtgacaccggaggacctggtgcagatgcctccgacgccccccagcagccatggcagtgacagcgacggctcccagagtccccgctctctgcccccctccagccctgtcaggcccatggcgcgctcctccacggccatctccacctccccactcctcactgcccctcacaaattacaggggacatcagggccactgctcctgacagaggaggagaagcggaccctgattgctgagggctaccccatccccacaaaactccccctcaccaaagccgaggagaaggccttgaagagagtccggaggaaaatcaagaacaagatctcagcccaggagagccgtcgtaagaagaaggagtatgtggagtgtctagaaaagaaggtggagacatttacatctgagaacaatgaactgtggaagaaggtggagaccctggagaatgccaacaggaccctgctccagcagctgcagaaactccagactctggtcaccaacaagatctccagaccttacaagatggccgccacccagactgggacctgcctcatggtggcagccttgtgctttgttctggtgctgggctccctcgtgccctgccttcccgagttctcctccggctcccagactgtgaaggaagaccccctggccgcagacggcgtctacacggccagccagatgccctcccgaagcctcctattctacgatgacggggcaggcttatgggaagatggccgcagcaccctgctgcccatggagcccccagatggctgggaaatcaaccccggggggccggcagagcagcggccccgggaccacctgcagcatgatcacctggacagcacccacgagaccaccaagtacctgagtgaggcctggcctaaagacggtggaaacggcaccagccccgacttctcccactccaaggagtggttccacgacagggatctgggccccaacaccaccatcaaactctcctaggccatgccaagacccaggacataggacggacccctggtacccagaagaggagttcttgctcactaacccggatccgcctcgtgcccctgcctcctggagcttcccattccaggagaaaaggctccacttcccagcccttccttgcccctgacatttggactcttcccttgggccgaccactctgttctcattctccttcccaccaacatccatccgtccttctcagacaaaccactcactgggtaccccacctcctctctcatatgcccaacacgaccactgcctccctgcccccacacctgcacccaaacagacacatcaacgcaccccactcacagacaccccttaccccacccccactgtacagagaccaagaacagaaattgtttgtaaataatgaaccttattttttattattgccaatcccctaagatattgtattttacaaatctccctcttcccttcgcccctcccttgttttatattttatgaagttagtgcgggctttgctgctccctggcccaggaaagagggactacctgaccctcacctggcacccccctgctgctgcccaagccgctgggcctttttaattgccaaactgctctcttcatcagctcagcacatgctttaagaaagcaaaaccaaaaaaaaaaaaaaaaagatgcagcatcaaaaaaaaaaaaaaaaaaaaaaaaaaaaaaaaa

SEQ ID NO: 229326 - DNA, 1560 bp, Artificial Sequence
  derived and/or modified sequence
atggacgccgtgctggagcccttccccgccgacagactgttccccggcagcagcttcctggacctgggcgacctgaacgagagcgacttcctgaacaacgcccacttccccgagcacctggaccacttcaccgagaacatggaggacttcagcaacgacctgttcagcagcttcttcgacgaccccgtgctggacgagaagagccccctgctggacatggagctggacagccccacccccggcatccaggccgagcacagctacagcctgagcggcgacagcgccccccagagccccctggtgcccatcaagatggaggacaccacccaggacgccgagcacggcgcctgggccctgggccacaagctgtgcagcatcatggtgaagcaggagcagagccccgagctgcccgtggaccccctggccgcccccagcgccatggccgccgccgccgccatggccaccacccccctgctgggcctgagccccctgagcagactgcccatcccccaccaggcccccggcgagatgacccagctgcccgtgatcaaggccgagcccctggaggtgaaccagttcctgaaggtgacccccgaggacctggtgcagatgccccccaccccccccagcagccacggcagcgacagcgacggcagccagagccccagaagcctgccccccagcagccccgtgagacccatggccagaagcagcaccgccatcagcaccagccccctgctgaccgccccccacaagctgcagggcaccagcggccccctgctgctgaccgaggaggagaagagaaccctgatcgccgagggctaccccatccccaccaagctgcccctgaccaaggccgaggagaaggccctgaagagagtgagaagaaagatcaagaacaagatcagcgcccaggagagcagaagaaagaagaaggagtacgtggagtgcctggagaagaaggtggagaccttcaccagcgagaacaacgagctgtggaagaaggtggagaccctggagaacgccaacagaaccctgctgcagcagctgcagaagctgcagaccctggtgaccaacaagatcagcagaccctacaagatggccgccacccagaccggcacctgcctgatggtggccgccctgtgcttcgtgctggtgctgggcagcctggtgccctgcctgcccgagttcagcagcggcagccagaccgtgaaggaggaccccctggccgccgacggcgtgtacaccgccagccagatgcccagcagaagcctgctgttctacgacgacggcgccggcctgtgggaggacggcagaagcaccctgctgcccatggagccccccgacggctgggagatcaaccccggcggccccgccgagcagagacccagagaccacctgcagcacgaccacctggacagcacccacgagaccaccaagtacctgagcgaggcctggcccaaggacggcggcaacggcaccagccccgacttcagccacagcaaggagtggttccacgacagagacctgggccccaacaccaccatcaagctgagctag

SEQ ID NO: 229327 - DNA, 1296 bp, Artificial Sequence
  derived and/or modified sequence
atggacgccgtgctggagcccttccccgccgacagactgttccccggcagcagcttcctggacctgggcgacctgaacgagagcgacttcctgaacaacgcccacttccccgagcacctggaccacttcaccgagaacatggaggacttcagcaacgacctgttcagcagcttcttcgacgaccccgtgctggacgagaagagccccctgctggacatggagctggacagccccacccccggcatccaggccgagcacagctacagcctgagcggcgacagcgccccccagagccccctggtgcccatcaagatggaggacaccacccaggaggacctggtgcagatgccccccaccccccccagcagccacggcagcgacagcgacggcagccagagccccagaagcctgccccccagcagccccgtgagacccatggccagaagcagcaccgccatcagcaccagccccctgctgaccgccccccacaagctgcagggcaccagcggccccctgctgctgaccgaggaggagaagagaaccctgatcgccgagggctaccccatccccaccaagctgcccctgaccaaggccgaggagaaggccctgaagagagtgagaagaaagatcaagaacaagatcagcgcccaggagagcagaagaaagaagaaggagtacgtggagtgcctggagaagaaggtggagaccttcaccagcgagaacaacgagctgtggaagaaggtggagaccctggagaacgccaacagaaccctgctgcagcagctgcagaagctgcagaccctggtgaccaacaagatcagcagaccctacaagatggccgccacccagaccggcacctgcctgatggtggccgccctgtgcttcgtgctggtgctgggcagcctggtgccctgcctgcccgagttcagcagcggcagccagaccgtgaaggaggaccccctggccgccgacggcgtgtacaccgccagccagatgcccagcagaagcctgctgttctacgacgacggcgccggcctgtgggaggacggcagaagcaccctgctgcccatggagccccccgacggctgggagatcaaccccggcggccccgccgagcagagacccagagaccacctgcagcacgaccacctggacagcacccacgagaccaccaagtacctgagcgaggcctggcccaaggacggcggcaacggcaccagccccgacttcagccacagcaaggagtggttccacgacagagacctgggccccaacaccaccatcaagctgagctag

SEQ ID NO: 229328 - DNA, 1560 bp, Artificial Sequence
  derived and/or modified sequence
atggatgcagtcctggaacccttccctgcagacagactgtttcctggcagctcattcttggacctcggggatctgaatgagtcggacttcctgaacaatgctcattttcccgaacacctcgatcactttacggagaacatggaggattttagtaatgatctgttctcttcgttcttcgatgatccagtactcgacgaaaaaagtcctctcctcgatatggagctggattcccctactcccggcatccaggctgaacactcttactcattgtcaggagatagcgctccccagtcccccctcgtacccatcaaaatggaggacacaactcaggacgccgagcacggagcctgggctctgggtcacaagctgtgtagcatcatggtgaagcaggaacaatctcccgaacttccagtggatcccctggccgcgccctcagctatggctgcagcagctgctatggccactaccccactccttggcctgagtcccctatcacggctgcccatcccacaccaggctcccggtgagatgacccaacttccagtaatcaaagcagagcctttggaagtgaaccagtttttaaaagttaccccagaggacctagtccagatgccccccacaccgccttcgtcacacggcagtgacagcgacggttctcagtcacctcggtccttgccaccctcatccccagttagacctatggcaaggtctagtacagctataagcacatccccccttttgactgcccctcacaagttacagggtacatctggaccactgctcctgacagaagaggagaagagaacgttgatcgccgagggttaccccatcccaacaaaattgccgctgactaaagctgaggaaaaggcactgaagcgagtccggcgcaaaatcaagaacaagatatctgcgcaggagagtcggcgcaagaaaaaggagtacgtcgagtgcctggaaaaaaaagtggagacttttacgtcggagaacaacgagctgtggaaaaaagtggaaacactcgaaaacgccaacaggacactgttgcaacaactgcagaaattgcagaccctagtcaccaataagatcagccgaccctacaagatggcagcgacacaaacaggaacctgcctgatggtcgcagcgttgtgttttgtgctggtcctgggaagcctcgtgccttgtcttcctgagttctcctcaggtagtcagactgtcaaagaggatcccctggcagcagatggggtatataccgctagtcagatgcccagcagaagtctgctcttctacgatgatggcgccggcctgtgggaggatggacggtctacacttctgccaatggaaccgcccgatggatgggaaatcaacccgggcggaccggccgagcagcggccccgcgatcatctgcaacacgatcaccttgactcaacccatgagaccacaaagtatctctccgaagcatggcccaaagatggaggcaatggcacttcaccggatttctctcattctaaagagtggtttcatgacagggatctcggcccaaacaccaccatcaagttgagctag

SEQ ID NO: 229329 - DNA, 1296 bp, Artificial Sequence
  derived and/or modified sequence
atggacgctgtactagagccatttcccgccgacagactgtttccaggtagcagtttcctcgatttaggcgatctcaacgaaagtgacttcctgaacaacgctcactttccggagcacctggaccatttcacggagaacatggaggatttctctaatgacttattctctagcttctttgatgatcctgtccttgatgagaagtctcctctcctggatatggaactagactcccctacacccggaatacaggcagaacattcttactctctgtccggtgattctgctccgcagagtccccttgtcccaataaagatggaggacacaacacaggaggatctggttcagatgcctccgacccccccatcatcccacggatctgactctgatgggtcacagagtcctagaagtcttccaccatcttctcctgtgagacctatggcaagatcttctacagcaataagtacaagcccgctactgacagctccacacaagcttcagggtacctcaggccccctcctacttactgaagaagaaaaaaggactctcatcgccgaaggctacccaattcctaccaaactgcctctgaccaaggcggaggaaaaagccttaaaacgggtgaggcggaagatcaaaaataaaatatccgcccaagaaagtaggaggaagaaaaaggaatatgtggaatgcctcgagaagaaggtagaaactttcaccagtgaaaataacgagttatggaaaaaggtggagacacttgagaatgccaatcggacacttttacaacaactgcagaagttgcagactctggtgacaaataagatttccagaccttacaaaatggcagcaacacagaccgggacctgtctaatggttgctgccctctgctttgtgcttgtgctcgggtctttggtaccttgcctgcctgagttctcatccggcagccagacagttaaggaggatcctcttgctgcggacggcgtctatacggcaagccagatgcccagtaggagtctgctcttctacgatgacggcgccggactctgggaagacgggcggtcaactctgttgcccatggagcctcccgacgggtgggagattaatcccggcgggccggctgagcagagaccacgcgatcacctccaacacgatcaccttgactccactcatgagacgacaaaatacctatccgaagcttggccaaaagacggcggtaatggcacatctcccgacttctctcactcaaaagagtggttccacgatcgagacctgggccccaatacaaccattaagctgagctag

SEQ ID NO: 229330 - DNA, 1560 bp, Artificial Sequence
  derived and/or modified sequence
atggatgctgtgctggagccttttcctgctgacaggctcttccccgggagttcctttctggatctaggagatctgaacgagtcagacttcctgaacaatgcccattttcccgagcaccttgaccattttactgagaacatggaagacttcagcaacgacctcttcagttcttttttcgatgaccccgtgctggacgaaaaaagtccgttgctagacatggagctggattcaccgacaccggggattcaggcagagcactcatattcactctcaggggattctgcccctcagagcccactggtcccgatcaagatggaggacaccacccaggatgctgaacatggtgcttgggccctgggccacaaactttgcagcatcatggtcaagcaggaacagagcccagaactgcctgtggacccccttgcagccccgtcagccatggcggcggctgcagccatggctacaacgcccctcttaggattatcccctctgtctcggctccccattccacaccaggccccaggcgagatgactcagctgcccgtgattaaggcagagcctctcgaagtcaatcaatttctgaaggtaacacctgaagaccttgtgcaaatgccgccaacaccgcccagctcgcacgggagtgacagcgacgggagtcagtcccccaggagtctgcccccctctagccccgttaggcccatggcccgaagctcaactgcgatttcaacatcaccactgttgacagcccctcacaagctccagggtactagtgggcccctccttctgactgaagaggaaaaaagaaccctgatcgcggaggggtaccctatcccgacaaagcttccacttaccaaggctgaggaaaaagcgttaaagcgtgtgagacgcaaaataaagaacaaaatctctgcacaagaatctcgccggaaaaaaaaggaatacgtagagtgcctcgagaagaaagtggaaacgtttacgagcgagaacaacgagctatggaagaaggtggagacccttgagaatgctaatcgcaccctgctacagcagcttcaaaagctgcaaacactggttaccaataagatctcacgcccctacaagatggcggccactcagactgggacctgtctcatggtggcagcactctgtttcgtgctggtgcttggaagcctcgtgccctgtctccccgagtttagtagcggctctcaaacagtcaaagaagatccgctggccgccgatggcgtgtatactgccagtcaaatgccgtctcgcagcctgcttttctatgatgacggtgcagggctctgggaggacggacgcagtactctgctcccaatggaacctccagatggctgggagattaaccctgggggacctgccgaacagagaccgcgggaccacctgcagcacgaccatctcgatagcactcacgaaaccactaagtacctgagtgaggcgtggcctaaagacggcgggaatggcacctcccctgatttctcacattccaaagagtggttccacgacagggatctggggcctaataccaccataaaactgagctag

SEQ ID NO: 229331 - DNA, 1560 bp, Artificial Sequence
  derived and/or modified sequence
atggatgctgtgctggagcccttccctgctgacaggctcttccctggcagcagcttcctggacctgggggacctgaatgaaagtgacttcctgaacaatgcccacttccctgagcacctggaccacttcacagagaacatggaggacttcagcaatgacctcttcagcagcttctttgatgatcctgtgctggatgagaagagccccctgctggacatggagctggacagccccaccccaggcatccaggccgagcacagctacagcctgagcggggacagcgccccccagagccccctggtgcccatcaagatggaggacaccacccaggatgctgagcacggggcctgggccctgggccacaagctgtgcagcatcatggtgaagcaggagcagagccctgagctgcctgtggaccccctggccgcccccagcgccatggctgctgctgctgccatggccaccacccccctgctgggcctgagccccctgagccggctgcccatcccccaccaggcccctggagagatgacccagctgcctgtgatcaaggccgagcccctggaggtgaaccagttcctgaaggtgaccccagaggacctggtgcagatgccacccaccccacccagcagccacggcagtgacagtgatggcagccagagccccaggagcctgccccccagcagccctgtgcggcccatggcccggagcagcacagccatcagcaccagccccctgctgacagccccccacaagctgcagggcaccagcggccccctgctgctgacagaggaggagaagaggaccctgattgctgagggctaccccatccccaccaagctgcccctgaccaaggccgaggagaaggccctgaagagggtgcggaggaagatcaagaacaagatcagcgcccaggagagcaggaggaagaagaaggagtatgtggagtgcctggagaagaaggtggagaccttcaccagcgagaacaatgagctgtggaagaaggtggagaccctggagaatgccaacagaaccctgctgcagcagctgcagaagctgcagaccctggtgaccaacaagatcagccggccctacaagatggccgccacccagacaggcacctgcctgatggtggccgccctgtgctttgtgctggtgctgggcagcctggtgccctgcctgcctgagttcagcagcggcagccagacagtgaaggaggaccccctggccgcagatggagtgtacacagccagccagatgcccagccgcagcctgctcttctatgatgatggagctggcctgtgggaggatggccgcagcaccctgctgcccatggagcccccagatggctgggagatcaaccctgggggccctgctgagcagaggccccgggaccacctgcagcacgaccacctggacagcacccatgagaccaccaagtacctgtctgaggcctggcccaaggatggcggcaatggcaccagcccagacttcagccacagcaaggagtggttccatgaccgggacctgggccccaacaccaccatcaagctgtcctag

SEQ ID NO: 229332 - DNA, 1296 bp, Artificial Sequence
  derived and/or modified sequence
atggatgctgtgctggagcccttccctgctgacaggctcttccctggcagcagcttcctggacctgggggacctgaatgaaagtgacttcctgaacaatgcccacttccctgagcacctggaccacttcacagagaacatggaggacttcagcaatgacctcttcagcagcttctttgatgatcctgtgctggatgagaagagccccctgctggacatggagctggacagccccaccccaggcatccaggccgagcacagctacagcctgagcggggacagcgccccccagagccccctggtgcccatcaagatggaggacaccacccaggaggacctggtgcagatgccacccaccccacccagcagccacggcagtgacagtgatggcagccagagccccaggagcctgccccccagcagccctgtgcggcccatggcccggagcagcacagccatcagcaccagccccctgctgacagccccccacaagctgcagggcaccagcggccccctgctgctgacagaggaggagaagaggaccctgattgctgagggctaccccatccccaccaagctgcccctgaccaaggccgaggagaaggccctgaagagggtgcggaggaagatcaagaacaagatcagcgcccaggagagcaggaggaagaagaaggagtatgtggagtgcctggagaagaaggtggagaccttcaccagcgagaacaatgagctgtggaagaaggtggagaccctggagaatgccaacagaaccctgctgcagcagctgcagaagctgcagaccctggtgaccaacaagatcagccggccctacaagatggccgccacccagacaggcacctgcctgatggtggccgccctgtgctttgtgctggtgctgggcagcctggtgccctgcctgcctgagttcagcagcggcagccagacagtgaaggaggaccccctggccgcagatggagtgtacacagccagccagatgcccagccgcagcctgctcttctatgatgatggagctggcctgtgggaggatggccgcagcaccctgctgcccatggagcccccagatggctgggagatcaaccctgggggccctgctgagcagaggccccgggaccacctgcagcacgaccacctggacagcacccatgagaccaccaagtacctgtctgaggcctggcccaaggatggcggcaatggcaccagcccagacttcagccacagcaaggagtggttccatgaccgggacctgggccccaacaccaccatcaagctgtcctag

SEQ ID NO: 229333 - DNA, 1560 bp, Artificial Sequence
  derived and/or modified sequence
atggacgccgtgctggagcccttccccgccgaccggctgttccccggcagttccttcttagacctaggtgatctgaatgagtcagactttctgaacaatgcccacttcccggagcacctggaccactttacggagaacatggaagacttctccaatgacctgttttcttcttttttcgatgatccagtcctggacgagaagtctcccctcctggatatggagctggatagcccaacaccggggatacaggctgagcacagctactccttgagcggggactctgccccacagtcgccacttgtcccgatcaaaatggaagacactactcaggacgccgagcacggggcctgggcgttgggccacaagctttgttccattatggtcaagcaggagcaatctcccgaactccctgtggacccccttgctgccccaagcgccatggctgctgccgctgctatggccactacgccactgctcggcctgtcaccactaagtcggctgccaatcccccaccaggctcctggggagatgacgcagcttccagtcatcaaagcagaacccttagaagtgaatcagttcctgaaggtaacccctgaggacctggtgcaaatgccgccaacgccgcctagctcccatggctctgactccgatggctcgcaatcgcctcgcagcttgcctccaagctcacccgtgaggccgatggcccggtccagtacagccatctcaacctctcccctgttaaccgctccccacaaattacagggcacctcaggacccctgctgctgaccgaagaggagaaaaggacgctcatcgccgaaggataccccattcccacaaaattgccactgaccaaagctgaagagaaggccctgaaacgcgtgcggagaaagatcaaaaataaaatcagcgcacaggagtcacggcggaaaaaaaaagaatacgtcgagtgtttagaaaagaaggtggagaccttcaccagcgagaataacgaactgtggaagaaagtcgagacgcttgagaatgccaaccggacgttgctccagcagctgcagaagctgcagaccctagtgacaaacaaaatctcccgcccatataagatggccgccacacagacaggcacatgtctgatggttgccgcattgtgcttcgtcctcgtgcttggatcgctggttccttgtcttcccgaattcagttctggatcccagacagtcaaggaggatccccttgcggccgacggggtgtacacggcaagtcaaatgccttctagatccctactgttttacgacgacggggctggactttgggaagatgggaggagtaccttactccccatggagccgccagatggctgggagattaatcccgggggacctgctgagcagcgtcctcgtgaccacctccaacacgatcatctggatagtactcacgaaactacaaagtacctctccgaggcctggcccaaggacgggggaaatgggacttccccagactttagtcacagcaaagaatggtttcacgatcgggatctcggcccgaacacgacgattaagttgagctag

SEQ ID NO: 229334 - DNA, 1296 bp, Artificial Sequence
  derived and/or modified sequence
atggacgccgtgctggagcccttccccgccgaccggctgttccccggtagctcattcctggacctaggcgacctcaacgagtcggatttcctgaataacgctcattttcctgaacatttagatcattttactgaaaatatggaggactttagcaatgatctcttctctagcttcttcgacgatccagtattggatgagaagagccccttgctggatatggaattggactccccgacccccgggatccaggccgagcacagctactctctgagcggcgactccgctccccaatctcccctggttccgataaaaatggaagatacaactcaagaggatttggttcagatgccacctaccccaccaagttcacacggcagcgactccgacgggtcccagagcccccggagtctcccccccagctcccctgtgagacccatggctcggtcctctactgccatttcaacctctcctctgcttactgccccccataaacttcaagggacctccggccctctcctgcttacagaggaagagaaaaggaccctcattgccgaggggtaccctataccaactaaattaccactgactaaagccgaggagaaagccttgaagagagtgagacgtaagatcaaaaacaaaatttctgcccaggaaagccggcggaaaaagaaggagtatgttgagtgcctcgagaagaaggtcgagacttttaccagtgagaataacgagttgtggaaaaaggtggagacccttgagaatgctaacaggaccctacttcagcagctccaaaagttgcaaacccttgtcaccaacaagatttcccggccgtataagatggcggccacccagacgggaacctgtctgatggtagctgccctttgcttcgtgctggtgctgggcagcctagttccgtgcctgcctgagtttagctctgggtcacagactgtaaaggaggaccctcttgccgctgacggcgtgtatacggcatcccaaatgccatctagaagcctgctgttctacgacgatggagcaggcttatgggaagacggtcgaagcaccctcttacccatggaacccccagatgggtgggagataaacccagggggacccgcagaacagagacccagagatcacctccagcacgaccacttagactctactcacgaaactactaaatacctgagcgaagcgtggcccaaggacggcggcaatggcacctccccagacttctcccacagcaaagagtggtttcacgacagagatcttggtccaaataccaccattaagctttcctag

SEQ ID NO: 229335 - DNA, 1560 bp, Artificial Sequence
  derived and/or modified sequence
atggacgccgtgctggagcccttccccgccgaccggctgttccccggctcttccttcctcgacttgggagacctcaatgagtctgacttcctgaataatgcccacttcccggaacacctcgaccatttcaccgaaaatatggaggactttagcaatgacctgtttagcagcttcttcgacgatcccgtgctggatgaaaaaagccctttgcttgacatggagctagactctcccacacccggcatccaagcagagcacagctactcactcagcggagattcagcacctcagtcacccctggtgccaatcaagatggaagacaccacccaggacgctgagcacggggcctgggccctggggcacaagctgtgtagcatcatggtgaagcaggaacaaagtcctgagctccccgtggaccccctggccgccccctcagctatggccgctgctgccgctatggctacaacccctcttctcggcctctctccactttctcggctgcccattccccatcaggcccctggcgagatgacacaactccctgtcattaaagctgagcctcttgaggtcaatcagttcctgaaggtgaccccggaggatctggtgcagatgcctccgaccccaccttcctctcatggtagtgattcggatggatcccagagccctagaagccttccccccagctcacccgtaaggccaatggcacgaagcagcacagcaatcagtacctcacctttgttgaccgctccgcacaaattgcaagggactagcggtccactcttgcttaccgaggaggagaagcgaacattaatcgctgaaggatacccgattcccactaaactgcccttaaccaaggctgaggagaaggccctaaaacgcgttcggcgtaagattaaaaataaaatcagtgcccaggagtctagaagaaagaaaaaggagtacgtggaatgtcttgagaagaaagtggaaactttcacctctgaaaacaacgaactgtggaaaaaagttgagacactcgaaaatgctaaccgtaccttgcttcagcagctccaaaaacttcaaactttagtaacaaataaaatcagccgtccttacaaaatggctgccactcagacaggcacctgcctgatggttgccgcgctctgcttcgttttagtcctggggtccttggtgccgtgcctgccagagttctcctctggatcacaaaccgtgaaggaggacccactggccgccgatggcgtttataccgcgtcacagatgccgagtaggtcactcttgttctatgatgacggagccggcctttgggaggatggacgctcaacacttttgccaatggagcccccagatggttgggaaataaatcctggggggcctgccgagcagagaccaagagatcaccttcagcacgaccacttagactcaacacacgagaccaccaagtatctgtctgaggcttggcccaaggacggtggaaatggaaccagtccagacttttcccacagtaaagagtggtttcatgacagagacctggggccaaatacaacaattaaactgtcctag

SEQ ID NO: 229336 - DNA, 1560 bp, Artificial Sequence
  derived and/or modified sequence
atggacgcagtgctggaacctttcccagctgataggttgtttcccggaagctctttcctcgatctcggcgacttgaacgagtctgatttcctgaacaacgctcactttcccgaacacctcgaccacttcaccgaaaatatggaagacttcagcaacgacttgttttcctctttttttgacgatcccgtgctagacgagaaatcccccctgcttgacatggaactagactccccgaccccaggcattcaagcagaacatagctattcactaagcggagattccgcaccccagtccccattagttcctatcaagatggaagacacaacacaggatgctgagcacggggcttgggcactgggacacaagctttgttccatcatggtcaagcaagagcagtccccagagctgcctgtcgacccccttgcagcgcctagtgcgatggcggcagctgccgcaatggcaacaacccccttgctgggcctgagcccacttagccgcctgcccatcccccaccaagccccaggtgagatgactcagttacctgtcatcaaagccgaacctctggaggtcaatcagtttctgaaggttactcccgaagaccttgtgcagatgcctcctactccccctagcagccatggcagcgattccgatggatcccagtccccgagatcgctgccgccatcctcaccagtgaggcctatggcccgatccagcacagccattagcacttccccactgctgaccgcgcctcataagctgcaaggaacatccggtcctctcttactcacggaagaagagaaacgcaccctgatcgccgaaggctaccctatcccaaccaaactgccactcactaaagccgaagagaaggccctaaagcgagtgcgtagaaagatcaagaataagatcagcgcacaagaatcccgcaggaagaagaaagagtacgttgaatgcttggagaagaaagtggagacatttacaagtgagaacaatgagctctggaagaaggtggaaaccctggaaaatgctaaccggactttgcttcagcagttgcaaaagctacagacactggtgactaacaaaatcagtaggccatataagatggcggctacacaaactggcacttgcctgatggtagcagcactgtgtttcgtgctcgtgttgggttcactggttccctgcctgcctgagttcagctcagggtctcagaccgttaaggaagaccccctggctgctgacggcgtgtataccgccagccagatgccctctcgctccctgctcttctatgatgatggcgcaggattatgggaggatgggcgatcaactctattgcccatggagccaccagatggatgggagatcaatcctggcggtccagccgagcagcggccacgcgaccacctccagcacgaccatctagacagcacccatgaaacgacaaaatatctgtccgaagcctggcccaaggacggaggtaatggaacatctcccgatttctcccactcaaaggaatggttccatgacagagatctgggtccaaataccaccatcaagctctcttag

SEQ ID NO: 229337 - DNA, 1296 bp, Artificial Sequence
  derived and/or modified sequence
atggatgctgtgcttgagcccttccccgctgaccgactcttcccaggtagttccttcctggatctgggagacctaaatgaatcggactttctgaacaatgcgcactttcccgagcacttagatcattttaccgagaacatggaggatttttcaaatgacctcttctcttcatttttcgatgatccggtgctcgatgagaagtcaccactgctggatatggagctagattcgccaacccctggtatccaagcagaacacagctattctttaagcggtgactccgcccctcagtctccgcttgttcctatcaaaatggaagacaccacgcaagaggatctcgttcaaatgccgcctacccctcctagcagccacggatctgattctgatggatcccagtccccccgttctttaccaccatcttcccccgtcaggcccatggccagatcctctacagcgatctccacctcgcctctgttaaccgcgccacacaaactacaaggtacctccggacccctcctccttaccgaggaagaaaaaaggactctcattgccgaaggatacccaataccaaccaagctgcctttgaccaaagccgaggagaaggccctcaaaagggttagacgcaaaattaagaacaagataagtgcccaggagtcaaggaggaaaaagaaggaatacgtggaatgtcttgaaaaaaaggtcgagactttcacaagtgaaaataatgaattgtggaaaaaggtcgaaaccctagagaatgcgaatcggacgcttctccagcagctgcagaagctccaaacactggtgactaacaaaataagccgcccatacaagatggcagcaactcagaccggaacttgcctgatggtggctgctctgtgtttcgttctggtgctgggctcgcttgttccgtgtttacctgaattcagcagcggcagccagaccgtgaaggaggatccgctcgccgctgatggcgtgtataccgcatctcagatgcccagcaggagcctccttttttacgatgatggggcaggtttgtgggaggacggacggtcgacactgctgcccatggaaccaccggacgggtgggagattaatccaggaggcccagccgaacaaaggcctcgggatcacttacaacacgaccacctcgactcaacccacgagaccactaaatatctttctgaggcctggccaaaggatgggggaaacgggacctctcccgacttctctcactcaaaggagtggttccacgatagggatctcggcccaaacacaaccattaagctgtcctag

SEQ ID NO: 229338 - DNA, 1560 bp, Artificial Sequence
  derived and/or modified sequence
atggatgcagtcctggagccttttccagccgaccgactgttccctggaagctcatttctggacctgggagaccttaacgagagcgacttcttaaacaatgcgcattttccggagcatctggatcatttcaccgagaacatggaggacttctccaatgatctgtttagctccttctttgacgatccagtgctggatgaaaaaagccccctgctggatatggagctcgacagccccactccgggtatccaggcggaacatagttacagtctcagcggcgacagcgcccctcagtcacctctcgtgcccattaagatggaggataccacccaggacgccgagcacggcgcatgggccttgggtcacaagttatgctcgattatggtgaagcaagagcagtcgccagagttgcccgtggatcctcttgccgcaccatctgcaatggcagcagctgctgccatggccacaaccccactgcttggcttatctcctttgagccggctccccatcccgcatcaggccccaggtgagatgacacagctgcccgtgattaaagcagaaccactggaggtgaatcagttcctcaaagtgactccagaggacctcgtccagatgccccctaccccaccatctagccacggttccgattcagatggttcccagtcacctcgcagtctccctccatcttcccctgtaagacccatggccaggagctcaactgccatatctacctctccactgttgacggctccacataagctacagggtacttctggcccactgctgctcaccgaagaagaaaagcgaaccctgatcgccgaaggctacccgatacccacaaaactgcccttaacaaaggccgaagaaaaggccttaaagcgggtcaggaggaaaattaagaacaaaatttccgctcaggagtcgaggcgcaagaaaaaggagtacgtggagtgtttggagaagaaggttgagactttcaccagcgagaataacgagctttggaagaaggtggagactctagagaacgccaaccgcacactgctgcaacagttgcagaagttacagactctcgtcacaaataagattagtcgaccttataaaatggcggctacacagaccggtacatgtctgatggtcgcggcactctgctttgtacttgtgctggggtctcttgtgccttgcctgccagagttttccagcggatcccagacagtgaaggaagaccccctcgcagctgatggtgtgtacaccgcgagccagatgccctcccgctcactgttattctacgacgatggcgctggactctgggaagatgggaggtctacccttctacccatggaaccacccgacggttgggagataaaccctggcggtccagcagagcaacgtcccagggatcacctgcaacatgatcacctcgattcaacacatgagactacgaagtacctatccgaagcctggcccaaagatggcggtaacggaacgagccccgattttagccactccaaggagtggtttcacgaccgcgatttaggaccaaacacgaccattaagctcagttag

SEQ ID NO: 229339 - DNA, 2669 bp, Artificial Sequence
  derived and/or modified sequence
agaagacgtgcggagggagacgcagagacagaggagaggccggcagccacccagtctcgggggagcacttagctcccccgccccggctcccaccctgtccggggggctcctgaagccctcagccccaaccccgggctccccatggaagccagctgtgccccaggaggagcaggaggaggtggagtcggctgaatgcccacggtgcgcccggggcccctgagcccatcccgctcctagccgctgccctaaggcccccgcgcgccccgcgccccccacccggggccgcgccgcctccgtccgcccctcccccggggcttcgccccggacctgccccccgcccgtttgccagcgctcaggcaggagctctggactgggcgcgccgccgccctggagtgagggaagcccagtggaagggggtcccgggagccggctgcgatggacgccgtcttggaacccttcccggccgacaggctgttccccggatccagcttcctggacttgggggatctgaacgagtcggacttcctcaacaatgcgcactttcctgagcacctggaccactttacggagaacatggaggacttctccaatgacctgttcagcagcttctttgatgaccctgtgctggatgagaagagccctctattggacatggaactggactcccctacgccaggcatccaggcggagcacagctactccctgagcggcgactcagcgccccagagcccccttgtgcccatcaagatggaggacaccacccaagatgcagagcatggagcatgggcgctgggacacaaactgtgctccatcatggtgaagcaggagcagagcccggagctgcccgtggaccctctggctgccccctcggccatggctgccgcggccgccatggccaccaccccgctgctgggcctcagccccttgtccaggctgcccatcccccaccaggccccgggagagatgactcagctgccagtgatcaaagcagagcctctggaggtgaaccagttcctcaaagtgacaccggaggacctggtgcagatgcctccgacgccccccagcagccatggcagtgacagcgacggctcccagagtccccgctctctgcccccctccagccctgtcaggcccatggcgcgctcctccacggccatctccacctccccactcctcactgcccctcacaaattacaggggacatcagggccactgctcctgacagaggaggagaagcggaccctgattgctgagggctaccccatccccacaaaactccccctcaccaaagccgaggagaaggccttgaagagagtccggaggaaaatcaagaacaagatctcagcccaggagagccgtcgtaagaagaaggagtatgtggagtgtctagaaaagaaggtggagacatttacatctgagaacaatgaactgtggaagaaggtggagaccctggagaatgccaacaggaccctgctccagcagctgcagaaactccagactctggtcaccaacaagatctccagaccttacaagatggccgccacccagactgggacctgcctcatggtggcagccttgtgctttgttctggtgctgggctccctcgtgccctgccttcccgagttctcctccggctcccagactgtgaaggaagaccccctggccgcagacggcgtctacacggccagccagatgccctcccgaagcctcctattctacgatgacggggcaggcttatgggaagatggccgcagcaccctgctgcccatggagcccccagatggctgggaaatcaaccccggggggccggcagagcagcggccccgggaccacctgcagcatgatcacctggacagcacccacgagaccaccaagtacctgagtgaggcctggcctaaagacggtggaaacggcaccagccccgacttctcccactccaaggagtggttccacgacagggatctgggccccaacaccaccatcaaactctcctaggccatgccaagacccaggacataggacggacccctggtacccagaagaggagttcttgctcactaacccggatccgcctcgtgcccctgcctcctggagcttcccattccaggagaaaaggctccacttcccagcccttccttgcccctgacatttggactcttcccttgggccgaccactctgttctcattctccttcccaccaacatccatccgtccttctcagacaaaccactcactgggtaccccacctcctctctcatatgcccaacacgaccactgcctccctgcccccacacctgcacccaaacagacacatcaacgcaccccactcacagacaccccttaccccacccccactgtacagagaccaagaacagaaattgtttgtaaataatgaaccttattttttattattgccaatcccctaagatattgtattttacaaatctccctcttcccttcgcccctcccttgttttatattttatgaagttagtgcgggctttgctgctccctggcccaggaaagagggactacctgaccctcacctggcacccccctgctgctgcccaagccgctgggcctttttaattgccaaactgctctcttcatcagctcagcacatgctttaagaaagcaaaaccaaaaaaaaaaaaaaaaagatgcagcatc

SEQ ID NO: 229340 - DNA, 2405 bp, Artificial Sequence
  derived and/or modified sequence
agaagacgtgcggagggagacgcagagacagaggagaggccggcagccacccagtctcgggggagcacttagctcccccgccccggctcccaccctgtccggggggctcctgaagccctcagccccaaccccgggctccccatggaagccagctgtgccccaggaggagcaggaggaggtggagtcggctgaatgcccacggtgcgcccggggcccctgagcccatcccgctcctagccgctgccctaaggcccccgcgcgccccgcgccccccacccggggccgcgccgcctccgtccgcccctcccccggggcttcgccccggacctgccccccgcccgtttgccagcgctcaggcaggagctctggactgggcgcgccgccgccctggagtgagggaagcccagtggaagggggtcccgggagccggctgcgatggacgccgtcttggaacccttcccggccgacaggctgttccccggatccagcttcctggacttgggggatctgaacgagtcggacttcctcaacaatgcgcactttcctgagcacctggaccactttacggagaacatggaggacttctccaatgacctgttcagcagcttctttgatgaccctgtgctggatgagaagagccctctattggacatggaactggactcccctacgccaggcatccaggcggagcacagctactccctgagcggcgactcagcgccccagagcccccttgtgcccatcaagatggaggacaccacccaagaggacctggtgcagatgcctccgacgccccccagcagccatggcagtgacagcgacggctcccagagtccccgctctctgcccccctccagccctgtcaggcccatggcgcgctcctccacggccatctccacctccccactcctcactgcccctcacaaattacaggggacatcagggccactgctcctgacagaggaggagaagcggaccctgattgctgagggctaccccatccccacaaaactccccctcaccaaagccgaggagaaggccttgaagagagtccggaggaaaatcaagaacaagatctcagcccaggagagccgtcgtaagaagaaggagtatgtggagtgtctagaaaagaaggtggagacatttacatctgagaacaatgaactgtggaagaaggtggagaccctggagaatgccaacaggaccctgctccagcagctgcagaaactccagactctggtcaccaacaagatctccagaccttacaagatggccgccacccagactgggacctgcctcatggtggcagccttgtgctttgttctggtgctgggctccctcgtgccctgccttcccgagttctcctccggctcccagactgtgaaggaagaccccctggccgcagacggcgtctacacggccagccagatgccctcccgaagcctcctattctacgatgacggggcaggcttatgggaagatggccgcagcaccctgctgcccatggagcccccagatggctgggaaatcaaccccggggggccggcagagcagcggccccgggaccacctgcagcatgatcacctggacagcacccacgagaccaccaagtacctgagtgaggcctggcctaaagacggtggaaacggcaccagccccgacttctcccactccaaggagtggttccacgacagggatctgggccccaacaccaccatcaaactctcctaggccatgccaagacccaggacataggacggacccctggtacccagaagaggagttcttgctcactaacccggatccgcctcgtgcccctgcctcctggagcttcccattccaggagaaaaggctccacttcccagcccttccttgcccctgacatttggactcttcccttgggccgaccactctgttctcattctccttcccaccaacatccatccgtccttctcagacaaaccactcactgggtaccccacctcctctctcatatgcccaacacgaccactgcctccctgcccccacacctgcacccaaacagacacatcaacgcaccccactcacagacaccccttaccccacccccactgtacagagaccaagaacagaaattgtttgtaaataatgaaccttattttttattattgccaatcccctaagatattgtattttacaaatctccctcttcccttcgcccctcccttgttttatattttatgaagttagtgcgggctttgctgctccctggcccaggaaagagggactacctgaccctcacctggcacccccctgctgctgcccaagccgctgggcctttttaattgccaaactgctctcttcatcagctcagcacatgctttaagaaagcaaaaccaaaaaaaaaaaaaaaaagatgcagcatc

SEQ ID NO: 229341 - DNA, 2687 bp, Artificial Sequence
  derived and/or modified sequence
cagagaggaaagtgacagaagacgtgcggagggagacgcagagacagaggagaggccggcagccacccagtctcgggggagcacttagctcccccgccccggctcccaccctgtccggggggctcctgaagccctcagccccaaccccgggctccccatggaagccagctgtgccccaggaggagcaggaggaggtggagtcggctgaatgcccacggtgcgcccggggcccctgagcccatcccgctcctagccgctgccctaaggcccccgcgcgccccgcgccccccacccggggccgcgccgcctccgtccgcccctcccccggggcttcgccccggacctgccccccgcccgtttgccagcgctcaggcaggagctctggactgggcgcgccgccgccctggagtgagggaagcccagtggaagggggtcccgggagccggctgcgatggacgccgtcttggaacccttcccggccgacaggctgttccccggatccagcttcctggacttgggggatctgaacgagtcggacttcctcaacaatgcgcactttcctgagcacctggaccactttacggagaacatggaggacttctccaatgacctgttcagcagcttctttgatgaccctgtgctggatgagaagagccctctattggacatggaactggactcccctacgccaggcatccaggcggagcacagctactccctgagcggcgactcagcgccccagagcccccttgtgcccatcaagatggaggacaccacccaagatgcagagcatggagcatgggcgctgggacacaaactgtgctccatcatggtgaagcaggagcagagcccggagctgcccgtggaccctctggctgccccctcggccatggctgccgcggccgccatggccaccaccccgctgctgggcctcagccccttgtccaggctgcccatcccccaccaggccccgggagagatgactcagctgccagtgatcaaagcagagcctctggaggtgaaccagttcctcaaagtgacaccggaggacctggtgcagatgcctccgacgccccccagcagccatggcagtgacagcgacggctcccagagtccccgctctctgcccccctccagccctgtcaggcccatggcgcgctcctccacggccatctccacctccccactcctcactgcccctcacaaattacaggggacatcagggccactgctcctgacagaggaggagaagcggaccctgattgctgagggctaccccatccccacaaaactccccctcaccaaagccgaggagaaggccttgaagagagtccggaggaaaatcaagaacaagatctcagcccaggagagccgtcgtaagaagaaggagtatgtggagtgtctagaaaagaaggtggagacatttacatctgagaacaatgaactgtggaagaaggtggagaccctggagaatgccaacaggaccctgctccagcagctgcagaaactccagactctggtcaccaacaagatctccagaccttacaagatggccgccacccagactgggacctgcctcatggtggcagccttgtgctttgttctggtgctgggctccctcgtgccctgccttcccgagttctcctccggctcccagactgtgaaggaagaccccctggccgcagacggcgtctacacggccagccagatgccctcccgaagcctcctattctacgatgacggggcaggcttatgggaagatggccgcagcaccctgctgcccatggagcccccagatggctgggaaatcaaccccggggggccggcagagcagcggccccgggaccacctgcagcatgatcacctggacagcacccacgagaccaccaagtacctgagtgaggcctggcctaaagacggtggaaacggcaccagccccgacttctcccactccaaggagtggttccacgacagggatctgggccccaacaccaccatcaaactctcctaggccatgccaagacccaggacataggacggacccctggtacccagaagaggagttcttgctcactaacccggatccgcctcgtgcccctgcctcctggagcttcccattccaggagaaaaggctccacttcccagcccttccttgcccctgacatttggactcttcccttgggccgaccactctgttctcattctccttcccaccaacatccatccgtccttctcagacaaaccactcactgggtaccccacctcctctctcatatgcccaacacgaccactgcctccctgcccccacacctgcacccaaacagacacatcaacgcaccccactcacagacaccccttaccccacccccactgtacagagaccaagaacagaaattgtttgtaaataatgaaccttattttttattattgccaatcccctaagatattgtattttacaaatctccctcttcccttcgcccctcccttgttttatattttatgaagttagtgcgggctttgctgctccctggcccaggaaagagggactacctgaccctcacctggcacccccctgctgctgcccaagccgctgggcctttttaattgccaaactgctctcttcatcagctcagcacatgctttaagaaagcaaaaccaaaaaaaaaaaaaaaaagatgcagcatcaa

SEQ ID NO: 229342 - protein, 401 aa, Artificial Sequence
  derived and/or modified sequence
MEDPSGAREPRARPRERDPGRRPHPDQGRTHDRPRDRPGDPRRKRSSDGNRRRDGDRDPERDQERDGNRDRNRDRERERERERDPDRGPRRDTHRDAGPRAGEHGVWEKPRQSRTRDGARGLTWDAAAPPGPAPWEAPEPPQPQRKGDPGRRRPESEPPSERYLPSTPRPGREEVEYYQSEAEGLLECHKCKYLCTGRACCQMLEVLLNLLILACSSVSYSSTGGYTGITSLGGIYYYQFGGAYSGFDGADGEKAQQLDVQFYQLKLPMVTVAMACSGALTALCCLFVAMGVLRVPWHCPLLLVTEGLLDMLIAGGYIPALYFYFHYLSAAYGSPVCKERQALYQSKGYSGFGCSFHGADIGAGIFAALGIVVFALGAVLAIKGYRKVRKLKEKPAEMFEF

SEQ ID NO: 229343 - DNA, 1206 bp, Artificial Sequence
  derived and/or modified sequence
atggaggaccccagcggtgccagggagccccgcgcgcgcccacgagagcgagatcccggccggagaccccatcctgaccaagggagaacccatgatagaccaagggatagaccaggagatccccgccggaagaggtcgagcgacggcaaccgtcgtcgggacggggaccgcgaccccgaaagagatcaagagcgcgacgggaacagagatcgcaaccgcgacagggaaagggagcgggagagagaacgggacccagatcgcggtccccgaagggacactcatcgtgatgccggtccccgcgccggagagcacggggtctgggagaagcccagacaatctcgtactagagacggtgcccgcgggttgacgtgggatgcggcagctcccccaggcccagctccatgggaagcccccgagccccctcagccccagcgcaagggtgaccctggcaggcgtcggccggagtctgagcctccctccgaaaggtatttgccttctacaccccggcccgggagagaggaggttgagtattaccagtccgaagccgaagggctcttggagtgccacaagtgcaaatacctctgcaccgggcgcgcctgctgccagatgttggaagttctcctcaacttactgattcttgcctgctccagtgtttcttatagctcaacaggcggctatacaggcataacaagtctgggaggaatctattattaccagtttggtggtgcatacagtggatttgacggagcagacggtgagaaagcgcaacaactagacgtacagttttaccagttaaaactgccaatggtgaccgtcgccatggcctgttccggggcactgaccgcattgtgttgcctctttgttgcaatgggcgtgctgagggtgccttggcactgtcctctgctattagttactgaagggttgctggacatgctgatcgcaggtggttacatccccgctttgtacttctatttccactatctcagtgctgcgtatggcagcccagtgtgcaaggaaagacaggcattgtatcaaagtaagggctacagcggtttcggctgttcgttccacggagccgatataggggccggaatattcgctgcactaggaatcgtcgtctttgctctgggggctgtccttgctatcaaggggtatcgtaaggtgcgaaaattaaaagaaaaaccggccgaaatgtttgaattttag

SEQ ID NO: 229344 - DNA, 1206 bp, Artificial Sequence
  derived and/or modified sequence
atggaggaccccagcggggcccgggagccccgggcccggccccgggagcgggaccctggaagaagaccccacccagaccagggccgcacccatgaccggccccgggacaggcctggggaccccaggaggaagaggagcagtgatggcaacagaagaagagatggagaccgggaccctgagcgggaccaggagagagatggcaacagagacaggaacagagaccgggagcgggagcgggagcgggagcgggaccctgaccggggcccccggcgggacacccacagagatgctggccccagggctggggagcacggcgtgtgggagaagccccggcagagcaggaccagagatggagcccggggcctgacctgggatgctgctgcccctcctggccctgccccctgggaggcccctgagcccccccagccccagaggaagggggaccctggaagaagaagacctgagagcgagccccccagcgagcgctacctgcccagcaccccccggcccggccgggaggaggtggagtactaccagagcgaggccgagggcctgctggagtgccacaagtgcaagtacctgtgcaccggccgggcctgctgccagatgctggaggtgctgctgaacctgctgatcctggcctgcagctctgtgtcctacagcagcactggaggctacacaggcatcaccagcctgggcggcatctactactaccagtttggaggagcctacagcggctttgatggagcagatggagagaaggcccagcagctggatgtgcagttctaccagctgaagctgcccatggtgacagtggccatggcctgcagcggggccctgacagccctgtgctgcctgtttgtggccatgggcgtgctgcgggtgccctggcactgccccctgctgctggtgacagagggcctgctggacatgctgattgctgggggctacatcccagccctgtacttctacttccactacctgtctgctgcctacggcagccctgtgtgcaaggagcggcaggccctgtaccagagcaagggctacagcggcttcggctgcagcttccatggagctgacattggagctggcatctttgctgccctgggcatcgtggtgtttgccctgggcgctgtgctggccatcaagggctacaggaaggtgaggaagctgaaggagaagccagctgagatgtttgagttctag

SEQ ID NO: 229345 - DNA, 2912 bp, Artificial Sequence
  derived and/or modified sequence
tgttgccctcaggtcgctcccgggcggggacacggaacccggccatggaagatccgtcgggggctcgcgagccccgggcccggccgagagagcgggacccgggacggcgcccccacccagaccaaggccgcacccacgatcgaccgcgggaccgacccggggacccgcgcaggaagcgaagcagcgacgggaaccggcgaagggacggggaccgggacccggagagagaccaggagagggacgggaaccgcgaccggaaccgggaccgggagagggagagagagagggaaagagacccggaccgaggcccccgccgggacacacacagggacgcgggccctcgcgcaggtgaacacggagtttgggaaaaaccgcgccaaagccggacgcgggacggagcccggggactgacctgggacgcagccgcgcctcctgggcccgcgccctgggaagccccggagccgccgcagccgcagaggaagggagaccccgggcgccgcagacccgaaagtgaacccccttcggagagatatctgccctcgacccccaggcctggacgagaggaggtggaatattaccagtcagaggcggaaggactcctggaatgccacaaatgcaaatacttgtgcactgggagagcctgctgccaaatgctggaggttctcctgaacttgctgatcctggcctgcagctctgtgtcttacagttccacagggggctacacgggcatcaccagcttggggggcatttactactatcagttcggaggggcttacagtggctttgatggtgctgacggggagaaggcccagcaactggatgtccagttctaccagctaaagctgcccatggtcactgtggcaatggcctgtagtggagccctcacagccctctgctgcctcttcgttgccatgggtgtcctgcgggtcccgtggcattgtccactgttgctggtgaccgaaggcttgttggacatgctcatcgcgggggggtacatcccggccttgtacttctacttccactacctctctgctgcctatggctctcctgtgtgtaaagagaggcaggcgctgtaccaaagcaaaggctacagcggtttcggctgcagtttccacggagcagatataggagctggaatctttgctgccctgggcattgtggtctttgccctgggggctgtcctggccataaagggctaccgaaaagttaggaagctaaaagagaagccagcagaaatgtttgaattttaagggtttctaaaacgctctgacagatgcaagtggtggtggaaggtagtctgagccactgcctttcccaagaatcccttgttgtggaagtttccagtgctggaaaagcagcgagccagcgttggtgtggtgggcggagctcccagtcgcatggagcggtgttcatggatgcaacagaccctggcttctggagtcctctgtgagtgagggaccaatcaaaattatttttcaaaaagcaaaaaaatggccggcctcggcggctcacacctgtaaccccagcactttgggaggctgaggtgggtggatcacttgaggtcaggagctcgagaccagcttggccaacatggtgagcccccgtctctactaaaatacaaaaaaattagccaggcgtggtggcgggcgcctgtaatcccagctacttgggaggctgaggcaggagaatcgcttgaatctgggaggcggagattgcagtgagccgagatcccgccactgcactccagcccaggtgacagagcgagactccatctcaaaaaaaaaaaaaagcaaaaaaactggaccccaagagccacaaggaaaaagcatgtactacaacagagtgcacctcttcattcagtaaagggaggtcaccaagagaatttgatgaaccttaccttcaaagttcctgggcacagtggctcacacctgtaatcccagagctttgggaggctgaggtaggaggattgcttgaacccaggagttcaagtttgcagtgcgctatgattgtcccactacactctagcctgagcaacagaccaagaccgtattgccaaaataccaaaaaaaaaaaaagttcatggagagccacatagacatgagaccacacttcagcctgaatttttctaaaacacagttgtctcaagcagattactccacacgtttttccacactgaactctccagtccttccacttccttaattctgcaaatggagggggtggggactcttgggaaactactcctgtaaaattgaagttggaggtaggcgtgggctgaggaaagaggaatcagattaattctctgggttgcaaagaggctattctgcaagccccttacagtggccctgaaagctcaataagtgttttgtacctcttgtaaatgtgccattgtgtgaagcattaaacccaacatctagaattcaggattcatccagaataaaaggatgtaaaatctttcccaacagaagagtgttacttttggtcagacaacttcatgggttcttactgcacattaaattatgacttatggaacattgcaatatattctcggtccttaagttatgacttatggaacattacaatatattctcggtccaagtgagtaagttctttgctttatgtgaatccaataaaaaatccaaagaattttaatttggagttgatgtcctctttacaatacatttataatattctcttaaatacagacaatttttcacatttaaaaggtgagttccatttgagtttagaaaaggaaatatatatatacatgcttgtatatgattggaaaatttcttgaagaataacatcagaaagtattaagttttgcttttgaagagaaggggacttttcatttatacatggcttgactgcacatgtattaattttagaaaaataaaaagtaaaaaagttga

SEQ ID NO: 229346 - DNA, 1206 bp, Artificial Sequence
  derived and/or modified sequence
atggaggaccccagcggcgcccgggagccccgggcccggccccgggagcgagaccctggtaggcgtccacaccccgaccagggtagaacccacgataggccccgggaccggccgggagaccctcgtcgcaagcgctcgagtgatggcaacaggcgtcgagacggcgaccgtgatccggagagagaccaggagcgggatgggaatcgagacaggaacagggacagggagcgcgagcgtgagagagagcgggaccccgaccgcgggcctcgaagggatacacatcgcgacgcgggaccaagagctggcgagcacggagtgtgggagaagccccggcagtccagaactcgtgatggcgcacggggcttgacttgggacgctgctgcaccaccaggcccggccccttgggaggcccctgagcccccacagcctcagcggaaaggagacccgggccgcaggcggcctgagagcgagcccccttccgaacggtatcttcctagcacgccacgcccagggagagaagaagtggagtactatcaaagcgaggccgaaggtctgcttgaatgtcacaaatgtaagtatttgtgtactggacgggcttgctgccagatgcttgaagtgctcctgaacctgctaatcctggcttgctcttcagtgtcctattcgtccacgggaggatacacggggatcacctcccttggagggatctattattatcagttcggaggagcgtattccggcttcgacggggccgacggtgagaaggcacagcaactggacgtacaattctaccaactgaagctgccaatggtgaccgtcgcgatggcgtgttcaggcgccttgacagccctgtgttgcttgtttgtggcaatgggcgttctgcgagtgccatggcactgtcctctcctgctcgttactgaagggttgcttgacatgttaattgccggcggatacattccagctttgtatttctactttcactacctgtccgccgcctacggctcacctgtgtgtaaagagaggcaggccctgtaccagagcaaggggtactctggatttgggtgctctttccatggagctgacatcggggctggtatatttgctgctcttggcattgttgtgttcgcactcggagccgtgctcgcaataaaaggatacagaaaagtacggaagttaaaggagaagccagctgaaatgtttgagttctag

SEQ ID NO: 229347 - DNA, 1206 bp, Artificial Sequence
  derived and/or modified sequence
atggaagacccctcaggcgcaagagagcccagggctcgacccagggaaagggaccctggtcgccgtccccatccggaccagggcaggactcatgaccgtcccagagatagacctggggaccccaggagaaaacggagctcagacggcaaccgacgacgcgatggcgatagggatcccgagagagaccaggagcgggatggcaacagggatagaaatcgagacagggagcgggagagagaaagagaacgggacccagacaggggaccaaggagagatacacaccgggacgctgggccacgcgcaggggaacatggggtgtgggaaaagcccagacagagccggacacgagatggagcacggggactgacttgggatgccgctgcacctcctggccctgccccttgggaagcccctgagccaccgcagccacagcgaaaaggtgaccctggtagacgaaggccagaatctgaaccgccttcggagcggtatctcccaagcacaccgagacccggaagggaggaagtggagtactaccagtcggaagctgagggactcctagagtgtcacaaatgtaagtacctttgcacaggacgagcctgttgtcagatgttggaagtgctactgaacctgctgattttggcatgctcttccgtgtcctattcaagcaccgggggatacacgggcattacttcattagggggaatttattactatcagtttggaggcgcttattctgggtttgacggcgcagatggagagaaggcacagcagctggacgtgcagttctaccagctcaagctccccatggtcacagtcgcaatggcatgtagtggcgcacttactgcactgtgttgtttgtttgtggctatgggtgtgcttcgcgtgccctggcattgccccctgctcttagtcaccgaagggttgcttgacatgttgatagcgggtgggtatatccctgcactgtacttttatttccattatctcagtgctgcatacggatcgcctgtatgtaaggagaggcaggctctttatcagagtaagggatactctggatttggttgtagctttcacggcgcagatattggggctgggatctttgcagctcttgggatagtggtgtttgccttaggagctgtgctggccattaaaggttaccgcaaggtcaggaaactgaaagagaagccagcagagatgttcgagttctag

SEQ ID NO: 229348 - DNA, 1206 bp, Artificial Sequence
  derived and/or modified sequence
atggaggaccccagcggcgccagagagcccagagccagacccagagagagagaccccggcagaagaccccaccccgaccagggcagaacccacgacagacccagagacagacccggcgaccccagaagaaagagaagcagcgacggcaacagaagaagagacggcgacagagaccccgagagagaccaggagagagacggcaacagagacagaaacagagacagagagagagagagagagagagagagagaccccgacagaggccccagaagagacacccacagagacgccggccccagagccggcgagcacggcgtgtgggagaagcccagacagagcagaaccagagacggcgccagaggcctgacctgggacgccgccgccccccccggccccgccccctgggaggcccccgagcccccccagccccagagaaagggcgaccccggcagaagaagacccgagagcgagccccccagcgagagatacctgcccagcacccccagacccggcagagaggaggtggagtactaccagagcgaggccgagggcctgctggagtgccacaagtgcaagtacctgtgcaccggcagagcctgctgccagatgctggaggtgctgctgaacctgctgatcctggcctgcagcagcgtgagctacagcagcaccggcggctacaccggcatcaccagcctgggcggcatctactactaccagttcggcggcgcctacagcggcttcgacggcgccgacggcgagaaggcccagcagctggacgtgcagttctaccagctgaagctgcccatggtgaccgtggccatggcctgcagcggcgccctgaccgccctgtgctgcctgttcgtggccatgggcgtgctgagagtgccctggcactgccccctgctgctggtgaccgagggcctgctggacatgctgatcgccggcggctacatccccgccctgtacttctacttccactacctgagcgccgcctacggcagccccgtgtgcaaggagagacaggccctgtaccagagcaagggctacagcggcttcggctgcagcttccacggcgccgacatcggcgccggcatcttcgccgccctgggcatcgtggtgttcgccctgggcgccgtgctggccatcaagggctacagaaaggtgagaaagctgaaggagaagcccgccgagatgttcgagttctag

SEQ ID NO: 229349 - protein, 541 aa, Artificial Sequence
  derived and/or modified sequence
MGSQEVLGHAARLASSGLLLQVLFRLITFVLNAFILRFLSKEIVGVVNVRLTLLYSTTLFLAREAFRRACLSGGTQRDWSQTLNLLWLTVPLGVFWSLFLGWIWLQLLEVPDPNVVPHYATGVVLFGLSAVVELLGEPFWVLAQAHMFVKLKVIAESLSVILKSVLTAFLVLWLPHWGLYIFSLAQLFYTTVLVLCYVIYFTKLLGSPESTKLQTLPVSRITDLLPNITRNGAFINWKEAKLTWSFFKQSFLKQILTEGERYVMTFLNVLNFGDQGVYDIVNNLGSLVARLIFQPIEESFYIFFAKVLERGKDATLQKQEDVAVAAAVLESLLKLALLAGLTITVFGFAYSQLALDIYGGTMLSSGSGPVLLRSYCLYVLLLAINGVTECFTFAAMSKEEVDRYNFVMLALSSSFLVLSYLLTRWCGSVGFILANCFNMGIRITQSLCFIHRYYRRSPHRPLAGLHLSPVLLGTFALSGGVTAVSEVFLCCEQGWPARLAHIAVGAFCLGATLGTAFLTETKLIHFLRTQLGVPRRTDKMT

SEQ ID NO: 229350 - protein, 502 aa, Artificial Sequence
  derived and/or modified sequence
MGSQEVLGHAARLASSGLLLQVLFRLITFVLNAFILRFLSKEIVGVVNVRVPLGVFWSLFLGWIWLQLLEVPDPNVVPHYATGVVLFGLSAVVELLGEPFWVLAQAHMFVKLKVIAESLSVILKSVLTAFLVLWLPHWGLYIFSLAQLFYTTVLVLCYVIYFTKLLGSPESTKLQTLPVSRITDLLPNITRNGAFINWKEAKLTWSFFKQSFLKQILTEGERYVMTFLNVLNFGDQGVYDIVNNLGSLVARLIFQPIEESFYIFFAKVLERGKDATLQKQEDVAVAAAVLESLLKLALLAGLTITVFGFAYSQLALDIYGGTMLSSGSGPVLLRSYCLYVLLLAINGVTECFTFAAMSKEEVDRYNFVMLALSSSFLVLSYLLTRWCGSVGFILANCFNMGIRITQSLCFIHRYYRRSPHRPLAGLHLSPVLLGTFALSGGVTAVSEVFLCCEQGWPARLAHIAVGAFCLGATLGTAFLTETKLIHFLRTQLGVPRRTDKMT

SEQ ID NO: 229351 - DNA, 1626 bp, Artificial Sequence
  derived and/or modified sequence
atggggagccaggaggtgttggggcacgctgccagactcgccagcagcggactcctgttgcaagtgttgttccggctgattacatttgtgctgaatgcctttatcctgcgttttttgtccaaagaaatcgtgggggtggtgaatgtccggctcactctcctgtactcgaccacactgtttttggcaagggaggcattccgccgtgcttgcttgagtgggggaacacagagagactggtcacagactttgaacctgctgtggctgactgtgccacttggcgtgttttggtcactgttccttggctggatctggttacaattgctggaagtcccagatccaaatgtggtcccacactatgcgacgggggtagtactgtttggcttgagtgccgtagtcgagctgttgggcgaacccttttgggtgctcgcacaggcccacatgttcgtgaaactgaaagtcatagcggagtcactaagcgtcatcctgaagagtgtgcttacagcctttctggtgttatggcttccgcattggggtctgtacatcttttcgctggcacagctgttctacacaactgtgctggtactttgctatgtcatttacttcactaagctgcttggatctccagaatccacgaagctgcagacgttaccggtgagccgcatcacagacctgctccctaacattacacgtaacggtgcgtttatcaactggaaagaggctaaactgacatggagtttttttaaacagtcctttttaaagcagattctcaccgagggtgaacggtatgtgatgacatttctgaatgtgctgaacttcggagaccagggtgtttacgacattgtcaataatttaggctccctggtggcccgcctgatctttcaaccgatcgaagaatccttctacattttcttcgctaaagttctggagaggggaaaagacgctactttgcagaagcaggaggatgtcgccgtggcagccgctgtcttggagtcactccttaaacttgccctcctcgccgggctcaccattacagtatttggttttgcttactcacaactcgctctcgacatttacggtgggacaatgcttagttccggctccgggcccgtgctgctgagatcatattgcctttacgtcctcctccttgctatcaacggcgtgaccgaatgctttacatttgcagcaatgtcaaaagaggaggtggaccgttataattttgtgatgctggcattgagctccagcttcctggtgcttagctatttgctgacaaggtggtgtgggtccgtggggttcatactggctaattgtttcaacatggggattaggatcacccagtctctgtgttttatccatcgttactaccgtaggtctccccacaggcccctagccggacttcatctgtcccccgtgctgcttgggaccttcgcactgagtggcggcgtgacagctgtaagcgaagtctttctttgctgtgagcaaggctggcctgcgaggcttgctcacatcgccgtgggagctttttgcctgggagccactctggggaccgcattcctcacggagacaaagctcattcacttcttgcgcacccagctgggcgtgccacgacggactgataagatgacttag

SEQ ID NO: 229352 - DNA, 1509 bp, Artificial Sequence
  derived and/or modified sequence
atggggtcccaggaagtgctgggccacgccgccagactcgccagtagtggattacttctgcaggtgcttttcagattgatcacttttgtcctgaacgcatttatcctccgtttcttgtcaaaggaaatcgtcggcgtggtaaacgttcgggtgccgttgggcgtcttctggtccctgttcttgggatggatatggctacaactgttggaggtgccagatcccaacgtagttccgcactatgcaacaggcgttgtattattcggtttgtctgccgtcgtcgaactcctgggagaacccttctgggtgctcgcgcaggctcatatgttcgtcaagctaaaggtcatcgcagaatcacttagcgtgatactcaagagtgtgttgacagccttcttagtgctgtggctgcctcattggggcctttacattttctccttagcacagctgttctacacaaccgttctggtgctgtgctacgtcatttattttaccaaactgctcggaagtccggaatctactaagctacagactctgcctgttagccggattacagacctcctgcctaatattacccgtaacggcgcgtttataaactggaaggaggcaaagttaacttggtcattctttaagcagagcttcctgaagcagatcctcactgaaggcgagcggtatgtgatgacatttctgaatgtgttaaacttcggcgatcaaggcgtctatgacattgtaaataacctgggaagcctggtcgcacgcctcattttccaacccattgaagagtctttttatattttctttgccaaagtccttgagagagggaaggatgctacattgcaaaagcaggaagacgtggcggtcgccgccgctgttcttgagagcttgctgaaattggcacttttagcaggtctcactatcaccgtgtttgggttcgcctacagccagctggcgctggatatttatggcggaacaatgctgtcctctggtagtggccccgtacttctgaggtcctattgtctctatgtcctgctcctggccataaatggtgtgactgagtgtttcacattcgcagccatgtcaaaagaggaggtcgatcggtacaatttcgtaatgttagctctatccagctcattcctggtcctgtcatacctgctcacaagatggtgcgggtcagtaggatttattctggcaaactgctttaatatgggcatccggataacgcagagcctgtgctttattcatagatattataggaggtcccctcatcgtccactcgctggcctccacctttcccctgtgctgcttgggacctttgctttatctggaggagtgacagcggtttctgaggtttttctgtgctgcgaacaagggtggccagccagactagcgcacattgctgtcggcgcattctgtttgggtgccactctgggcactgctttcctcaccgaaactaagctaatccacttcctgagaacccagctgggcgtccccagacgcaccgataaaatgacctag

SEQ ID NO: 229353 - DNA, 1626 bp, Artificial Sequence
  derived and/or modified sequence
atgggcagccaggaggtgctgggccacgccgcccggctggccagcagcggcctgctgctgcaggtgctcttccgcctcatcacctttgtgctgaatgccttcatcctgcgcttcctgagcaaggagatcgtgggcgtggtgaatgtgcggctgaccctgctgtacagcaccaccctcttcctggcccgggaggccttcagaagagcctgcctgagcggcggcacccagagggactggagccagaccctgaacctgctgtggctgactgtgcccctgggcgtcttctggagcctcttcctgggctggatctggctgcagctgctggaggtgcctgaccccaacgtggtgccccactacgccactggagtggtgctgtttggcctgtctgctgtggtggagctgctgggggagcccttctgggtgctggcccaggcccacatgtttgtgaagctgaaggtgattgctgagagcctgagcgtcatcctgaagtctgtgctgacagccttcctggtgctgtggctgccccactggggcctgtacatcttcagcctggcccagctgttctacaccaccgtgctggtgctgtgctacgtgatctacttcaccaagctgctgggcagccctgagagcaccaagctgcagaccctgcctgtgagccgcatcacagacctgctgcccaacatcaccagaaatggagccttcatcaactggaaggaggccaagctgacctggagcttcttcaagcagagcttcctgaagcagatcctgacagaaggagagcgctacgtgatgaccttcctgaatgtgctgaactttggagaccagggcgtgtatgacatcgtgaacaacctgggcagcctggtggcccggctcatcttccagcccatcgaggagagcttctacatcttctttgccaaggtgctggagcggggcaaggatgccaccctgcagaagcaggaggatgtggccgtggccgctgctgtgctggagagcctgctgaagctggccctgctggccggcctgaccatcaccgtgtttggatttgcctacagccagctggccctggacatctacggcggcaccatgctgagcagcggcagcggccctgtgctgctgcggagctactgcctgtatgtgctgctgctggccatcaatggagtgacagagtgcttcacctttgctgccatgagcaaggaggaggtggaccgctacaactttgtgatgctggccctgagcagcagcttcctggtgctgagctacctgctgacccgctggtgtggctctgtgggcttcatcctggccaactgcttcaacatgggcatccgcatcacccagagcctgtgcttcatccaccgctactacagaagaagcccccaccggcccctggccggcctgcacctgagccctgtgctgctgggcacctttgccctgagcggcggcgtgacagctgtgtctgaggtgttcctgtgctgtgagcagggctggccagcccggctggcccacatcgctgtgggcgccttctgcctgggcgccaccctgggcacagccttcctgacagagaccaagctgatccacttcctgcggacccagctgggcgtgcccaggagaacagacaagatgacctag

SEQ ID NO: 229354 - DNA, 1509 bp, Artificial Sequence
  derived and/or modified sequence
atgggcagccaggaggtgctgggccacgccgcccggctggccagcagcggcctgctgctgcaggtgctcttccgcctcatcacctttgtgctgaatgccttcatcctgcgcttcctgagcaaggagatcgtgggcgtggtgaatgtgcgggtgcccctgggcgtcttctggagcctcttcctgggctggatctggctgcagctgctggaggtgcctgaccccaacgtggtgccccactacgccaccggggtggtgctgtttggcctgtctgctgtggtggagctgctgggggagcccttctgggtgctggcccaggcccacatgtttgtgaagctgaaggtgattgctgagagcctgagcgtcatcctgaagtctgtgctgacagccttcctggtgctgtggctgccccactggggcctgtacatcttcagcctggcccagctgttctacaccaccgtgctggtgctgtgctacgtgatctacttcaccaagctgctgggcagccctgagagcaccaagctgcagaccctgcctgtgagccgcatcacagacctgctgcccaacatcaccagaaatggagccttcatcaactggaaggaggccaagctgacctggagcttcttcaagcagagcttcctgaagcagatcctgacagaaggagagagatatgtgatgaccttcctgaatgtgctgaactttggagaccagggcgtgtatgacatcgtgaacaacctgggcagcctggtggcccggctcatcttccagcccatcgaggagagcttctacatcttctttgccaaggtgctggagcggggcaaggatgccaccctgcagaagcaggaggatgtggccgtggccgctgctgtgctggagagcctgctgaagctggccctgctggccggcctgaccatcaccgtgtttggatttgcctacagccagctggccctggacatctatggaggcaccatgctgagcagcggcagcggccctgtgctgctgcggagctactgcctgtatgtgctgctgctggccatcaacggggtgacagagtgcttcacctttgctgccatgagcaaggaggaggtggaccgctacaactttgtgatgctggccctgagcagcagcttcctggtgctgagctacctgctgacccgctggtgtggctctgtgggcttcatcctggccaactgcttcaacatgggcatccgcatcacccagagcctgtgcttcatccaccgctactaccgccgcagcccccaccggcccctggccggcctgcacctgagccctgtgctgctgggcacctttgccctgtctggaggagtgacagctgtgtctgaggtgttcctgtgctgtgagcagggctggccagcccggctggcccacatcgctgtgggcgccttctgcctgggcgccaccctgggcacagccttcctgacagagaccaagctgatccacttcctgcggacccagctgggcgtgcccaggagaacagacaagatgacctag

SEQ ID NO: 229355 - DNA, 1626 bp, Artificial Sequence
  derived and/or modified sequence
atgggcagccaggaggtgctgggccacgccgcccggctggccagcagcgggcttttgctccaggtccttttccgcctcatcacttttgtcttaaatgcattcatcctgcggtttctgtccaaggaaatcgtcggcgtggtcaatgtgcgccttaccctgctatatagcaccactttgttcctagctagagaagcctttagacgggcttgtctgtcaggcggaacgcagcgcgattggtcacagaccctcaatctgctgtggctgacggtgcccctgggagtgttctggtcactttttctggggtggatctggctgcagctcctggaggtacccgacccaaatgtagtgccacattatgccacaggcgtcgtgctgtttgggctgagcgcggtcgtggagctgctcggggaacctttctgggtcttggcgcaggcacatatgttcgtcaagctgaaggtcattgccgagtcgctctccgtcattctaaaatcagtgttaactgctttccttgtgctttggctgccccattgggggctgtacatcttttctcttgctcagttgttctataccacagtgttggtgctttgttatgtaatctacttcactaaactattggggagtcctgagagtacaaagctgcagaccctacccgtcagcagaatcaccgatttattgcccaacattacaaggaacggggcgttcatcaactggaaggaagctaagctgacgtggagttttttcaaacagagctttttgaagcagatcctgacagaaggagaaagatacgtcatgacatttcttaatgtcctgaattttggagaccagggcgtctacgatattgtgaacaatctggggtcgctggttgctcggctgatctttcaacccatcgaagaaagtttttatatcttcttcgcaaaagtacttgaacggggaaaggatgctaccctgcaaaagcaagaagacgtggccgtcgcagctgcggtcctggaatcgttgctgaaactggcactgctggcaggcttgacaatcaccgttttcgggttcgcctatagccagttggcgctcgatatatatggagggactatgctgagctccggaagcggaccagtcctgcttagatcatattgcttgtacgtgctgctcctggctattaatggcgtgaccgaatgcttcacgtttgctgccatgtcaaaagaggaagttgatcgatataatttcgtgatgcttgcacttagttcttccttcctggtactcagttatctattgacaagatggtgcggtagtgtggggtttattctcgctaattgtttcaacatgggcatcagaatcacccagtccttgtgcttcattcatcgatattatagaagatccccgcaccggccattggccgggctgcacctcagcccggtcctgctggggacgttcgctttgtctggtggagtgacagcagtctccgaagtgttcctctgctgcgagcagggatggccggccaggcttgctcacatcgctgtgggggcattctgcctcggcgcaacactgggtacggccttcttgacagagaccaaattgattcacttcctgaggactcaattgggtgtccctcgtagaacagataaaatgacctag

SEQ ID NO: 229356 - DNA, 1509 bp, Artificial Sequence
  derived and/or modified sequence
atgggcagccaggaggtgctgggccacgccgcccggctggccagcagcgggcttctcctccaggttttattcagattaatcacctttgtgctgaacgcctttattctgcgtttcctgagcaaggagattgtgggcgtggtgaacgtgcgggttccactgggagtgttctggagtctgttcctggggtggatatggctgcaattactggaggtgcccgaccctaatgtggtcccgcactatgccaccggagtggttttattcggcttaagcgcagtggtggagctgctgggcgagcctttttgggttctggctcaggcacacatgttcgtgaaacttaaggttattgctgaatctctcagtgtgatactcaaaagcgtacttactgcttttctagtcctatggctgccacattgggggctctatattttttccctggcccagctcttctatactacagtcctggtcctttgttacgtgatctactttactaagctgctgggcagccccgagagcaccaaactacaaaccctgccggtttcacggatcactgacctgcttcctaatattacaaggaatggggctttcatcaattggaaagaagccaagctgacatggtcctttttcaaacagagcttcctcaagcagatccttacagaaggcgagcgatacgtgatgacgtttctaaacgtgttaaacttcggggatcagggagtctacgacattgtgaacaatctgggtagtttggtagcacggctgattttccaaccgatcgaggaaagtttctacatcttctttgccaaagtgctggagcggggcaaagatgcgactcttcaaaagcaggaggatgtcgccgttgcagccgccgtcctggagtctctgctaaagctggctcttctcgctgggcttacaattacagtattcggcttcgcatactcccagctcgcgctggatatttatgggggaacaatgttgtcgtcgggctcaggccccgtgcttctgaggtcatactgcctgtacgtgctgctgttggcaatcaacggcgttacagaatgctttacgttcgctgccatgagcaaggaagaagtcgatcgttacaacttcgtcatgctagctctgtcctcctcttttctggtgctatcatacctcctgactaggtggtgtggctctgtcggtttcatacttgccaattgctttaacatggggattcgcattactcagagcctctgtttcatccaccgctattatagaaggtcgcctcatagacctcttgcggggctccacttaagtcctgtcctgttagggacatttgccctatcgggcggcgtcaccgctgtgagtgaagtgtttctgtgctgtgaacagggctggcctgcacgcttagctcacatcgctgtgggcgccttctgcctgggcgcaactctcggaactgctttccttactgaaacaaaactgatccatttcctgaggacccaacttggagtgccgcgtcggacagacaagatgacgtag

SEQ ID NO: 229357 - DNA, 1626 bp, Artificial Sequence
  derived and/or modified sequence
atggggtcccaggaggtgttgggccatgccgctagattggcctccagtgggctgcttctgcaggtgctgttcaggctcatcactttcgtgctcaatgcattcatcttgcgattccttagcaaggaaattgtgggcgtggtaaatgtaaggcttactcttctgtacagcaccactctgttcctcgccagagaagcctttcgcagggcttgtctgagtggtggcacacaaagggattggagccagaccttaaacctgctttggctcactgtgccgcttggggttttttggtccctctttctcggttggatttggctgcagctgcttgaggtgccagatccaaatgtggtgcctcattacgccaccggggtggtgctattcggcctttctgctgtggtggagctcctgggagagccattctgggtgcttgcccaggcccatatgttcgtgaaactgaaagtcatcgctgagtcattgtccgttatactgaaatcggtgttgaccgcattcttggtcctgtggctgccccattggggtctctatattttttctctggctcagctattctataccaccgtgcttgtcctgtgttacgttatctacttcaccaagctgctgggatcacctgagtccacaaagctccagactctgcctgtgagccgaatcacagacctgcttcctaatatcacaaggaacggagcttttatcaattggaaggaggccaaattgacctggtctttcttcaagcagtctttcctaaaacagattttgacagagggtgagcgctacgtgatgactttcttgaatgtcctcaacttcggggatcagggggtttacgacatcgttaataatctgggatcactggttgcccgacttatctttcaacctattgaagagtctttctatatcttctttgccaaagtgctggagcgcggaaaagatgctactcttcagaagcaagaagatgtggctgtggcagcagccgttctcgagtccctgctcaagttggccctcctcgccggactcacaattaccgtgtttgggttcgcctactcccaacttgccctggacatttatggcggtacaatgcttagcagtggttctgggccagtgcttctcagaagttattgcctctacgtacttctcctcgctatcaacggcgtgacagaatgtttcactttcgccgctatgtcaaaagaggaggtagataggtataatttcgtgatgctggccctgtcctcatcatttcttgtgctctcataccttttgacacggtggtgcggatctgttgggtttatcctggccaattgcttcaacatgggaattaggatcacccagagcctgtgtttcattcaccgctactacagaaggtcaccacacagaccactcgccggactgcatctgtctcccgtgcttctgggcactttcgccctgtcgggaggcgtcactgccgttagcgaagtcttcctttgctgcgagcaggggtggccagctcggctggcccacattgcggtgggggcattttgtttgggtgccactctcggcactgccttcttgaccgaaaccaagcttattcatttcttgaggactcagctgggcgtgccacgcagaacagataaaatgacatag

SEQ ID NO: 229358 - DNA, 1509 bp, Artificial Sequence
  derived and/or modified sequence
atgggatcccaggaggttctcggccatgcagcacgacttgcatcaagcggtctgctgctgcaggttctatttcggctcatcactttcgtgttgaatgcgttcattcttcgcttcctcagcaaggagattgtgggcgttgtcaacgtgagggttccccttggcgtgttttggtccctttttctcggatggatctggctccagctccttgaggttcccgaccccaacgttgtgcctcactacgcaactggcgtcgttcttttcggactctcagctgtggtggagttattgggcgagccgttttgggtcctggcacaagcacatatgttcgtgaagctcaaggtcattgctgagtcactgagtgtgatccttaagagcgtgttgaccgctttcctcgtgctgtggttgcctcactggggtctgtatatatttagtctggcccagcttttttacactacagtgctcgttttatgctacgtgatctacttcacaaaattactcgggagtccagagtccaccaagctccagaccctgcctgtctccaggattacggatctcctgcctaatatcacgagaaatggagccttcataaattggaaggaggcaaagctcacctggagcttcttcaagcagagctttctgaagcagatccttaccgaaggggaaaggtacgtcatgacctttcttaatgtgttgaatttcggtgatcagggcgtgtacgacattgtcaataatctcggtagcctggtggcgcgactgattttccagccaattgaagagagtttttatattttttttgccaaggttctggaaagggggaaagacgctacgctgcagaaacaggaggatgtcgccgtggccgcagccgtcctggaaagtctcctgaaactcgcactgttggcaggcctgaccatcacggttttcggctttgcttattcccaactggcactcgacatttacgggggaactatgctcagcagtggctccggtccagtcctgctccgttcctactgcctgtatgtattgctcctggctattaatggagtgaccgaatgcttcaccttcgctgcaatgagcaaggaggaggtcgatcgctacaacttcgtgatgctggctctgtcttcgagcttcttggttttaagctatctcctgacccgttggtgcggaagtgttggctttatactggctaactgtttcaatatgggaatacgcatcacacaatctctgtgttttattcataggtactaccgcaggagcccacaccgtccgctggctggtctgcatctctccccagtgctgctgggtacatttgctctttccggtggagtgacagcagtgtctgaagtgtttctgtgctgcgagcagggatggcccgcacgcctggcccacattgccgtcggggctttttgtctgggtgccaccctcggtaccgcttttttgaccgagactaaactcatccattttctgcgtacccagctgggtgtacccaggcgtactgacaaaatgacttag

SEQ ID NO: 229359 - DNA, 5108 bp, Artificial Sequence
  derived and/or modified sequence
cttatcgcgactaaacggagtggcggcggcatttcctggtgtctgagcctggcgcggaggctatgggcagccaggaggtgctgggccacgcggcccggctggcctcctccggtctcctcctgcaggtgttgtttcggttgatcacctttgtcttgaatgcatttattcttcgcttcctgtcaaaggaaatcgttggcgtagtaaatgtaagactaacgctgctttactcaaccaccctcttcctggccagagaggccttccgcagagcatgtctcagtgggggcacccagcgagactggagccagaccctcaacctgctgtggctaacagtccccctgggtgtgttttggtccttattcctgggctggatctggttgcagctgcttgaagtgcctgatcctaatgttgtccctcactatgcaactggagtggtgctgtttggtctctcggcagtggtggagcttctaggagagcccttttgggtcttggcacaagcacatatgtttgtgaagctcaaggtgattgcagagagcctgtcggtaattcttaagagcgttctgacagcttttctcgtgctgtggttgcctcactggggattgtacattttctctttggcccagcttttctataccacagttctggtgctctgctatgttatttatttcacaaagttactgggttccccagaatcaaccaagcttcaaactcttcctgtctccagaataacagatctgttacccaatattacaagaaatggagcgtttataaactggaaagaggctaaactgacttggagttttttcaaacagtctttcttgaaacagattttgacagaaggcgagcgatatgtgatgacatttttgaatgtattgaactttggtgatcagggtgtgtatgatatagtgaataatcttggctcccttgtggccagattaattttccagccaatagaggaaagtttttatatattttttgctaaggtgctggagaggggaaaggatgccacacttcagaagcaggaggacgttgctgtggctgctgcagtcttggagtccctgctcaagctggccctgctggccggcctgaccatcactgtttttggctttgcctattctcagctggctctggatatctacggagggaccatgcttagctcaggatccggtcctgttttgctgcgttcctactgtctctatgttctcctgcttgccatcaatggagtgacagagtgtttcacatttgctgccatgagcaaagaggaggtcgacaggtacaattttgtgatgctggccctgtcctcctcattcctggtgttatcctatctcttgacccgttggtgtggcagcgtgggcttcatcttggccaactgctttaacatgggcattcggatcacgcagagcctttgcttcatccaccgctactaccgaaggagcccccacaggcccctggctggcctgcacctatcgccagtcctgctcgggacatttgccctcagtggtggggttactgctgtttcggaggtattcctctgctgtgagcagggctggccagccagactggcacacattgctgtgggggccttctgtctgggagcaactctcgggacagcattcctcacagagaccaagctgatccatttcctcaggactcagttaggtgtgcccagacgcactgacaaaatgacatgacttcagggaagcctggacacccgaggcacctggaccagctatgggtagttctgtgggtggaacacattctgtgtaagagccccactgagggctctgcagcggagtgacagcaaccccagagatgaggcaccagagagtgccactgcatgagacacctgtgaccattcgaagtctgaaatgcggggggggagtttcatttttaagtgaagaccaaaagccctttaaaaataatagttttttatcattttatagtaatcagcattttctcttttactaatatactcattccttttgcgtatgattggcctttggagctacatgctccaacaaactatatcttaattgttaactgttaataattatctggcccagaaaaagagatgcagtgattttacccttcacaggaatattgaacttcttctgtaaaagagagagagaaacctctctctctcatgcaccacatggaaacagagtgtggccctgaagttgtggctttctttgtgtcaaaactgtggtctgagtttttagagaaggaaaaatgctactcagtgagaaatccaagaaatgaaaccaggaaggttttcagatcacatttcccagagtgagttcgggagaatcttgcctgtcgtgatcacactgttccccgccgccccaggtcagcacatacttgacccagagtgggctctcaggatttgttgattgaagggtgggtgaaagctggctggagactcctggcctggccacctgcaagaggcggactttgaagaaaactgtgatccagttgagccactttgtccctgaggggaatgctgctttgcagctttctgtaacttctcacatgggaattgcactggtgacagataaggtttaacagatgtacttttttatcctcagaataagacaaggcaaactctatatggctagtattactgagtcaggtccctcccgttgacccattaattccagcattgatcaatacaaccaaattccagccccaggacaagagtggcaggcatgggggcctggtactccaggctacagtgtgagcccaggtgttctgcaccttgcagcctgcacactgcaggtgaaatcatgagcagtgttctggagtgtgaagtgtttttatttttttgttaatgtattaattccttttagatattaacccccctcagaactatatgcacaaactataacttggatgttaataatcctgtcactcagtgccccaaaccttctgtgtctacacctagagagagggccagtaagggcaactcctatcatgcattaaaatgcatgtatttaaatctgcttgcccagagccagtacccaggggctaaggattaagacctgtcagtacaccaagactggggcccagtcacctggcaggtttttatctactcagagggagaatgctttgcactaagtgggagaaaagcagctaaatgcaaggtgtcctgagcaattagaggacctccaaagcatggcctcagtcatgccttcatcgggcaaggtcaggccagctcagaaaaatggatggtcccatagggtcaagtggagcacacacggaaggcagtcctccttccctcccatgtcctttctctgtccctggcatccacagaaagggaccttcagtcctcatgagctgcttctctgcagctgctgatcaccctcccggaaccctgcacctatcccgtgcccacctgaccccagactcaagcatgatcctcattctacctgcctcggaatcacctggattgcaagtcagaacatggcttcccaggacccactccaggccttcagggtctgtgtctcccaggaggagggctctgagattggcttttctggcaagcccacgtggctttgatgccaccaaggttggcatgccccattgtcttccttcgtgacaggcccaggaccatcatgctcatgctcacagtgcctgttctctgctccaggaacagagctgctgctctacaagcagccttgtgactccggggtctctgggagcaggactccccaggcttgtgctctctcagcttgagagaggctctatgtctgaaggcagtgctcactctctcatccctcccctgctgttcgcccagtgctgctgtcagggccagctcctcttgaaagacagccagccgcaaaggcagcccagggcttcttccggtgtcctgcttccctgtatctagggagagttgtacatgtggctgcgtgttttcccaggactagccctgccgcctgggctgtcagcactttggcagcaggtcctctgtggttctctgcctctggtgcctccctaaagctcagctggacctgaccaggcctctggcatttcccctgctggaccccctagagccacagctgtgcctcagggagcttgcatacatgtgggccagcctgcctcactttacccaagtggatttggggagcagaaatcatacttttggctttcaataccacttatagtgaggctacttctccatggaaacaagtctctgaggcacaacctttatgaaaggaaggagcattcgttggtgagaagaacagtatcgctgacttcctgtgctcctctggccacaggtaactgttggtcacttcagatttggcttggggtctctcagtgaggagctgctgctgtgctgtttaatgcttacctgatggcaacttctggctctggaaccgctactctgccctgttcccagccacttcccaacctgattcaagcagggcccctccttcctcctgtctttatttatttatttattgagacagagtctcactctgtcgcccaggctggagtgcagtagcgcgatctcggctcactgcgagctctgcctcctgggttcaagcgattctcttgcctcagcctcctgagtagctggggctacaggcgcctgccaccacacccggctaatttttgtatttttagtagagacagggtttcaccatattggccaggctggtcttgaactcctgaccttgtgatccgcccgcctcagcctcccaaagtgctgggattacaggcgtgagccaccgctcctggcctattcttttcttttcagagacaaggtctcactctctcctctcgcccaggctggagtgcagtggtgtcatcatagctcattgcagcctcaaactcctgggctcaagcaatcctcccacctcagcctcctgagtagctgggatcacaggtgtgtgctacctcacccagctaatttctaatttttttttgtagagactggatctcactgttgccttgaactcctgggctcaagtgatcctcctgcctcagcctcccaaagtgctgggattccagaccagccattttttttccttaatcatgcattcctgttgctagtttcacatcagtcccctggtttaataagaaataaaatattttcttcacacttttgaaaa

SEQ ID NO: 229360 - DNA, 1800 bp, Artificial Sequence
  derived and/or modified sequence
actaaacggagtggcggcggcatttcctggtgtctgagcctggcgcggaggctatgggcagccaggaggtgctgggccacgcggcccggctggcctcctccggtctcctcctgcaggtgttgtttcggttgatcacctttgtcttgaatgcatttattcttcgcttcctgtcaaaggaaatcgttggcgtagtaaatgtaagagtccccctgggtgtgttttggtccttattcctgggctggatctggttgcagctgcttgaagtgcctgatcctaatgttgtccctcactatgcaactggagtggtgctgtttggtctctcggcagtggtggagcttctaggagagcccttttgggtcttggcacaagcacatatgtttgtgaagctcaaggtgattgcagagagcctgtcggtaattcttaagagcgttctgacagcttttctcgtgctgtggttgcctcactggggattgtacattttctctttggcccagcttttctataccacagttctggtgctctgctatgttatttatttcacaaagttactgggttccccagaatcaaccaagcttcaaactcttcctgtctccagaataacagatctgttacccaatattacaagaaatggagcgtttataaactggaaagaggctaaactgacttggagttttttcaaacagtctttcttgaaacagattttgacagaaggcgagcgatatgtgatgacatttttgaatgtattgaactttggtgatcagggtgtgtatgatatagtgaataatcttggctcccttgtggccagattaattttccagccaatagaggaaagtttttatatattttttgctaaggtgctggagaggggaaaggatgccacacttcagaagcaggaggacgttgctgtggctgctgcagtcttggagtccctgctcaagctggccctgctggccggcctgaccatcactgtttttggctttgcctattctcagctggctctggatatctacggagggaccatgcttagctcaggatccggtcctgttttgctgcgttcctactgtctctatgttctcctgcttgccatcaatggagtgacagagtgtttcacatttgctgccatgagcaaagaggaggtcgacaggtacaattttgtgatgctggccctgtcctcctcattcctggtgttatcctatctcttgacccgttggtgtggcagcgtgggcttcatcttggccaactgctttaacatgggcattcggatcacgcagagcctttgcttcatccaccgctactaccgaaggagcccccacaggcccctggctggcctgcacctatcgccagtcctgctcgggacatttgccctcagtggtggggttactgctgtttcggaggtattcctctgctgtgagcagggctggccagccagactggcacacattgctgtgggggccttctgtctgggagcaactctcgggacagcattcctcacagagaccaagctgatccatttcctcaggactcagttaggtgtgcccagacgcactgacaaaatgacatgacttcagggaagcctggacacccgaggcacctggaccagctatgggtagttctgtgggtggaacacattctgtgtaagagccccactgagggctctgcagcggagtgacagcaaccccagagatgaggcaccagagagtgccactgcatgagacacctgtgaccattcgaagtctgaaatgcggggggggagtttcatttttaagtgaagaccaaaagccctttaaaaataatagtttt

SEQ ID NO: 229361 - DNA, 1626 bp, Artificial Sequence
  derived and/or modified sequence
atgggcagccaggaggtgctgggccacgccgccagactggccagcagcggcctgctgctgcaggtgctgttcagactgatcaccttcgtgctgaacgccttcatcctgagattcctgagcaaggagatcgtgggcgtggtgaacgtgagactgaccctgctgtacagcaccaccctgttcctggccagagaggccttcagaagagcctgcctgagcggcggcacccagagagactggagccagaccctgaacctgctgtggctgaccgtgcccctgggcgtgttctggagcctgttcctgggctggatctggctgcagctgctggaggtgcccgaccccaacgtggtgccccactacgccaccggcgtggtgctgttcggcctgagcgccgtggtggagctgctgggcgagcccttctgggtgctggcccaggcccacatgttcgtgaagctgaaggtgatcgccgagagcctgagcgtgatcctgaagagcgtgctgaccgccttcctggtgctgtggctgccccactggggcctgtacatcttcagcctggcccagctgttctacaccaccgtgctggtgctgtgctacgtgatctacttcaccaagctgctgggcagccccgagagcaccaagctgcagaccctgcccgtgagcagaatcaccgacctgctgcccaacatcaccagaaacggcgccttcatcaactggaaggaggccaagctgacctggagcttcttcaagcagagcttcctgaagcagatcctgaccgagggcgagagatacgtgatgaccttcctgaacgtgctgaacttcggcgaccagggcgtgtacgacatcgtgaacaacctgggcagcctggtggccagactgatcttccagcccatcgaggagagcttctacatcttcttcgccaaggtgctggagagaggcaaggacgccaccctgcagaagcaggaggacgtggccgtggccgccgccgtgctggagagcctgctgaagctggccctgctggccggcctgaccatcaccgtgttcggcttcgcctacagccagctggccctggacatctacggcggcaccatgctgagcagcggcagcggccccgtgctgctgagaagctactgcctgtacgtgctgctgctggccatcaacggcgtgaccgagtgcttcaccttcgccgccatgagcaaggaggaggtggacagatacaacttcgtgatgctggccctgagcagcagcttcctggtgctgagctacctgctgaccagatggtgcggcagcgtgggcttcatcctggccaactgcttcaacatgggcatcagaatcacccagagcctgtgcttcatccacagatactacagaagaagcccccacagacccctggccggcctgcacctgagccccgtgctgctgggcaccttcgccctgagcggcggcgtgaccgccgtgagcgaggtgttcctgtgctgcgagcagggctggcccgccagactggcccacatcgccgtgggcgccttctgcctgggcgccaccctgggcaccgccttcctgaccgagaccaagctgatccacttcctgagaacccagctgggcgtgcccagaagaaccgacaagatgacctag

SEQ ID NO: 229362 - DNA, 1509 bp, Artificial Sequence
  derived and/or modified sequence
atgggcagccaggaggtgctgggccacgccgccagactggccagcagcggcctgctgctgcaggtgctgttcagactgatcaccttcgtgctgaacgccttcatcctgagattcctgagcaaggagatcgtgggcgtggtgaacgtgagagtgcccctgggcgtgttctggagcctgttcctgggctggatctggctgcagctgctggaggtgcccgaccccaacgtggtgccccactacgccaccggcgtggtgctgttcggcctgagcgccgtggtggagctgctgggcgagcccttctgggtgctggcccaggcccacatgttcgtgaagctgaaggtgatcgccgagagcctgagcgtgatcctgaagagcgtgctgaccgccttcctggtgctgtggctgccccactggggcctgtacatcttcagcctggcccagctgttctacaccaccgtgctggtgctgtgctacgtgatctacttcaccaagctgctgggcagccccgagagcaccaagctgcagaccctgcccgtgagcagaatcaccgacctgctgcccaacatcaccagaaacggcgccttcatcaactggaaggaggccaagctgacctggagcttcttcaagcagagcttcctgaagcagatcctgaccgagggcgagagatacgtgatgaccttcctgaacgtgctgaacttcggcgaccagggcgtgtacgacatcgtgaacaacctgggcagcctggtggccagactgatcttccagcccatcgaggagagcttctacatcttcttcgccaaggtgctggagagaggcaaggacgccaccctgcagaagcaggaggacgtggccgtggccgccgccgtgctggagagcctgctgaagctggccctgctggccggcctgaccatcaccgtgttcggcttcgcctacagccagctggccctggacatctacggcggcaccatgctgagcagcggcagcggccccgtgctgctgagaagctactgcctgtacgtgctgctgctggccatcaacggcgtgaccgagtgcttcaccttcgccgccatgagcaaggaggaggtggacagatacaacttcgtgatgctggccctgagcagcagcttcctggtgctgagctacctgctgaccagatggtgcggcagcgtgggcttcatcctggccaactgcttcaacatgggcatcagaatcacccagagcctgtgcttcatccacagatactacagaagaagcccccacagacccctggccggcctgcacctgagccccgtgctgctgggcaccttcgccctgagcggcggcgtgaccgccgtgagcgaggtgttcctgtgctgcgagcagggctggcccgccagactggcccacatcgccgtgggcgccttctgcctgggcgccaccctgggcaccgccttcctgaccgagaccaagctgatccacttcctgagaacccagctgggcgtgcccagaagaaccgacaagatgacctag

SEQ ID NO: 229363 - protein, 197 aa, Artificial Sequence
  derived and/or modified sequence
MEERPAETNANVDNSASPSVAQLAGRFREQAAAAKETPASKPTRRKPPCSLPLFPPKVDLGQNGEEANLTFDPAALLPGASPKSPGLKAMVSPFHSPPSTPSSPGVRSRPSEAEEVPVSFDQPPEGSHLPCYNKVRTRGSIKRRPPSRRFRRSQSDCGELGDFRAVESSQQNGAKEEDGDEVLPSKSKAPGSPLSSE

SEQ ID NO: 229364 - protein, 416 aa, Artificial Sequence
  derived and/or modified sequence
MEERPAETNANVDNSASPSVAQLAGRFREQAAAAKETPASKPTRRKPPCSLPLFPPKVDLGQNGEEKSPPNASHPPKFKVKSSPLIEKLQANLTFDPAALLPGASPKSPGLKAMVSPFHSPPSTPSSPGVRSRPSEAEEVPVSFDQPPEGSHLPCYNKVRTRGSIKRRPPSRRFRRSQSDCGELGDFRAVESSQQNGAKEEDGDEVLPSKSKAPGSPLSSEGAAGEGVRTLGPAEKPPLRRSPSRTEKQEEDRATEEAKNGEKARRSSEEVDGQHPAQEEVPESPQTSGPEAENRCGSPREEKPAGEEAEMEKATEVKGERVQNEEVGPEHDSQETKKLEEGAAVKETPHSPPGGVKGGDVPKQEKGKEKQQEGAVLEPGCSPQTGPAQLETSSEVQSEPAVPKPEDDTPVQDTKM

SEQ ID NO: 229365 - DNA, 594 bp, Artificial Sequence
  derived and/or modified sequence
atggaggagagacccgccgagaccaacgccaacgtggacaacagcgccagccccagcgtggcccagctggccggcagattcagagagcaggccgccgccgccaaggagacccccgccagcaagcccaccagaagaaagcccccctgcagcctgcccctgttcccccccaaggtggacctgggccagaacggcgaggaggccaacctgaccttcgaccccgccgccctgctgcccggcgccagccccaagagccccggcctgaaggccatggtgagccccttccacagcccccccagcacccccagcagccccggcgtgagaagcagacccagcgaggccgaggaggtgcccgtgagcttcgaccagccccccgagggcagccacctgccctgctacaacaaggtgagaaccagaggcagcatcaagagaagaccccccagcagaagattcagaagaagccagagcgactgcggcgagctgggcgacttcagagccgtggagagcagccagcagaacggcgccaaggaggaggacggcgacgaggtgctgcccagcaagagcaaggcccccggcagccccctgagcagcgagtag

SEQ ID NO: 229366 - DNA, 1251 bp, Artificial Sequence
  derived and/or modified sequence
atggaggagagacccgccgagaccaacgccaacgtggacaacagcgccagccccagcgtggcccagctggccggcagattcagagagcaggccgccgccgccaaggagacccccgccagcaagcccaccagaagaaagcccccctgcagcctgcccctgttcccccccaaggtggacctgggccagaacggcgaggagaagagcccccccaacgccagccacccccccaagttcaaggtgaagagcagccccctgatcgagaagctgcaggccaacctgaccttcgaccccgccgccctgctgcccggcgccagccccaagagccccggcctgaaggccatggtgagccccttccacagcccccccagcacccccagcagccccggcgtgagaagcagacccagcgaggccgaggaggtgcccgtgagcttcgaccagccccccgagggcagccacctgccctgctacaacaaggtgagaaccagaggcagcatcaagagaagaccccccagcagaagattcagaagaagccagagcgactgcggcgagctgggcgacttcagagccgtggagagcagccagcagaacggcgccaaggaggaggacggcgacgaggtgctgcccagcaagagcaaggcccccggcagccccctgagcagcgagggcgccgccggcgagggcgtgagaaccctgggccccgccgagaagccccccctgagaagaagccccagcagaaccgagaagcaggaggaggacagagccaccgaggaggccaagaacggcgagaaggccagaagaagcagcgaggaggtggacggccagcaccccgcccaggaggaggtgcccgagagcccccagaccagcggccccgaggccgagaacagatgcggcagccccagagaggagaagcccgccggcgaggaggccgagatggagaaggccaccgaggtgaagggcgagagagtgcagaacgaggaggtgggccccgagcacgacagccaggagaccaagaagctggaggagggcgccgccgtgaaggagaccccccacagcccccccggcggcgtgaagggcggcgacgtgcccaagcaggagaagggcaaggagaagcagcaggagggcgccgtgctggagcccggctgcagcccccagaccggccccgcccagctggagaccagcagcgaggtgcagagcgagcccgccgtgcccaagcccgaggacgacacccccgtgcaggacaccaagatgtag

SEQ ID NO: 229367 - DNA, 594 bp, Artificial Sequence
  derived and/or modified sequence
atggaggagcgaccagccgagaccaatgcaaatgtcgacaattcagcaagcccaagcgtggcccaactggccggacgatttagggagcaggccgctgcggcaaaggaaacaccagcatcgaaacctacacgcaggaaacctccatgctctctccctctgtttccacctaaggtcgaccttggccaaaacggggaggaagcaaacctgaccttcgacccagccgccctgctacctggggcttcacccaagtctcccggtctaaaagcaatggtgagtccctttcattcacctccctccacgccctctagccccggcgtcaggagcagaccttccgaagccgaagaggtgcctgtgtccttcgaccaacccccagaagggtcccacctcccctgttataataaagtaagaacccggggatcaatcaagcgccggccgcctagccggcggttccggaggtctcagagcgactgtggggaattgggggacttccgtgccgtcgaatcatcccagcagaatggggcgaaggaagaggacggcgatgaggtgcttccaagcaaatcaaaagccccaggtagtccattgtctagcgagtag

SEQ ID NO: 229368 - DNA, 1251 bp, Artificial Sequence
  derived and/or modified sequence
atggaggagaggccagctgagacaaacgccaacgtcgataactcggcatccccatcagttgcccagctagccggcagattccgggagcaggcggcagcagcaaaagagactccggcatccaaacccacaagaaggaaacccccctgcagtttgccactcttccccccaaaggtcgacctcggtcagaacggagaggagaagagtcctccaaatgcgagccatccccctaagtttaaggtgaaatcatcgcctcttatcgaaaaactccaagctaatctgacttttgatcccgccgccctgctgcccggggcgtcaccgaagagcccaggactgaaagctatggtctccccgttccatagccctccaagcactccctccagcccaggggtgagatccaggcccagtgaggccgaagaagtccccgtgtcttttgatcagccgccggaaggcagtcatctgccctgttacaacaaagtacgcactcgtggcagtattaagagacgcccgccatcccggaggttccggcgcagccaatctgactgcggggaattaggggattttcgcgctgttgaatccagtcaacagaatggagcgaaggaggaagatggtgatgaggtgctgcctagtaaaagtaaggcaccgggatcccccctgtcgtctgaaggcgctgctggggagggtgtgcgtactctgggtcctgctgaaaagccaccgttgaggaggtctcctagtcggactgagaaacaggaagaagatcgagcaacagaagaggctaaaaacggggagaaggcaaggaggtccagcgaggaagtggacggtcagcatccagcccaggaagaagtgccagagtcgccccaaactagcggtcctgaggctgagaacaggtgcggaagccctcgcgaggagaaaccggcaggcgaagaggccgaaatggagaaggccaccgaggtgaagggcgaacgggtgcagaacgaagaagtaggcccggaacatgacagtcaagaaacgaagaaactggaagagggggcagccgtcaaggagacgccccatagcccgcccggaggggtgaaagggggagatgtccctaagcaggaaaaggggaaagaaaagcagcaggagggcgctgtattggagcccggctgctcccctcagaccggccctgcccagttagagacgtctagtgaggtgcaatccgagcccgcagtgcctaagcccgaggacgatacaccagtgcaggacaccaagatgtag

SEQ ID NO: 229369 - DNA, 594 bp, Artificial Sequence
  derived and/or modified sequence
atggaggagaggcctgctgagaccaatgccaacgtggacaacagcgccagccccagcgtggcccagctggccggccgcttccgggagcaggccgctgctgccaaggagaccccagccagcaagcccaccaggaggaagccaccctgcagcctgcccctcttcccccccaaggtggacctgggccagaatggagaggaggccaacctgacctttgatcctgctgccctgctgcccggggccagccccaagagccctggcctgaaggccatggtgagccccttccacagcccccccagcacccccagcagccctggggtgcgcagccggcccagcgaggccgaggaggtgcctgtgtcctttgaccagcccccagagggcagccacctgccctgctacaacaaggtgaggacccggggcagcatcaagagaagaccacccagccgccgcttcagaagaagccagagcgactgtggggagctgggggacttccgggctgtggagagcagccagcagaatggagccaaggaggaggatggagatgaggtgctgcccagcaagagcaaggcccctggcagccccctgagcagcgagtag

SEQ ID NO: 229370 - DNA, 1251 bp, Artificial Sequence
  derived and/or modified sequence
atggaggagaggcctgctgagaccaatgccaacgtggacaacagcgccagccccagcgtggcccagctggccggccgcttccgggagcaggccgctgctgccaaggagaccccagccagcaagcccaccaggaggaagccaccctgcagcctgcccctcttcccccccaaggtggacctgggccagaatggagaggagaagagccccccaaatgccagccacccccccaagttcaaggtgaagagcagccccctcatcgagaagctgcaggccaacctgacctttgatcctgctgccctgctgcccggggccagccccaagagccctggcctgaaggccatggtgagccccttccacagcccccccagcacccccagcagccctggggtgcgcagccggcccagcgaggccgaggaggtgcctgtgtcctttgaccagcccccagagggcagccacctgccctgctacaacaaggtgaggacccggggcagcatcaagagaagaccacccagccgccgcttcagaagaagccagagcgactgtggggagctgggggacttccgggctgtggagagcagccagcagaatggagccaaggaggaggatggagatgaggtgctgcccagcaagagcaaggcccctggcagccccctgagcagcgagggcgccgccggggagggcgtgaggaccctgggccctgctgagaagccacccctgcggcgcagccccagcaggacagagaagcaggaggaggaccgggccacagaggaggccaagaatggagagaaggcccggcgcagcagcgaggaggtggatggccagcacccagcccaggaggaggtgcctgagagcccccagaccagcggccctgaggctgaaaatagatgtggcagcccccgggaggagaagccagctggggaggaggccgagatggagaaggccacagaggtgaagggggagcgggtgcagaatgaggaggtgggccctgagcatgacagccaggagaccaagaagctggaggagggcgctgctgtgaaggagaccccccacagccccccaggaggagtgaagggaggagatgtgcccaagcaggagaagggcaaggagaagcagcaggagggcgctgtgctggagcccggctgcagcccccagacaggccctgcccagctggagaccagcagcgaggtgcagagcgagcctgctgtgcccaagccagaagatgacacccctgtgcaggacaccaagatgtag

SEQ ID NO: 229371 - DNA, 594 bp, Artificial Sequence
  derived and/or modified sequence
atggaggagcggcccgccgagaccaacgccaacgtggacaacagcgctagtccttccgtggctcagcttgcgggccgcttcagggagcaggctgcagcggcgaaagagactccagcctcgaaacccacccgccgaaaaccgccttgttccctgccattattcccacctaaggtagatctcggtcagaacggcgaagaagctaacctgaccttcgatcccgcagccctgttacccggcgccagtcccaaaagccctggcctgaaagccatggtctctccattccattccccacctagtaccccaagcagtccaggcgtgcgttcacggccatctgaggctgaggaagtccctgtctctttcgatcagcctccggagggcagccatcttccatgctataataaagtccggacaagggggtctattaaacgccgcccacctagtagacgctttaggaggtcccagtctgactgtggtgaactgggcgattttagggccgtcgaatcaagtcagcaaaacggagctaaggaagaagatggcgatgaggttctcccaagcaagagtaaggcccccggcagcccgctgtcgtctgagtag

SEQ ID NO: 229372 - DNA, 1251 bp, Artificial Sequence
  derived and/or modified sequence
atggaggagcggcccgccgagaccaacgccaacgtggacaacagcgcctcaccctctgtagcccagcttgccggccggttcagagaacaggccgccgcagccaaagagacacctgcaagtaagcctacccggcgtaaaccaccatgctctttgccactttttcctcccaaggtggaccttggccaaaacggagaagagaagtccccacctaacgctagtcacccaccgaagtttaaggtcaagtcaagcccattaatagagaagctccaggccaacctgacgtttgacccggctgcgctgcttcccggtgcctcacccaagtctcctggattaaaagccatggtgtctccattccatagtccacctagcaccccgagttctcccggtgtcagaagtaggccgagcgaagccgaagaggttccagtgtcatttgaccagccccccgagggttcgcacctgccatgctacaataaggtgcggaccagaggcagtatcaagagaaggccaccatctcgacgcttccggcgttcacaatccgattgtggcgaactgggggatttcagagcggtcgagagtagccagcagaacggcgcaaaggaagaggatggcgatgaggtgcttcctagcaaaagcaaggcccctggttctcccttgagctccgaaggagctgctggcgaaggcgtccgtactctgggcccagctgaaaaacctcccctgcggaggtcaccgtcccgtacagagaaacaagaggaggaccgtgccacggaggaggcaaaaaacggcgaaaaagccagaagaagtagtgaggaggtcgatgggcagcacccagctcaggaagaggtgccagagagccctcaaacgtcaggacccgaggcagaaaacagatgcggctccccgcgtgaggagaagcctgctggagaggaggccgagatggagaaagccacagaggtaaagggggaaagggtccaaaacgaagaggtcgggcctgagcacgactcccaggagactaagaagctggaggaaggagcagcggttaaggaaacgcctcacagtcccccaggaggtgttaaggggggcgacgtccccaagcaggaaaaaggcaaagaaaagcagcaggaaggagcagtgctagagcctggctgttctccacaaaccggcccagcacagctggaaacttcctccgaggtgcagagcgagcccgcagtacccaagcccgaggacgacaccccggttcaggacaccaaaatgtag

SEQ ID NO: 229373 - DNA, 594 bp, Artificial Sequence
  derived and/or modified sequence
atggaagaaaggccagctgagacaaacgccaatgtagataattcggcctccccctctgttgcccaacttgcagggaggtttagggaacaggcagcggctgctaaggaaacaccagcgtccaaacccacaagaaggaaacccccttgctccttaccacttttcccgccaaaagtggacctaggacagaatggtgaggaagccaacctgacatttgatcctgccgctttgttacccggtgcctctcctaaatcacctggcctgaaggcaatggtgtcccctttccattcacccccaagtacgccgagcagtcccggagtgcgctcccgcccttcagaggccgaggaggtgcccgtctctttcgatcagcctccggaagggagccacttgccatgctataacaaagtgagaacccgtggatccattaagcggaggcctcccagccgtcgttttagacggtctcagagcgactgtggggagctcggtgactttagagctgtagagtcgagccagcaaaacggagcaaaagaggaggatggcgacgaggtgctgcccagcaaatccaaagctccaggaagcccactcagttcagagtag

SEQ ID NO: 229374 - DNA, 1251 bp, Artificial Sequence
  derived and/or modified sequence
atggaggaacgtcccgctgagactaacgcaaacgttgataatagcgcctcccctagcgtcgcccagttagcgggtaggttcagagaacaggctgccgctgctaaggaaacaccagcttccaagcccaccaggaggaagccaccatgcagcttgccgctctttccgccaaaggtggacttgggccagaacggagaggaaaagtcccccccaaatgcctctcatccccctaaattcaaagttaagtcaagccctctgatcgaaaaactgcaggccaatttgacctttgacccagccgctttgctgcccggagccagtccgaagtccccgggactcaaagcgatggtgagccccttccatagtcccccttcaaccccatcttctccaggggtcagatcgcggccatcggaggccgaggaagtgcccgtttcgttcgatcagccccctgagggtagtcacctcccatgttataataaagtgaggacacggggatccatcaaaaggcggccaccctctaggcgctttagacggtctcagtcagactgcggggagctaggggacttccgcgctgtcgaatcttctcagcaaaatggtgccaaggaggaggacggagatgaggtattgccctctaaaagtaaagctcccggtagccccctcagttccgaaggagcggctggagaaggtgttaggactctgggtcccgcagaaaaaccccctctgcgaagaagcccctctcggactgagaaacaagaagaggatcgggctaccgaggaggcaaaaaatggggagaaggctcgacggtcctcggaagaggttgacggacagcatcctgcccaggaagaagttccagaaagcccacagacgtccgggcctgaggctgagaatagatgtggttcccctagggaggaaaagccggcaggcgaagaggccgagatggagaaagccacagaggtgaagggcgaacgcgtacagaacgaagaggtgggtcctgagcacgacagccaggaaaccaaaaagctggaggaaggagccgctgtgaaagagacgcctcactccccccctggcggagtaaagggaggcgacgtcccgaaacaggagaaagggaaagagaagcagcaggaaggagccgtgttggaaccagggtgctcgccgcagacgggtcctgcccaattggaaacaagcagtgaggtgcagtccgagcctgccgtgccgaagcctgaagacgatacacccgtgcaggacaccaaaatgtag

SEQ ID NO: 229375 - DNA, 822 bp, Artificial Sequence
  derived and/or modified sequence
tccccttcctccctccctccctcctcctccttcctcgttctctcgcgcagggcccccgcggccggggcagtcccgcagccgagcgcagccgggcgcgcgccaccgcccactcgccctgtgcccgccgcagcccgaaactggccacggccgggagcggaggggacagcggggatcgtgagctccggcccgggcgagcgggtgcgtctgccgcagagtcggcacctgaaggacatggaggaaagaccggcagagaccaatgccaatgtggacaactcggcgtccccctcggtggcccagctggccgggcggtttagggagcaggcggctgcagccaaggagacaccagccagtaaaccaacccgaaggaaaccgccctgttccctccccctgttcccccccaaggtagacctgggccagaatggtgaggaggccaatttaacctttgacccagctgctctactgcctggggcctcacccaagagtcctggactcaaggctatggtgtcgccatttcacagcccaccttctacccccagcagccctggtgtgcgatctaggcccagcgaggcagaggaggtgcctgtcagcttcgaccagccccctgaaggcagtcatctgccctgttacaacaaggtgcggacgaggggctcaataaaaaggcgccctccctccaggcgattccgaaggtcacagtcagactgtggagaacttggagatttcagggcggtggagtcatctcagcagaacggtgctaaggaagaggatggggatgaagtgttgccatccaagagcaaggccccaggatcccctttgtccagtgag

SEQ ID NO: 229376 - DNA, 3135 bp, Artificial Sequence
  derived and/or modified sequence
ttgagtcctgccctgggagggacagtatctgtttagatttgcgtctaaatttaaaccctgatcgtcggcctccctccccgctccccaccctcccctcccctccccttcctccctccctccctcctcctccttcctcgttctctcgcgcagggcccccgcggccggggcagtcccgcagccgagcgcagccgggcgcgcgccaccgcccactcgccctgtgcccgccgcagcccgaaactggccacggccgggagcggaggggacagcggggatcgtgagctccggcccgggcgagcgggtgcgtctgccgcagagtcggcacctgaaggacatggaggaaagaccggcagagaccaatgccaatgtggacaactcggcgtccccctcggtggcccagctggccgggcggtttagggagcaggcggctgcagccaaggagacaccagccagtaaaccaacccgaaggaaaccgccctgttccctccccctgttcccccccaaggtagacctgggccagaatggtgaggagaaatcaccacccaatgcgagccaccctcctaaattcaaggtcaagagctcgcctctgattgagaagcttcaggccaatttaacctttgacccagctgctctactgcctggggcctcacccaagagtcctggactcaaggctatggtgtcgccatttcacagcccaccttctacccccagcagccctggtgtgcgatctaggcccagcgaggcagaggaggtgcctgtcagcttcgaccagccccctgaaggcagtcatctgccctgttacaacaaggtgcggacgaggggctcaataaaaaggcgccctccctccaggcgattccgaaggtcacagtcagactgtggagaacttggagatttcagggcggtggagtcatctcagcagaacggtgctaaggaagaggatggggatgaagtgttgccatccaagagcaaggccccaggatcccctttgtccagtgagggagcagcgggagagggagtgagaaccctgggacctgctgaaaagcctcctctgaggaggtcacccagcaggacagagaagcaggaggaggacagggccacagaggaagccaagaacggtgaaaaggccaggcggagttcagaggaggtggacggccagcacccggcccaagaggaggtcccggaatcgccccagacctctggcccagaggcagaaaataggtgtgggagccccagggaggaaaagccagctggagaggaagcagagatggaaaaggctacagaggtgaagggggagagggtgcaaaatgaagaggtgggacctgaacatgacagccaagaaacaaagaagctggaggagggagctgcagtgaaggagaccccccacagtccccctggaggagtgaagggcggagatgtccccaagcaggaaaaaggcaaggaaaaacaacaggagggggcagtgctcgagccaggctgcagcccccagaccggccctgcccagctggagaccagcagtgaggtccagagcgagccagcagtccccaagccggaggatgacactcctgtccaggacactaaaatgtgaagaacagctcattgtgccccagtgatgaagttgctggacacatctctttgcaggtagcagcaacagttgtagcagcagcagacgaagccattgcagaggcagaatatgctgagtgtctggagtcagcctgaagacacagggtggattatttcctggcctccacaccaaacgttcccttgcagatggagactgaatctgagggcagcagacttttatcagcttgagtttatgtcatttgatggacttggttcaacaacaagaacttacttaaaacaatgtactgtggtgatgagtcccaggggcactggtcagcctgtggagccctggatgctatccacacccacctatccctgcagctaatttagctgatctctaatttaactgagctctaatttagctgatcagattttgcttgggtaaagttcctttttaatgttctaaagtgtttacggttctcaaatatcagttaaaaactaattttaggtggccataaacataaaatagaaaccctgtaagttacagaagaccctaaattgtatcaaaaccctagagacaacttttcaatttgatccaaatttgaactggccaaccagtctttaaaacactggactagaagagataatgattgaaacatttaaaaaaaaaaagtgctccattcgcaggagcttttcctgtcctgtggttttccagttggtgaccaccatgggaggtcgctggctcggctcactcccttctcccacccttgagaatgtggagaactcccatggagaggcagaatggcaggaggtttcatgtcccgcgttgcatctcctcctgaaagaaaagcagtgatacctgaataatgctggctctccgattgatcctgtgaggatgaatttgcatttccagaatccttgagcatggattagatgtttcctgggaggtgccttgagtaccattatgtgcaagctacataattaaaacatttttcttagtttccctgggaagcttttcttgactcacagcccaggttcttctgcccaacacaaaaggagtgagttggggtctttagtctcttcttattgggtagctcttgctttaatattctgtttggtgagtgtaagggattctgcaagggacagggggcctgactacccagtctttgacttgtatcctctcccctcttcatacactcctgctgaaaaatgttaatccaaatacacatttaaacttagggtcggtccttattctgatttgagtattttaatgtctcagtgtgctgatttggtagttggaagaattattcttctggaggtctgttagactacatcctacactgacttcagaaaacagtctgtcagacaaaaaggccttatgtcaccactggtacctcagtttcctcatcccatttacagtttttctaactccagggtagtgtttagtgttaatatttgggatatattttttttcaaaactgtttttaagtagtttgtaatttgtaacaaacttgtaacctggttgggactgatattgtcatagctatgataaactttggatattagcagaatttggga

SEQ ID NO: 229377 - protein, 104 aa, Artificial Sequence
  derived and/or modified sequence
MKLAALLGLCVALSCSSAAAFLVGSAKPVAQPVAALESAAEAGAGTLANPLGTLNPLKLLLSSLGIPVNHLIEGSQKCVAELGPQAVGAVKALKALLGALTVFG

SEQ ID NO: 229378 - DNA, 315 bp, Artificial Sequence
  derived and/or modified sequence
atgaaattggcagccctgctgggcctctgcgtagccttgtcatgtagcagtgccgccgcattcctcgtgggttcggccaaacctgttgcccagcccgtggcggcgctcgaatccgccgccgaagccggagcggggaccctagcgaacccactgggcactctcaatccactcaaactcctactttccagtctggggatcccagtgaatcacttgatagagggtagtcagaagtgtgtcgcagagctgggcccgcaggcagtcggagcggtgaaggctctgaaagcccttctgggtgccctgacagtgtttggctag

SEQ ID NO: 229379 - DNA, 315 bp, Artificial Sequence
  derived and/or modified sequence
atgaagctggccgccctgctgggcctgtgtgtggccctgagctgcagcagcgctgctgccttcctggtgggcagcgccaagcctgtggcccagcctgtggccgccctggagagcgctgctgaggccggggccggcaccctggccaaccccctgggcaccctgaaccccctgaagctgctgctgagcagcctgggcatccctgtgaaccacctgattgagggcagccagaagtgtgtggccgagctgggcccccaggccgtgggcgctgtgaaggccctgaaggccctgctgggcgccctgactgtgtttggatag

SEQ ID NO: 229380 - DNA, 315 bp, Artificial Sequence
  derived and/or modified sequence
atgaagctggccgccctgctgggcctgtgcgtggccctgagctgctccagtgccgccgccttcttggtgggctccgcaaagcccgtggcccagcccgtggctgccctggaatctgccgccgaagcaggcgcgggaaccttagctaatccgttgggtaccttaaatcccctgaagttactcctttcatcgcttggcattcctgttaatcatctcatcgaaggaagccagaagtgcgtcgccgaattaggcccccaagccgtgggtgcagtgaaggcgctgaaagcattgctgggtgcactgactgtatttggttag

SEQ ID NO: 229381 - DNA, 315 bp, Artificial Sequence
  derived and/or modified sequence
atgaagctcgccgctttgcttggcttgtgcgtcgccctgtcatgcagctctgctgctgcattcttggtgggaagcgctaagcctgtggctcaaccggtcgcagccctcgagtcagctgctgaagctggagcaggaaccctcgcgaaccctctgggaacactcaatccactaaagctactactgtcaagcttggggatacccgtgaatcatctgatagaggggtcccagaagtgtgtagcagagcttgggccacaggccgttggagctgtcaaggccctcaaagcactgctgggggctcttaccgtatttgggtag

SEQ ID NO: 229382 - DNA, 521 bp, Artificial Sequence
  derived and/or modified sequence
gcgaggaccgggtataagaagcctcgtggccttgcccgggcagccgcaggttccccgcgcgccccgagcccccgcgccatgaagctcgccgccctcctggggctctgcgtggccctgtcctgcagctccgctgctgctttcttagtgggctcggccaagcctgtggcccagcctgtcgctgcgctggagtcggcggcggaggccggggccgggaccctggccaaccccctcggcaccctcaacccgctgaagctcctgctgagcagcctgggcatccccgtgaaccacctcatagagggctcccagaagtgtgtggctgagctgggtccccaggccgtgggggccgtgaaggccctgaaggccctgctgggggccctgacagtgtttggctgagccgagactggagcatctacacctgaggacaagacgctgcccacccgcgagggctgaaaaccccgccgcggggaggaccgtccatccccttcccccggcccctctcaataaacgtggttaagagcagc

SEQ ID NO: 229383 - DNA, 315 bp, Artificial Sequence
  derived and/or modified sequence
atgaagctggccgccctgctgggcctgtgcgtggccctgagctgcagcagcgccgccgccttcctggtgggcagcgccaagcccgtggcccagcccgtggccgccctggagagcgccgccgaggccggcgccggcaccctggccaaccccctgggcaccctgaaccccctgaagctgctgctgagcagcctgggcatccccgtgaaccacctgatcgagggcagccagaagtgcgtggccgagctgggcccccaggccgtgggcgccgtgaaggccctgaaggccctgctgggcgccctgaccgtgttcggctag

SEQ ID NO: 229384 - protein, 184 aa, Artificial Sequence
  derived and/or modified sequence
MTSFEDADTEETVTCLQMTVYHPGQLQCGIFQSISFNREKLPSSEVVKFGRNSNICHYTFQDKQVSRVQFSLQLFKKFNSSVLSFEIKNMSKKTNLIVDSRELGYLNKMDLPYRCMVRFGEYQFLMEKEDGESLEFFETQFILSPRSLLQENNWPPHRPIPEYGTYSLCSSQSSSPTEMDENES

SEQ ID NO: 229385 - protein, 84 aa, Artificial Sequence
  derived and/or modified sequence
MTSFEDADTEETVTCLQMTVYHPGQLQCGIFQSISFNREKLPSSEVVKFGRNSNICHYTFQDKQVSRVQFSLQLFKIQQLSSLL

SEQ ID NO: 229386 - DNA, 555 bp, Artificial Sequence
  derived and/or modified sequence
atgaccagcttcgaggacgccgacaccgaggagaccgtgacctgcctgcagatgaccgtgtaccaccccggccagctgcagtgcggcatcttccagagcatcagcttcaacagagagaagctgcccagcagcgaggtggtgaagttcggcagaaacagcaacatctgccactacaccttccaggacaagcaggtgagcagagtgcagttcagcctgcagctgttcaagaagttcaacagcagcgtgctgagcttcgagatcaagaacatgagcaagaagaccaacctgatcgtggacagcagagagctgggctacctgaacaagatggacctgccctacagatgcatggtgagattcggcgagtaccagttcctgatggagaaggaggacggcgagagcctggagttcttcgagacccagttcatcctgagccccagaagcctgctgcaggagaacaactggcccccccacagacccatccccgagtacggcacctacagcctgtgcagcagccagagcagcagccccaccgagatggacgagaacgagagctag

SEQ ID NO: 229387 - DNA, 255 bp, Artificial Sequence
  derived and/or modified sequence
atgaccagcttcgaggacgccgacaccgaggagaccgtgacctgcctgcagatgaccgtgtaccaccccggccagctgcagtgcggcatcttccagagcatcagcttcaacagagagaagctgcccagcagcgaggtggtgaagttcggcagaaacagcaacatctgccactacaccttccaggacaagcaggtgagcagagtgcagttcagcctgcagctgttcaagatccagcagctgagcagcctgctgtag

SEQ ID NO: 229388 - DNA, 555 bp, Artificial Sequence
  derived and/or modified sequence
atgacctcgttcgaggacgccgacactgaggagaccgtgacttgcctccagatgacagtctaccatccaggccagttgcaatgtggaattttccaatccatcagtttcaacagggagaagctgccctcttctgaagtggtgaagttcggcagaaatagtaatatctgccattataccttccaggacaagcaggtcagccgcgttcagttttcgctccagctatttaaaaaattcaacagctccgtgctcagctttgagatcaagaacatgtctaagaagacaaacctcatcgtggattccagggaactgggatacttaaacaagatggacctgccctatcggtgtatggttagattcggggagtaccagtttctgatggagaaggaagacggagagagtctcgaattttttgaaacccagtttattctaagccctaggtccctgctgcaagagaacaactggcccccccacaggcctatccccgaatatggtacttatagcctctgctctagccagtcctccagccctacggaaatggatgagaatgagtcttag

SEQ ID NO: 229389 - DNA, 255 bp, Artificial Sequence
  derived and/or modified sequence
atgactagcttcgaggatgcagacactgaggaaactgtgacctgtctgcagatgacagtgtatcatcctgggcagctgcagtgcggaatcttccagtctatctccttcaatcgggagaaactcccgagctcggaagtagtgaaattcggcaggaactccaatatctgtcactatacatttcaggacaagcaagtaagcagagttcagttctccctgcagctctttaagatacagcagctctcatccctgctttag

SEQ ID NO: 229390 - DNA, 555 bp, Artificial Sequence
  derived and/or modified sequence
atgacatcttttgaggatgccgacaccgaagagaccgtcacatgcctccaaatgacggtctaccacccagggcagttacagtgcgggattttccagagcattagctttaaccgtgaaaagctgccatcttctgaagtagtaaaattcggccgcaacagcaacatttgccactatacgtttcaggacaagcaagtctcaagggtgcagttttctctccagctcttcaagaagttcaacagctccgtactgagcttcgagatcaaaaacatgtcgaagaagaccaatctgatcgtcgactcccgcgagttagggtacctgaacaaaatggacctcccttacaggtgtatggtgagatttggggaataccagtttctcatggagaaagaggatggggagagtctggaattcttcgagacgcagttcatactgtcgcctagaagtcttttacaagaaaacaactggcctccacaccgcccgataccggagtacggaacttattcattgtgtagcagccagtcatcgtctcccaccgaaatggatgagaacgagtcttag

SEQ ID NO: 229391 - DNA, 555 bp, Artificial Sequence
  derived and/or modified sequence
atgaccagctttgaagatgctgacacagaggagaccgtgacctgcctgcagatgacagtgtaccaccctggccagctgcagtgtggcatcttccagagcatctccttcaaccgggagaagctgcccagcagcgaggtggtgaagtttggaagaaacagcaacatctgccactacaccttccaggacaagcaggtgtcccgggtgcagttcagcctgcagctgttcaagaagttcaacagctctgtgctgagctttgagatcaagaacatgagcaagaagaccaacctgattgtggacagccgggagctgggctacctgaacaagatggacctgccctaccgctgcatggtgcgctttggagagtaccagttcctgatggagaaggaggatggagagagcctggagttctttgagacccagttcatcctgagccccaggagcctgctgcaggagaacaactggccaccccaccggcccatcccagaatatggcacctacagcctgtgcagcagccagagcagcagccccacagagatggatgaaaatgaaagctag

SEQ ID NO: 229392 - DNA, 255 bp, Artificial Sequence
  derived and/or modified sequence
atgaccagctttgaagatgctgacacagaggagaccgtgacctgcctgcagatgacagtgtaccaccctggccagctgcagtgtggcatcttccagagcatctccttcaaccgggagaagctgcccagcagcgaggtggtgaagtttggaagaaacagcaacatctgccactacaccttccaggacaagcaggtgtcccgggtgcagttcagcctgcagctgttcaagatccagcagctgagcagcctgctgtag

SEQ ID NO: 229393 - DNA, 555 bp, Artificial Sequence
  derived and/or modified sequence
atgaccagcttcgaggacgccgacaccgaggagaccgtgacctgccttcagatgaccgtataccaccctggtcagctgcagtgtggcatattccaatccattagttttaaccgagaaaagctcccgtcatcagaagtggtaaagttcgggagaaatagcaacatctgccactacacctttcaggacaaacaggtttcccgggtgcagtttagccttcagttgtttaaaaagttcaatagttcggttctgtcattcgaaatcaagaatatgagcaaaaaaaccaacctgattgtggacagccgggagctggggtacctgaataaaatggaccttccctatagatgcatggttcggtttggggagtatcagtttctcatggagaaggaagacggggagagtcttgaattttttgagacacaatttattctctcaccccggagcctactgcaggagaataactggcctccgcacaggcccatccctgagtatggaacgtactccctgtgcagctcacagtctagttcccctaccgagatggatgaaaacgaatcctag

SEQ ID NO: 229394 - DNA, 255 bp, Artificial Sequence
  derived and/or modified sequence
atgaccagcttcgaggacgccgacaccgaggagaccgtgacctgccttcagatgacagtctatcacccaggccagctgcagtgtggcatattccaaagcatctccttcaaccgcgaaaagctgccatcctccgaggtggttaaattcggtaggaacagcaatatctgtcactacacatttcaggacaagcaagtttcgagagtccagttttcacttcagctgtttaaaattcagcagctgtcgtccttactttag

SEQ ID NO: 229395 - DNA, 555 bp, Artificial Sequence
  derived and/or modified sequence
atgaccagcttcgaggacgccgacaccgaggagaccgtgacctgcctgcagatgactgtttatcaccccgggcaactgcagtgtggcattttccaatcaatctcttttaatagggaaaaacttccttcttccgaggtggtcaaattcggtagaaattccaatatatgccattatacctttcaggataaacaggtctctcgagtgcagttctccctgcaactctttaagaagttcaactcctctgtgttgtcatttgagattaaaaacatgtccaagaagacaaatcttatcgtcgactcacgtgaactgggatatctcaataaaatggacctgccatataggtgtatggtgaggtttggcgagtaccagttcctgatggagaaggaagatggggaaagtttggaattttttgaaacgcagtttatcctaagcccaaggagcctcctgcaagagaataactggcctccacatcgacccatcccagagtatggaacttacagcctatgcagctcccaaagttcaagcccaacagagatggatgagaacgaatcatag

SEQ ID NO: 229396 - DNA, 555 bp, Artificial Sequence
  derived and/or modified sequence
atgacatcatttgaagacgcagatacggaggaaacagtgacctgcctacaaatgaccgtgtaccacccgggacagcttcaatgcggcatctttcagagcatctctttcaaccgtgaaaaattaccttcttcagaagtcgttaagttcgggagaaacagtaacatttgccactatacattccaggataagcaggtctccagagtccagttcagcctgcaactgttcaagaagtttaactcctccgtgctgtccttcgaaattaaaaatatgtccaaaaaaaccaacctgattgtggatagtagggaactggggtatctgaacaagatggatctcccttaccggtgcatggtgcgtttcggcgagtatcagttcctgatggaaaaggaagacggggaaagtcttgagttttttgagacacagttcatactatccccacggtcactactgcaagaaaacaactggccaccccacaggccaataccggagtacgggacatactccctttgcagttcgcagtcaagcagccccacagagatggacgagaatgaatcttag

SEQ ID NO: 229397 - DNA, 255 bp, Artificial Sequence
  derived and/or modified sequence
atgacctcgttcgaggatgcagatacagaggagactgtgacctgtttgcaaatgactgtttaccatccagggcagctccagtgcggcatctttcagtctatcagtttcaatcgcgagaagttaccctcaagtgaagtggtgaagttcgggaggaactctaatatttgccattacactttccaggacaagcaggttagcagggtgcagttctctctccagttgttcaaaatacaacagctgagcagcctgttatag

SEQ ID NO: 229398 - DNA, 555 bp, Artificial Sequence
  derived and/or modified sequence
atgacttcattcgaagatgcagatacggaagagaccgttacttgcctacagatgactgtgtaccaccctggccagttgcagtgcgggatctttcagtcaataagctttaacagagagaagctgccatccagtgaagtagtaaagttcggacgcaatagcaatatctgtcactacaccttccaggataaacaggtttctagggtccagttctccttacagctgttcaaaaaatttaactcatcagtgctaagtttcgagatcaagaatatgagcaagaaaaccaatctgattgtggactccagagagctcggatatttaaacaagatggatctgccttataggtgcatggtacgattcggagagtaccagtttttaatggagaaagaggatggagaaagccttgaattctttgagacacagttcatcctcagccccaggtccctgctccaggagaataattggccccctcaccgaccaataccagagtacggtacctacagtctatgctcatcacagtcatcgagtccaacagaaatggatgagaatgaatcttag

SEQ ID NO: 229399 - DNA, 3072 bp, Artificial Sequence
  derived and/or modified sequence
tttacaaaggccccgggcgcgagaggacgtgctctgccagccagtgggaaggcaggccgcgcgcgcgggagcgcgggaggatcggcggctcgcggtcactggtccctggctcggttccccgcaccccggggctcacacttacccgcgcggaggagcagcggccgggtgtccacccccatcctgcgcccagtctcctcgattcccctcgctctgagccgggagagccgaacagctgaagagagttcactgactccccagccccaggtgggccttgtgcacatcatgaccagttttgaagatgctgacacagaagagacagtaacttgtctccagatgacggtttaccatcctggccagttgcagtgtggaatatttcagtcaataagttttaacagagagaaactcccttccagcgaagtggtgaaatttggccgaaattccaacatctgtcattatacttttcaggacaaacaggtttcccgagttcagttttctctgcagctgtttaaaaaattcaacagctcagttctctcctttgaaataaaaaatatgagtaaaaagaccaatctgatcgtggacagcagagagctgggctacctaaataaaatggacctgccatacaggtgcatggtcagattcggagagtatcagtttctgatggagaaggaagatggcgagtcattggaattttttgagactcaatttattttatctccaagatcactcttgcaagaaaacaactggccaccacacaggcccataccggagtatggcacttattcgctctgctcctcccaaagcagttctccgacagaaatggatgaaaatgagtcatgaacacagaaagtctaagaggagaaatatgatggatgaagagctctgtagatgctgtatagacactaaataagagttgattagggtagtatattatagtcatctgttatgctgtgaaatttggaattcagtattatcattttgaagtctgtaaattgtgttagtcattaacttagtcacctgttgtattctggatctacacaaaattattttaactgctcttattaatctgtgaggattaatatacaaaaagtatcctttgagatgaagtcgtgttctcaaaataaggttatattattttctttttctgcttgattttcatcttgtgttttgctttgtttttgtaaggaaccatctcttggtttggtcacatcagttcacaacagccatttgttttcaaggtcaaggctccaggcaggttgttactggtgtttgcagcctgtcagtacttgcagtactggaataggttctaggctagtgtctgcgcgtcactgtggttttagcatgggaggacttatttgagaaatactaccttacttttctatgatttctttttacagagttatagtgtgtttactcctaagatgacagttctctttgtctatattcagcatctaagacaaatatttaaacattttaaagaaccactgtgttaagtttaggattatttacttaccaaattagaagtttgacttttatgtgttatacacaatcttaaaatttcacgaattcacctttttaatagtatccatgtacataataaaatcaaagtttaattagccattttctttgaatttttttctaaataagggaaataactgttcttgggccactttacagagataaatgtatgtgaatgtttatgataaacgcttaaatatttctaaaatattaacttcaaaaaagtctttttcagttcttaaataaaaatttatttatttaagatacttattcgacttatcttaactaaggtagctatgaatgttaagtagatgaggtaaccattcagttaagttaaattgtagcattgccaggtagtgaggctcactgtacaattttccaggtaaatgaaatttcctgtagtaagaggtccgtatttttgtaacagccttttaaaaatgcttttgggaaccctccagcctcttaccaaaagaggctttaaacctcatcttgattcagactgtcagtctattcctgggcagtagtatgtgatgtccagcaccctaaccccgactccccagccctgggactattccagtagagtgaaatatttgtccctgtacaaagtggcctgaatgactgttggagttcctgtgtctggttttcctgtttattccctgtgatgcccagagtaatggcccatccaaagatgtccagatgtccatgtgctagtctccagaacttgtaactgtgttgttatgtggcaaaggggaatgaaggctgcagatggaagtaaaatagattatgctggattatctgggtgtgcccaattgatcaccggatccgtaaaagtggaagagaggcagatcaggatgtcagcgtgatgaggtgtgagacagacttgacttgctgttgctgggaggaaggggaggtcatgagccaaggaatgtggacagtctcttgaagctggaaagtgtgcattggacatctggaagccagaaaagacaaagaaatatccagaaaggaacaaagtcttgtggacaccttgattttggtccagtgagaatatgtttgacttgttaacctacaaaactttatgatgataaatttgtgttggtcgtaagccactaaatcacagtaatttgttatagcagcagatagaaaactaatatactccctttaatataaggttatctactattgattctttctaggattttagcttctggtctgatgtgggtttacagccagatcacccggcttgaattgcttacagtgtgtagtctcatggtaaaggcgttctatgagtgaagtgtatatactttaatgtgtgtatactgtcacattttgactattttggaagactttcacctctgtttcttgtctttgaggctgatgaatgtgtttctaagttataaatttaatattaagggattcatgtattattgttattgaatccaaacaatgtgttaagtaatatttagggccagaaaaatcttgtacagaataatgatttctcctaatgtaaatcttggaaagggttttgttcaacttgagaaatattaaattttttattct

SEQ ID NO: 229400 - DNA, 2660 bp, Artificial Sequence
  derived and/or modified sequence
gcgcgagaggacgtgctctgccagccagtgggaaggcaggccgcgcgcgcgggagcgcgggaggatcggcggctcgcggtcactggtccctggctcggttccccgcaccccggggctcacacttacccgcgcggaggagcagcggccgggtgtccacccccatcctgcgcccagtctcctcgattcccctcgctctgagccgggagagccgaacagctgaagagagttcactgactccccagccccaggtgggccttgtgcacatcatgaccagttttgaagatgctgacacagaagagacagtaacttgtctccagatgacggtttaccatcctggccagttgcagtgtggaatatttcagtcaataagttttaacagagagaaactcccttccagcgaagtggtgaaatttggccgaaattccaacatctgtcattatacttttcaggacaaacaggtttcccgagttcagttttctctgcagctgtttaaaattcaacagctcagttctctcctttgaaataaaaaatatgagtaaaaagaccaatctgatcgtggacagcagagagctgggctacctaaataaaatggacctgccatacaggtgcatggtcagattcggagagtatcagtttctgatggagaaggaagatggcgagtcattggaattttttgagactcaatttattttatctccaagatcactcttgcaagaaaacaactggccaccacacaggcccataccggagtatggcacttattcgctctgctcctcccaaagcagttctccgacagaaatggatgaaaatgagtcatgaacacagaaagtctaagaggagaaatatgatggatgaagagctctgtagatgctgtatagacactaaataagagttgattagggtagtatattatagtcatctgttatgctgtgaaatttggaattcagtattatcattttgaagtctgtaaattgtgttagtcattaacttagtcacctgttgtattctggatctacacaaaattattttaactgctcttattaatctgtgaggattaatatacaaaaagtatcctttgagatgaagtcgtgttctcaaaataaggttatattattttctttttctgcttgattttcatcttgtgttttgctttgtttttgtaaggaaccatctcttggtttggtcacatcagttcacaacagccatttgttttcaaggtcaaggctccaggcaggttgttactggtgtttgcagcctgtcagtacttgcagtactggaataggttctaggctagtgtctgcgcgtcactgtggttttagcatgggaggacttatttgagaaatactaccttacttttctatgatttctttttacagagttatagtgtgtttactcctaagatgacagttctctttgtctatattcagcatctaagacaaatatttaaacattttaaagaaccactgtgttaagtttaggattatttacttaccaaattagaagtttgacttttatgtgttatacacaatcttaaaatttcacgaattcacctttttaatagtatccatgtacataataaaatcaaagtttaattagccattttctttgaatttttttctaaataagggaaataactgttcttgggccactttacagagataaatgtatgtgaatgtttatgataaacgcttaaatatttctaaaatattaacttcaaaaaagtctttttcagttcttaaataaaaatttatttatttaagatacttattcgacttatcttaactaaggtagctatgaatgttaagtagatgaggtaaccattcagttaagttaaattgtagcattgccaggtagtgaggctcactgtacaattttccaggtaaatgaaatttcctgtagtaagaggtccgtatttttgtaacagccttttaaaaatgcttttgggaaccctccagcctcttaccaaaagaggctttaaacctcatcttgattcagactgtcagtctattcctgggcagtagtatgtgatgtccagcaccctaaccccgactccccagccctgggactattccagtagagtgaaatatttgtccctgtacaaagtggcctgaatgactgttggagttcctgtgtctggttttcctgtttattccctgtgatgcccagagtaatggcccatccaaagatgtccagatgtccatgtgctagtctccagaacttgtaactgtgttgttatgtggcaaaggggaatgaaggctgcagatggaagtaaaatagattatgctggattatctgggtgtgcccaattgatcaccggatccgtaaaagtggaagagaggcagatcaggatgtcagcgtgatgaggtgtgagacagacttgacttgctgttgctgggaggaaggggaggtcatgagccaaggaatgtggacagtctcttgaagctggaaagtgtgcattggacatctggaagccagaaaagacaaagaaatatccagaaaggaacaaagtcttgtggacaccttgattttggtccagtgagaatatgtttgacttgttaacctacaaaactttatgatgataaatttgtgttggtcgtaagccactaaatcacagtaatttgttatagcagcagatagaaaactaatatactccctttaat

SEQ ID NO: 229401 - DNA, 769 bp, Artificial Sequence
  derived and/or modified sequence
gactgagctgctccttgtgggaactgctgatgttttgacaaaagaaagagggaaggtggaactacacagtggcttttaagtttctgcttggaagtgggccttgtgcacatcatgaccagttttgaagatgctgacacagaagagacagtaacttgtctccagatgacggtttaccatcctggccagttgcagtgtggaatatttcagtcaataagttttaacagagagaaactcccttccagcgaagtggtgaaatttggccgaaattccaacatctgtcattatacttttcaggacaaacaggtttcccgagttcagttttctctgcagctgtttaaaaaattcaacagctcagttctctcctttgaaataaaaaatatgagtaaaaagaccaatctgatcgtggacagcagagagctgggctacctaaataaaatggacctgccatacaggtgcatggtcagattcggagagtatcagtttctgatggagaaggaagatggcgagtcattggaattttttgagactcaatttattttatctccaagatcactcttgcaagaaaacaactggccaccacacaggcccataccggagtatggcacttattcgctctgctcctcccaaagcagttctccgacagaaatggatgaaaatgagtcatgaacacagaaagtctaagaggagaaatatgatggatgaagagctctgtagatgctgtatagacactaaataagagttgattagggtagtatattatagtcatctg

SEQ ID NO: 229402 - protein, 344 aa, Artificial Sequence
  derived and/or modified sequence
MKMKLFQTICRQLRSSKFSVESAALVAFSTSSYSCGRKKKVNPYEEVDQEKYSNLVQSVLSSRGVAQTPGSVEEDALLCGPVSKHKLPNQGEDRRVPQNWFPIFNPERSDKPNASDPSVPLKIPLQRNVIPSVTRVLQQTMTKQQVFLLERWKQRMILELGEDGFKEYTSNVFLQGKRFHEALESILSPQETLKERDENLLKSGYIESVQHILKDVSGVRALESAVQHETLNYIGLLDCVAEYQGKLCVIDWKTSEKPKPFIQSTFDNPLQVVAYMGAMNHDTNYSFQVQCGLIVVAYKDGSPAHPHFMDAELCSQYWTKWLLRLEEYTEKKKNQNIQKPEYSE

SEQ ID NO: 229403 - DNA, 2336 bp, Artificial Sequence
  derived and/or modified sequence
ggagacgccggcccttccgctcggagaggtactccctgcctctaactggtggcgcgttggcggaggccgacgaaagcctcgggtggggcgtgagcgccgcggggcattctggacctgctttgccttaggctgtgcctaattcgaaaccaaagcgcgggacggatgaaagtacgggtcgcgagaggttgttcgcgccttgagagttaagcgaagtgtggtggcttccaaggaatacaaacataaaggccttcgaccgttgcaaatagactaaagtgaaaacaaatctgaatgaagatgaagttatttcagaccatttgcaggcagctcaggagttcaaagttttctgtggaatcagctgcccttgtggctttctctacttcctcttactcatgtggccggaagaaaaaagtgaacccatatgaagaagtggaccaagaaaaatactctaatttagttcagtctgtcttgtcatccagaggcgtcgcccagaccccgggatcggtggaggaagatgctttgctctgtggacccgtgagcaagcataagctgccaaaccaaggtgaggacagacgagtgccacaaaactggtttcctatcttcaatccagagagaagtgataaaccaaatgcaagtgatccttcagttcctttgaaaatccccttgcaaaggaatgtgataccaagtgtgacccgagtccttcagcagaccatgacaaaacaacaggttttcttgttggagaggtggaaacagcggatgattctggaactgggagaagatggctttaaagaatacacttcaaacgtctttttacaagggaaacggttccacgaagccttggaaagcatactttcaccccaggaaaccttaaaagagagagatgaaaatctcctcaagtctggttacattgaaagtgtccagcatattctgaaagatgtcagtggagtgcgagctcttgaaagtgctgttcaacatgaaaccttaaactatataggtctgctggactgtgtggctgagtatcagggcaagctctgtgtgattgattggaagacatcagagaaaccaaagccttttattcaaagtacatttgacaacccactgcaagttgtggcatacatgggtgccatgaaccatgataccaactacagctttcaggttcaatgtggcttaattgtggtggcctacaaagatggatcacctgcccacccacatttcatggatgcagagctctgttcccagtactggaccaagtggcttcttcgactagaagaatatacggaaaagaaaaagaaccagaatattcagaaaccagaatattcagaatagggagcaagttgctatttgggaacattcagcaccttctcacagtttgggaacatatattgctgtttactccagtgtaaaaatgaggtgccactggatctgagtgctacacgaacacaagtagaagtattaatttgttgaaatgtgttgttaccaaaaagactgaaaagccccaaagtctagatataaagacctagacttcggcacgcgaaatcccagctatgctacctcttatttacctgaaaggaggacacgcaggatgggcagtcatgctggtgactcttgtactcccttgagggacattgggggggggggggcgtggtcccaggcaggatgcccagtctttgagctgagattggaaggcagtgaggctgagggtgccaagatttccccagggttcacccagaggggaaggggctacatgcccccagctgtgtgcagggaggacacatcagcccactaccgctgccaacaccaatgcctaaaacttgtttcatacattggggttttctatatatttcagctgggaaaagcttacatttaaccttttgaaaaaataaatacgtgattagcctcaactaaacattgctgactataaagacagtatattcaccatgtcgctggcaatatgtcattgcgtaacaccaaataaccccccagaagtagccagaggccagtttgaacatcacaattctaagtgttttagtaactatttctggcgtgagtcaacagatcatgtagatagagtcaattattgtttgtggagtttttcagctataggggaggggaactattaaaatccatttgtttctattcaataggtaataaaaattagttgtccctgggtttgggaaacttaaatgcccattacagccctggggaagggttttctgtcttatggagtgagtcttagcatttaagttatacagttgctgccttaaaatagtagcctgctacaatgacttctttgggtagccattttcataagaaataaaatacaagatatgagtaatgaa

SEQ ID NO: 229404 - DNA, 1035 bp, Artificial Sequence
  derived and/or modified sequence
atgaagatgaagctgttccagaccatctgcagacagctgagaagcagcaagttcagcgtggagagcgccgccctggtggccttcagcaccagcagctacagctgcggcagaaagaagaaggtgaacccctacgaggaggtggaccaggagaagtacagcaacctggtgcagagcgtgctgagcagcagaggcgtggcccagacccccggcagcgtggaggaggacgccctgctgtgcggccccgtgagcaagcacaagctgcccaaccagggcgaggacagaagagtgccccagaactggttccccatcttcaaccccgagagaagcgacaagcccaacgccagcgaccccagcgtgcccctgaagatccccctgcagagaaacgtgatccccagcgtgaccagagtgctgcagcagaccatgaccaagcagcaggtgttcctgctggagagatggaagcagagaatgatcctggagctgggcgaggacggcttcaaggagtacaccagcaacgtgttcctgcagggcaagagattccacgaggccctggagagcatcctgagcccccaggagaccctgaaggagagagacgagaacctgctgaagagcggctacatcgagagcgtgcagcacatcctgaaggacgtgagcggcgtgagagccctggagagcgccgtgcagcacgagaccctgaactacatcggcctgctggactgcgtggccgagtaccagggcaagctgtgcgtgatcgactggaagaccagcgagaagcccaagcccttcatccagagcaccttcgacaaccccctgcaggtggtggcctacatgggcgccatgaaccacgacaccaactacagcttccaggtgcagtgcggcctgatcgtggtggcctacaaggacggcagccccgcccacccccacttcatggacgccgagctgtgcagccagtactggaccaagtggctgctgagactggaggagtacaccgagaagaagaagaaccagaacatccagaagcccgagtacagcgagtag

SEQ ID NO: 229405 - DNA, 1035 bp, Artificial Sequence
  derived and/or modified sequence
atgaaaatgaagctgtttcagaccatttgtcggcagctcagatcgtcaaaattctccgtggaatccgccgccctagtggctttcagtacatctagttattcctgtggacgtaagaagaaagtcaacccgtatgaggaagtggatcaggaaaaatactctaatctggttcagtctgttctgtcttctcgcggagtcgcacagacacccggcagtgtcgaggaagatgcgctgctgtgcgggccggtgtcaaagcataagcttcctaaccagggtgaagacagacgcgtgccacagaattggtttcccatttttaatccagaacgaagtgacaaaccgaacgcctcagatccaagcgtaccactcaaaataccacttcagaggaatgtcattccaagtgtcacaagagtcctgcaacagaccatgacgaagcagcaggtctttctgctcgagaggtggaaacaaagaatgatcctggagctgggcgaagacgggttcaaagagtacacttcaaacgtttttctccagggaaagaggtttcacgaggctttggagagtatattatctcctcaagaaacactgaaagagagagatgagaacctgctaaaatcagggtacatcgaatccgtccaacacattctgaaggatgtgtctggggtccgggcactggaaagcgcagttcagcacgagacccttaactatattggcctgttagattgcgtggccgagtatcagggcaaactttgcgttattgactggaagacctccgaaaagccaaagccttttatccaatcaaccttcgataaccccctgcaggtcgtagcgtacatgggcgccatgaaccacgatacaaattattcttttcaggttcaatgcggcctaattgtggtggcctataaggatggctctccagctcatccacacttcatggacgcagaactgtgctctcaatattggaccaagtggctgctccgcttggaggagtatacagagaaaaagaaaaatcagaatattcagaaacccgaatactcggagtag

SEQ ID NO: 229406 - DNA, 1035 bp, Artificial Sequence
  derived and/or modified sequence
atgaagatgaagctgttccagaccatctgccggcagctgcggagcagcaagttctctgtggagagcgctgccctggtggccttcagcaccagcagctacagctgtggcaggaagaagaaggtgaacccctatgaggaggtggaccaggagaagtacagcaacctggtgcagagcgtgctgagcagccggggcgtggcccagaccccaggctctgtggaggaggatgccctgctgtgtggccctgtgtccaagcacaagctgcccaaccagggcgaggaccggcgggtgccccagaactggttccccatcttcaaccctgagaggagtgacaagcccaatgccagtgaccccagcgtgcccctgaagatccccctgcagagaaatgtcatccccagcgtgaccagggtgctgcagcagaccatgaccaagcagcaggtgttcctgctggagcgctggaagcagaggatgatcctggagctgggggaggatggcttcaaggagtacaccagcaatgtgttcctgcagggcaagcgcttccacgaggccctggagagcatcctgagcccccaggagaccctgaaggagagagatgagaacctgctgaagagcggctacatcgagagcgtgcagcacatcctgaaggatgtgtctggagtgcgggccctggagagcgctgtgcagcacgagaccctgaactacatcggcctgctggactgtgtggccgagtaccagggcaagctgtgtgtgattgactggaagaccagcgagaagcccaagcccttcatccagagcacctttgacaaccccctgcaggtggtggcctacatgggcgccatgaaccacgacaccaactacagcttccaggtgcagtgtggcctcatcgtggtggcctacaaggatggcagccctgcccacccccacttcatggatgctgagctgtgcagccagtactggaccaagtggctgctgcggctggaggagtacacagagaagaagaagaaccagaacatccagaagccagagtacagcgagtag

SEQ ID NO: 229407 - DNA, 1035 bp, Artificial Sequence
  derived and/or modified sequence
atgaagatgaagctgttccagaccatctgccggcagctgcggagctccaagttttctgttgagtcggccgcactcgtcgctttttctacttcgtcttacagctgcggtaggaagaaaaaagtgaatccttatgaggaggttgatcaggaaaaatacagtaatctggtccaaagcgttctatcttcccggggtgttgctcagacgcctggcagcgtcgaggaggatgcactgctgtgtggtcccgtaagcaagcacaagctgccaaatcagggcgaagacagacgggtgccacaaaactggttccccatattcaacccagaacgcagcgataaacccaacgcttcagatcccagcgtgcccttaaaaatcccacttcaaaggaacgtcattccgtcagtgacccgcgtgctgcaacaaacaatgacaaagcagcaggtgtttctcctcgagcggtggaagcagcggatgatcctcgagctgggagaagatggatttaaagagtacactagcaatgtatttttacagggcaaacgattccatgaggccttagaatccattttgagcccacaggaaacgctgaaagaacgcgatgagaatttactgaagtctgggtacatagagtctgtccaacacattctcaaagacgtgagtggtgtgcgggcgctcgagtcagccgttcagcacgagacactgaactacatcggcctgctggattgcgtggcagagtatcaaggcaaactctgcgtgattgactggaagactagtgagaaaccgaaaccattcattcaaagcacattcgacaaccctcttcaggtggtggcgtacatgggcgccatgaatcatgacacgaactattcttttcaggtgcagtgcggacttatcgtcgtcgcctacaaagacggaagtccagcacaccctcatttcatggacgcagaactctgctctcagtactggactaaatggttgctgaggctcgaagagtacaccgagaagaaaaaaaatcaaaacatacaaaaacctgagtatagcgaatag

SEQ ID NO: 229408 - DNA, 1035 bp, Artificial Sequence
  derived and/or modified sequence
atgaaaatgaagctgtttcagaccatttgccgccaactacggtcatcaaagttctctgtagagagtgcggctctggtggccttctctacttctagctactcctgcggcagaaaaaagaaagtgaatccgtatgaggaggtggaccaagaaaagtacagtaatctggtgcagtctgtcctgtcctctcggggagtggcccagaccccaggctcggtggaagaagatgctcttttatgtggcccagtgtcaaagcataagctgcccaaccaaggagaagaccggcgtgtgccacagaattggttccccattttcaaccccgagcgaagtgacaagcccaacgcttcagatccatcagtgccattgaaaattcccctgcagcgcaacgtgatccctagcgtgacccgggtactccagcagactatgaccaagcagcaagtattcctgttagagagatggaaacagaggatgatccttgagctcggcgaggatggattcaaggagtacacatccaacgttttcctgcaaggaaaaagatttcatgaggccctggagtctattctgtcaccccaggagacactgaaggagcgggatgagaacctgctgaagtccgggtacattgaaagcgtgcaacacattttaaaggatgtgagcggcgttcgcgctcttgagtctgctgtgcagcatgaaacactcaactacatcgggcttctggattgcgtggctgagtaccaaggcaagctgtgcgtaatagattggaaaactagcgagaaaccaaagccattcatacagtctacattcgacaatcccctgcaggttgtggcttatatgggtgccatgaatcacgacacgaactatagttttcaggttcagtgcggcctgattgttgtggcctataaggacgggtctccagctcacccgcattttatggacgccgagctgtgttctcagtactggactaagtggctattgaggctagaggagtacactgagaaaaagaaaaatcaaaatatccaaaaacccgagtactccgaatag

SEQ ID NO: 229409 - protein, 525 aa, Artificial Sequence
  derived and/or modified sequence
MECCRRATPGTLLLFLAFLLLSSRTARSEEDRDGLWDAWGPWSECSRTCGGGASYSLRRCLSSKSCEGRNIRYRTCSNVDCPPEAGDFRAQQCSAHNDVKHHGQFYEWLPVSNDPDNPCSLKCQAKGTTLVVELAPKVLDGTRCYTESLDMCISGLCQIVGCDHQLGSTVKEDNCGVCNGDGSTCRLVRGQYKSQLSATKSDDTVVAIPYGSRHIRLVLKGPDHLYLETKTLQGTKGENSLSSTGTFLVDNSSVDFQKFPDKEILRMAGPLTADFIVKIRNSGSADSTVQFIFYQPIIHRWRETDFFPCSATCGGGYQLTSAECYDLRSNRVVADQYCHYYPENIKPKPKLQECNLDPCPASDGYKQIMPYDLYHPLPRWEATPWTACSSSCGGGIQSRAVSCVEEDIQGHVTSVEEWKCMYTPKMPIAQPCNIFDCPKWLAQEWSPCTVTCGQGLRYRVVLCIDHRGMHTGGCSPKTKPHIKEECIVPTPCYKPKEKLPVEAKLPWFKQAQELEEGAAVSEEPS

SEQ ID NO: 229410 - DNA, 276 bp, Artificial Sequence
  derived and/or modified sequence
atggaaattgcacattacgcaaaggtgttcacagccgacggccatctagggtgctatattctcgctacgatgaattaccattccgcaaagcattgcggaagctgcctccagagccagctctgcaaacgcttgaaacaagaagatagactcagcccaggctttcaagggcagctcggccagcatagcgagacctcaagccttaagacagtcatcggacccctggcgcccagctgtcacctggcagatatgaagaactggagatggcaacagtggtag

SEQ ID NO: 229411 - DNA, 276 bp, Artificial Sequence
  derived and/or modified sequence
atggagatcgcccactacgccaaggtgttcaccgccgacggccacttgggttgctatattctggccactatgaattaccatagcgccaagcactgtggctcatgtcttcagagccagctgtgtaagcggttgaagcaggaggataggcttagtccgggtttccaggggcagctcggccagcatagtgagacatcctccctgaaaacggtgatcgggcctcttgctcctagctgccacctggctgatatgaagaattggaggtggcagcagtggtag

SEQ ID NO: 229412 - DNA, 276 bp, Artificial Sequence
  derived and/or modified sequence
atggaaatcgcgcattatgccaaagtgtttaccgcagacggccacctcggttgctacatcctggctaccatgaattaccactcagctaaacactgcggtagctgcctccagtctcagctgtgcaaacggctcaagcaggaggaccgactttcaccaggtttccagggtcagctgggccagcacagcgagactagttcccttaaaacagtcataggccctctggctccctcttgtcatctggctgatatgaagaattggagatggcaacagtggtag

SEQ ID NO: 229413 - DNA, 2321 bp, Artificial Sequence
  derived and/or modified sequence
gcaggcagaggagcacttagcagcttattcagtgtccgattctgattccggcaaggatccaagcatggaatgctgccgtcgggcaactcctggcacactgctcctctttctggctttcctgctcctgagttccaggaccgcacgctccgaggaggaccgggacggcctatgggatgcctggggcccatggagtgaatgctcacgcacctgcgggggtggggcctcctactctctgaggcgctgcctgagcagcaagagctgtgaaggaagaaatatccgatacagaacatgcagtaatgtggactgcccaccagaagcaggtgatttccgagctcagcaatgctcagctcataatgatgtcaagcaccatggccagttttatgaatggcttcctgtgtctaatgaccctgacaacccatgttcactcaagtgccaagccaaaggaacaaccctggttgttgaactagcacctaaggtcttagatggtacgcgttgctatacagaatctttggatatgtgcatcagtggtttatgccaaattgttggctgcgatcaccagctgggaagcaccgtcaaggaagataactgtggggtctgcaacggagatgggtccacctgccggctggtccgagggcagtataaatcccagctctccgcaaccaaatcggatgatactgtggttgcaattccctatggaagtagacatattcgccttgtcttaaaaggtcctgatcacttatatctggaaaccaaaaccctccaggggactaaaggtgaaaacagtctcagctccacaggaactttccttgtggacaattctagtgtggacttccagaaatttccagacaaagagatactgagaatggctggaccactcacagcagatttcattgtcaagattcgtaactcgggctccgctgacagtacagtccagttcatcttctatcaacccatcatccaccgatggagggagacggatttctttccttgctcagcaacctgtggaggaggttatcagctgacatcggctgagtgctacgatctgaggagcaaccgtgtggttgctgaccaatactgtcactattacccagagaacatcaaacccaaacccaagcttcaggagtgcaacttggatccttgtccagccaggtgggaggccaccccatggaccgcgtgctcctcctcgtgtggggggggcatccagagccgggcagtttcctgtgtggaggaggacatccaggggcatgtcacttcagtggaagagtggaaatgcatgtacacccctaagatgcccatcgcgcagccctgcaacatttttgactgccctaaatggctggcacaggagtggtctccggtaactgtgccttctttctttgttcattaggagagtaagtccactcttccctctcatcatcatggccccaccgggtaccctgagcagctccacactcttcttgaggtgtctagaagcctaccagcttagctcctggagtaggaatgccccaaatccagcatgaccaaaagtaaatgatgtttttttaaagtgtctttcttcaagtttcttcaagaagcctctattgttccccagataatgttccctcaaatagcacggggaagcaactgcctttcaagggtaattgaggctgaatgaatgatcccgaatctgtaaaagctgctttgatgatagagctcagtagaccagaagtttgatttcattttgtatgtattatgctttgtatccgaaagggtctaagtggattaatattaaaactatgtatattaatcattggagaagggggaagaggaaatgaaaatagcacaaaaattaaaattggaacgaagtaagataattaaaacaaaaaacttatagatgttaggaaacctgctgtaattaaacataaaatgtcattcagggtttcctgactgctaatgcagaaaggaaaatcgtaaaggaaacagaaagatgaaataagccattgtgccctccgcctcagaaatgacaaaagactcttcactgagccctgtggcttcatggcagcagatcagagctgtgacattttctacatctagacatgctaccagacatggggaaccattagaggtgcaatctacattgggcatctggtcattcaatctgtttttttaaatgttatttttgcctttcaatgtaatcaattggattaacaatgctgcaatataatttagctataatcgtagtttaaattttttgatatccatgtaggggtatttcccatatttttggaagtagcggtcattagcaaagtaactaaataaaatacagtgctggtagtcaaaattaa

SEQ ID NO: 229414 - DNA, 1578 bp, Artificial Sequence
  derived and/or modified sequence
atggaatgttgcagacgggcaactcccggcaccctactcctcttcttggcttttcttctgctgagcagtcgtacagctaggtctgaggaagatagagatggtctctgggacgcatgggggccctggtcagaatgttcgagaacatgcggcgggggcgcaagctattcgctacgacggtgtctgtctagtaaatcttgcgaggggcgcaatatccgataccgcacctgcagcaatgtagactgcccccctgaggctggagatttcagagcacagcaatgcagtgcacataatgacgtgaaacatcacggccagttctacgagtggcttccagtgagcaacgaccctgataatccctgctccctcaagtgtcaggccaagggcaccactctggtggtggaattagccccgaaagtgctcgatggaacacggtgttatactgagagcttggacatgtgtatttccggcctctgccaaatcgtggggtgtgatcaccaactcgggtccacagtcaaagaggacaattgtggcgtgtgcaatggcgatggcagcacgtgccgcttggtgagggggcaatacaagagccagcttagcgccacaaagagtgacgatacggtcgtggccattccatacggttctcgccacattcggctagtgcttaagggtcccgaccatttatacctggagaccaaaaccctacaaggaacaaaaggagagaactcgttgtcttccacggggacgtttttagttgacaactcttccgtggacttccaaaagttccccgataaagagattctgagaatggccggacccctgacagcagatttcatcgtgaaaatccgcaattctggctctgctgactccactgtgcagtttatcttttatcaacccatcattcacaggtggcgggaaacggacttctttccctgtagcgcaacatgcggaggaggctaccagctgaccagcgcggaatgctatgacctacggtccaatcgggttgtcgctgaccagtattgccactattaccctgaaaatatcaaaccgaaaccgaagctgcaggagtgtaacctggatccttgcccagctagcgacggatataaacaaatcatgccgtacgacctctaccaccctctccctcgatgggaggcaactccttggacagcctgctcttcttcctgcggaggtgggatccagagccgcgccgtctcctgtgtcgaggaggatattcagggacacgtgacctcggtcgaagaatggaagtgcatgtacacccccaagatgccaatcgctcagccctgcaacatttttgattgtcctaaatggctggcccaggagtggagcccttgcacagtgacatgcggccaggggcttcgttacagggtcgtcctgtgtattgaccatcggggaatgcacaccggcggatgttcccctaaaacaaagccccatattaaggaggagtgcattgttcccaccccatgctataagcctaaagaaaagctgcctgtcgaagccaaactgccatggttcaagcaggcccaggaactcgaggagggagccgccgtaagtgaggagcccagctag

SEQ ID NO: 229415 - DNA, 1320 bp, Artificial Sequence
  derived and/or modified sequence
atggagtgttgtagaagagctaccccagggactctgctgctgtttctagctttcctgcttctctcttctaggactgcccgatctgaagaagacagagacggactgtgggatgcctggggcccctggagtgaatgcagtagaacctgcggtggaggtgctagctacagtcttagaaggtgcctcagctccaagagctgtgagggtcgaaacataagatacaggacctgctctaatgtggactgccctccagaagctggagactttagagctcagcagtgttccgcccacaatgatgtgaaacatcatggacagttctacgaatggctacctgtcagtaatgaccctgataatccctgctctctaaaatgtcaggccaaggggaccactcttgtggtcgagttagctcccaaggtcctggacgggacacgctgctacaccgaatctttggatatgtgcatctcagggctctgccagatagttggttgcgatcatcagctgggtagtactgtgaaggaggataactgcggagtgtgtaacggagacggtagcacctgtcgtctggttagggggcagtacaagagccaactgtcagccacaaagtcagatgatacggttgtggccatcccgtatgggagcaggcatattcggctggtactgaaaggaccagatcacctgtacctcgagactaagactctacaaggcacaaaaggggagaatagcctgagtagcaccggaacgttcttggtggacaattctagcgtggacttccagaagtttccagataaagaaattctgaggatggcaggcccactaaccgcagactttatagtcaagatcagaaattccggctccgcagactctaccgtgcaattcatattttaccagccaatcatccaccgttggcgggaaaccgatttcttcccctgtagcgctacctgcggtggtggctaccagctgacctctgcagagtgctacgaccttcgcagcaatagggtggtcgcagatcaatattgccactactacccggaaaatataaagcccaagcctaaactgcaggagtgcaaccttgacccgtgccccgcacggtgggaggctactccgtggaccgcatgttccagctcttgtggcggcggaattcaatccagagccgtgtcatgcgttgaagaggacattcagggtcatgtaaccagcgtggaggagtggaagtgcatgtacaccccaaagatgccaattgcccagccatgtaacatctttgactgccctaaatggctggcccaggaatggtctccagtcacagtgccgtccttcttcgtgcactag

SEQ ID NO: 229416 - DNA, 1578 bp, Artificial Sequence
  derived and/or modified sequence
atggagtgctgcagaagagccaccccaggcaccctgctgctcttcctggccttcctgctgctgagcagcaggacagcccggtctgaggaggacagagatggcctgtgggatgcctggggcccctggagcgagtgcagcaggacctgtggcggcggggccagctacagcctgcggcgctgcctgagcagcaagagctgtgagggcaggaacatccgctaccgcacctgcagcaatgtggactgccccccagaggccggggacttccgggcccagcagtgcagcgcccacaatgatgtgaagcaccacggccagttctatgagtggctgcctgtgtccaatgaccctgacaacccctgcagcctgaagtgccaggccaagggcaccaccctggtggtggagctggcccccaaggtgctggatggcacccgctgctacacagagagcctggacatgtgcatcagcggcctgtgccagatcgtgggctgtgaccaccagctgggcagcacagtgaaggaggacaactgtggggtgtgcaatggagatggcagcacctgccgcctggtgcggggccagtacaagagccagctgagcgccaccaagagtgatgacacagtggtggccatcccctacggcagccgccacatccggctggtgctgaagggccctgaccacctgtacctggagaccaagaccctgcagggcaccaagggggagaacagcctgagcagcacaggcaccttcctggtggacaacagctctgtggacttccagaagttcccagacaaggagatcctgaggatggccggccccctgacagctgacttcatcgtgaagatccggaacagcggcagcgctgacagcacagtgcagttcatcttctaccagcccatcatccaccgctggagggagacagacttcttcccctgcagcgccacctgtggcggcggctaccagctgaccagcgcagaatgttatgacctgcggagcaacagagtggtggccgaccagtactgccactactacccagagaacatcaagcccaagcccaagctgcaggagtgcaacctggacccctgcccagccagtgatggctacaagcagatcatgccctatgacctgtaccaccccctgccccgctgggaggccaccccctggacagcctgcagcagcagctgtggcggcggcatccagagcagagctgtgtcctgtgtggaggaggacatccagggccacgtgacctctgtggaggagtggaagtgcatgtacacccccaagatgcccatcgcccagccctgcaacatctttgactgccccaagtggctggcccaggagtggagcccctgcaccgtgacctgtggccagggcctgcgctacagagtggtgctgtgcatcgaccaccggggcatgcacactggaggctgcagccccaagaccaagccccacatcaaggaggagtgcatcgtgcccaccccctgctacaagcccaaggagaagctgcctgtggaggccaagctgccctggttcaagcaggcccaggagctggaggagggcgctgctgtgtctgaggagcccagctag

SEQ ID NO: 229417 - DNA, 1320 bp, Artificial Sequence
  derived and/or modified sequence
atggagtgctgcagaagagccaccccaggcaccctgctgctcttcctggccttcctgctgctgagcagcaggacagcccggtctgaggaggacagagatggcctgtgggatgcctggggcccctggagcgagtgcagcaggacctgtggcggcggggccagctacagcctgcggcgctgcctgagcagcaagagctgtgagggcaggaacatccgctaccgcacctgcagcaatgtggactgccccccagaggccggggacttccgggcccagcagtgcagcgcccacaatgatgtgaagcaccacggccagttctatgagtggctgcctgtgtccaatgaccctgacaacccctgcagcctgaagtgccaggccaagggcaccaccctggtggtggagctggcccccaaggtgctggatggcacccgctgctacacagagagcctggacatgtgcatcagcggcctgtgccagatcgtgggctgtgaccaccagctgggcagcacagtgaaggaggacaactgtggggtgtgcaatggagatggcagcacctgccgcctggtgcggggccagtacaagagccagctgagcgccaccaagagtgatgacacagtggtggccatcccctacggcagccgccacatccggctggtgctgaagggccctgaccacctgtacctggagaccaagaccctgcagggcaccaagggggagaacagcctgagcagcacaggcaccttcctggtggacaacagctctgtggacttccagaagttcccagacaaggagatcctgaggatggccggccccctgacagctgacttcatcgtgaagatccggaacagcggcagcgctgacagcacagtgcagttcatcttctaccagcccatcatccaccgctggagggagacagacttcttcccctgcagcgccacctgtggcggcggctaccagctgaccagcgcagaatgttatgacctgcggagcaacagagtggtggccgaccagtactgccactactacccagagaacatcaagcccaagcccaagctgcaggagtgcaacctggacccctgcccagcccgctgggaggccaccccctggacagcctgcagcagcagctgtggcggcggcatccagagcagagctgtgtcctgtgtggaggaggacatccagggccacgtgacctctgtggaggagtggaagtgcatgtacacccccaagatgcccatcgcccagccctgcaacatctttgactgccccaagtggctggcccaggagtggagccctgtgacagtgcccagcttctttgtgcactag

SEQ ID NO: 229418 - DNA, 1578 bp, Artificial Sequence
  derived and/or modified sequence
atggagtgctgccggcgggccacccccggcaccctgctgctgttcctggcctttctgctcttaagttctcgaaccgcccgcagcgaagaggatagagatggcctgtgggacgcctggggaccatggtctgaatgttctcgaacatgcggaggaggtgccagttactcactgagaagatgtctgagctccaagagctgcgagggcaggaacatcaggtatcgcacatgtagcaatgtcgattgccctccggaagcaggggacttcagggctcagcagtgcagcgcccataatgacgttaagcaccacggtcagttttacgagtggttaccagtctcaaacgaccctgataacccgtgttctctgaagtgccaggcaaaggggaccaccctggtggtggaacttgctccaaaggtattagatggaacccgctgctataccgagtcactcgacatgtgcatctcgggcctttgtcagattgtgggttgcgaccaccaactcggctcaaccgtcaaggaagataattgtggtgtgtgtaatggggatggctctacctgtaggctcgtgcgaggtcaatacaaatcccagctctccgcaacaaaatccgacgataccgtcgttgccattccctatggcagtcgccacataaggctcgtactgaagggccctgaccatttgtatttggagaccaagacgctgcagggcaccaaaggcgaaaactcactctcaagtactggaacgtttctcgtggacaattcgtctgttgactttcagaaattccccgataaagaaatcctgaggatggccggcccccttacagcagacttcatcgtgaaaatcaggaactccgggtccgctgattcaaccgtccagttcatattctaccagcccattatacaccggtggcgcgagactgatttctttccctgctcagccacgtgtggtgggggctatcaactaacatcagccgagtgttacgacctcagatccaaccgtgtagtcgccgatcagtactgccactattatcctgagaatatcaagccaaaaccaaagctccaggagtgcaatttagatccatgccctgcctcagatggctacaagcaaatcatgccttatgatctctaccacccgctgcccaggtgggaggccacaccctggacagcctgttcttcatcctgcggtggcggcatccagtctagagcagtgtcatgcgtagaagaggacattcagggtcacgtgacaagcgtggaagaatggaagtgcatgtacactcctaagatgcctattgcacaaccttgtaacatcttcgactgcccgaaatggcttgcccaggagtggtcgccatgcacagtgacttgtggtcaaggccttcggtatagggtggtgctttgtatcgatcacaggggaatgcacactggagggtgttcacctaaaactaaaccccatatcaaggaagaatgtattgtgccaacaccgtgctacaagcctaaggaaaagctcccagtggaagccaaactcccatggttcaagcaggcccaggaattagaagagggggctgcggtctccgaagagccaagttag

SEQ ID NO: 229419 - DNA, 1320 bp, Artificial Sequence
  derived and/or modified sequence
atggagtgctgccggcgggccacccccggcaccctgctgctgttcctggccttcttgctcctctcttccagaactgcgagaagcgaggaagatagggatgggctgtgggacgcgtggggcccttggagcgagtgttcaaggacttgcggtgggggcgcctcatatagcctgcggagatgcctctcctcaaaaagttgcgaagggaggaacattcggtatagaacctgttcaaatgtggactgcccccctgaagcaggtgattttagggcccaacaatgctctgcacacaatgatgtcaaacaccacggtcagttctatgagtggctgcctgtctccaacgatcctgacaacccgtgctctcttaagtgccaagccaagggcactacactggttgtcgagttggctccgaaagtattggatggaacccgctgctataccgagtccttggacatgtgtattagcgggttgtgccagatcgtggggtgtgatcaccaactgggttccactgtaaaggaggataattgcggagtttgcaacggcgacggcagcacctgtaggctggtgcggggacagtataaatcccagctttccgccaccaagagcgatgacactgttgtggctattccctatggcagccgccacatcagactagtcctgaaggggccggatcacctttacctggaaacaaagacattacagggtacgaaaggggaaaacagtctttcaagcactggaaccttcctggtggataatagctcggtagatttccagaagttccccgataaagagatcctaagaatggcaggacctttgaccgccgactttattgtcaagattcggaattctgggagtgctgattccacagtgcagtttatattctaccagcccatcatccataggtggcgggagactgattttttcccttgttctgccacgtgcgggggcggttatcaactgacctccgctgagtgctacgatctccgttccaaccgggtggtggcagaccagtattgtcactattacccggagaatatcaaacctaaacccaagctgcaggagtgtaatctggatccttgcccggctagatgggaggctacaccgtggaccgcttgctctagcagttgcggaggaggtatacaaagccgcgccgtgtcttgtgtagaagaggacatacaaggacatgtgacctcagtcgaggagtggaaatgtatgtatactcccaagatgccaattgcgcagccctgcaacatcttcgattgccccaaatggctggcgcaggagtggtcacctgtcacggtgccgagcttctttgtgcattag

SEQ ID NO: 229420 - DNA, 1578 bp, Artificial Sequence
  derived and/or modified sequence
atggaatgttgtcggagagccactcccggtaccctcctgctgtttctggcattcctgttgctctcctcaaggacggcgagatctgaggaggacagggacgggctgtgggatgcatggggcccatggagtgagtgctcacgaacctgtggagggggtgcatcctacagcctgcgcagatgtctgtcttctaaatcttgtgagggcaggaacattagatatagaacgtgctcgaacgttgattgcccacccgaagccggagatttcagagcccaacagtgttcagctcataatgacgtcaagcatcatggacagttttatgagtggctgcccgtcagcaacgatccagataatccctgtagcttgaagtgccaggctaagggaaccaccctggttgtggaactggcccctaaagtcttagacggtacacggtgctacaccgagtctctggacatgtgcatcagcggactatgccagattgtgggatgtgaccaccaattgggatccactgttaaagaagacaactgcggcgtgtgtaacggagacggaagcacctgtaggctggtccgaggacaatacaaatcgcagctgagcgcgacgaagagcgatgacaccgtcgtggccatcccgtatggcagcagacacatacggctggtcctgaaggggccagaccacctgtacctggagacaaagaccctccagggcacaaaaggcgagaatagtttgagcagtactggtacattcctagtggataatagctctgtagacttccaaaaatttcctgacaaggagatattacgaatggcgggtccactgacggccgatttcatcgttaagattcggaactcaggttctgcagattcaaccgtgcagtttatcttttaccagccaatcattcacagatggagggagacggacttcttcccatgctcggcaacctgtggcggtgggtaccaactgacaagtgcagagtgttatgatctgaggtccaatagggtggtcgctgaccagtactgtcactactacccagaaaacatcaaaccgaagcccaagctgcaggaatgcaatctggacccttgtccagcgtccgatggctataagcaaattatgccttatgacctttatcatccattgccaagatgggaggctaccccatggaccgcctgttcatctagttgtggaggtggcatacaaagcagagctgtgtcttgcgtagaggaagatatccaggggcacgtgactagcgtggaagagtggaaatgtatgtacacccctaagatgccaattgcccagccatgtaatatcttcgactgtcccaagtggttggcacaggagtggtctccatgcaccgtgacatgtgggcagggattgaggtaccgggtggtgttatgtatcgaccaccggggtatgcacactggtggatgttcaccgaagacaaagccacatataaaggaggaatgtatcgttcctactccttgctacaaacccaaggagaaattgcctgttgaggcgaaacttccatggtttaagcaggcccaggaactggaggagggggctgccgtgagcgaagagccaagttag

SEQ ID NO: 229421 - DNA, 1320 bp, Artificial Sequence
  derived and/or modified sequence
atggaatgttgtaggagggccacaccaggaacccttttgctctttctagccttccttttgctgtcatccaggacagccaggtcagaggaggatcgtgacggactgtgggacgcatgggggccttggagtgagtgctctcgcacatgcggcggtggggcaagttacagtctgaggcggtgcttgtcctccaaatcctgtgagggtcgtaacatccggtatcggacttgctcaaacgtcgactgtccccctgaagctggagacttcagagcccagcagtgtagtgcacacaacgatgtcaagcatcatggccaattttacgagtggctgcccgtgtcaaatgacccagacaatccttgtagtctgaagtgccaggcaaaagggactaccttggtagttgaattggcgcctaaagtcctggatggaactcgttgctatactgagtccttggacatgtgcatctcgggcctttgtcagatcgtgggttgtgatcaccagctgggtagcacagttaaagaggacaattgcggagtatgcaacggtgatggatccacgtgtagactggttaggggccagtacaagtcacaactatctgcaaccaagagtgacgataccgtggtcgcgattccctacggatctcgccatattcgattagtgctaaagggccctgaccatttgtatctggagactaaaaccctccaggggacaaaaggggaaaactcactgagctccaccggcacctttcttgtggataattcctcagtggactttcagaagtttccggacaaagagatcctaagaatggccggtcccctcacggccgactttattgtgaaaattcgcaatagtggctctgcagacagcactgtgcagtttattttctaccagcctataatccaccgctggagggagacagattttttcccatgttctgccacatgtggcggtgggtaccaacttaccagcgccgagtgttacgacctgcgtagtaatagagtggtcgcagaccagtactgccattactaccctgagaacatcaaacctaagcctaagttgcaagaatgtaacctcgacccttgcccagcaaggtgggaggcaacaccctggaccgcatgtagttcaagctgcggtggaggcatccaaagtagagctgtgtcctgtgtcgaggaggatattcagggccatgtcacttctgtggaggagtggaaatgcatgtacacccctaaaatgcctatcgcccagccttgtaacatcttcgattgccccaagtggctggcccaggagtggtcacctgttaccgtcccaagcttttttgtgcactag

SEQ ID NO: 229422 - DNA, 1578 bp, Artificial Sequence
  derived and/or modified sequence
atggagtgttgtagacgagcgacccccggaacacttcttctttttctcgccttcctactcctttctagtagaacagcgcgctcagaagaggatcgcgatggattatgggacgcttggggcccctggtcagagtgttcgcgaacctgtggaggaggcgcttcatacagccttcgtagatgcctctccagcaagtcatgcgagggcaggaatataagataccggacctgtagtaatgtggattgcccaccagaagccggggattttagggcccaacaatgtagtgctcataacgatgttaaacaccacggacagttctatgagtggcttcccgtgtccaatgatcctgacaacccatgctccctcaagtgccaagccaaggggaccactcttgttgtcgaactggctccgaaggtgctggatgggacccgatgctacaccgaaagccttgatatgtgtatttctggactgtgccagattgtgggctgcgaccaccagttaggcagtacagtgaaagaagacaattgcggagtgtgcaatggcgacggatcaacttgccgtctggttcgggggcagtacaagagtcaactatccgcaaccaaatccgacgataccgtggtcgccataccctacggatctcggcatatccggcttgtgctgaaaggtccagaccacctctatctcgaaacaaagacccttcaaggcaccaagggcgagaacagtcttagcagtactgggactttcctggtggacaactcatctgttgactttcagaaattccctgataaagaaatcctgcgtatggcgggtcctctcacagccgacttcatcgtaaaaattaggaactcgggttcagctgacagcaccgtgcagttcatcttttatcagccgattatccaccgatggagagaaaccgatttctttccctgctctgctacatgcgggggcggctatcaacttacgtctgcagagtgttacgatctccggagcaatagagtcgtggcagatcagtattgtcattattatcccgagaacattaagcccaaacctaaattacaggagtgtaatttggatccctgcccagcttctgatggttacaaacagataatgccctacgatctatatcaccccctccccaggtgggaagccacaccttggactgcctgttcatcaagttgtggcggtggtatacagagcagagctgtcagctgcgtggaggaagatatccagggccacgtgactagtgtcgaagagtggaagtgtatgtatactcctaagatgcccatcgcacaaccgtgcaacattttcgattgccccaagtggctcgctcaggaatggtcaccttgtactgttacctgcgggcagggcctcagatatcgggtggtcctgtgtattgatcacaggggcatgcacaccggtggctgttctccaaaaaccaagccacatatcaaagaagagtgcatcgtgcctactccctgttataaacccaaggagaagctgcccgtggaagcgaagcttccttggttcaaacaggcccaagagcttgaggagggagccgccgtctccgaagaaccatcctag

SEQ ID NO: 229423 - DNA, 1320 bp, Artificial Sequence
  derived and/or modified sequence
atggaatgctgccgaagagccacccctgggacattgctgttatttttggccttcctgctccttagctctcgaactgcccgatccgaagaggatagagatggcttatgggatgcctggggcccatggagcgaatgttcaagaacatgcggcggaggcgcgtcttactctttgcgcaggtgcttaagctcaaagtcttgtgagggcagaaatattagatatcgaacgtgctcgaacgtggactgtccacctgaggccggcgactttagagcccagcaatgtagcgcccataatgacgttaaacaccacggccagttttacgaatggttacccgtgagtaatgaccctgacaatccctgttccctgaagtgtcaggccaagggcacgacccttgttgtggagctggcccccaaggtgctggacggaactagatgttataccgaatccctcgatatgtgtataagcggactttgtcaaattgtaggctgtgaccatcaactggggtctactgttaaggaggacaattgtggcgtgtgtaacggcgacggcagcacctgcaggctggtccgggggcaatataaaagccaattgagtgccacaaaatctgacgacaccgtcgtcgccatcccctacggaagtaggcacataagactggtactgaagggacccgaccatttgtacctggagacaaagacactgcagggtaccaaaggcgagaactctcttagcagtacgggaacctttctcgtcgataacagttccgtggacttccagaaattccctgacaaagagatcctgcgcatggctggccccctgaccgcagatttcatcgtgaaaatccggaacagcgggagcgcggattccactgttcagttcatattttaccagcccataattcaccgatggcgcgagacagacttttttccctgttctgccacctgcggcggtggataccagttaaccagcgctgagtgctacgacttgcggtccaacagggttgtcgcggatcagtactgtcactactatcccgagaacattaagccaaagcctaaactccaagagtgtaatctcgacccatgcccagcgcggtgggaagctacaccttggactgcgtgtagctcctcgtgtggaggagggatacagtcccgtgcggtaagctgcgtggaagaagacattcagggacatgtcaccagcgtggaagagtggaagtgtatgtataccccaaagatgccaattgcccagccatgtaacatctttgactgccctaaatggcttgcccaggaatggagccctgtcactgtgccctccttttttgtacactag

SEQ ID NO: 229424 - DNA, 1578 bp, Artificial Sequence
  derived and/or modified sequence
atggagtgttgtagacgagcgacccccggaacacttcttctttttctcgccttcctactcctttctagtagaacagcgcgctcagaagaggatcgcgatggattatgggacgcttggggcccctggtcagagtgttcgcgaacctgtggaggaggcgcttcatacagccttcgtagatgcctctccagcaagtcatgcgagggcaggaatataagataccggacctgtagtaatgtggattgcccaccagaagccggggattttagggcccaacaatgtagtgctcataacgatgttaaacaccatgggcaattctatgagtggctacccgttagtaacgatcctgataacccatgttctcttaaatgtcaggcaaagggcactactttggtagtcgagctggcaccaaaagtcttggatggtaccaggtgttacactgaaagcctggatatgtgtattagcggattgtgtcagattgtcggatgtgaccatcagctgggctcaactgtgaaggaagataattgtggcgtgtgtaacggagatgggagcacctgccggctggtccgaggacaatacaaaagtcaactgagcgctacaaaatctgacgacacagtcgtcgctattccatacggctcccggcacatcagactcgtcttaaaagggcctgaccacctgtacctcgaaaccaagactctgcaaggaacaaaaggagagaatagcctgtcttcgacaggaactttcttggtagacaactcaagcgtggatttccagaaattcccagataaagaaattctgcgaatggctggccctttaacagcagatttcatcgtgaagattagaaatagcggaagcgccgactccaccgttcaattcattttctatcaacccattatccatcgatggcgagaaacagacttcttcccttgcagcgcaacttgcggcggcggataccaactgactagcgccgagtgttatgacttgcgcagtaatagagtagttgcagatcagtactgccactactatcccgagaacattaaacccaaacctaagctccaagaatgcaatctggacccctgcccagccagcgatggatataaacaaatcatgccatacgatctttaccatcccctgcctaggtgggaagccaccccctggaccgcctgctcttcctcgtgtggcggaggaatacagtctagagctgtaagttgtgttgaggaggacatacagggccatgtgaccagtgtcgaagaatggaagtgtatgtacacaccaaaaatgccaatcgcccagccctgcaatatattcgattgccctaagtggcttgcccaagaatggagcccttgcacggttacctgtggtcagggtttaagataccgggtcgtgctatgtatcgatcacagaggaatgcacacgggaggatgttctccaaaaactaagcctcacatcaaagaagagtgcatcgtccctacaccttgctacaagccgaaagagaagttgcctgttgaagcaaaactcccatggttcaagcaagctcaagaactggaagagggcgccgcggtttctgaagagcccagttag

SEQ ID NO: 229425 - DNA, 1320 bp, Artificial Sequence
  derived and/or modified sequence
atggaatgctgccgaagagccacccctgggacattgctgttatttttggccttcctgctccttagctctcgaactgcccgatccgaagaggatagagatggcttatgggatgcctggggcccatggagcgaatgttcaagaacatgcggcggaggcgcgtcttactctttgcgcaggtgcttaagctcaaagtcttgtgagggcagaaatattagatatcgaacgtgctcgaacgtggactgtccacctgaggccggcgactttagagcccagcaatgtagcgcccataatgacgttaaacaccacgggcagttttacgagtggctgccagtgtcaaacgatcccgataatccttgttccttgaagtgtcaagctaagggtaccaccttagtagtcgaactcgcccccaaggtgctggatggtacgcggtgttacaccgagagccttgacatgtgcattagcggcctttgtcagattgtaggctgtgaccaccagctgggatccaccgtgaaagaggataactgtggagtgtgtaacggagatgggagtacctgtagactagtacgagggcagtataagagccagctttcagcgaccaagtccgacgacactgtcgtggctatcccctacggttccagacacatcagactggtgttaaagggccccgaccacttgtacctcgagaccaaaacactgcagggcacaaaaggagaaaactccctatcatctaccggcacgttcctggttgataattcctccgttgacttccagaagttccctgataaagagatcctgaggatggccgggccactcaccgctgactttatagtgaagattagaaacagcggctcagcagattccactgtccagttcattttctatcagcccataattcatcgttggcgagaaactgacttctttccgtgttctgcaacatgcggtggcggttaccaactgacaagtgccgagtgctacgatttaaggagcaaccgggtggtggccgatcagtactgtcactattatccggagaacataaaacccaagcccaaacttcaggagtgtaaccttgacccctgcccagcacgatgggaggccacaccatggacggcctgttcctctagttgcggtggcggtattcaatctagggcagtatcttgtgtcgaagaagacattcaaggtcacgtgacttccgtagaggaatggaaatgtatgtatacacctaaaatgcccatcgctcagccttgtaatatttttgattgtccaaaatggctcgcccaggagtggtcccccgtcacagttccgtctttcttcgtgcactag

SEQ ID NO: 229426 - DNA, 1578 bp, Artificial Sequence
  derived and/or modified sequence
atggagtgctgcagaagagccacccccggcaccctgctgctgttcctggccttcctgctgctgagcagcagaaccgccagaagcgaggaggacagagacggcctgtgggacgcctggggcccctggagcgagtgcagcagaacctgcggcggcggcgccagctacagcctgagaagatgcctgagcagcaagagctgcgagggcagaaacatcagatacagaacctgcagcaacgtggactgcccccccgaggccggcgacttcagagcccagcagtgcagcgcccacaacgacgtgaagcaccacggccagttctacgagtggctgcccgtgagcaacgaccccgacaacccctgcagcctgaagtgccaggccaagggcaccaccctggtggtggagctggcccccaaggtgctggacggcaccagatgctacaccgagagcctggacatgtgcatcagcggcctgtgccagatcgtgggctgcgaccaccagctgggcagcaccgtgaaggaggacaactgcggcgtgtgcaacggcgacggcagcacctgcagactggtgagaggccagtacaagagccagctgagcgccaccaagagcgacgacaccgtggtggccatcccctacggcagcagacacatcagactggtgctgaagggccccgaccacctgtacctggagaccaagaccctgcagggcaccaagggcgagaacagcctgagcagcaccggcaccttcctggtggacaacagcagcgtggacttccagaagttccccgacaaggagatcctgagaatggccggccccctgaccgccgacttcatcgtgaagatcagaaacagcggcagcgccgacagcaccgtgcagttcatcttctaccagcccatcatccacagatggagagagaccgacttcttcccctgcagcgccacctgcggcggcggctaccagctgaccagcgccgagtgctacgacctgagaagcaacagagtggtggccgaccagtactgccactactaccccgagaacatcaagcccaagcccaagctgcaggagtgcaacctggacccctgccccgccagcgacggctacaagcagatcatgccctacgacctgtaccaccccctgcccagatgggaggccaccccctggaccgcctgcagcagcagctgcggcggcggcatccagagcagagccgtgagctgcgtggaggaggacatccagggccacgtgaccagcgtggaggagtggaagtgcatgtacacccccaagatgcccatcgcccagccctgcaacatcttcgactgccccaagtggctggcccaggagtggagcccctgcaccgtgacctgcggccagggcctgagatacagagtggtgctgtgcatcgaccacagaggcatgcacaccggcggctgcagccccaagaccaagccccacatcaaggaggagtgcatcgtgcccaccccctgctacaagcccaaggagaagctgcccgtggaggccaagctgccctggttcaagcaggcccaggagctggaggagggcgccgccgtgagcgaggagcccagctag

SEQ ID NO: 229427 - DNA, 1320 bp, Artificial Sequence
  derived and/or modified sequence
atggagtgctgcagaagagccacccccggcaccctgctgctgttcctggccttcctgctgctgagcagcagaaccgccagaagcgaggaggacagagacggcctgtgggacgcctggggcccctggagcgagtgcagcagaacctgcggcggcggcgccagctacagcctgagaagatgcctgagcagcaagagctgcgagggcagaaacatcagatacagaacctgcagcaacgtggactgcccccccgaggccggcgacttcagagcccagcagtgcagcgcccacaacgacgtgaagcaccacggccagttctacgagtggctgcccgtgagcaacgaccccgacaacccctgcagcctgaagtgccaggccaagggcaccaccctggtggtggagctggcccccaaggtgctggacggcaccagatgctacaccgagagcctggacatgtgcatcagcggcctgtgccagatcgtgggctgcgaccaccagctgggcagcaccgtgaaggaggacaactgcggcgtgtgcaacggcgacggcagcacctgcagactggtgagaggccagtacaagagccagctgagcgccaccaagagcgacgacaccgtggtggccatcccctacggcagcagacacatcagactggtgctgaagggccccgaccacctgtacctggagaccaagaccctgcagggcaccaagggcgagaacagcctgagcagcaccggcaccttcctggtggacaacagcagcgtggacttccagaagttccccgacaaggagatcctgagaatggccggccccctgaccgccgacttcatcgtgaagatcagaaacagcggcagcgccgacagcaccgtgcagttcatcttctaccagcccatcatccacagatggagagagaccgacttcttcccctgcagcgccacctgcggcggcggctaccagctgaccagcgccgagtgctacgacctgagaagcaacagagtggtggccgaccagtactgccactactaccccgagaacatcaagcccaagcccaagctgcaggagtgcaacctggacccctgccccgccagatgggaggccaccccctggaccgcctgcagcagcagctgcggcggcggcatccagagcagagccgtgagctgcgtggaggaggacatccagggccacgtgaccagcgtggaggagtggaagtgcatgtacacccccaagatgcccatcgcccagccctgcaacatcttcgactgccccaagtggctggcccaggagtggagccccgtgaccgtgcccagcttcttcgtgcactag

SEQ ID NO: 229428 - DNA, 642 bp, Artificial Sequence
  derived and/or modified sequence
atgcagatccaggtggccggcctgctgcagttcgccgtgcccctgttcagcaccgccgaggaggacctgctggccatccagctgctgctgaacagcagcgagagcagcctgcaccagctgaccgccatggtggactgcagaggcctgcacaaggactacctggacgccctggccggcatctgctacgacggcctgcagggcctgctgtacctgggcctgttcagcttcctggccgccctggccttcagcaccatgatctgcgccggccccagagcctggaagcacttcaccaccagaaacagagactacgacgacatcgacgacgacgaccccttcaacccccaggcctggagaatggccgcccacagcccccccagaggccagctgcacagcttctgcagctacagcagcggcctgggcagccagaccagcctgcagccccccgcccagaccatcagcaacgcccccgtgagcgagtacatgaaccaggccatgctgttcggcagaaaccccagatacgagaacgtgcccctgatcggcagagccagccccccccccacctacagccccagcatgagagccacctacctgagcgtggccgacgagcacctgagacactacggcaaccagttccccgcctag

SEQ ID NO: 229429 - DNA, 642 bp, Artificial Sequence
  derived and/or modified sequence
atgcagatacaagtagccggcctgctgcaattcgctgtgccgctgttcagcaccgccgaggaggatctgctggcaattcagctcctgctcaacagcagcgagagctcccttcaccagctcacagcaatggtcgattgtagaggactgcataaagattatctggatgcattggccgggatttgctacgatggcctgcaagggttgttatatctggggctgtttagctttttggccgcactcgctttctccactatgatttgcgccgggccgcgagcctggaagcatttcacgacaagaaatagagattacgatgacatcgacgacgatgatcctttcaatccacaggcttggagaatggcagcccactctcccccccggggccaactccactcattttgctcgtacagctcagggttgggatctcagacctcactgcagccacccgcacaaactatttccaatgccccagtttcagaatatatgaaccaggctatgcttttcgggcggaacccacggtatgagaatgttccattaataggccgggcatcacctcctcccacctacagcccatcgatgcgcgcaacctacctgtcagtggcggatgagcacctgcggcattacggaaatcaattccctgcctag

SEQ ID NO: 229430 - DNA, 642 bp, Artificial Sequence
  derived and/or modified sequence
atgcagatccaggtggccggcctgctgcagtttgctgtgcccctcttcagcacagctgaggaggacctgctggccatccagctgctgctgaacagcagcgagagcagcctgcaccagctgacagccatggtggactgccggggcctgcacaaggactacctggatgccctggccggcatctgctatgatggcctgcagggcctgctgtacctgggcctcttctccttcctggccgccctggccttcagcaccatgatctgtgccggcccccgggcctggaagcacttcaccaccaggaacagagattatgatgacattgatgatgatgaccccttcaacccccaggcctggaggatggccgcccacagccccccccggggccagctgcacagcttctgcagctacagcagcggcctgggcagccagaccagcctgcagcccccagcccagaccatcagcaatgcccctgtgtctgagtacatgaaccaggccatgctgtttggaagaaaccccaggtatgaaaatgtgcccctgattggccgggccagccccccacccacctacagccccagcatgagggccacctacctgtctgtggctgatgagcacctgcggcactacggcaaccagtttcctgcctag

SEQ ID NO: 229431 - DNA, 642 bp, Artificial Sequence
  derived and/or modified sequence
atgcagatccaggtggccggcctgctgcagttcgccgtgcccctgttttctaccgcagaggaggatctcctggcaattcagttattactgaactcttcggaatcaagtctgcatcagctcacagccatggtggattgtagaggactgcacaaggactacctggacgcgctggctggcatttgttacgacggtctccagggcctgctgtacttggggttgttcagctttctggcagccctcgcgttttcaactatgatttgcgccgggccacgagcctggaaacactttaccaccaggaatagggactacgacgacatcgacgatgatgatccgtttaaccctcaggcttggcggatggctgcccactcccctccgcggggccagttgcactctttctgttcctactcaagcggactgggcagccagacgtcccttcagcccccagcacagacgatttcaaacgccccggtctccgagtacatgaatcaggctatgctgttcggtcgtaacccccggtacgagaatgtgcctctgatcggtcgcgcatcccctcccccaacctactcaccttctatgcgggccacgtatcttagcgtcgctgacgagcatttgcggcactacggaaaccagttccccgcatag

SEQ ID NO: 229432 - DNA, 642 bp, Artificial Sequence
  derived and/or modified sequence
atgcaaatccaggttgccggattgctgcagttcgcagtccccttgttctccactgccgaggaagacctcttggcaatccaactgctgttaaacagttctgaatcatccctgcaccagcttactgccatggtggactgtcggggtctacacaaagattacttagatgcactcgcaggaatctgctatgatggcttgcaggggcttttgtatttaggtctgttctccttcctggccgcactcgctttttctaccatgatttgcgctggtcccagggcctggaagcatttcaccacacggaacagggattatgatgacatcgacgatgatgatcctttcaaccctcaagcatggaggatggccgcacactctccccctcgcggtcagctgcatagtttctgctcttactcctcaggactcggttcacagacttccctgcaaccccctgctcaaaccatctcaaacgcacccgtcagcgaatacatgaatcaagctatgctttttggacgtaatcctcgctatgagaacgtccccctgattgggagggcttcaccccctcctacatactcgccgtctatgcgggcaacttacctctccgtggccgatgagcatttacgccactatgggaatcagttccctgcctag

SEQ ID NO: 229433 - protein, 628 aa, Artificial Sequence
  derived and/or modified sequence
MALRARALYDFRSENPGEISLREHEVLSLCSEQDIEGWLEGVNSRGDRGLFPASYVQVIRAPEPGPAGDGGPGAPARYANVPPGGFEPLPVAPPASFKPPPDAFQALLQPQQAPPPSTFQPPGAGFPYGGGALQPSPQQLYGGYQASQGSDDDWDDEWDDSSTVADEPGALGSGAYPDLDGSSSAGVGAAGRYRLSTRSDLSLGSRGGSVPPQHHPSGPKSSATVSRNLNRFSTFVKSGGEAFVLGEASGFVKDGDKLCVVLGPYGPEWQENPYPFQCTIDDPTKQTKFKGMKSYISYKLVPTHTQVPVHRRYKHFDWLYARLAEKFPVISVPHLPEKQATGRFEEDFISKRRKGLIWWMNHMASHPVLAQCDVFQHFLTCPSSTDEKAWKQGKRKAEKDEMVGANFFLTLSTPPAAALDLQEVESKIDGFKCFTKKMDDSALQLNHTANEFARKQVTGFKKEYQKVGQSFRGLSQAFELDQQAFSVGLNQAIAFTGDAYDAIGELFAEQPRQDLDPVMDLLALYQGHLANFPDIIHVQKGKAWPLEQVIWSVLCRLKGATLTAVPLWVSESYSTGEEASRDVDAWVFSLECKLDCSTGSFLLEYLALGNEYSFSKVQRVPLMTVLSF

SEQ ID NO: 229434 - protein, 591 aa, Artificial Sequence
  derived and/or modified sequence
MALRARALYDFRSENPGEISLREHEVLSLCSEQDIEGWLEGVNSRGDRGLFPASYVQVIRAPEPGPAGDGGPGAPARYANVPPGGFEPLPVAPPASFKPPPDAFQALLQPQQAPPPSTFQPPGAGFPYGGGALQPSPQQLYGGYQASQGSDDDWDDEWDDSSTVADEPGALGSGAYPDLDGSSSAGVGAAGRYRLSTRSDLSLGSRGGSVPPQHHPSGPKSSATVSRNLNRFSTFVKSGGEAFVLGEASGFVKDGDKLCVVLGPYGPEWQENPYPFQCTIDDPTKQTKFKGMKSYISYKLVPTHTQVPVHRRYKHFDWLYARLAEKFPVISVPHLPEKQATGRFEEDFISKRRKGLIWWMNHMASHPVLAQCDVFQHFLTCPSSTDEKAWKQGKRKAEKDEMVGANFFLTLSTPPAAALDLQEVESKIDGFKCFTKKMDDSALQLNHTANEFARKQVTGFKKEYQKVGQSFRGLSQAFELDQQAFSVGLNQAIAFTGDAYDAIGELFAEQPRQDLDPVMDLLALYQGHLANFPDIIHVQKGKAWPLEQVIWSVLCRLKGATLTAVPLWVSESYSTGEEASRDVDAWVFSLE

SEQ ID NO: 229435 - DNA, 1887 bp, Artificial Sequence
  derived and/or modified sequence
atggccctgagagccagagccctgtacgacttcagaagcgagaaccccggcgagatcagcctgagagagcacgaggtgctgagcctgtgcagcgagcaggacatcgagggctggctggagggcgtgaacagcagaggcgacagaggcctgttccccgccagctacgtgcaggtgatcagagcccccgagcccggccccgccggcgacggcggccccggcgcccccgccagatacgccaacgtgccccccggcggcttcgagcccctgcccgtggccccccccgccagcttcaagcccccccccgacgccttccaggccctgctgcagccccagcaggcccccccccccagcaccttccagccccccggcgccggcttcccctacggcggcggcgccctgcagcccagcccccagcagctgtacggcggctaccaggccagccagggcagcgacgacgactgggacgacgagtgggacgacagcagcaccgtggccgacgagcccggcgccctgggcagcggcgcctaccccgacctggacggcagcagcagcgccggcgtgggcgccgccggcagatacagactgagcaccagaagcgacctgagcctgggcagcagaggcggcagcgtgcccccccagcaccaccccagcggccccaagagcagcgccaccgtgagcagaaacctgaacagattcagcaccttcgtgaagagcggcggcgaggccttcgtgctgggcgaggccagcggcttcgtgaaggacggcgacaagctgtgcgtggtgctgggcccctacggccccgagtggcaggagaacccctaccccttccagtgcaccatcgacgaccccaccaagcagaccaagttcaagggcatgaagagctacatcagctacaagctggtgcccacccacacccaggtgcccgtgcacagaagatacaagcacttcgactggctgtacgccagactggccgagaagttccccgtgatcagcgtgccccacctgcccgagaagcaggccaccggcagattcgaggaggacttcatcagcaagagaagaaagggcctgatctggtggatgaaccacatggccagccaccccgtgctggcccagtgcgacgtgttccagcacttcctgacctgccccagcagcaccgacgagaaggcctggaagcagggcaagagaaaggccgagaaggacgagatggtgggcgccaacttcttcctgaccctgagcaccccccccgccgccgccctggacctgcaggaggtggagagcaagatcgacggcttcaagtgcttcaccaagaagatggacgacagcgccctgcagctgaaccacaccgccaacgagttcgccagaaagcaggtgaccggcttcaagaaggagtaccagaaggtgggccagagcttcagaggcctgagccaggccttcgagctggaccagcaggccttcagcgtgggcctgaaccaggccatcgccttcaccggcgacgcctacgacgccatcggcgagctgttcgccgagcagcccagacaggacctggaccccgtgatggacctgctggccctgtaccagggccacctggccaacttccccgacatcatccacgtgcagaagggcaaggcctggcccctggagcaggtgatctggagcgtgctgtgcagactgaagggcgccaccctgaccgccgtgcccctgtgggtgagcgagagctacagcaccggcgaggaggccagcagagacgtggacgcctgggtgttcagcctggagtgcaagctggactgcagcaccggcagcttcctgctggagtacctggccctgggcaacgagtacagcttcagcaaggtgcagagagtgcccctgatgaccgtgctgagcttctag

SEQ ID NO: 229436 - DNA, 1776 bp, Artificial Sequence
  derived and/or modified sequence
atggccctgagagccagagccctgtacgacttcagaagcgagaaccccggcgagatcagcctgagagagcacgaggtgctgagcctgtgcagcgagcaggacatcgagggctggctggagggcgtgaacagcagaggcgacagaggcctgttccccgccagctacgtgcaggtgatcagagcccccgagcccggccccgccggcgacggcggccccggcgcccccgccagatacgccaacgtgccccccggcggcttcgagcccctgcccgtggccccccccgccagcttcaagcccccccccgacgccttccaggccctgctgcagccccagcaggcccccccccccagcaccttccagccccccggcgccggcttcccctacggcggcggcgccctgcagcccagcccccagcagctgtacggcggctaccaggccagccagggcagcgacgacgactgggacgacgagtgggacgacagcagcaccgtggccgacgagcccggcgccctgggcagcggcgcctaccccgacctggacggcagcagcagcgccggcgtgggcgccgccggcagatacagactgagcaccagaagcgacctgagcctgggcagcagaggcggcagcgtgcccccccagcaccaccccagcggccccaagagcagcgccaccgtgagcagaaacctgaacagattcagcaccttcgtgaagagcggcggcgaggccttcgtgctgggcgaggccagcggcttcgtgaaggacggcgacaagctgtgcgtggtgctgggcccctacggccccgagtggcaggagaacccctaccccttccagtgcaccatcgacgaccccaccaagcagaccaagttcaagggcatgaagagctacatcagctacaagctggtgcccacccacacccaggtgcccgtgcacagaagatacaagcacttcgactggctgtacgccagactggccgagaagttccccgtgatcagcgtgccccacctgcccgagaagcaggccaccggcagattcgaggaggacttcatcagcaagagaagaaagggcctgatctggtggatgaaccacatggccagccaccccgtgctggcccagtgcgacgtgttccagcacttcctgacctgccccagcagcaccgacgagaaggcctggaagcagggcaagagaaaggccgagaaggacgagatggtgggcgccaacttcttcctgaccctgagcaccccccccgccgccgccctggacctgcaggaggtggagagcaagatcgacggcttcaagtgcttcaccaagaagatggacgacagcgccctgcagctgaaccacaccgccaacgagttcgccagaaagcaggtgaccggcttcaagaaggagtaccagaaggtgggccagagcttcagaggcctgagccaggccttcgagctggaccagcaggccttcagcgtgggcctgaaccaggccatcgccttcaccggcgacgcctacgacgccatcggcgagctgttcgccgagcagcccagacaggacctggaccccgtgatggacctgctggccctgtaccagggccacctggccaacttccccgacatcatccacgtgcagaagggcaaggcctggcccctggagcaggtgatctggagcgtgctgtgcagactgaagggcgccaccctgaccgccgtgcccctgtgggtgagcgagagctacagcaccggcgaggaggccagcagagacgtggacgcctgggtgttcagcctggagtag

SEQ ID NO: 229437 - DNA, 1887 bp, Artificial Sequence
  derived and/or modified sequence
atggctctaagggccagggcactctatgacttcaggtcggagaacccaggcgagatatcactgagggaacacgaggtgttgtcgctgtgtagcgagcaagacatcgagggctggctggaaggagtcaattcccgtggagatcggggcctctttcctgcctcctacgtgcaggtcattcgcgcccctgaacctgggcctgcgggcgatggaggaccaggagcccctgcacgatacgccaatgttccccctggcggcttcgaacccctgccagtggctccaccagcctcttttaaaccacccccagacgcctttcaggccttgctgcaaccccaacaggcgcccccgccatccactttccaacctcccggagccggatttccttacggaggaggcgccctacagcccagtcctcagcagttatatggtgggtatcaggctagccagggcagtgacgacgactgggacgatgagtgggatgactcaagtaccgtggctgacgagcccggggcactaggctccggcgcctatcccgatttggatggctcatcttctgctggggttggagccgctggacgatatcgcctgtcgacacgctctgatctaagcctgggcagccggggtggcagcgtaccgcctcagcaccacccgtcgggtcccaaaagtagtgccacagtgtctcgtaaccttaacaggttttctacattcgtaaagtctggtggtgaggcatttgtgctgggcgaagcaagtggctttgtcaaagacggggataagttgtgtgtcgtgctgggcccttatgggcctgaatggcaggaaaacccgtaccctttccagtgtaccatcgacgacccaaccaaacaaacaaaattcaaggggatgaagtcatacatttcttacaaactcgtgcccacgcacacccaggtacctgtgcaccgtaggtataagcattttgactggttatacgccaggctcgccgagaaatttcctgtgatttcggtgccacatcttcccgagaagcaagccaccggacgatttgaggaagactttattagcaaaagacgcaaaggcctgatttggtggatgaatcacatggcttcacacccagtgctcgcccagtgcgatgtgttccagcactttctgacgtgcccttcatctactgatgaaaaggcctggaagcagggcaaacggaaggccgagaaggacgagatggtaggtgccaacttttttctgaccctctccacccccccagcagccgctctggatttgcaggaggtagagtccaagatcgacggctttaaatgttttacgaagaaaatggacgacagcgccttacaattaaaccacacggctaatgagttcgctcggaaacaggttactggctttaaaaaggagtatcagaaagtgggccaatctttccgcggactatctcaggcatttgagctcgatcagcaggctttctccgtgggcctcaaccaagctattgcttttacaggagacgcctatgacgcaatcggcgaactgtttgctgagcagcctagacaggatctggaccccgtaatggacctccttgccctctatcaaggtcatctggccaacttccccgacatcattcatgtgcagaaaggcaaagcctggcccctcgagcaggtgatctggtcagtgctatgtcgactgaaaggagctacgttgacggctgtgccgctgtgggtctcagagtcctactctaccggagaagaggcatctagggatgtggatgcgtgggtgttctcactggagtgtaaactcgactgctcaactggttccttcctgctcgagtatttggccctgggaaatgagtactccttttctaaggtccagcgagtgccgttgatgacggtattgagcttctag

SEQ ID NO: 229438 - DNA, 1776 bp, Artificial Sequence
  derived and/or modified sequence
atggccctgagagcccgcgctctctatgacttcaggtccgaaaaccctggcgaaatctctctgagagaacacgaggtgctgtcgttgtgttctgagcaggatatcgaaggctggcttgagggcgtcaactcgagaggggatcgaggactatttcccgcttcctacgttcaagtgattcgcgcaccagagcccgggcccgcaggtgacgggggacccggggcccccgcgcggtacgcgaacgttcctcctggtggatttgaaccactgcccgtagccccccctgcgagttttaagcctccgccggacgcatttcaggcccttctgcaaccacagcaggcccctcctccatccacatttcagccacctggcgctggattcccttacggaggaggcgccctacagccctcccctcaacagctctacggaggctatcaggccagccaggggtcagacgacgactgggatgacgagtgggacgactccagtacagttgctgacgaacccggagccctcggcagcggcgcctatcctgacttagatggatctagtagcgcaggggtcggtgccgccgggcgttaccggctgtcgacacgttcagacctgagcctgggatcccggggcggctccgtgccgccacagcaccatccatctggacctaaaagtagcgcaacagtgtctcgaaatctcaacaggttcagcaccttcgttaaaagcgggggagaggccttcgtcctcggcgaagctagtggctttgtaaaggacggcgataaattgtgtgtagtcctagggccctacggacccgagtggcaggagaacccctacccatttcaatgcaccatagacgatccaacaaagcagacaaaattcaaaggcatgaaaagttacattagctacaagctggtgcctactcatacacaggtcccagttcatcgaagatataagcacttcgattggctgtacgcccgattggccgagaagtttccagtaattagtgtaccgcatctgcctgagaagcaagctaccggcagatttgaagaggattttatctctaaaagaagaaagggactgatctggtggatgaaccacatggcaagccatccggttttagctcagtgtgatgtctttcagcacttcctgacatgtccaagttccaccgacgaaaaagcatggaagcaggggaaacgcaaagccgaaaaggacgagatggtcggtgcaaatttcttccttacactgtctacgccgccagcagcggccttagatctgcaggaagtggagtctaagatcgacggctttaaatgttttaccaaaaagatggatgattccgcactccaactgaaccacaccgctaacgagtttgcccggaagcaggtgacggggttcaaaaaggagtatcagaaagtgggacaaagttttcgaggcttgagccaagccttcgagctggatcagcaagccttcagcgtcggtctgaaccaggcaattgcctttacaggcgatgcctatgacgcgatcggtgaactgttcgcagagcagcctaggcaggacctcgatcccgtcatggaccttctggcgctgtatcagggtcatctggccaacttcccagacatcattcatgttcaaaaaggcaaagcatggccccttgagcaggtcatctggtctgtactgtgtcgactgaaaggagccacactcaccgcagtgccactgtgggtgagtgaatcttactctaccggggaagaggctagccgcgacgttgatgcgtgggtttttagcctggaatag

SEQ ID NO: 229439 - DNA, 1887 bp, Artificial Sequence
  derived and/or modified sequence
atggccctgcgggcccgggccctgtatgacttccgctctgagaaccctggagagatcagcctgcgggagcacgaggtgctgagcctgtgcagcgagcaggacatcgagggctggctggagggcgtgaacagcagaggagaccggggcctcttccctgccagctatgtgcaggtgatccgggcccctgagcccggccctgctggagatggcggccctggggccccagcccgctatgccaacgtgcccccaggcggctttgagcccctgcctgtggcccccccagccagcttcaagcccccaccagatgccttccaggccctgctgcagccccagcaggcccccccacccagcaccttccagcccccaggggccggcttcccctacggcggcggggccctgcagcccagcccccagcagctgtatggaggctaccaggccagccagggcagtgatgatgactgggatgatgagtgggatgacagcagcacagtggctgatgagcccggggccctgggcagcggggcctacccagacctggatggcagcagcagcgctggggtgggcgccgccggccgctaccgcctgagcaccaggagtgacctgagcctgggcagcagaggaggctctgtgcccccccagcaccaccccagcggccccaagagcagcgccaccgtgtccaggaacctgaaccgcttcagcacctttgtgaagagcggcggggaggcctttgtgctgggggaggccagcggctttgtgaaggatggagacaagctgtgtgtggtgctgggcccctacggccctgagtggcaggagaacccctaccccttccagtgcaccattgatgaccccaccaagcagaccaagttcaagggcatgaagagctacatctcctacaagctggtgcccacccacacccaggtgcctgtgcaccggcgctacaagcactttgactggctgtatgcccggctggccgagaagtttcctgtgatctctgtgccccacctgcctgagaagcaggccaccggccgctttgaggaggacttcatcagcaagaggaggaagggcctcatctggtggatgaaccacatggccagccaccctgtgctggcccagtgtgatgtgttccagcacttcctgacctgccccagcagcacagatgagaaggcctggaagcagggcaagaggaaggccgagaaggatgagatggtgggcgccaacttcttcctgaccctgagcaccccacctgctgctgccctggacctgcaggaggtggagagcaagattgatggcttcaagtgcttcaccaagaagatggatgattctgccctgcagctgaaccacacagccaatgaatttgccaggaagcaggtgacaggcttcaagaaggagtaccagaaggtgggccagagcttccggggcctgagccaggcctttgagctggaccagcaggccttctctgtgggcctgaaccaggccatcgccttcaccggagatgcctatgatgccatcggggagctgtttgctgagcagccccggcaggacctggaccctgtgatggacctgctggccctgtaccagggccacctggccaacttcccagacatcatccacgtgcagaagggcaaggcctggcccctggagcaggtgatctggagcgtgctgtgccgcctgaagggggccaccctgacagctgtgcccctgtgggtgtctgagagctacagcactggagaggaggccagcagagatgtggatgcctgggtgttcagcctggagtgcaagctggactgcagcacaggcagcttcctgctggagtacctggccctgggcaatgagtacagcttcagcaaggtgcagagggtgcccctgatgacagtgctgtccttctag

SEQ ID NO: 229440 - DNA, 1776 bp, Artificial Sequence
  derived and/or modified sequence
atggccctgcgggcccgggccctgtatgacttccgctctgagaaccctggagagatcagcctgcgggagcacgaggtgctgagcctgtgcagcgagcaggacatcgagggctggctggagggcgtgaacagcagaggagaccggggcctcttccctgccagctatgtgcaggtgatccgggcccctgagcccggccctgctggagatggcggccctggggccccagcccgctatgccaacgtgcccccaggcggctttgagcccctgcctgtggcccccccagccagcttcaagcccccaccagatgccttccaggccctgctgcagccccagcaggcccccccacccagcaccttccagcccccaggggccggcttcccctacggcggcggggccctgcagcccagcccccagcagctgtatggaggctaccaggccagccagggcagtgatgatgactgggatgatgagtgggatgacagcagcacagtggctgatgagcccggggccctgggcagcggggcctacccagacctggatggcagcagcagcgctggggtgggcgccgccggccgctaccgcctgagcaccaggagtgacctgagcctgggcagcagaggaggctctgtgcccccccagcaccaccccagcggccccaagagcagcgccaccgtgtccaggaacctgaaccgcttcagcacctttgtgaagagcggcggggaggcctttgtgctgggggaggccagcggctttgtgaaggatggagacaagctgtgtgtggtgctgggcccctacggccctgagtggcaggagaacccctaccccttccagtgcaccattgatgaccccaccaagcagaccaagttcaagggcatgaagagctacatctcctacaagctggtgcccacccacacccaggtgcctgtgcaccggcgctacaagcactttgactggctgtatgcccggctggccgagaagtttcctgtgatctctgtgccccacctgcctgagaagcaggccaccggccgctttgaggaggacttcatcagcaagaggaggaagggcctcatctggtggatgaaccacatggccagccaccctgtgctggcccagtgtgatgtgttccagcacttcctgacctgccccagcagcacagatgagaaggcctggaagcagggcaagaggaaggccgagaaggatgagatggtgggcgccaacttcttcctgaccctgagcaccccacctgctgctgccctggacctgcaggaggtggagagcaagattgatggcttcaagtgcttcaccaagaagatggatgattctgccctgcagctgaaccacacagccaatgaatttgccaggaagcaggtgacaggcttcaagaaggagtaccagaaggtgggccagagcttccggggcctgagccaggcctttgagctggaccagcaggccttctctgtgggcctgaaccaggccatcgccttcaccggagatgcctatgatgccatcggggagctgtttgctgagcagccccggcaggacctggaccctgtgatggacctgctggccctgtaccagggccacctggccaacttcccagacatcatccacgtgcagaagggcaaggcctggcccctggagcaggtgatctggagcgtgctgtgccgcctgaagggggccaccctgacagctgtgcccctgtgggtgtctgagagctacagcactggagaggaggccagcagagatgtggatgcctgggtgttcagcctggagtag

SEQ ID NO: 229441 - DNA, 1887 bp, Artificial Sequence
  derived and/or modified sequence
atggccctgcgggcccgggccctgtacgacttccggagcgagaacccgggtgagattagcctgcgcgaacatgaagtcctttccctgtgttctgaacaagacatagagggctggctggagggcgtcaactctcggggggatagggggctgttccctgccagctacgtgcaggtgatacgtgcacccgaaccaggccctgctggagacggcggtcccggggccccagcccgttatgcaaacgtgccaccgggcggcttcgagcctctccccgtggccccccccgcttcgtttaagcctcctccagatgctttccaggccttgctccagccgcagcaggcccccccgccatccactttccagcccccgggtgcgggattcccgtacggggggggagctctgcagccatctccccagcagctgtatggcgggtaccaggcctcacagggatctgacgacgattgggatgacgaatgggacgactccagcacagtggcggatgaaccgggcgcgctgggatccggggcctatcctgacctagacggctcatcttcagctggcgttggggctgcaggccggtaccggctctcgacccgcagcgacctgtctttaggctcgagagggggatccgttcctccccaacaccaccccagtgggcccaaatccagcgccactgtttcacgcaatctgaaccgcttcagcactttcgtgaaaagcggaggagaggcctttgtgctaggcgaggcgagcggatttgtgaaggatggggataagctttgcgtcgtgctgggcccatatggccccgaatggcaggagaatccctacccgttccagtgcaccattgatgatcctacaaagcagacgaagttcaaggggatgaaatcttacatcagttataaacttgtacccacacacactcaggtgcccgttcacaggaggtataaacactttgactggctgtacgccagattggctgagaaattcccagttatctcagtcccacacttaccggagaagcaagccacgggtcgcttcgaagaggattttatctccaagaggaggaagggattgatctggtggatgaatcacatggccagccatccggtgttggcccagtgtgatgtgtttcagcacttccttacttgcccatcctcaaccgacgaaaaagcatggaaacagggaaaacggaaggccgagaaagacgaaatggtgggcgcaaatttcttcctgactctgtccacccctcctgccgccgcgctcgatctgcaagaagttgaatcaaagattgatgggtttaaatgttttactaaaaaaatggacgacagtgctttgcagctgaatcataccgcgaacgagtttgcaagaaagcaggtgacggggtttaagaaggaatatcagaaggtcggacagagtttcagaggcctgtctcaggccttcgagctcgaccagcaagccttttccgttggactgaatcaggcaatcgcgttcactggcgatgcttacgatgctattggcgaactgttcgctgagcagccccggcaggaccttgatcccgtgatggacttactggccctataccaagggcacctggccaactttcccgatattatccatgttcagaaaggaaaggcatggcccctcgagcaagtgatttggtctgttctttgtcggcttaagggtgctacacttaccgccgtccccctttgggtgtcggagtcttacagcacgggcgaggaggccagtagggacgtggatgcgtgggtattctcgcttgagtgcaaactggattgttctaccggttctttccttttggaatatctggccttgggaaacgaatactcctttagcaaagttcaacgggttccactgatgacagtgttgtccttttag

SEQ ID NO: 229442 - DNA, 1776 bp, Artificial Sequence
  derived and/or modified sequence
atggccctgcgggcccgggccctgtacgacttccggagcgagaacccaggtgagatctcactgagagaacacgaggtgctttctctgtgctccgagcaagatattgaggggtggctcgagggcgtcaactctagaggcgacaggggactttttcctgcaagctatgtacaagtgatacgggcccccgaacccggacccgcaggcgacggaggcccaggcgcgcctgctaggtacgcaaatgtgccaccaggcggatttgaacctctgccggtggccccccctgcatccttcaaacctccccccgacgccttccaggctctgttgcagcctcagcaggcgccaccacccagcacttttcaaccgcccggggcgggcttcccctatggcgggggggcattgcagccctccccccagcagctgtacggcgggtaccaggcaagtcaggggtcggacgatgactgggacgatgagtgggacgactcatccacagtcgccgacgagccgggggccctggggagcggagcctacccagacttggacggttccagcagcgctggtgtgggtgcagccgggcgctaccggttgtcgacacgctccgacctgagtctcggcagcagggggggaagcgtgcctccccagcatcacccgagcgggccaaagtcgtctgcgacagtaagccggaacctgaatcgcttcagcaccttcgtgaagtccggtggcgaggccttcgttctcggagaagcctcgggctttgtcaaagacggggataaattgtgcgtggtgcttgggccctacgggcctgaatggcaagaaaatccgtatccgttccagtgtacaatcgatgatcctaccaaacaaactaagtttaaggggatgaagagctacatttcttataagctagtcccgacccatacacaggtgcctgtgcacaggaggtacaagcatttcgattggctgtacgcacgactggccgaaaaattcccggtgatcagcgtgccacacttacccgaaaaacaagccactggccggttcgaggaggattttatttctaagaggcggaagggtctaatctggtggatgaatcatatggcctcacaccccgtactggctcaatgtgacgtatttcagcatttcctcacgtgcccaagctccactgatgaaaaagcctggaagcagggcaaaagaaaggccgagaaggatgaaatggtgggtgccaatttttttctaaccttgagtactcctccagcagccgccctggacctccaggaggtggaatcaaagattgatggattcaagtgctttaccaaaaagatggacgacagtgctctccagctgaatcacactgcaaatgaattcgcaaggaaacaagtgactgggtttaaaaaggaataccagaaggtggggcagagctttagggggttaagccaggcttttgaactggaccaacaggcgttctcagtgggactaaatcaggcgatcgcttttaccggcgacgcctatgacgccataggagaactttttgctgaacaaccccggcaggaccttgatcccgtgatggaccttctggccctataccaaggtcatcttgctaattttcctgacattatacatgtacagaaaggcaaggcttggcctctcgagcaggttatctggtccgtgctgtgcaggctgaagggagccaccctcacggccgtaccactttgggtatcagaatcgtacagtacaggggaagaagcatcaagagacgttgatgcttgggtcttttcattggagtag

SEQ ID NO: 229443 - DNA, 1887 bp, Artificial Sequence
  derived and/or modified sequence
atggctcttcgtgctcgggctctgtacgatttcagaagtgaaaatcccggtgagatcagcctcagagagcatgaggtactttcactctgtagcgaacaggacattgagggatggctggaaggtgtgaatagcagaggggataggggactctttcctgctagttacgtccaggtcataagggcccctgaaccaggccctgccggtgatggcggaccaggggcaccagccagatacgcaaacgtcccgccaggaggctttgagccactccccgtggcccctccggcttccttcaagcccccacctgatgccttccaggctctgctccagcctcaacaggcccctcctccttcgacgtttcagcccccaggtgccggattcccctatggtggcggagccttgcagccgagtcctcagcaattgtacggtggttatcaggcgtcccaggggtccgatgacgactgggatgacgaatgggacgacagttctactgtagcggatgaacccggagccctgggcagtggcgcatacccggacctggacggctcgtctagcgcaggggtcggcgctgcaggcagataccgcctttccaccagatccgacctgagcctggggagcagaggtggctccgtgcccccacagcaccacccttcaggccctaagtctagcgccaccgtgtctcgcaacctcaaccggtttagcacatttgtgaagagcggaggcgaagcattcgttctcggggaggcttctgggtttgtgaaagacggagataagctgtgtgtggtcctggggccatacgggcctgaatggcaggagaacccttacccttttcagtgcacaatagatgacccaacaaaacagactaagtttaagggcatgaagtcctacatttcctataagctggtgcccacccacacccaggtgcctgttcacagaagatacaagcacttcgattggctgtatgcaagactcgctgagaagttccctgtaatcagcgtgcctcacctcccagagaaacaggcaacgggaaggtttgaagaggacttcatctccaagaggcgcaaaggcctaatctggtggatgaaccacatggcctcccatccggttcttgcccagtgcgacgtttttcaacacttcctgacctgcccatcgtcgacagatgaaaaagcttggaaacagggaaaacgcaaggcggaaaaagatgaaatggttggggcaaatttcttcctgacattgagcacccccccagcggcagctctggacttgcaggaagtcgagtctaaaattgacgggtttaaatgctttaccaagaagatggatgatagtgcccttcagctgaaccatacggccaatgagtttgcacggaaacaggtgaccggttttaagaaagagtatcagaaagtggggcagagctttcgtggcctgtcacaggcgttcgaactagaccagcaagccttcagcgtaggtctgaaccaggctatcgcttttaccggagatgcctacgatgccatcggggaactgttcgcggaacagcctcggcaggatctggatcctgtgatggatctgcttgccctctaccaaggccacctggccaactttcccgacattatccacgtccagaagggcaaggcatggcctctggagcaggtaatttggtccgtactttgccgactgaagggagccacacttacagctgttcccttgtgggttagtgagagctatagcacaggggaagaagcatcccgggacgtagacgcctgggtgttcagcctagaatgtaaactagactgttctaccggctcttttctgttggagtatcttgctttgggaaacgagtactctttcagcaaggtacaaagggtacctctgatgacagtcctgtctttctag

SEQ ID NO: 229444 - DNA, 1776 bp, Artificial Sequence
  derived and/or modified sequence
atggctcttcgtgcccgtgcattatatgacttccggtccgaaaatcccggtgagatatctcttcgcgagcacgaagtgctgtcgctgtgcagcgaacaggacatcgagggctggctggagggcgtcaactcccgcggagatcggggactcttcccggcaagttatgtgcaggtgatcagagcgcctgaaccgggacctgcaggcgacggaggacctggggctccagccagatacgcgaacgtcccaccagggggtttcgaacctcttccagtggccccacccgcatcgttcaagcctccacctgacgcatttcaggctcttctgcagccccagcaagctcctccgccttcaacgttccagcccccaggagccggattcccctatggcggtggggctctgcagcccagtccccagcaattatatggaggataccaggcttcccagggatccgacgatgattgggacgatgaatgggatgactcatcgacagtggcggacgaacccggtgctctcggaagtggggcttatcccgacctggatggatcctcatccgcaggtgtgggagctgcaggccgttaccgcctgtccactcgaagtgacctttcactgggttctaggggcggtagcgtccctcctcagcaccacccatccgggcctaagtcatccgcgacagtgagcaggaatctcaacagattttctaccttcgtgaagtcaggcggagaggccttcgtcctgggggaggcatcaggcttcgtcaaagatggtgacaaactgtgcgtcgttctcggcccttatggacctgagtggcaagaaaacccttacccgttccagtgcaccattgatgatcccaccaagcaaaccaagtttaagggaatgaaaagctacataagttataagttggtccctacccacacgcaggtgcctgtacaccggcgatataagcactttgactggctgtatgctcggctcgctgagaagttcccggtcatctctgtccctcacttgcctgaaaagcaggccaccggacgctttgaagaagacttcatcagtaagaggagaaaggggcttatctggtggatgaatcacatggcaagccatcccgtcttagcccagtgcgatgtgtttcagcactttctgacatgccccagctctacagacgaaaaagcgtggaaacagggcaagcgcaaagccgaaaaggacgaaatggtcggggcaaacttcttcctgacgctgtctactccccctgctgcagctctcgacctacaggaggtcgaaagtaaaatcgatggtttcaagtgctttacaaagaagatggacgactctgcgctacaactgaaccacacggcgaatgaattcgccagaaaacaggttaccggtttcaaaaaagagtaccagaaggtcgggcagagcttcagaggactttcccaggcctttgagcttgatcagcaggccttcagtgttgggcttaaccaggcaatcgcctttacaggagacgcatacgacgcgatcggcgaattatttgctgaacagcctaggcaggacctggacccagtgatggatctgcttgctctctaccagggtcacctcgctaacttccccgacataatccacgtgcagaaagggaaggcatggcccctggaacaagtgatttggtctgtcctgtgccgcctgaagggtgcgactcttaccgcggtcccactttgggttagcgaatcttacagcactggcgaggaggcctcccgggacgtggatgcctgggttttttccctggagtag

SEQ ID NO: 229445 - DNA, 3241 bp, Artificial Sequence
  derived and/or modified sequence
ggcgctgcgaagtggaggcgctgcgagcggagccgcgcggagggcgcgaccggctggtccgggcagcgtgggtttgccgccttcggggctccagtccgcgcgccagggctcgagcagtaccgcgggcccctcaggtgggcctcggctcgggacgccgggagtcgggaccgccagtcggggcgccgggaccatggcgctgcgcgcccgggcgctgtacgacttcaggtcggagaacccaggagagatctcgctgcgagagcacgaggtgctgagcctgtgcagcgagcaggacatcgagggctggctcgagggggtcaacagccgcggcgaccgcggcctcttcccggcctcctatgtgcaggtgatccgcgcccccgagcctggcccggcgggagacggcggcccgggcgccccggcccgctacgccaatgtgccccccgggggcttcgagcccctgcctgtcgcgccccccgcctccttcaagccgccgcctgacgccttccaggcgctgctgcagccacagcaggcgccgcctccgagcaccttccagccgcccggcgcgggcttcccgtacggcgggggcgccctgcagccgtcgcctcagcagctctacggcggctaccaggccagccaaggcagcgatgatgactgggacgacgagtgggacgacagctccacggtggcggacgagccgggcgctctgggcagcggagcatacccggacctcgacggctcgtcttcggcgggtgtgggcgcagccggccgctaccgcctgtccacgcgctccgacctgtccctgggttcccgcggcggctcggtccccccgcagcaccacccgtcggggcccaagagctcggccaccgtgagccgcaacctcaatcgcttctccaccttcgtcaagtccggcggggaggccttcgtgctgggggaggcgtcaggcttcgtgaaggacggggacaagctgtgcgtggtgctggggccctatggccccgagtggcaggagaacccctacccgttccagtgcaccatcgacgaccccaccaagcagaccaagttcaagggcatgaagagctacatctcctacaagctggtgcccacgcacacgcaggtgccggtgcatcggcgctacaagcacttcgactggctgtacgcgcgcctggcggagaagttcccggtcatctccgtgccccacctgcccgagaagcaggccaccggccgcttcgaggaggacttcatctctaagcgcaggaagggcctgatctggtggatgaaccacatggccagccacccagtgctggcgcagtgcgacgtcttccagcacttcctgacgtgccccagcagcaccgacgagaaagcctggaagcagggcaagaggaaggccgagaaggacgagatggtgggcgccaacttcttcctgacccttagcacgccccccgccgctgcccttgacctgcaggaggtggagagcaagatcgacggcttcaagtgcttcaccaagaagatggacgacagcgcgctgcagctcaaccacacggccaacgagttcgcgcgcaagcaggtgaccggcttcaaaaaggagtatcagaaggtgggccagtccttccgcggcctcagccaggcctttgagctggaccagcaggccttctcggtgggcctgaaccaggctatcgccttcaccggagatgcctatgacgccattggcgagctcttcgcggagcagcccaggcaggacctggatcccgtcatggacctattagcgctgtatcaggggcatctggctaacttcccggacatcatccacgttcagaaaggtaaagcctggcccttagagcaggtgatatggagtgtattgtgcaggctgaaaggggcgactttgacagcagtaccactgtgggtttcagaatcatattctacaggtgaggaagcgagcagagacgtggacgcctgggtcttttccctagagtgtaagttggattgctcgacaggcagcttcctcctcgagtatcttgcattagggaatgagtactctttctcgaaggttcaaagagtacctttgatgacagtgctatcattttagagtttgaatagttgagtaatgagctgctcaaatctgtaatcttgagacgagggtagaattagaaggggacctaaaccatgttaggtatctgtttgaacactgcactgtcacttagtggtgagtttcaaaaagtgaggaaataatggagaagaacggatgtctgtaaatagaaatctgctttcacccttccacacctctcaatctctgctttggtagaggaattaagatcaattctctgagtttaagaaattcctgcaaagaattcttgcctgcaacctttacgaagtgaagtaatttcaggaaaagcgtactcattttgagtttgaaatctattaatgtactgaaattgagaacgttgtttaggaaaattgtttagggaaactacatagaatgaatataatctgagtattggatctgagagcagcgttgctggtatcccagtgagttagctgtccaactatcagagttcatgagttattaatagttgttagtgtctctgacctttgctaaagcaccagaatttgcaaattaaaaaaatatatagcagtagtgcttgtcttaacatttcttactaatgtgcattctcatataatgccttgattgagagaatggggaggtgtgggagttagggaggcagtcttgcctgtgaaagtccagtgtaggggcggctgggcagggaaacctactcctgagcagggaaacctactgtccctgtttcctcagcgggtctggcctttactggtgaagtgctcactgcctttctggtgggccagtccgtttatgagcaaccctgatctctggcatgtcttttcttgtattgaactgaagtttgcctcccttgattgtctttctgttccctgggaccgccttcagacatttggagacagcagtctcgcttccttcctctctgcttctctccttccccttccaaatgcgtgactggtcttctgactcctatgggggaaggggcttgctgggagaatgatcaaacgttttcagtcttgttgctgccgctgaaagggagtaccctggacatcagtactaattttagtagacagtagtaactttcttggcaatttgcgatttgtaaatgcagtctaatattgaattcgttttttgtgcaatcatattgctgttggcctgtattaaacctgtatttacatt

SEQ ID NO: 229446 - protein, 213 aa, Artificial Sequence
  derived and/or modified sequence
MEDLLDLDEELRYSLATSRAKMGRRAQQESAQAENHLNGKNSSLTLTGETSSAKLPRCRQGGWAGDSVKASNGTQTGKQQLDLNACYHKTHHRDLGLASLEEADIPIIPDLEEVQEEDFVLQVAAPPSIQIKRVMTYRDLDNDLMKYSAIQTLDGEIDLKLLTKVLAPEHEVREDDVGWDWDHLFTEVSSEVLTEWDPLQTEKEDPAGQARHT

SEQ ID NO: 229447 - DNA, 642 bp, Artificial Sequence
  derived and/or modified sequence
atggaagacctcttagaccttgatgaagagctgaggtatagcctcgccacaagcagggcaaagatgggcagacgtgcccaacaggaatctgcgcaggccgaaaatcaccttaacggaaagaattcctccctgaccctgactggtgaaacgtcttctgccaaactgccccgttgcagacagggagggtgggccggggattcggtaaaggcctccaatggaactcagacaggcaagcagcaactcgacctgaatgcatgctaccacaagacacatcacagggatttggggctcgcgagcctggaggaggctgacattccaataattcccgatctagaggaagtgcaggaagaggactttgtgttgcaggtcgcggcccctccttcgatccagatcaaacgcgttatgacatatcgcgatctggacaatgatcttatgaagtactctgccattcagacgctcgacggtgagattgacttaaaattgcttaccaaagtgctggctcctgaacacgaagtaagagaggacgacgtaggttgggactgggaccatctgttcacagaggtgtcgagtgaagttttgacagaatgggacccgctccagactgagaaggaagatccagcgggacaggcaagacacacttag

SEQ ID NO: 229448 - DNA, 816 bp, Artificial Sequence
  derived and/or modified sequence
cggagatggaggatttgctcgacttggacgaggagcttcgctacagcttggctacctccagggccaagatgggtcgccgagctcaacaggagtcagcgcaggccgagaatcacctcaatggcaagaattcctctttgactctgactggagagacttcctctgctaaattacctcgctgccgacagggaggctgggcaggtgattccgtgaaggcttcgaacggtacccaaacaggcaaacaacagctggatctgaacgcatgctatcacaaaacgcatcacagagatttggggctggcttcattggaagaggcagatattcctatcattccggatctggaggaagtacaggaagaagactttgttttgcaggtggcagcccctcccagcatccagataaagcgggtgatgacctaccgtgacctggacaatgacctcatgaagtactcagccattcagacactggatggggagatcgacctgaaactcctcaccaaagtgctcgcgccggagcacgaagtccgggaggatgatgtcggctgggactgggaccatctgttcactgaggtgtcctcagaggtcctcactgagtgggacccactgcagacggagaaggaggaccctgcggggcaggccaggcacacctgagcccgtcacccatgctctagacatgaagaaatgcaatgagcttaaagctaaagaagcttgtaagcagctccgaatttttacctggaatattttgtaataaaaatatttatattcagtcaaccacattggataattcaattgcaataaattgcttattctgtgccatctc

SEQ ID NO: 229449 - DNA, 642 bp, Artificial Sequence
  derived and/or modified sequence
atggaggacctgctggacctggatgaggagctgcgctacagcctggccaccagccgggccaagatgggccggcgggcccagcaggagagcgcccaggccgagaaccacctgaatggcaagaacagcagcctgaccctgactggagagaccagcagcgccaagctgccccgctgccggcagggcggctgggccggggacagcgtgaaggccagcaatggcacccagacaggcaagcagcagctggacctgaatgcctgctaccacaagacccaccaccgggacctgggcctggccagcctggaggaggccgacatccccatcatcccagacctggaggaggtgcaggaggaggactttgtgctgcaggtggccgccccacccagcatccagatcaagagggtgatgacctacagagacctggacaatgacctgatgaagtacagcgccatccagaccctggatggagaaattgacctgaagctgctgaccaaggtgctggcccctgagcacgaggtgcgggaggatgatgtgggctgggactgggaccacctgttcacagaggtgagcagcgaggtgctgacagagtgggaccccctgcagacagagaaggaggaccctgctggccaggcccggcacacctag

SEQ ID NO: 229450 - DNA, 642 bp, Artificial Sequence
  derived and/or modified sequence
atggaggacctgctggacctggacgaggagctgcggtacagcctggctaccagcagggctaagatggggcgccgggctcaacaagagagcgctcaggccgagaatcacctcaacggcaagaatagctcactgactctgactggcgaaacttcgagcgcaaaattaccccgctgcaggcagggcggctgggctggcgacagcgtgaaggcatcaaacggcacacagactggcaagcagcaacttgatttaaacgcctgttatcataaaacccatcaccgagacctgggcctcgccagcctcgaggaagcagacattcccattattcctgatttagaagaagtgcaggaggaagactttgttctgcaagtggctgccccacctagtatacaaattaagcgggtcatgacttatcgggaccttgacaacgatctcatgaagtatagtgccatccagaccctagatggcgagattgacctgaaactgctgacaaaggtgttagccccggaacacgaggtacgggaggacgacgtgggctgggattgggatcacctgtttacagaagtgtcatccgaagttcttacggagtgggatcctctgcagactgaaaaggaggacccagccggccaagctcggcacacctag

SEQ ID NO: 229451 - DNA, 642 bp, Artificial Sequence
  derived and/or modified sequence
atggaagacctgctggatctggacgaggagttaagatattctctcgcgaccagcagagcaaagatggggagacgcgctcaacaggagtcggcgcaggctgaaaatcacctgaacgggaagaatagtagcctaactctaacaggagagacctctagcgccaagctgccaagatgccggcaaggaggttgggcaggggattcagtgaaagcctctaatgggacgcagaccggcaagcagcagttagaccttaacgcctgctaccataaaactcaccatagagaccttggactggcctccttggaagaagcagacataccaattattcccgacctggaagaagtgcaggaggaggacttcgtactccaggtggccgctccccctagtattcagatcaaacgggttatgacataccgggacctggacaacgacctgatgaaatacagcgcaatccaaacactggatggcgagatcgacctgaagctcttaacaaaagtactggcgcctgaacacgaggtacgtgaggatgatgtaggctgggactgggaccacttatttaccgaggtctcctcagaggttttaacagagtgggatcccttgcagactgaaaaggaggaccctgctggtcaggcaaggcatacttag

SEQ ID NO: 229452 - DNA, 642 bp, Artificial Sequence
  derived and/or modified sequence
atggaggacctgctggacctggacgaggagctgagatacagcctggccaccagcagagccaagatgggcagaagagcccagcaggagagcgcccaggccgagaaccacctgaacggcaagaacagcagcctgaccctgaccggcgagaccagcagcgccaagctgcccagatgcagacagggcggctgggccggcgacagcgtgaaggccagcaacggcacccagaccggcaagcagcagctggacctgaacgcctgctaccacaagacccaccacagagacctgggcctggccagcctggaggaggccgacatccccatcatccccgacctggaggaggtgcaggaggaggacttcgtgctgcaggtggccgccccccccagcatccagatcaagagagtgatgacctacagagacctggacaacgacctgatgaagtacagcgccatccagaccctggacggcgagatcgacctgaagctgctgaccaaggtgctggcccccgagcacgaggtgagagaggacgacgtgggctgggactgggaccacctgttcaccgaggtgagcagcgaggtgctgaccgagtgggaccccctgcagaccgagaaggaggaccccgccggccaggccagacacacctag

SEQ ID NO: 229453 - protein, 288 aa, Artificial Sequence
  derived and/or modified sequence
MKDRTQELRSAKDSDDEEEVVHVDRDHFMDEFFEQVEEIRGCIEKLSEDVEQVKKQHSAILAAPNPDEKTKQELEDLTADIKKTANKVRSKLKAIEQSIEQEEGLNRSSADLRIRKTQHSTLSRKFVEVMTEYNATQSKYRDRCKDRIQRQLEITGRTTTNEELEDMLESGKLAIFTDDIKMDSQMTKQALNEIETRHNEIIKLETSIRELHDMFVDMAMLVESQGEMIDRIEYNVEHSVDYVERAVSDTKKAVKYQSKARRKKIMIIICCVVLGVVLASSIGGTLGL

SEQ ID NO: 229454 - DNA, 867 bp, Artificial Sequence
  derived and/or modified sequence
atgaaggatagaactcaggaattaaggagtgccaaggacagtgatgacgaggaagaggtggttcacgtggaccgcgaccactttatggacgagttctttgagcaggtggaagagattcgtggctgcatagagaaactcagtgaggatgtggagcaggtgaaaaaacagcatagtgctattttagctgccccgaaccccgacgagaagactaagcaggagctcgaggacctgaccgcagacatcaagaaaactgctaacaaagtgcggagcaaactcaaggcaatcgagcagagtattgagcaagaggagggtctgaaccgttcctcggcagatctgcgtattcggaagacacagcactcgacactttcccggaagttcgtcgaggtgatgaccgagtataatgccactcagagtaaatatcgtgatcgatgtaaagacagaatacagcgacagctagaaattactggaaggactaccaccaacgaggagctagaggacatgctcgagagcggaaaactcgccatattcacagacgatattaaaatggacagccaaatgactaagcaggccttgaacgaaatcgagacgcggcataatgagattatcaagctggagacgtccattcgggaactgcatgatatgttcgtcgatatggcgatgttagtcgagtctcagggcgaaatgatcgatcggatagagtacaacgtcgagcactctgtcgattatgtggagcgggccgtctccgataccaaaaaggccgtaaaataccaatccaaagcacgcagaaaaaaaattatgatcataatctgctgtgtcgtgcttggcgtggtgctagcctcatcaatcggagggaccctgggtctatag

SEQ ID NO: 229455 - DNA, 867 bp, Artificial Sequence
  derived and/or modified sequence
atgaaggacaggacccaggagctgcggagcgccaaggacagtgatgatgaggaggaggtggtgcacgtggaccgggaccacttcatggatgagttctttgagcaggtggaggagatccggggctgcatcgagaagctgtctgaagatgtggagcaggtgaagaagcagcacagcgccatcctggccgcccccaacccagatgagaagaccaagcaggagctggaggacctgacagctgacatcaagaagacagccaacaaggtgcgcagcaagctgaaggccatcgagcagagcattgagcaggaggagggcctgaacagaagcagcgctgacctgcgcatcaggaagacccagcacagcaccctgagcaggaagtttgtggaggtgatgacagagtacaatgccacccagagcaagtacagagaccgctgcaaggaccgcatccagaggcagctggagatcactggaagaaccaccaccaatgaggagctggaggacatgctggagagcggcaagctggccatcttcacagatgacatcaagatggacagccagatgaccaagcaggccctgaatgaaattgagaccaggcacaatgagatcatcaagctggagaccagcatccgggagctgcatgacatgtttgtggacatggccatgctggtggagagccagggcgagatgattgaccgcatcgagtacaacgtggagcacagcgtggactatgtggagagagctgtgtctgacaccaagaaggctgtgaagtaccagagcaaggcccggaggaagaagatcatgatcatcatctgctgcgtggtgctgggcgtggtgctggccagcagcatcggcggcaccctgggcctgtag

SEQ ID NO: 229456 - DNA, 867 bp, Artificial Sequence
  derived and/or modified sequence
atgaaggaccggacccaggagctgcggagcgccaaggacagcgacgatgaagaggaagtcgtgcatgttgatagggaccactttatggatgagtttttcgagcaggtggaggaaatccggggctgcatcgaaaagctatccgaggatgtcgaacaggttaagaaacagcactccgctattcttgccgcccccaatccagatgagaagacaaagcaggaactcgaggacctgaccgcggacattaagaagaccgccaataaggtgaggtctaagctgaaagccatcgagcaatccatcgagcaggaggaaggactgaaccggtcctctgctgaccttcgcattcgaaaaactcagcacagcacgctctctcgaaaatttgtcgaggtgatgaccgagtacaacgccacccagtcaaaatatcgggatagatgcaaggataggattcagcgacagctggagatcactggtaggaccacaacgaacgaggaactcgaggatatgcttgaatcaggcaaactggcaatttttaccgacgatatcaagatggacagccagatgaccaaacaggcactaaatgaaatcgaaacaagacacaatgagatcataaaactcgagacatctatccgggagttgcacgacatgttcgtggatatggccatgttagttgagtctcagggcgagatgatcgatagaattgaatacaatgtggagcactctgtcgattatgtcgagcgagcggtttctgacactaaaaaggccgtcaaatatcaatcaaaagccagacggaagaagataatgatcataatttgctgcgtggttctgggagtggtgttagcctcaagtatcggtggcactctcgggttatag

SEQ ID NO: 229457 - DNA, 867 bp, Artificial Sequence
  derived and/or modified sequence
atgaaggataggacacaagaactccgctcagccaaagattcagacgatgaggaagaagttgtgcatgtcgatcgcgaccatttcatggatgagtttttcgagcaggtggaggagatacgagggtgtatcgaaaaacttagcgaagatgttgagcaggttaagaagcagcactccgctatcctggccgcacccaaccccgatgaaaaaaccaagcaggaactcgaagacctgaccgctgatattaagaagacagccaacaaagtgagatctaaactcaaagctatagaacagagcatcgaacaggaggagggtctcaatcggagtagcgcagacctgagaattcgcaagacacagcactctacattgtcccgaaaatttgtcgaggtaatgaccgagtataatgctacacagtcaaagtacagagaccgttgtaaggaccgtatccagaggcaattggaaataacaggcaggactacgactaacgaagaattagaggacatgctcgagagcggtaagctcgcgatctttactgacgacataaagatggactcccagatgacaaagcaagcactcaacgaaatcgagacccgtcacaacgaaattatcaagctggagacgtcaatccgtgagttacatgacatgtttgtggatatggcaatgctggtcgagtcccaaggcgaaatgatagacaggatcgaatacaatgtggagcactcagtcgactacgtcgagcgcgctgtgtccgatactaagaaggccgttaaatatcagtccaaagccagacgaaagaagattatgattatcatttgttgtgttgtacttggcgtggtgttggctagttctataggcggaactctgggcctgtag

SEQ ID NO: 229458 - DNA, 4539 bp, Artificial Sequence
  derived and/or modified sequence
cggcgccccccggcgcccccagaccccggcctccggcacagaggcgggagacccggagcagcagcagaggcaggaggactaggaggaggaggaggagccgtcgcaggatgaaggatcggactcaagagctgcggagtgcgaaagacagtgatgatgaagaggaggtggtccacgtggatcgggaccacttcatggatgagttctttgaacaggtggaagagatccggggctgcattgagaaactgtcggaggatgtggagcaggtgaaaaaacagcatagcgccatcctggccgcacccaacccagatgagaagaccaaacaggagctggaggatctcactgcagacatcaagaagacggccaacaaggttcggtccaaattgaaagcgatcgagcaaagcattgaacaggaggaggggctgaaccgttcctccgcggacctgcgcatccgcaagacccagcactccacactgtcccggaagttcgtggaggtaatgaccgaatataacgcgacccagtccaagtaccgggaccgctgcaaggaccggatccagcggcaactggagatcactggaaggaccaccaccaacgaagaactggaagacatgctggagagcgggaagctggccatcttcacagatgacatcaaaatggactcacagatgacgaagcaggcgctgaatgagattgagacgaggcacaatgagatcatcaagctggagaccagcatccgcgagctgcacgatatgtttgtggacatggccatgctcgtagagagccagggagagatgattgaccgcatcgagtacaacgtggaacattctgtggactacgtggagcgagctgtgtctgacaccaagaaagcagtgaaatatcagagcaaggcccggaggaagaaaatcatgatcatcatttgctgtgtggtgctgggggtggtcttggcgtcatccattggggggacgctgggcttgtaggccccccccacccttctctctcccagacccttcccccaccacatcgggagcaatacccccaccacccctttcactccatcccctgctccaggctcactcccaaaacagacccaggcagccccacccccacggcagaccctggtgtccctggacctcaccgggccatggaccccccccccgtccccgcacgtagatcgcagcaggcgtgattacacatgcacaccaacatgcatgccgccggcacatgctcgagacgtgtggacaccccagcgtgcgtgtgcgtgtgatgtgtgtgatgcaccagagcaccccctccacccccaccttgggtgtgtgtgcgtggtctgagcttcccccttcaccggggctgttgtgtagactgcagccaagtgtaacacagcagtccatcacgccctctctgtcctctgtgaacagtgtgtgtgcgtgcgtgagaccacagatctgtggacacaccatttgtgtacgtggaattttgtgtttcagtgtttgaacctaatgcaacagcaacaaagccactgatacctgagccctttgtgtctgctacaaaccaggcaggtggtgtgtgtggactcacactcacattctcagaggatccagggaggcccaggtacacacaggccatggcagacaccccatgtctttgttaccccaggggctgtggcatgtcccaggagggtgtgcatgtgtgtgtgtgtgtgtgtgtgtgtgtccaggatgtgcctgaagtattgataggtcttctcagatagagccctccacactgtggactggacacctgttttgggagggcacagaaatgtgtatttcttgctacctagaatgcagctgtgtgtgtgtggcgtgcgtgtgtatgcacgtgtgtgtgtgtgttaggggctctctacatggtgtgctttttaatttttttttgttttttgttttttgtttttttcgagacggagtcttgctctgtcacccaggctggagtgcagtggcgcaatctcagctcactgcaacctgtgcctccctgacgcaagcgattctcatgcctcagcctcccaagtagctgggactacaggcgcctgccaccacgcctggctaattttagaattttagtagagatgaggttttgacatgttggccaggctggtctcgaactcctgacctcaggtgatccgcccactttggcctccctaagtgctggcattacaggcctgagccaccacgcctggcctacatgatgtgtttctgtcctgcctgacctacatggtgtgtttctgccctgcgtattacacacacacacacacacgtgcgtgcacacacacttctaaggacgtggccccatctggctttgtctctccagttgtccttgccctgcccccctccccagaggtgctgcccagtgctggtgtggccacacacggctacatcattgtgcaggcagagctccctgcctgcccagcctcagggctctgcatgctcacacctagatcctcatcttcctccatgtctctgcccagcatagccccgagcccctggaagctggtacccctcagtgtgctcacacgtggcaaggccgaggtggccccaggcaggggccataccaggcacaaaccatgcacgctggcatgggtgcggggatcacacgaatgcctcctggaaggaaagggctacttgtaggaatgttactgatgaggcaagatgccaaggacttccctgcagggatcaaagatcaggacacgaccccttcctcacacacccacctcagacctgggagaggactgtgtgtcccccactgccccatcggatgctctgggctctgcctcagggaactcgggtttggggaaatgtctatttcagaagtactggagtggccagtgtggcagtggccactcagggtgggctgggtcctgagacccatccccgacacctctcctgctgaaccctcaggctgctccccacaccagggtgtgactgaggggtacacaggcctggatttctggtgtgaggaaggggctagcacctcccctgttgtgtagccagcacaggcacaatttgtgggtttggtggcaggtaggtggtgcgtgggagaaaggacagtgttagaggtccccactccgtggtctaggatcatgaaaggtgaacacacaagtacacaaatgtgccatgccctggcatggggcttatgtgtgcacaggcaaggcactcggtgtgtgtgtgcggaccccagggtcccaggtcatgtgaagcgtacgtgtgtgtgcattgtatgtgtgtgtacattgtgtgtgcattgtgtgtgcatgtggccaaacagatgtgacctcccagaacacagtacccctccacctctacccgagctcagacagccgagctctcccttgtcctgtgtgtgtgtcagtgtggccacgtgcgtaaccccaggtgggctgtcctgagctgggggcctgcctgtcccttcccagaacgcccctctgcaggacaggaagtctgccccaagtctggccacggccctcctgctcccatctcgggctgcttgggagacatcagagcaggccccagcccccagtcccctcttccggccgcctggacaggacccccattcagcccaggtgtttccggaagtcccacggccttggggccacaggagaagggttgaagcgtggctggggcaccactccccccacctggagtggcattgggcccacagctgcccatctctgggcctcaggtggaccaggggatctctaagggtctgctgtgccctttctatgcgtcctccacatcctatgatgtgcctgcttgttggctgctgtctgtgtgcgtcctggcatgttgtctggaggctggtgtcttttgcatgttcttggacaaatgtgtgctacctgcccaggcgcctgcaaccattgagcccacatgtgccccacgtgtgccctgcgggtggtcccgggcctggccagggctcagtgctcctcttccccctcctccctgttcccacccctcatgaagcacactgcgtgtccatcccatgtacccgtgggtcgacacacgctcttgccacgccctgagcgtgtacacatgatgtgttctatgcattcaccctgccccccagcccgccctgcagaggacaagatgggtggccccggctccctttcccctaaccgcccctgcccgctgtgcagccgtgtgcgttggcgtgtgtttctgtgtcactggcgtgtcacgtgatgtagccgtgtttgctgacatgagcccctgcccccttctctgtttctccgttggtttctagagctctctccctccccttctcagaggggacaggactcctggggcctggctggggcccagagccaggccgccctctcctgttagccctcagagtcccatttctgttagccctcagagtcccatttctattggtgaccaacttgcaaatggataaaacacaggaaaatcctgccccccccttcctccctgcatgtcctgtccccagagccccccaccccaccctgggccaggtcaggccctgtgggacgggagaaatagcaaccaatccaacagcggg

SEQ ID NO: 229459 - DNA, 867 bp, Artificial Sequence
  derived and/or modified sequence
atgaaggacagaacccaggagctgagaagcgccaaggacagcgacgacgaggaggaggtggtgcacgtggacagagaccacttcatggacgagttcttcgagcaggtggaggagatcagaggctgcatcgagaagctgagcgaggacgtggagcaggtgaagaagcagcacagcgccatcctggccgcccccaaccccgacgagaagaccaagcaggagctggaggacctgaccgccgacatcaagaagaccgccaacaaggtgagaagcaagctgaaggccatcgagcagagcatcgagcaggaggagggcctgaacagaagcagcgccgacctgagaatcagaaagacccagcacagcaccctgagcagaaagttcgtggaggtgatgaccgagtacaacgccacccagagcaagtacagagacagatgcaaggacagaatccagagacagctggagatcaccggcagaaccaccaccaacgaggagctggaggacatgctggagagcggcaagctggccatcttcaccgacgacatcaagatggacagccagatgaccaagcaggccctgaacgagatcgagaccagacacaacgagatcatcaagctggagaccagcatcagagagctgcacgacatgttcgtggacatggccatgctggtggagagccagggcgagatgatcgacagaatcgagtacaacgtggagcacagcgtggactacgtggagagagccgtgagcgacaccaagaaggccgtgaagtaccagagcaaggccagaagaaagaagatcatgatcatcatctgctgcgtggtgctgggcgtggtgctggccagcagcatcggcggcaccctgggcctgtag

SEQ ID NO: 229460 - protein, 445 aa, Artificial Sequence
  derived and/or modified sequence
MLLFVEQVASKGTGLNPNAKVWQEIAPGNTDATPVTHGTESSWHEIAATSGAHPEGNAELSEDICKEYEVMYSSSCETTRNTTGIEESTDGMILGPEDLSYQIYDVSGESNSAVSTEDLKECLKKQLEFCFSRENLSKDLYLISQMDSDQFIPIWTVANMEEIKKLTTDPDLILEVLRSSPMVQVDEKGEKVRPSHKRCIVILREIPETTPIEEVKGLFKSENCPKVISCEFAHNSNWYITFQSDTDAQQAFKYLREEVKTFQGKPIMARIKAINTFFAKNGYRLMDSSIYSHPIQTQAQYASPVFMQPVYNPHQQYSVYSIVPQSWSPNPTPYFETPLAPFPNGSFVNGFNSPGSYKTNAAAMNMGRPFQKNRVKPQFRSSGGSEHSTEGSVSLGDGQLNRYSSRNFPAERHNPTVTGHQEQTYLQKETSTLQVEQNGDYGRGR

SEQ ID NO: 229461 - protein, 374 aa, Artificial Sequence [sequence omitted]

SEQ ID NO: 229462 - protein, 724 aa, Artificial Sequence
  derived and/or modified sequence
MLLFVEQVASKGTGLNPNAKVWQEIAPGNTDATPVTHGTESSWHEIAATSGAHPEGNAELSEDICKEYEVMYSSSCETTRNTTGIEESTDGMILGPEDLSYQIYDVSGESNSAVSTEDLKECLKKQLEFCFSRENLSKDLYLISQMDSDQFIPIWTVANMEEIKKLTTDPDLILEVLRSSPMVQVDEKGEKVRPSHKRCIVILREIPETTPIEEVKGLFKSENCPKVISCEFAHNSNWYITFQSDTDAQQAFKYLREEVKTFQGKPIMARIKAINTFFAKNGYRLMDSSIYSHPIQTQAQYASPVFMQPVYNPHQQYSVYSIVPQSWSPNPTPYFETPLAPFPNGSFVNGFNSPGSYKTNAAAMNMGRPFQKNRVKPQFRSSGGSEHSTEGSVSLGDGQLNRYSSRNFPAERHNPTVTGHQEQTYLQKETSTLQVEQNGDYGRGRRTLFRGRRRREDDRISRPHPSTAESKAPTPKFDLLASNFPPLPGSSSRMPGELVLENRMSDVVKGVYKEKDNEELTISCPVPADEQTECTSAQQLNMSTSSPCAAELTALSTTQQEKDLIEDSSVQKDGLNQTTIPVSPPSTTKPSRASTASPCNNNINAATAVALQEPRKLSYAEVCQKPPKEPSSVLVQPLRELRSNVVSPTKNEDNGAPENSVEKPHEKPEARASKDYSGFRGNIIPRGAAGKIREQRRQFSHRAIPQGVTRRNGKEQYVPPRSPK

SEQ ID NO: 229463 - DNA, 2175 bp, Artificial Sequence
  derived and/or modified sequence
atgctgctgttcgtggagcaggtggccagcaagggcaccggcctgaaccccaacgccaaggtgtggcaggagatcgcccccggcaacaccgacgccacccccgtgacccacggcaccgagagcagctggcacgagatcgccgccaccagcggcgcccaccccgagggcaacgccgagctgagcgaggacatctgcaaggagtacgaggtgatgtacagcagcagctgcgagaccaccagaaacaccaccggcatcgaggagagcaccgacggcatgatcctgggccccgaggacctgagctaccagatctacgacgtgagcggcgagagcaacagcgccgtgagcaccgaggacctgaaggagtgcctgaagaagcagctggagttctgcttcagcagagagaacctgagcaaggacctgtacctgatcagccagatggacagcgaccagttcatccccatctggaccgtggccaacatggaggagatcaagaagctgaccaccgaccccgacctgatcctggaggtgctgagaagcagccccatggtgcaggtggacgagaagggcgagaaggtgagacccagccacaagagatgcatcgtgatcctgagagagatccccgagaccacccccatcgaggaggtgaagggcctgttcaagagcgagaactgccccaaggtgatcagctgcgagttcgcccacaacagcaactggtacatcaccttccagagcgacaccgacgcccagcaggccttcaagtacctgagagaggaggtgaagaccttccagggcaagcccatcatggccagaatcaaggccatcaacaccttcttcgccaagaacggctacagactgatggacagcagcatctacagccaccccatccagacccaggcccagtacgccagccccgtgttcatgcagcccgtgtacaacccccaccagcagtacagcgtgtacagcatcgtgccccagagctggagccccaaccccaccccctacttcgagacccccctggcccccttccccaacggcagcttcgtgaacggcttcaacagccccggcagctacaagaccaacgccgccgccatgaacatgggcagacccttccagaagaacagagtgaagccccagttcagaagcagcggcggcagcgagcacagcaccgagggcagcgtgagcctgggcgacggccagctgaacagatacagcagcagaaacttccccgccgagagacacaaccccaccgtgaccggccaccaggagcagacctacctgcagaaggagaccagcaccctgcaggtggagcagaacggcgactacggcagaggcagaagaaccctgttcagaggcagaagaagaagagaggacgacagaatcagcagaccccaccccagcaccgccgagagcaaggcccccacccccaagttcgacctgctggccagcaacttcccccccctgcccggcagcagcagcagaatgcccggcgagctggtgctggagaacagaatgagcgacgtggtgaagggcgtgtacaaggagaaggacaacgaggagctgaccatcagctgccccgtgcccgccgacgagcagaccgagtgcaccagcgcccagcagctgaacatgagcaccagcagcccctgcgccgccgagctgaccgccctgagcaccacccagcaggagaaggacctgatcgaggacagcagcgtgcagaaggacggcctgaaccagaccaccatccccgtgagcccccccagcaccaccaagcccagcagagccagcaccgccagcccctgcaacaacaacatcaacgccgccaccgccgtggccctgcaggagcccagaaagctgagctacgccgaggtgtgccagaagccccccaaggagcccagcagcgtgctggtgcagcccctgagagagctgagaagcaacgtggtgagccccaccaagaacgaggacaacggcgcccccgagaacagcgtggagaagccccacgagaagcccgaggccagagccagcaaggactacagcggcttcagaggcaacatcatccccagaggcgccgccggcaagatcagagagcagagaagacagttcagccacagagccatcccccagggcgtgaccagaagaaacggcaaggagcagtacgtgccccccagaagccccaagtag

SEQ ID NO: 229464 - DNA, 2175 bp, Artificial Sequence
  derived and/or modified sequence
atgcttctgtttgttgagcaagtggctagcaaaggcactgggctgaatcctaatgcaaaagtatggcaggaaatagcacccggaaacaccgatgccactccagtgacacacggaactgagagttcctggcatgaaattgccgctacttctggggcccaccccgagggcaacgccgaattgagtgaggacatatgtaaagagtatgaagtgatgtactcatcctcatgcgagacgacaagaaacactactggcatcgaggagagtacagacggaatgatcttggggcctgaggacctcagttatcagatatatgatgtatccggagagagcaattccgccgttagcactgaggatttaaaggaatgcctgaagaaacaactggagttttgctttagccgcgagaacctaagcaaggatctgtacctgatcagccagatggactccgatcagttcatcccaatctggactgtggcgaacatggaagaaatcaaaaagttgacaactgatccagacctcatactcgaggttctgcgatcctcccccatggtgcaagtggacgaaaagggcgaaaaagtccggccttctcacaagcggtgtatagtgattctgcgcgagatcccagagaccacacccatcgaggaggtaaagggtctcttcaagagcgagaattgcccaaaggttatttcctgtgagttcgcacacaacagcaattggtatatcacctttcagtccgacaccgatgcacaacaggcttttaagtacctccgagaggaggtcaaaacatttcagggtaagcctattatggccaggattaaggcaattaacacattctttgctaaaaatgggtacagacttatggactcttccatttacagccatccgatccagacacaggcccagtatgcttcccccgtttttatgcaacccgtctacaacccccaccagcagtactccgtgtattcgattgtgcctcagagttggagccccaaccccactccatactttgagacacctctggctccctttccaaacggttcttttgtgaatgggttcaactccccaggctcatacaagaccaatgcggcggctatgaacatgggccggccattccagaagaaccgggtcaagcctcagtttcggtcatccggcgggtccgaacacagcaccgagggttctgtaagcctgggggacggccagcttaataggtactcctcaagaaactttcctgccgagcggcacaacccgaccgtgactggacatcaggagcagacatacctccagaaggagacgtctacgttgcaggtggaacagaacggggactacggcagaggaagacggaccctgttccgcggccgccggaggagagaagacgatcggatcagccgaccccacccgtccaccgctgaatccaaagcacctacaccaaagttcgacctgctggcatcaaatttcccacccctgcctggcagttcctcgcggatgcccggagagcttgttctcgagaatcggatgagtgatgttgttaagggagtttataaagaaaaagacaacgaagagctgaccatctcttgccccgtgcctgcagatgaacagaccgagtgcacgagcgctcagcaacttaacatgtctacttccagcccttgtgctgctgaactgactgcattgtccacgactcagcaggagaaagacctaattgaggattcctccgtgcagaaggatggcctgaaccagactactatccctgtgtcacccccctccaccactaaaccttcacgcgcctctactgcctctccttgcaataacaatattaacgcggccacagctgtcgccctacaggagcctcgcaaactttcttacgctgaagtttgccagaaacctcctaaggagcctagctccgtgctggtgcagccgctgagggaattacgcagcaatgtggtgtcccccacaaaaaatgaggacaacggcgcaccagagaattcggtggagaagccacacgagaaacccgaggcaagggccagcaaagactactcaggctttagaggtaacatcattccacggggggcagccggtaaaattagggagcagaggcggcagttctcccaccgagccatccctcaaggcgtgacccggaggaacggcaaggaacagtatgtgcccccacgttcgcccaagtag

SEQ ID NO: 229465 - DNA, 2175 bp, Artificial Sequence
  derived and/or modified sequence
atgctgctgtttgtggagcaggtggccagcaaaggaacaggcctgaaccccaatgccaaggtgtggcaggagatcgcccctggcaacacagatgccacccctgtgacccatggaacagagagctcctggcatgaaattgctgccaccagcggggcccaccctgagggcaatgctgagctgtctgaggacatctgcaaggagtatgaggtgatgtacagcagcagctgtgagaccaccaggaacaccactggaattgaggagagcacagatggcatgatcctgggccctgaggacctgagctaccagatctatgatgtgtctggagagagcaacagcgctgtgtccacagaggacctgaaggaatgtctgaagaagcagctggagttctgcttcagccgggagaacctgagcaaggacctgtacctgatcagccagatggacagcgaccagttcatccccatctggacagtggccaacatggaggagatcaagaagctgaccacagatcctgacctgatcctggaggtgctgcggagcagccccatggtgcaggtggatgagaagggggagaaggtgcggcccagccacaagcgctgcatcgtcatcctgcgggagatccctgagaccacccccatcgaggaggtgaagggcctcttcaagtctgagaactgccccaaggtgatcagctgtgaatttgcccacaacagcaactggtacatcaccttccagagcgacacagatgcccagcaggccttcaagtacctgcgggaggaggtgaagaccttccagggcaagcccatcatggcccgcatcaaggccatcaacaccttctttgccaagaatggctaccgcctgatggacagcagcatctacagccaccccatccagacccaggcccagtatgccagccctgtgttcatgcagcctgtgtacaacccccaccagcagtacagcgtgtacagcatcgtgccccagagctggagccccaaccccaccccctactttgagacccccctggcccccttccccaacggcagctttgtgaatggcttcaacagccctggcagctacaagaccaatgctgctgccatgaacatgggccggcccttccagaagaacagagtgaagccccagttccgcagcagcggcggcagcgagcacagcacagagggctctgtgtccctgggagatggccagctgaaccgctacagcagcaggaacttccctgctgagcggcacaaccccaccgtgacaggccaccaggagcagacctacctgcagaaggagaccagcaccctgcaggtggagcagaatggagactatggccggggccgccgcaccctcttccggggcagaagaagaagagaagatgaccgcatcagccggccccaccccagcacagctgagagcaaggcccccacccccaagtttgacctgctggccagcaacttcccccccctgcccggcagcagcagcaggatgcctggagagctggtgctggagaacaggatgtctgatgtggtgaagggcgtgtacaaggagaaggacaatgaggagctgaccatcagctgccctgtgcctgcagatgagcagacagaatgtaccagcgcccagcagctgaacatgagcaccagcagcccctgtgccgctgagctgacagccctgagcaccacccagcaggagaaggacctgattgaggacagctctgtgcagaaggatggcctgaaccagaccaccatccctgtgagcccccccagcaccaccaagcccagccgggccagcacagccagcccctgcaacaacaacatcaatgctgccacagctgtggccctgcaggagcccaggaagctgtcctatgcagaggtgtgccagaagccacccaaggagcccagctctgtgctggtgcagcccctgcgggagctgcggagcaatgtggtgagccccaccaagaatgaagacaacggggcccctgagaacagcgtggagaagccccatgagaagccagaggcccgggccagcaaggactacagcggcttccggggcaacatcatccccagaggagctgctgggaagatccgggagcagaggcggcagttcagccaccgggccatcccccagggcgtgaccaggagaaatggcaaggagcagtatgtgcccccaagaagccccaagtag

SEQ ID NO: 229466 - DNA, 6427 bp, Artificial Sequence
  derived and/or modified sequence
ccgggtggaggggcaaggcgagtgtgtgtccttatcctagcaattggggcgcgggcctgtgagccagttggagttgcggcggcgggaacgattgggctgagcagaggacgacatgttgcttttcgtggagcaggtagcatctaaaggaactggtttaaatcctaatgccaaagtatggcaagaaattgctcctggaaatactgatgccaccccagtaactcatggaactgaaagctcttggcatgaaatagcagctacatcaggtgctcatcctgagggtaatgcagagctctcagaagatatatgtaaagaatatgaagtaatgtattcttcatcttgtgaaaccacaagaaatactacaggcattgaagaatcaactgatgggatgattttaggaccagaagatctgagttaccaaatatatgatgtttccggagaaagcaattcagcagtttctacagaagacctaaaagaatgtctgaagaaacaattagaattctgtttttcacgagaaaatttgtcaaaggatctttacttgatatctcaaatggatagtgatcagttcatcccaatttggacagttgccaacatggaagaaataaaaaagttgactacagaccctgatctaattcttgaagtgttaagatcttctcccatggtacaagttgatgagaagggtgagaaagtgagaccaagtcataagcgttgtattgtaattcttagagagattcctgaaacaacaccaatagaggaagtgaaaggtttgttcaaaagtgaaaactgccccaaagtgataagctgtgagtttgcacacaatagcaactggtatatcactttccagtcagacacagatgcacaacaggcttttaaatacttaagagaagaagttaaaacatttcagggcaagccaattatggcaaggataaaagccatcaatacattttttgctaagaatggttatcgattaatggattctagtatctatagtcaccccattcaaactcaagcacagtatgcctccccagtctttatgcagcctgtatataatcctcaccaacagtactcggtctatagtattgtgcctcagtcttggtctccaaatcctacaccttactttgaaacaccactggctccctttcccaatggtagttttgtgaatggctttaattcgccaggatcttataaaacaaatgctgctgctatgaatatgggtcgaccattccaaaaaaatcgtgtgaagcctcagtttaggtcatctggtggttcagaacactcaacagagggctctgtatccttgggggatggacagttgaacagatatagttcaagaaactttccagctgaacggcataaccccacagtaactgggcatcaggagcaaacttaccttcagaaggagacttccactttgcaggtggaacagaatggggactatggtaggggcaggagaactctcttcagaggtcgaagacgacgagaagatgacaggatctcaagacctcatccttcaacagctgaatcaaaggctccaacaccaaagtttgacttattagcctcaaattttccacctttacctggaagttcatcaagaatgccaggtgaactcgttttggagaataggatgtctgatgttgttaaaggtgtctacaaagaaaaggataatgaagagttgacaattagttgcccagtgcctgcagatgagcagacagaatgcacttctgcccagcaactcaatatgagtaccagttctccatgtgctgctgagcttactgcattaagcacaactcagcaagaaaaggatctaatagaagattcctctgttcagaaggatggtctcaatcagacaactataccagtttctcctccaagtactacaaagccatcgagggcaagtactgcttcaccatgtaataataacataaatgcagctacagctgtggctctacaggaaccccgaaagttaagttatgctgaagtgtgccagaagccccctaaagagccatcttcagttcttgtgcagccactacgggaacttcgctccaatgtggtgtctcccaccaaaaatgaagacaatggagctcctgagaactccgttgagaaaccacatgagaagccagaagcaagggctagtaaggattattctggcttccgaggcaatataatccccaggggagcagcaggaaaaatcagggaacagagacgccagtttagccatagggctatacctcagggagtgactcgacgtaatggcaaagagcaatatgtgccacccagatcaccaaagtaaaaaacaacaaaactattcaaaaacttcactctcttcccattaaacttgaactgtggctatattgaactgttttggaggggagggggtagccaggaaggaaacaagagaaagtacgtccatttcattatggattttggagttgtgagtgataggatcccaaaattcatctctaatgtggtttttaaatgctggaggattccaatcaatataaatatatatatatatatacacacacatatataaaaagtataatttttctatttttgtttttggttttaatttgcagagatttgctgccaggaatcaattttgagggttcagatttagcttggaagaaaaaaaagaaacatacatccttcagtataggagatgagggaatgagagaaaatattttttgaagaagcatttctgtaaaattagaaattactttttttaatctatttaaagtttggcttgaagaatgccatctctgactatatggccttgtattgcaaagcggatcagtggctggggtgcctgttgtgggtgtgagtgtgtacaagagcgattgaagccaaatctgttgtcatgttagtaaatgatttgaaaactgaatgtaatacttgagtagatttttttttctagtttgaaatttagtctgtctttttgaccttactaatatttcatttaacaagttgtaaaactctgattgtacttagagatgtgactaccaatcagtttgatactcaaggaaagggggttattcaagaaattgaaaatttcatcttggacctcagtgcataggtcaaatggatttcagaggtttaaacttccctgtgattcccccgaatacccccaaaatgagaaacaaaattttttttcttactccatttgttactctctgttctttgactgcccacccacagaaaagcaaaataaccaactacctactcaattgtgtgtttgtaattgctttgagcagtctagtcaaatcatataaattgttctaaatttcagaattgaacattgaagtattaactcttctgttcacacatttagaattttagctcccaagatggtagggcagactgaccgtacagtaatttatttgtcgttagtgttaaagattaagcatagtaactgactcttaagtgttaaataatgtagaagtaaaaaaattttttttaaaggcttaatttgggaggggggacttatttctgtttacagtgtattaccttccttccctcctcttctccccccacacccaacaaaatacagtttggaattcactgaaacagtaccagcaagtcatgagattttttagtaaagatgagaaagatggttgaagaaaattagtgcataatttctcagtgaataaagttgtagctctcatatactaaatagacaagtttacatgctgttatttagaaaatgactaaaatattaaaaaccgtgttgtgttaatctgttttaagtcataccatgttcagagttctatgtaaggtgggttttatttttcttttaagggatagtttgtaatagtaagaactgtcccatatgttagtaaattacatatgtacaaattgaaactgtaaattgtgaacactggaaagcaccattgtgacatagagtaaacatcttagtaatatattaaagtgaatgtaaatggtggttaaaattacattactgtgaaattcatcttccaactctaagttaagctttggagatacatgttagtggttaactgttaagagctttgaaaacactgcacatatctgtacaagccagaattactatttctttgacttattattagcttggcagttgcttttgatttgattgttttatgacatggtatactactatatttactcagtttgaaactattcatttctacacactatttttaaaaattgcctactaggtgaaacataacaataaaactacctgtgctgaaatttgggggaagtttaggtcctttaaaaaaacatattaatcattgactacatctatgataaaagtgcttattttggtttactaagataatgcagttggtggaaatgataaacgttttaagtgttaacatcctttgaatgcgttggatttcagagaataaacattttgtaaaaatcacttggtaaggattataaacttaattactgcacttaaaatgaaacattactttttttaaacaatgtgtcacaaatgtaggtctgtattacttgtatgcttgtgtgacttactgttagtccagctctaaaaatttaaaggttgtaattgaaatacaagaaaagagccttcttttagaagaaagcaagtatatttttgcttttacttcaaatgttatttaaagtagaaatttaatttgtagatataacctttaaaaattttctcattaagacaatgtttttaatttaatttgcctcattacatctaatagttcccatttgatggcatgtatagggaagagtgagagagtgtgtgtgtgtgtatgtgtgtgtaatatttatatatattcacagtatgtatttagcatttattttattacagcagatttaaagtttgtatctaaataatgcctatgagttgtgtgaagctcttggcttttttccaacgttactttgtaactaatgagggtggatgttcattgtagtttatttatttggttctttagatggaggaatttaaaaaatcaaatttttctcttcacctttatgacttgacatttccttgatctgttggaggctaaaagtaggtataaatgatattgaatgttgggtatagtgatactctgccatagttcttactgcatgaagagaacaagagtcacacaagttcaccactttgcacttcatagagaaggtacatagagacattgcaaaacctgtctccatttgctatcctgataattaaggttttcataatacctagggcctgtctctgagtaattttaattttgccaaatacactgacatttaaaatagtgatccatctaaatttttttcagctgggttttgaggaatataagagctttcaatgataaaggtttgttgtagttgtcttatgtgctgaatttgcagatgatcagatgctgtgcagaattctgatttatttttgtttcctaaaattaagatagcttgaatattatttcacattcctttttcttttttaaataaacaggtttgctttggaaaggcttaatgatggaatgttagcatcttcactagggtaaagaagaacaaaaagaatgttgctggaacgtaaaatagtatttaaaagttaatgaacacttctctagttttcttagttatggccttaataattagtctcttggcttaaatgtccactggttttactttgacacagttgaacaacactggggttaagtctctggtatttaggctggcaatatatatattaaccatattttaaaagtaccaattttgtttttacagaaaagataaaactcaaaagagaacagtgtattccttctgaggggcttttataaattattaactataatatatgatggattttttcctaattttttatatttccttacaattttggtggccattaatttaactttaggcttttgggcatatgctagtctgagcttccgaaaagatacatatatgtttcccttttcattagctgaatgaggatattttaagaagttgaaagagaatttattttcaagttgtgagtaaatcctcctttgaaattcacctgattattagataacttaaagtttatttttaaaagctgacaactttttatgaatcttcgagttgacagttcctaaaagcgtaactcagatattaatgggctgtgtattaaatggttttattttcagttttgcagcacagaacactgttgaaatatccatatcaacttgatttttttaacctaattcaggtgtcctttgcatctcttaaatgttgggggtgggggtcagagccagttatccggcttctgttttgtcgattgcttagatttgttcctgttgtcaaaactgttacccccaaaattggtgtgacacatgctcatgcataaaatgttaaaatgagtacatccttgtatttgtatttgttttcaacatcgccaaggtgctatgggaaattaacaaaattagaaaaaaaataaaattattaaaaagca

SEQ ID NO: 229467 - DNA, 2175 bp, Artificial Sequence
  derived and/or modified sequence
atgctgctgttcgtggagcaggtggccagcaagggcaccggcctgaatcccaatgctaaagtatggcaggaaatagctccaggcaacacagatgccaccccagtgactcacgggactgagtcgtcttggcacgaaatcgccgcaacgagtggagctcacccagagggaaatgccgagctgagtgaagatatatgcaaagagtacgaggtgatgtactccagcagctgcgagactacccgcaatacgacaggcattgaagagtctactgacggcatgattcttggccctgaggacctctcgtaccagatctatgacgtctctggcgaaagcaattccgctgtgagcacagaggatctgaaggaatgtcttaagaagcagttagagttctgcttctctcgtgaaaatttaagtaaagacctgtacttaatatctcaaatggactccgatcaattcattcctatttggacagtcgcaaatatggaagagattaaaaagctgactactgacccagatctgatcctagaggtgctgcgatcgagtccaatggtgcaggtggacgaaaagggcgaaaaagtgagaccctcacacaagcgatgcattgtaatcctcagagaaattccagaaactacacctatcgaggaggtgaagggcctctttaaatcggaaaattgccctaaagtgatctcttgtgaatttgcgcacaactccaactggtacatcacatttcagtcagacactgacgcccagcaagcctttaagtatcttagagaggaggtgaagactttccaaggaaagcctatcatggcgagaattaaggccataaacaccttttttgccaagaacggctaccgactgatggattcgtcaatctacagtcatccgatccagacccaagctcagtatgcctcccctgtgtttatgcagccagtctataatccacaccaacagtatagcgtgtactctatcgttccacagagttggtcacccaatccaactccatattttgaaacccccctggctcctttccctaatggctcatttgtgaatggttttaacagtcccggcagctacaaaactaacgccgctgcaatgaacatggggagacctttccagaagaaccgtgtgaagccgcagttccgttcaagcggcggctccgaacacagtactgaggggtctgtgagtctcggagacggacaactgaaccgttactcgtctcggaatttccccgctgagcggcacaatcccaccgttaccgggcaccaagaacaaacttatctgcaaaaagagacttcgacccttcaggtggagcagaatggggactacgggcggggtcgtcgcaccctgttccgtggccgccgacgcagagaggacgacaggatttctcgcccacatccttccaccgcggaaagtaaggcccctacaccgaagttcgatctgctggcatctaactttccgccactgcctgggtcttcgtctcgcatgcccggagaattggtgctcgaaaacagaatgagcgacgtagtcaaaggggtgtataaggagaaagataatgaagaactcacgattagctgcccggtacccgcagatgagcaaacagagtgcacctccgctcagcagttgaacatgtctacatcttccccatgcgccgccgagttgaccgctctgagcacaacacagcaggagaaagatcttattgaggactcaagtgttcaaaaagacggcctgaaccagacaactatcccagtttcaccccccagcaccaccaagccgtcgagagcttcaacagctagcccatgcaataataacatcaatgccgccaccgctgtggccctgcaggaacctcgcaagctgagctacgccgaggtgtgccaaaagccgcctaaggagccgtcatcggtgttggttcagcccctgcgggaactacggagcaatgtggtgtctccaaccaaaaacgaagataatggcgcacccgagaactctgtggagaagccacatgaaaagccagaagcccgggccagtaaagactattccgggtttcgggggaatatcatacctcgaggcgcggcggggaagattagagagcaacgcagacagtttagccatagagccataccacagggcgtgacccgcaggaatggcaaggaacagtatgtgccgcctaggtcacctaagtag

SEQ ID NO: 229468 - DNA, 2175 bp, Artificial Sequence
  derived and/or modified sequence
atgctcttatttgtagaacaggtagcgtctaaaggcaccggactgaatccgaatgcaaaagtgtggcaggagatcgccccagggaacaccgacgccacccctgttactcatggcacagaaagctcttggcacgagattgccgcaacctccggcgctcatccagaaggcaacgcagagctgtctgaggatatttgtaaagagtatgaagtgatgtacagttcttcctgtgaaaccactcggaacactactggaatcgaggaaagcaccgatgggatgattctgggaccggaggacctctcataccaaatctacgatgtgtccggagagtcaaactccgcagttagtacagaagacctgaaggaatgcttgaaaaagcagctcgagttttgctttagcagagagaatctgagtaaagatctttacctgatctcccagatggattctgatcaattcattcccatctggactgtagcgaatatggaagaaattaaaaagctgaccacagaccctgacctcattctcgaagttctcagatccagtcctatggtgcaggtcgacgagaaaggcgaaaaggtgagaccctctcacaaaaggtgtatcgtcatattaagggagattcccgagaccacccctatagaggaggtgaagggtctgtttaagtctgagaactgtcctaaggtgatctcctgcgaatttgcgcacaatagcaactggtatataacctttcaaagtgatactgacgcccagcaggcattcaaatacctccgagaggaggttaaaactttccagggcaagcccatcatggctcgcatcaaggctattaacaccttcttcgccaagaacggctatcgcttgatggatagctcaatttactcacacccaatccagactcaagctcaatacgcctcaccggtttttatgcagccagtttacaatccgcaccagcagtactctgtgtactctattgtgccacagtcctggtctcccaatcctactccctacttcgaaacccctctggcgcctttccctaacggcagctttgtcaatgggtttaacagtccaggtagctacaaaacaaatgccgcagcaatgaatatggggcgacctttccagaaaaatcgggttaaacctcagttcaggagctctgggggaagtgaacacagtacagagggcagtgtgagtttaggcgatggacaactgaaccgctattcatctaggaacttccccgcagagcggcacaaccccaccgttaccggacaccaggagcaaacgtacctgcaaaaggaaacctcaaccctgcaggtggagcagaatggggattacgggagggggagaagaactctttttcggggaagacggaggcgggaggacgaccgaatctccaggccccaccccagtaccgccgagtctaaggccccaacaccgaaattcgacttgctcgcttctaattttccgcctctccccggatctagctctcgtatgcccggagagcttgtactggagaacagaatgagtgacgtggttaagggcgtgtacaaagaaaaggataacgaggagctgaccataagctgtcccgtgccagccgacgaacagaccgagtgtacatcagctcagcagctgaatatgtccacgagctccccatgtgcggcagaactcaccgctctgagcacaacccagcaggaaaaggatctgatcgaagacagctccgttcaaaaagacggactcaatcagacgacaatcccagtcagcccaccatcaaccaccaagcctagccgtgcctccacggcgtcaccttgtaacaacaacatcaacgcagctaccgcagtggccttacaagagccaaggaagttgagctatgctgaggtttgtcaaaaaccgccaaaagaaccatcttcggtcctcgtgcagcctctgcgagaattgcgatccaatgtagtcagtcccaccaagaatgaggacaacggggcacctgaaaattcagtagagaaaccccacgaaaagcccgaagcgagagcatcaaaagattattcagggtttcggggaaatatcattcctcggggagcagcgggaaaaatccgagagcagcgccgtcagttcagccatcgtgcaatcccacaaggggtgactagacgcaatgggaaggaacagtatgtgccgcctcgctctccgaaatag

SEQ ID NO: 229469 - protein, 263 aa, Artificial Sequence
  derived and/or modified sequence
MLLAWVQAFLVSNMLLAEAYGSGGCFWDNGHLYREDQTSPAPGLRCLNWLDAQSGLASAPVSGAGNHSYCRNPDEDPRGPWCYVSGEAGVPEKRPCEDLRCPETTSQALPAFTTEIQEASEGPGADEVQVFAPANALPARSEAAAVQPVIGISQRVRMNSKEKKDLGTLGYVLGITMMVIIIAIGAGIILGYSYKRGKDLKEQHDQKVCEREMQRITLPLSAFTNPTCEIVDEKTVVVHTSQTPVDPQEGTTPLMGQAGTPGA

SEQ ID NO: 229470 - protein, 234 aa, Artificial Sequence
  derived and/or modified sequence
MLLAWVQAFLVSNMLLAEAYGSGGCFWDNGHLYREDQTSPAPGLRCLNWLDAQSGLASAPVSGAGNHSYCRNPDEDPRGPWCYVSGEAGVPEKRPCEDLRCPETTSQALPAFTTEIQEASEGPGADEVQVFAPANALPARSEAAAVQPVIGISQRVRMNSKEKKDLGTLGYVLGITMMVIIIAIGAGIILGYSYKRSVASLLGPLRRRGGRYTKSNFVAFLPKRKQDVENQLKM

SEQ ID NO: 229471 - protein, 241 aa, Artificial Sequence
  derived and/or modified sequence
MLLAWVQAFLVSNMLLAEAYGSGGCFWDNGHLYREDQTSPAPGLRCLNWLDAQSGLASAPVSGAGNHSYCRNPGEDLRCPETTSQALPAFTTEIQEASEGPGADEVQVFAPANALPARSEAAAVQPVIGISQRVRMNSKEKKDLGTLGYVLGITMMVIIIAIGAGIILGYSYKRGKDLKEQHDQKVCEREMQRITLPLSAFTNPTCEIVDEKTVVVHTSQTPVDPQEGTTPLMGQAGTPGA

SEQ ID NO: 229472 - protein, 184 aa, Artificial Sequence
  derived and/or modified sequence
MLLAWVQAFLVSNMLLAEAYGSGETTSQALPAFTTEIQEASEGPGADEVQVFAPANALPARSEAAAVQPVIGISQRVRMNSKEKKDLGTLGYVLGITMMVIIIAIGAGIILGYSYKRGKDLKEQHDQKVCEREMQRITLPLSAFTNPTCEIVDEKTVVVHTSQTPVDPQEGTTPLMGQAGTPGA

SEQ ID NO: 229473 - DNA, 705 bp, Artificial Sequence
  derived and/or modified sequence
atgctgctggcctgggtgcaggccttcctggtgagcaacatgctgctggccgaggcctacggcagcggcggctgcttctgggacaacggccacctgtacagagaggaccagaccagccccgcccccggcctgagatgcctgaactggctggacgcccagagcggcctggccagcgcccccgtgagcggcgccggcaaccacagctactgcagaaaccccgacgaggaccccagaggcccctggtgctacgtgagcggcgaggccggcgtgcccgagaagagaccctgcgaggacctgagatgccccgagaccaccagccaggccctgcccgccttcaccaccgagatccaggaggccagcgagggccccggcgccgacgaggtgcaggtgttcgcccccgccaacgccctgcccgccagaagcgaggccgccgccgtgcagcccgtgatcggcatcagccagagagtgagaatgaacagcaaggagaagaaggacctgggcaccctgggctacgtgctgggcatcaccatgatggtgatcatcatcgccatcggcgccggcatcatcctgggctacagctacaagagaagcgtggccagcctgctgggccccctgagaagaagaggcggcagatacaccaagagcaacttcgtggccttcctgcccaagagaaagcaggacgtggagaaccagctgaagatgtag

SEQ ID NO: 229474 - DNA, 726 bp, Artificial Sequence
  derived and/or modified sequence
atgctgctggcctgggtgcaggccttcctggtgagcaacatgctgctggccgaggcctacggcagcggcggctgcttctgggacaacggccacctgtacagagaggaccagaccagccccgcccccggcctgagatgcctgaactggctggacgcccagagcggcctggccagcgcccccgtgagcggcgccggcaaccacagctactgcagaaaccccggcgaggacctgagatgccccgagaccaccagccaggccctgcccgccttcaccaccgagatccaggaggccagcgagggccccggcgccgacgaggtgcaggtgttcgcccccgccaacgccctgcccgccagaagcgaggccgccgccgtgcagcccgtgatcggcatcagccagagagtgagaatgaacagcaaggagaagaaggacctgggcaccctgggctacgtgctgggcatcaccatgatggtgatcatcatcgccatcggcgccggcatcatcctgggctacagctacaagagaggcaaggacctgaaggagcagcacgaccagaaggtgtgcgagagagagatgcagagaatcaccctgcccctgagcgccttcaccaaccccacctgcgagatcgtggacgagaagaccgtggtggtgcacaccagccagacccccgtggacccccaggagggcaccacccccctgatgggccaggccggcacccccggcgcctag

SEQ ID NO: 229475 - DNA, 555 bp, Artificial Sequence
  derived and/or modified sequence
atgctgctggcctgggtgcaggccttcctggtgagcaacatgctgctggccgaggcctacggcagcggcgagaccaccagccaggccctgcccgccttcaccaccgagatccaggaggccagcgagggccccggcgccgacgaggtgcaggtgttcgcccccgccaacgccctgcccgccagaagcgaggccgccgccgtgcagcccgtgatcggcatcagccagagagtgagaatgaacagcaaggagaagaaggacctgggcaccctgggctacgtgctgggcatcaccatgatggtgatcatcatcgccatcggcgccggcatcatcctgggctacagctacaagagaggcaaggacctgaaggagcagcacgaccagaaggtgtgcgagagagagatgcagagaatcaccctgcccctgagcgccttcaccaaccccacctgcgagatcgtggacgagaagaccgtggtggtgcacaccagccagacccccgtggacccccaggagggcaccacccccctgatgggccaggccggcacccccggcgcctag

SEQ ID NO: 229476 - DNA, 705 bp, Artificial Sequence
  derived and/or modified sequence
atgctcctcgcatgggtccaggcttttttggtctcaaatatgttgctcgcagaggcatacggcagcggagggtgtttttgggataacggccacttgtatcgggaggatcagacgtccccagcccctggtttaaggtgtctgaactggctggatgctcaatccggactggcgtctgcccccgtgtcgggcgctggtaaccacagctattgcaggaacccagacgaggaccccagagggccgtggtgctatgtttcgggggaagccggtgtgccagaaaaacgcccctgcgaggacctgaggtgtccagagaccaccagtcaggccctgccagcgttcactacagagatacaggaggcgtccgagggccctggtgccgatgaagttcaagtcttcgcacctgccaatgccttgccagcgagatcagaggcagccgctgtgcagcctgtgatcgggatctctcagcgcgtgaggatgaacagcaaggagaagaaggatctcggcactctcggctatgttctaggcatcactatgatggtcataattattgccatcggagctggcattatactcggatacagctataagagaagcgtggcatcgctccttggccccctgcggaggcggggtggtcgctacactaagagtaattttgtggcctttctcccaaaaaggaaacaggacgtggaaaatcagctcaaaatgtag

SEQ ID NO: 229477 - DNA, 726 bp, Artificial Sequence
  derived and/or modified sequence
atgctcctagcttgggtgcaggcgtttttggtcagtaatatgctacttgccgaggcatatggcagcggcgggtgtttctgggataacggccacctgtaccgcgaggaccagacctcccctgcgcccggtctgagatgtctgaattggttggatgcccaatcaggccttgctagtgcccccgtctccggtgcaggcaatcactcatattgcaggaatcctggcgaggatctgcgctgccctgaaaccacgtctcaggcactgccagcttttacaacagagatccaggaagcatctgaaggtcctggcgccgacgaagttcaggtgtttgcccctgccaacgccctgccagcccgctccgaggcggctgctgtgcaacctgtcatcgggatttcacagagggtgaggatgaacagtaaagagaaaaaagatctcggaaccctcggttacgttctcggtattaccatgatggtaattatcatcgccattggtgccgggattatccttggttattcatacaagagaggaaaagatttgaaagaacagcacgaccaaaaggtgtgtgaaagggaaatgcagcgcatcaccctccccctcagcgccttcactaaccccacgtgtgagatcgttgacgagaagaccgtggtcgtgcatacctcccagactcccgtagatcctcaggaggggacaacacccctaatggggcaagccggaacaccaggtgcatag

SEQ ID NO: 229478 - DNA, 555 bp, Artificial Sequence
  derived and/or modified sequence
atgttgctggcatgggtccaggccttcctcgtaagcaatatgctcctggctgaggcgtatgggtccggtgagactacatctcaggcgctgccagccttcaccacagaaatccaagaggcctctgagggacctggggccgatgaagtgcaggtgtttgcccccgccaatgctcttccggcacgcagcgaggctgcagctgttcagcccgttattggaatctctcaacgcgtcaggatgaacagtaaggaaaagaaggacttgggaaccctggggtacgtcctcggtatcactatgatggtgatcatcattgccatcggcgccggcattatcctagggtactcctataaacgcggcaaggaccttaaggagcaacacgaccagaaggtttgtgaaagggaaatgcagcgtatcaccttaccgttatctgcattcactaatcctacctgcgagatcgtagacgagaaaaccgtggttgtgcatacctcacaaacacccgtggacccccaagaaggcacaactcctttgatgggacaagcaggtacgccaggcgcatag

SEQ ID NO: 229479 - DNA, 705 bp, Artificial Sequence
  derived and/or modified sequence
atgctgctggcctgggtgcaggccttcctggtgagcaacatgctgctggccgaggcctacggcagcggcggctgcttctgggacaatggccacctgtaccgggaggaccagaccagccctgcccctggcctgcgctgcctgaactggctggatgcccagagcggcctggccagcgcccctgtgtctggggccggcaaccacagctactgcagaaatccagatgaggacccccggggcccctggtgctacgtgtctggagaggccggcgtgcctgagaagaggccctgtgaggacctgcgctgcccagagaccaccagccaggccctgcctgccttcaccacagagatccaggaggccagcgagggccctggagcagatgaggtgcaggtgtttgccccagccaatgccctgcctgcccggtctgaggccgctgctgtgcagcccgtcatcggcatcagccagagggtgaggatgaacagcaaggagaagaaggacctgggcaccctgggctacgtgctgggcatcaccatgatggtgatcatcatcgccatcggggccggcatcatcctgggctacagctacaagaggtctgtggccagcctgctgggccccctgcggaggagaggaggccgctacaccaagagcaactttgtggccttcctgcccaagaggaagcaggatgtggagaaccagctgaagatgtag

SEQ ID NO: 229480 - DNA, 726 bp, Artificial Sequence
  derived and/or modified sequence
atgctgctggcctgggtgcaggccttcctggtgagcaacatgctgctggccgaggcctacggcagcggcggctgcttctgggacaatggccacctgtaccgggaggaccagaccagccctgcccctggcctgcgctgcctgaactggctggatgcccagagcggcctggccagcgcccctgtgtctggggccggcaaccacagctactgcagaaatcctggagaggacctgcgctgcccagagaccaccagccaggccctgcctgccttcaccacagagatccaggaggccagcgagggccctggagcagatgaggtgcaggtgtttgccccagccaatgccctgcctgcccggtctgaggccgctgctgtgcagcccgtcatcggcatcagccagagggtgaggatgaacagcaaggagaagaaggacctgggcaccctgggctacgtgctgggcatcaccatgatggtgatcatcatcgccatcggggccggcatcatcctgggctacagctacaagaggggcaaggacctgaaggagcagcacgaccagaaggtgtgtgagcgggagatgcagaggatcaccctgcccctgagcgccttcaccaaccccacctgtgagatcgtggatgagaagacagtggtggtgcacaccagccagacccctgtggacccccaggagggcaccacccccctgatgggccaggccggcacccctggggcctag

SEQ ID NO: 229481 - DNA, 555 bp, Artificial Sequence
  derived and/or modified sequence
atgctgctggcctgggtgcaggccttcctggtgagcaacatgctgctggccgaggcctacggcagcggggagaccaccagccaggccctgcctgccttcaccacagagatccaggaggccagcgagggccctggagcagatgaggtgcaggtgtttgccccagccaatgccctgcctgcccggtctgaggccgctgctgtgcagcctgtgattggcatcagccagagggtgaggatgaacagcaaggagaagaaggacctgggcaccctgggctacgtgctgggcatcaccatgatggtgatcatcatcgccatcggggccggcatcatcctgggctacagctacaagaggggcaaggacctgaaggagcagcacgaccagaaggtgtgtgagcgggagatgcagaggatcaccctgcccctgagcgccttcaccaaccccacctgtgaaattgtggatgagaagacagtggtggtgcacaccagccagacccctgtggacccccaggagggcaccacccccctgatgggccaggccggcacccctggggcctag

SEQ ID NO: 229482 - DNA, 705 bp, Artificial Sequence
  derived and/or modified sequence
atgctgctggcctgggtgcaggccttcctggtgagcaacatgctgttggcagaggcttatgggtctggagggtgtttttgggataacggtcatctctatagggaggatcaaactagtcccgcccctgggctgcgatgtctgaactggctggacgcccagtccggactcgcctcagcccctgtcagcggcgctggtaaccatagttactgccgaaaccccgacgaggatccgaggggaccctggtgttatgtttctggggaggccggggtgcccgaaaaacgaccatgtgaagatctgcggtgtcccgaaacgacgagccaagctttgcctgcttttaccaccgagatccaggaagcctctgagggccctggggccgatgaggttcaggtgttcgcaccggctaacgcgctgccagctaggtctgaggctgcagctgtgcagccagtgataggcatctcccagagggtgcgcatgaacagcaaagagaaaaaggatttggggactcttggttacgtgctcgggatcaccatgatggttattattatagccattggagctggaattattctcggctactcgtacaagcgcagtgtggcttccctcttgggacccctccgccggcgagggggtcgctatacgaaaagtaatttcgtcgcatttctcccgaaacgcaaacaggacgttgagaaccagctcaaaatgtag

SEQ ID NO: 229483 - DNA, 726 bp, Artificial Sequence
  derived and/or modified sequence
atgctgctggcctgggtgcaggccttcctggtgagcaacatgctgctagctgaagcttacggatccggcggatgtttctgggacaacggacacctctatcgtgaagaccagaccagcccggctcccgggctaagatgtttaaactggctggacgctcagagcggccttgcctctgcgcctgtgagcggcgccggcaaccacagctattgtcgcaatccaggagaggaccttaggtgccccgaaactacttcacaggcgctgcccgcatttacaacagagatccaagaggctagtgaggggccaggagccgatgaggtgcaggttttcgccccggctaatgctttgcccgcacgcagcgaagctgcagctgtccaacccgtcatcgggatctcccaacgcgttcgtatgaattcaaaggagaagaaggatttaggtacactgggttacgtcctgggcatcactatgatggtgatcatcattgccattggagccgggatcattcttggttactcatataaaagaggtaaggaccttaaggagcaacacgatcagaaggtgtgcgaaagggagatgcagcggataacgctccctctctccgcattcactaatccgacatgtgagattgttgatgaaaagaccgtcgtcgtacacacgagccagacccccgtggacccccaggaggggacaactcctctcatggggcaggcaggtacgccaggtgcatag

SEQ ID NO: 229484 - DNA, 555 bp, Artificial Sequence
  derived and/or modified sequence
atgctgctggcctgggtgcaggccttcctggtgagcaacatgctgcttgcagaggcatatgggagcggcgagacaactagccaggcactgcccgcttttaccacggaaatacaagaggcttctgagggcccaggagccgatgaggtgcaggttttcgcaccggccaatgctcttcctgctcgcagtgaagcagccgccgtccagccagttataggcataagtcagcgcgtgaggatgaacagcaaggaaaagaaggacctggggacactaggctatgtattaggtatcaccatgatggtcataatcatagcaatcggggcaggcattatcctgggatattcatataagcgcggaaaggatttaaaagagcagcatgatcagaaagtgtgtgagcgcgaaatgcagcgaatcaccctccccctatcagcattcactaatccaacgtgcgagatcgtggatgaaaagacagttgttgttcacaccagtcagacccccgtagatccccaggaaggcaccacccccctgatggggcaggcgggcacaccaggtgcgtag

SEQ ID NO: 229485 - DNA, 2467 bp, Artificial Sequence
  derived and/or modified sequence
aaaacagctcgcgctgcagcaagctagctgggaagctcccagttctaaagagaggctgtttaccagaacagcataacaagggcaggtctgactgcaaggctgggactgggaggcagagccgccgccaagggggcctcggttaaacactggtcgttcaatcacctgcaagacgaaggaggcaaggatgctgttggcctgggtacaagcattcctcgtcagcaacatgctcctagcagaagcctatggatctggaggctgtttctgggacaacggccacctgtaccgggaggaccagacctcccccgcgccgggcctccgctgcctcaactggctggacgcgcagagcgggctggcctcggcccccgtgtcgggggccggcaatcacagttactgccgaaacccggacgaggacccgcgcgggccctggtgctacgtcagtggcgaggccggcgtccctgagaaacggccttgcgaggacctgcgctgtccagagaccacctcccaggccctgccagccttcacgacagaaatccaggaagcgtctgaagggccaggtgcagatgaggtgcaggtgttcgctcctgccaacgccctgcccgctcggagtgaggcggcagctgtgcagccagtgattgggatcagccagcgggtgcggatgaactccaaggagaaaaaggacctgggaactctgggctacgtgctgggcattaccatgatggtgatcatcattgccatcggagctggcatcatcttgggctactcctacaagagggggaaggatttgaaagaacagcatgatcagaaagtatgtgagagggagatgcagcgaatcactctgcccttgtctgccttcaccaaccccacctgtgagattgtggatgagaagactgtcgtggtccacaccagccagactccagttgaccctcaggagggcaccaccccccttatgggccaggccgggactcctggggcctgagcccccccagtgggcaggagcccatgcagacactggtgcaggacagcccaccctcctacagctaggaggaactaccactttgtgttctggttaaaaccctaccactcccccgcttttttggcgaatcctagtaagagtgacagaagcaggtggccctgtgggctgagggtaaggctgggtagggtcctaacagtgctccttgtccatcccttggagcagattttgtctgtggatggagacagtggcagctcccacagtgatgctgctgctaagggcttccaaacattgcctgcacccctggaactgaaccagggatagacggggagctcccccaggctcctctgtgctttactaagatggcctcagtctccactgtgggcttgagtggcatacactgttattcatggttaaggtaaagcaggtcaagggatggcattgaaaaaatatatttagtttttaaaatatttgggatggaactccctactgacctctgagaactggaaacgagtttgtacagaagtcagaactttgggttgggaatgagatctaggttgtggctgctggtatgcttcagcttgctggcaatgatgtgccttgacaaccgtgggccaggcctgggcccagggactcttcctgtttcataaggaaaggaagaattgcactgagcattccacttaggaagaggatagagaaggatctgctccgcctttggccacaggagcagaggcagacctgggatgccccagtttctcttcagggatggatagtgacctgtcttcattttgcacaggtaagagagtagttagctaacctatgggaattatactgtggggccttgtgagctgcttctaagaggctaacctggaaactaagctcagaggcaaggtaataaagcacttcagggcttgctccccaagtgggcctgatttagcaggtggtcctgcgggcgtccaggtcagcaccttcctgtagggcactggggctagggtcacagcccctaactcataaagcaatcaaagaaccattagaaagggctcattaagccttttggacacaggaccccagagaggaaaaagtgacttgcccaaggtcgtaagcaagctactggcatggcaagagcccagcttcctgacggagcgcaacatttctccactgcactgtgctagcagctcagcagggcctctaacctgtgatgtcacactcaagaggccttggcagctcctagccatagagcttcctttccagaacccttccactgcccaatgtggagacgggttagtggggctttctatggagccatctgctttggggacctagacctcaggtggtctcttggtgttagtgatgctggagaagagaatattactggtttctacttttctataaaggcatttctctatatacatgttttatatacctcattctgacacctgcatatagtgtgggaaattgctctgcatttgacttaattaaaaaaaaaaaaagactcca

SEQ ID NO: 229486 - DNA, 999 bp, Artificial Sequence
  derived and/or modified sequence
gagaggctgtttaccagaacagcataacaagggcaggtctgactgcaaggctgggactgggaggcagagccgccgccaagggggcctcggttaaacactggtcgttcaatcacctgcaagacgaaggaggcaaggatgctgttggcctgggtacaagcattcctcgtcagcaacatgctcctagcagaagcctatggatctggaggctgtttctgggacaacggccacctgtaccgggaggaccagacctcccccgcgccgggcctccgctgcctcaactggctggacgcgcagagcgggctggcctcggcccccgtgtcgggggccggcaatcacagttactgccgaaacccggacgaggacccgcgcgggccctggtgctacgtcagtggcgaggccggcgtccctgagaaacggccttgcgaggacctgcgctgtccagagaccacctcccaggccctgccagccttcacgacagaaatccaggaagcgtctgaagggccaggtgcagatgaggtgcaggtgttcgctcctgccaacgccctgcccgctcggagtgaggcggcagctgtgcagccagtgattgggatcagccagcgggtgcggatgaactccaaggagaaaaaggacctgggaactctgggctacgtgctgggcattaccatgatggtgatcatcattgccatcggagctggcatcatcttgggctactcctacaagaggtcagtagcttctcttctgggccctcttaggaggaggggaggaaggtacacaaagtcaaactttgtggctttcttacccaaaaggaagcaagatgttgaaaatcagctcaagatgtagagacttggtcctagtctttatctgctgaccttggacaaaccctttcctttggtgcctttacacctcacttaaaagccttgtgagggatgttcttgttccgcattttacaaatgaagaagcctctgtcagagacttgctcaaagtcacatagcctaggag

SEQ ID NO: 229487 - DNA, 2387 bp, Artificial Sequence
  derived and/or modified sequence
agctgaaaaacagctcgcgctgcagcaagctagctgggaagctcccagttctaaagagaggctgtttaccagaacagcataacaagggcaggtctgactgcaaggctgggactgggaggcagagccgccgccaagggggcctcggttaaacactggtcgttcaatcacctgcaagacgaaggaggcaaggatgctgttggcctgggtacaagcattcctcgtcagcaacatgctcctagcagaagcctatggatctggaggctgtttctgggacaacggccacctgtaccgggaggaccagacctcccccgcgccgggcctccgctgcctcaactggctggacgcgcagagcgggctggcctcggcccccgtgtcgggggccggcaatcacagttactgccgaaacccgggcgaggacctgcgctgtccagagaccacctcccaggccctgccagccttcacgacagaaatccaggaagcgtctgaagggccaggtgcagatgaggtgcaggtgttcgctcctgccaacgccctgcccgctcggagtgaggcggcagctgtgcagccagtgattgggatcagccagcgggtgcggatgaactccaaggagaaaaaggacctgggaactctgggctacgtgctgggcattaccatgatggtgatcatcattgccatcggagctggcatcatcttgggctactcctacaagagggggaaggatttgaaagaacagcatgatcagaaagtatgtgagagggagatgcagcgaatcactctgcccttgtctgccttcaccaaccccacctgtgagattgtggatgagaagactgtcgtggtccacaccagccagactccagttgaccctcaggagggcaccaccccccttatgggccaggccgggactcctggggcctgagcccccccagtgggcaggagcccatgcagacactggtgcaggacagcccaccctcctacagctaggaggaactaccactttgtgttctggttaaaaccctaccactcccccgcttttttggcgaatcctagtaagagtgacagaagcaggtggccctgtgggctgagggtaaggctgggtagggtcctaacagtgctccttgtccatcccttggagcagattttgtctgtggatggagacagtggcagctcccacagtgatgctgctgctaagggcttccaaacattgcctgcacccctggaactgaaccagggatagacggggagctcccccaggctcctctgtgctttactaagatggcctcagtctccactgtgggcttgagtggcatacactgttattcatggttaaggtaaagcaggtcaagggatggcattgaaaaaatatatttagtttttaaaatatttgggatggaactccctactgacctctgagaactggaaacgagtttgtacagaagtcagaactttgggttgggaatgagatctaggttgtggctgctggtatgcttcagcttgctggcaatgatgtgccttgacaaccgtgggccaggcctgggcccagggactcttcctgtttcataaggaaaggaagaattgcactgagcattccacttaggaagaggatagagaaggatctgctccgcctttggccacaggagcagaggcagacctgggatgccccagtttctcttcagggatggatagtgacctgtcttcattttgcacaggtaagagagtagttagctaacctatgggaattatactgtggggccttgtgagctgcttctaagaggctaacctggaaactaagctcagaggcaaggtaataaagcacttcagggcttgctccccaagtgggcctgatttagcaggtggtcctgcgggcgtccaggtcagcaccttcctgtagggcactggggctagggtcacagcccctaactcataaagcaatcaaagaaccattagaaagggctcattaagccttttggacacaggaccccagagaggaaaaagtgacttgcccaaggtcgtaagcaagctactggcatggcaagagcccagcttcctgacggagcgcaacatttctccactgcactgtgctagcagctcagcagggcctctaacctgtgatgtcacactcaagaggccttggcagctcctagccatagagcttcctttccagaacccttccactgcccaatgtggagacgggttagtggggctttctatggagccatctgctttggggacctagacctcaggtggtctcttggtgttagtgatgctggagaagagaatattactggtttctacttttctataaaggcatttctctatatacatgttttatatacctcattctgacacctgcatatagtgtgggaaattgctctgcatttgacttaatt

SEQ ID NO: 229488 - DNA, 2374 bp, Artificial Sequence
  derived and/or modified sequence
agctgaaaaacagctcgcgctgcagcaagctagctgggaagctcccagttctaaagagaggctgtttaccagaacagcataacaagggcaggtctgactgcaaggctgggactgggaggcagagccgccgccaagggggcctcggttaaacactggtcgttcaatcacctgcaagacgaaggaggcaaggatgctgttggcctgggtacaagcattcctcgtcagcaacatgctcctagcagaagcctatggatctggaggctgtttctgggacaacggccacctgtaccgggaggaccagacctcccccgcgccgggcctccgctgcctcaactggctggacgcgcagagcgggctggcctcggcccccgtgtcgggggccggcaatcacagttactgccgaaacccggacgaggacccgcgcgggccctggtgctacgtcagtggcgaggccggcgtccctgagaaacggccttgcgaggacctgcgctgtccagagaccacctcccaggccctgccagccttcacgacagaaatccaggaagcgtctgaagggccaggtgcagatgaggtgcaggtgttcgctcctgccaacgccctgcccgctcggagtgaggcggcagctgtgcagccagtgattgggatcagccagcgggtgcggatgaactccaaggagaaaaaggacctgggaactctggggggaaggatttgaaagaacagcatgatcagaaagtatgtgagagggagatgcagcgaatcactctgcccttgtctgccttcaccaaccccacctgtgagattgtggatgagaagactgtcgtggtccacaccagccagactccagttgaccctcaggagggcaccaccccccttatgggccaggccgggactcctggggcctgagcccccccagtgggcaggagcccatgcagacactggtgcaggacagcccaccctcctacagctaggaggaactaccactttgtgttctggttaaaaccctaccactcccccgcttttttggcgaatcctagtaagagtgacagaagcaggtggccctgtgggctgagggtaaggctgggtagggtcctaacagtgctccttgtccatcccttggagcagattttgtctgtggatggagacagtggcagctcccacagtgatgctgctgctaagggcttccaaacattgcctgcacccctggaactgaaccagggatagacggggagctcccccaggctcctctgtgctttactaagatggcctcagtctccactgtgggcttgagtggcatacactgttattcatggttaaggtaaagcaggtcaagggatggcattgaaaaaatatatttagtttttaaaatatttgggatggaactccctactgacctctgagaactggaaacgagtttgtacagaagtcagaactttgggttgggaatgagatctaggttgtggctgctggtatgcttcagcttgctggcaatgatgtgccttgacaaccgtgggccaggcctgggcccagggactcttcctgtttcataaggaaaggaagaattgcactgagcattccacttaggaagaggatagagaaggatctgctccgcctttggccacaggagcagaggcagacctgggatgccccagtttctcttcagggatggatagtgacctgtcttcattttgcacaggtaagagagtagttagctaacctatgggaattatactgtggggccttgtgagctgcttctaagaggctaacctggaaactaagctcagaggcaaggtaataaagcacttcagggcttgctccccaagtgggcctgatttagcaggtggtcctgcgggcgtccaggtcagcaccttcctgtagggcactggggctagggtcacagcccctaactcataaagcaatcaaagaaccattagaaagggctcattaagccttttggacacaggaccccagagaggaaaaagtgacttgcccaaggtcgtaagcaagctactggcatggcaagagcccagcttcctgacggagcgcaacatttctccactgcactgtgctagcagctcagcagggcctctaacctgtgatgtcacactcaagaggccttggcagctcctagccatagagcttcctttccagaacccttccactgcccaatgtggagacgggttagtggggctttctatggagccatctgctttggggacctagacctcaggtggtctcttggtgttagtgatgctggagaagagaatattactggtttctacttttctataaaggcatttctctatatacatgttttatatacctcattctgacacctgcatatagtgtgggaaattgctctgcatttgacttaatt

SEQ ID NO: 229489 - DNA, 750 bp, Artificial Sequence
  derived and/or modified sequence
cctcggttaaacactggtcgttcaatcacctgcaagacgaaggaggcaaggatgctgttggcctgggtacaagcattcctcgtcagcaacatgctcctagcagaagcctatggatctggagagaccacctcccaggccctgccagccttcacgacagaaatccaggaagcgtctgaagggccaggtgcagatgaggtgcaggtgttcgctcctgccaacgccctgcccgctcggagtgaggcggcagctgtgcagccagtgattgggatcagccagcgggtgcggatgaactccaaggagaaaaaggacctgggaactctgggctacgtgctgggcattaccatgatggtgatcatcattgccatcggagctggcatcatcttgggctactcctacaagagggggaaggatttgaaagaacagcatgatcagaaagtatgtgagagggagatgcagcgaatcactctgcccttgtctgccttcaccaaccccacctgtgagattgtggatgagaagactgtcgtggtccacaccagccagactccagttgaccctcaggagggcaccaccccccttatgggccaggccgggactcctggggcctgagcccccccagtgggcaggagcccatgcagacactggtgcaggacagcccaccctcctacagctaggaggaactaccactttgtgttctggttaaaaccctaccactcccccgcttttttggcgaatcctagtaagagtgacaga

SEQ ID NO: 229490 - DNA, 705 bp, Artificial Sequence
  derived and/or modified sequence
atgttgctggcttgggtgcaggcatttctggtctctaatatgctcctggcggaagcgtacggcagcggtggttgtttctgggacaatggacatttatacagagaggaccagacttcacccgcacctgggctgaggtgccttaactggttggacgctcagagcggtctagctagtgcaccagtgtccggtgcagggaaccactcttactgtcgtaatccagatgaggatcctcggggaccatggtgctacgtgagcggtgaagccggagtgcccgagaaaaggccctgcgaagatctacggtgtccagagacaaccagccaggcgctccctgctttcactaccgagatccaggaagctagcgagggaccaggcgcagatgaggtacaagtgttcgcacctgccaacgccctgcctgctagaagcgaggcagccgcagtgcaacccgtgattggaatctcccagagagttaggatgaactcaaaagagaaaaaggatctgggcactctcggatacgtgctgggaatcaccatgatggtcataataatcgctatcggcgcaggtatcatcctgggatactcttacaagagatccgttgcatccctgctcgggcctctgcgcagacgaggcggacgatataccaagtccaacttcgttgccttcttacccaagcgcaaacaagatgtcgagaaccagctgaaaatgtag

SEQ ID NO: 229491 - DNA, 726 bp, Artificial Sequence
  derived and/or modified sequence
atgttgttggcttgggttcaggcctttctggtgtccaacatgctgctggcagaggcctatggatccgggggatgtttttgggataatggccatctataccgggaagaccaaactagtcccgctcccggactccgctgtctgaactggcttgacgctcagtccggcctcgcctccgctcctgtatcaggtgctggaaaccactcctactgccgaaacccgggtgaggatctgcggtgccccgaaacaacttcccaggctctgcccgctttcacgaccgagattcaggaggcctccgaaggacctggcgcagacgaggtgcaagtctttgctcccgcaaatgcactgcccgcaaggtcagaggcggcagcagtccagcccgtgataggcatctctcagagagtgcggatgaattcgaaagagaagaaggatctgggcacccttggctatgttctgggtatcacaatgatggttatcatcatagcgatcggagcgggaataattctgggctatagctataagcgaggaaaagacctgaaagagcagcatgatcagaaggtgtgtgaacgggagatgcagcgcatcacccttcccctgagcgccttcaccaatcccacgtgtgaaatcgtggatgaaaagaccgtcgtcgtgcatacatctcagaccccagtggatccccaggagggaactactcccctgatgggtcaggcaggcacgcctggggcatag

SEQ ID NO: 229492 - DNA, 555 bp, Artificial Sequence
  derived and/or modified sequence
atgcttttggcctgggttcaggccttcctcgtgagcaacatgctgctcgccgaggcatacgggtcaggtgaaacaacaagccaggccctccccgcttttactactgagatccaagaggcctcagagggcccaggagcagacgaggttcaagtttttgcccctgcaaacgccctccccgcacgctctgaggccgcagcagtccagcctgtgatcggtattagtcagagagtgcgcatgaattcaaaggagaagaaagacctgggcaccctggggtacgttctgggcattactatgatggtgatcatcattgccattggggcaggcatcatcctgggatatagctataagcgtggcaaagacctgaaggagcagcacgaccagaaggtttgcgaacgggagatgcaacgcatcaccttgcctctgtccgcattcaccaaccctacctgcgagattgttgatgaaaaaactgtggtagtgcacacaagccagactcccgtggatccacaagaggggaccacccctctgatggggcaagctgggacgcccggtgcatag

SEQ ID NO: 229493 - DNA, 792 bp, Artificial Sequence
  derived and/or modified sequence
atgctgctggcctgggtgcaggccttcctggtgagcaacatgctgctggccgaggcctacggcagcggcggctgcttctgggacaacggccacctgtacagagaggaccagaccagccccgcccccggcctgagatgcctgaactggctggacgcccagagcggcctggccagcgcccccgtgagcggcgccggcaaccacagctactgcagaaaccccgacgaggaccccagaggcccctggtgctacgtgagcggcgaggccggcgtgcccgagaagagaccctgcgaggacctgagatgccccgagaccaccagccaggccctgcccgccttcaccaccgagatccaggaggccagcgagggccccggcgccgacgaggtgcaggtgttcgcccccgccaacgccctgcccgccagaagcgaggccgccgccgtgcagcccgtgatcggcatcagccagagagtgagaatgaacagcaaggagaagaaggacctgggcaccctgggctacgtgctgggcatcaccatgatggtgatcatcatcgccatcggcgccggcatcatcctgggctacagctacaagagaggcaaggacctgaaggagcagcacgaccagaaggtgtgcgagagagagatgcagagaatcaccctgcccctgagcgccttcaccaaccccacctgcgagatcgtggacgagaagaccgtggtggtgcacaccagccagacccccgtggacccccaggagggcaccacccccctgatgggccaggccggcacccccggcgcctag

SEQ ID NO: 229494 - DNA, 792 bp, Artificial Sequence
  derived and/or modified sequence
atgctcctcgcttgggtgcaagctttcctagtgtctaatatgcttctcgcggaggcctacggtagcggcggctgtttttgggacaatggacatctctatcgagaggatcagacgagtccagctcccggcttgagatgcttgaattggttggacgcacagtccggcctggcgagtgctcccgtttccggcgcgggaaatcatagttattgtaggaacccggacgaagatcctcgcggaccctggtgttacgtgtccggcgaagccggtgtgcccgagaagaggccttgtgaagatctgcgctgccccgagacaactagccaggcactcccggcctttacgacagaaattcaagaagcctccgagggtcctggggcggacgaagtccaggtgttcgctccagctaacgctctgccagctaggtccgaggccgccgccgtgcagcccgtgatcggcatcagtcagagagtcaggatgaacagcaaggagaaaaaggatcttggaacattagggtacgtactggggatcaccatgatggttatcattattgcgataggcgcaggaattatcctgggttacagctacaagaggggcaaggatctgaaggagcagcacgaccagaaggtctgcgagagagagatgcaacgcatcaccctgcccctgagcgctttcaccaaccccacctgcgagatagtcgatgaaaagaccgtggtggtgcataccagccagacaccagtagatccccaagaggggactacccctctcatgggacaggccggcacccctggggcttag

SEQ ID NO: 229495 - DNA, 792 bp, Artificial Sequence
  derived and/or modified sequence
atgctgctggcctgggtgcaggccttcctggtgagcaacatgctgctggccgaggcctacggcagcggcggctgcttctgggacaatggccacctgtaccgggaggaccagaccagccctgcccctggcctgcgctgcctgaactggctggatgcccagagcggcctggccagcgcccctgtgtctggggccggcaaccacagctactgcagaaatccagatgaggacccccggggcccctggtgctacgtgtctggagaggccggcgtgcctgagaagaggccctgtgaggacctgcgctgcccagagaccaccagccaggccctgcctgccttcaccacagagatccaggaggccagcgagggccctggagcagatgaggtgcaggtgtttgccccagccaatgccctgcctgcccggtctgaggccgctgctgtgcagcccgtcatcggcatcagccagagggtgaggatgaacagcaaggagaagaaggacctgggcaccctgggctacgtgctgggcatcaccatgatggtgatcatcatcgccatcggggccggcatcatcctgggctacagctacaagaggggcaaggacctgaaggagcagcacgaccagaaggtgtgtgagcgggagatgcagaggatcaccctgcccctgagcgccttcaccaaccccacctgtgagatcgtggatgagaagacagtggtggtgcacaccagccagacccctgtggacccccaggagggcaccacccccctgatgggccaggccggcacccctggggcctag

SEQ ID NO: 229496 - DNA, 792 bp, Artificial Sequence
  derived and/or modified sequence
atgctgctggcctgggtgcaggccttcctggtgagcaacatgctgcttgctgaagcctatgggtcaggcggatgcttttgggacaatggtcatttataccgggaggatcagacctcgcctgctccagggctgaggtgtctcaactggttagacgcccagtctggactggcgtcagcgccagttagtggagccgggaaccacagctattgccgcaacccagacgaagacccccgggggccctggtgctatgtttccggcgaggccggcgtgccggaaaagaggccctgcgaagatcttcgctgccccgaaaccaccagtcaggccctccccgccttcactaccgagatccaggaagcttcagagggccccggagcagatgaggtccaggtgttcgcccctgcaaatgccctcccggcacgtagcgaggccgctgctgtacagcctgtaattggaatctcccaacgagtgcggatgaactcaaaagagaagaaggatctcggaaccctagggtatgttcttggcatcactatgatggtcatcatcatagccatcggtgccggtattatcctgggatatagctacaaaagggggaaggacctgaaagagcagcacgaccaaaaggtttgtgagcgcgagatgcaaagaatcacactccccctgtctgcatttaccaaccctacttgtgaaatcgtcgacgaaaagactgttgtcgtgcatacatcacagacaccggtcgatccacaagaaggcacaacaccactgatgggacaggctggtacacctggtgcctag

SEQ ID NO: 229497 - DNA, 792 bp, Artificial Sequence
  derived and/or modified sequence
atgctgttagcctgggtgcaggctttcctggtgtctaacatgcttttggccgaggcttacggtagcggtggatgtttctgggataatggacacctctaccgcgaggaccagacttccccagcccctggcctgaggtgtttaaactggctggacgcccagtccggacttgcgtcagctcccgtgagcggcgcaggcaaccattcctactgccgtaaccctgacgaggaccctcgcggtccttggtgctatgtgagtggggaggccggagtccccgaaaaacgaccctgtgaagacttacgatgtccggagaccaccagtcaggcgctgccggcttttaccaccgagattcaagaggccagcgagggtccaggagcagacgaagttcaagtttttgctcctgctaacgccctgcctgccaggtctgaggctgccgcagtgcagccggtgatcggaatctctcagagagtcaggatgaactccaaggagaagaaggaccttggaactttgggatacgtgctgggcattaccatgatggtcataatcattgctattggcgctgggatcattcttgggtattcttacaagaggggcaaggacttaaaggaacagcacgatcagaaagtctgcgagcgggagatgcagagaattacattgccattgagcgcttttactaatccgacctgcgagatcgtagacgaaaagactgttgtcgtacacacaagtcaaacacccgtggacccgcaggagggaacaactcccctgatgggtcaggcaggcacccctggagcatag

SEQ ID NO: 229498 - protein, 698 aa, Artificial Sequence
  derived and/or modified sequence
GVGGRGERLPRGFARVVRVASEGSVRRPSGPVPAPQPPAFRFVSRPGRARSESETLERSPPQSPGPGKAGDAPNRRSGHVRGARVLSPPGRRARLSSPGPSRSSEAREELRRHLVGLIERSRVVIFSKSYCPHSTRVKELFSSLGVECNVLELDQVDDGARVQEVLSEITNQKTVPNIFVNKVHVGGCDQTFQAYQSGLLQKLLQEDLAYDYDLIIIGGGSGGLSCAKEAAILGKKVMVLDFVVPSPQGTSWGLGGTCVNVGCIPKKLMHQAALLGQALCDSRKFGWEYNQQVRHNWETMTKAIQNHISSLNWGYRLSLREKAVAYVNSYGEFVEHHKIKATNKKGQETYYTAAQFVIATGERPRYLGIQGDKEYCITSDDLFSLPYCPGKTLVVGASYVALECAGFLAGFGLDVTVMVRSILLRGFDQEMAEKVGSYMEQHGVKFLRKFIPVMVQQLEKGSPGKLKVLAKSTEGTETIEGVYNTVLLAIGRDSCTRKIGLEKIGVKINEKSGKIPVNDVEQTNVPYVYAVGDILEDKPELTPVAIQSGKLLAQRLFGASLEKCDYINVPTTVFTPLEYGCCGLSEEKAIEVYKKENLEIYHTLFWPLEWTVAGRENNTCYAKIICNKFDHDRVIGFHILGPNAGEVTQGFAAAMKCGLTKQLLDDTIGIHPTCGEVFTTLEITKSSGLDITQKGCCG

SEQ ID NO: 229499 - DNA, 2097 bp, Artificial Sequence
  derived and/or modified sequence
ggcgtgggcggcagaggcgagagactgcccagaggcttcgccagagtggtgagagtggccagcgagggcagcgtgagaagacccagcggccccgtgcccgccccccagccccccgccttcagattcgtgagcagacccggcagagccagaagcgagagcgagaccctggagagaagccccccccagagccccggccccggcaaggccggcgacgcccccaacagaagaagcggccacgtgagaggcgccagagtgctgagcccccccggcagaagagccagactgagcagccccggccccagcagaagcagcgaggccagagaggagctgagaagacacctggtgggcctgatcgagagaagcagagtggtgatcttcagcaagagctactgcccccacagcaccagagtgaaggagctgttcagcagcctgggcgtggagtgcaacgtgctggagctggaccaggtggacgacggcgccagagtgcaggaggtgctgagcgagatcaccaaccagaagaccgtgcccaacatcttcgtgaacaaggtgcacgtgggcggctgcgaccagaccttccaggcctaccagagcggcctgctgcagaagctgctgcaggaggacctggcctacgactacgacctgatcatcatcggcggcggcagcggcggcctgagctgcgccaaggaggccgccatcctgggcaagaaggtgatggtgctggacttcgtggtgcccagcccccagggcaccagctggggcctgggcggcacctgcgtgaacgtgggctgcatccccaagaagctgatgcaccaggccgccctgctgggccaggccctgtgcgacagcagaaagttcggctgggagtacaaccagcaggtgagacacaactgggagaccatgaccaaggccatccagaaccacatcagcagcctgaactggggctacagactgagcctgagagagaaggccgtggcctacgtgaacagctacggcgagttcgtggagcaccacaagatcaaggccaccaacaagaagggccaggagacctactacaccgccgcccagttcgtgatcgccaccggcgagagacccagatacctgggcatccagggcgacaaggagtactgcatcaccagcgacgacctgttcagcctgccctactgccccggcaagaccctggtggtgggcgccagctacgtggccctggagtgcgccggcttcctggccggcttcggcctggacgtgaccgtgatggtgagaagcatcctgctgagaggcttcgaccaggagatggccgagaaggtgggcagctacatggagcagcacggcgtgaagttcctgagaaagttcatccccgtgatggtgcagcagctggagaagggcagccccggcaagctgaaggtgctggccaagagcaccgagggcaccgagaccatcgagggcgtgtacaacaccgtgctgctggccatcggcagagacagctgcaccagaaagatcggcctggagaagatcggcgtgaagatcaacgagaagagcggcaagatccccgtgaacgacgtggagcagaccaacgtgccctacgtgtacgccgtgggcgacatcctggaggacaagcccgagctgacccccgtggccatccagagcggcaagctgctggcccagagactgttcggcgccagcctggagaagtgcgactacatcaacgtgcccaccaccgtgttcacccccctggagtacggctgctgcggcctgagcgaggagaaggccatcgaggtgtacaagaaggagaacctggagatctaccacaccctgttctggcccctggagtggaccgtggccggcagagagaacaacacctgctacgccaagatcatctgcaacaagttcgaccacgacagagtgatcggcttccacatcctgggccccaacgccggcgaggtgacccagggcttcgccgccgccatgaagtgcggcctgaccaagcagctgctggacgacaccatcggcatccaccccacctgcggcgaggtgttcaccaccctggagatcaccaagagcagcggcctggacatcacccagaagggctgctgaggctag

SEQ ID NO: 229500 - DNA, 2097 bp, Artificial Sequence
  derived and/or modified sequence
ggagtgggtggccgtggcgagagactcccaagaggcttcgcccgcgtcgtacgggtggcctcagaaggcagcgttcgccggccctccggccctgttcccgcccctcagcctccagccttccgctttgtgtccaggcccgggcgcgcgcgctccgagtccgaaactctggagagatccccaccccagtcgcctgggcctgggaaagctggagacgcaccaaaccggcggtctgggcacgtgcgtggggccagggtactgtctccacctgggcgccgcgcaaggctgtcttccccgggcccgtcccggagtagcgaggcacgggaagagctacggcggcatctggtcggactgattgagcgctccagagtggtcatcttcagtaaatcctactgtccccactcaacccgagtcaaagagctcttctcaagtctcggggtcgagtgtaacgtgttagagctggatcaggtagacgacggtgcccgggttcaggaggtgctgtctgaaatcacaaatcaaaaaactgtcccaaatatcttcgtcaacaaggtccacgttggggggtgtgatcagacattccaggcataccagagtggtctgctccaaaagctccttcaggaggacctggcttacgactacgacctgattattatcggcggtggctcgggcggcctttcttgtgccaaagaggctgctattctggggaaaaaggtgatggtgctcgattttgtggtgcccagtcctcaaggaacatcctgggggctgggtggaacttgtgtgaacgttgggtgtatccctaaaaagctcatgcaccaggcagctttactgggccaggccctttgtgatagtcgaaagttcggctgggagtacaaccagcaggtccgacacaactgggagactatgacaaaggccattcagaaccacataagcagcttaaattggggctaccgattgtcgctaagggagaaggctgtggcttatgttaattcttatggggagtttgtggaacaccacaaaatcaaggccacgaataaaaaaggccaggaaacctactatacagccgctcagtttgtgatcgcaacaggcgagaggcccaggtaccttggcatccagggggacaaggagtattgtatcaccagtgacgacctattctcgctcccttactgcccaggaaaaacacttgttgtgggggccagctacgtggctttggagtgtgcggggttcctggccggattcggccttgatgttacagtcatggttagatccatcctcctcagaggttttgaccaggaaatggccgaaaaagttggcagctacatggagcagcacggtgttaagttcttaaggaagttcattccagtgatggtccagcaattggaaaagggatcgcctggcaagttgaaggtactggctaagtccactgaaggcactgaaacaatagaaggagtctacaacacggtactgctcgccattggacgcgacagttgtacccgtaagataggactggagaagattggagtgaaaatcaacgaaaaaagcggaaaaataccagttaatgatgtagagcagactaacgttccatatgtatatgctgtgggcgatattctggaggacaagccggagctgactccagtggccatacagagcgggaaattgctggcccagcgccttttcggagcgagcctagagaaatgcgactacataaacgtccccactacagtatttacccctctagagtacggttgttgcggtctgtcagaggaaaaggccatagaggtatacaaaaaagaaaacttagaaatttatcacactctcttttggccattagagtggactgtggcaggccgggagaacaatacctgctacgctaaaatcatttgtaataaatttgatcatgaccgggtgattgggttccacatcctgggtcccaatgccggtgaggtgactcaagggttcgccgccgccatgaagtgcggactgacaaagcagctgctcgatgacactattggaattcatcctacctgcggcgaggtgtttacaacactggaaataaccaagtcttccgggttggacatcacccaaaagggctgctgaggttag

SEQ ID NO: 229501 - DNA, 120 bp, Artificial Sequence
  derived and/or modified sequence
ggcctgaccaagcagctgctggatgacaccatcggcatccaccccacctgtggggaggtgttcaccaccctggagatcaccaagagcagcggcctggacatcacccagaagggcggctag

SEQ ID NO: 229502 - DNA, 2091 bp, Artificial Sequence
  derived and/or modified sequence
ggtgtgggcggccgcggggagcggctgccccggggctttgcccgggtggtgcgggtggccagcgagggctctgtgcggcggcccagcggccctgtgcctgccccccagcccccagccttccgctttgtgtcccggcccggccgggcccggtctgagagcgagaccctggagaggagccccccccagagccctggccctgggaaggctggagatgcccccaacagaagaagtggccacgtgcggggggcccgggtgctgagccccccaggaagaagagcccggctgagcagccctggccccagccgcagcagcgaggcccgggaggagctgcggcggcacctggtgggcctcatcgagaggagccgggtggtgatcttcagcaagagctactgcccccacagcaccagggtgaaggagctgttcagcagcctgggcgtggagtgcaatgtgctggagctggaccaggtggatgatggagcccgggtgcaggaggtgctgtctgagatcaccaaccagaagacagtgcccaacatctttgtgaacaaggtgcacgtgggcggctgtgaccagaccttccaggcctaccagagcggcctgctgcagaagctgctgcaggaggacctggcctatgactatgacctgatcatcattggaggcggcagcggcggcctgagctgtgccaaggaggccgccatcctgggcaagaaggtgatggtgctggactttgtggtgcccagcccccagggcacctcctggggcctgggcggcacctgtgtgaatgtgggctgcatccccaagaagctgatgcaccaggccgccctgctgggccaggccctgtgtgacagcaggaagtttggctgggagtacaaccagcaggtgcgccacaactgggagaccatgaccaaggccatccagaaccacatcagcagcctgaactggggctaccgcctgagcctgcgggagaaggctgtggcctacgtgaacagctatggagaatttgtggagcaccacaagatcaaggccaccaacaagaagggccaggagacctactacacagctgcccagtttgtgattgccaccggggagcggccccgctacctgggcatccagggcgacaaggagtactgcatcaccagtgatgacctcttcagcctgccctactgccctgggaagaccctggtggtgggcgccagctatgtggccctggagtgtgccggcttcctggccggcttcggcctggatgtgacagtgatggtgcgcagcatcctgctgcggggctttgaccaggagatggccgagaaggtgggcagctacatggagcagcacggcgtgaagttcctgaggaagttcatccctgtgatggtgcagcagctggagaagggcagccctgggaagctgaaggtgctggccaagagcacagagggcacagagaccattgaaggagtgtacaacacagtgctgctggccatcggccgggacagctgcaccaggaagattggcctggagaagattggagtgaagatcaatgagaagagcggcaagatccctgtgaatgatgtggagcagaccaacgtgccctacgtgtatgctgtgggggacatcctggaggacaagccagagctgacccctgtggccatccagagcggcaagctgctggcccagaggctgtttggagccagcctggagaagtgtgactacatcaacgtgcccaccaccgtcttcacccccctggagtatggctgctgcggcctgtctgaggagaaggccatcgaggtgtacaagaaggagaacctggagatctaccacaccctcttctggcccctggagtggacagtggccggccgggagaacaacacctgctacgccaagatcatctgcaacaagtttgaccatgacagagtgattggcttccacatcctgggccccaatgctggggaggtgacccagggctttgctgctgccatgaagtgtggcctgaccaagcagctgctggatgacaccatcggcatccaccccacctgtggggaggtgttcaccaccctggagatcaccaagagcagcggcctggacatcacccagaagggctgctag

SEQ ID NO: 229503 - DNA, 2097 bp, Artificial Sequence
  derived and/or modified sequence
ggcgtgggcggccggggcgagcggctgccccggggcttcgcccgggtagtccgcgtggcatccgaagggtccgtgcgcaggccctcagggcctgtgccggctccgcaaccccctgcgttcaggtttgtttcccgccctggaagggccagatccgaatccgagaccttggagcggagccctccgcagagccccggacccgggaaagccggggacgcccccaatcggagaagtggacatgtccgaggtgcacgggtactgagcccaccggggcgaagagcacgattgtctagtcccgggccctctaggagttcagaggctagagaagagttgagaaggcatctggtaggactgattgaacggagccgcgtggtgatattctcaaagtcctattgccctcacagtactagggtaaaagaactcttctcaagtctgggcgttgaatgcaacgttctcgagctggatcaggtggatgacggcgcacgcgtccaggaagtgctgtccgaaataacaaatcagaagacagtcccgaatattttcgtgaataaggtacatgtcgggggatgcgaccagacgttccaggcctaccaaagcgggctgctccaaaagctgcttcaggaagacctagcatatgactatgacctcatcattatcgggggagggagtggaggtctgtcttgcgcaaaagaggctgccattctcggtaaaaaagttatggtgcttgattttgtagtcccaagcccacagggtacctcctggggcttaggcggaacctgcgtcaatgtcggttgcatcccaaagaagttgatgcaccaggcagccctgctgggtcaggcactgtgtgacagcagaaaatttgggtgggagtacaaccagcaggtgcgtcacaactgggagactatgacaaaggctatccagaatcacatttcttctctcaactgggggtaccggctttcactgcgtgaaaaagccgtggcctatgtgaactcttacggcgaattcgtcgaacaccataaaataaaggccaccaacaaaaaaggccaagaaacatattacacagctgcacagttcgtgattgccacgggcgaacgaccgcggtacctgggcatccagggcgacaaagaatattgtatcacctcggacgatttgtttagcctgccctattgccccgggaagacactagtggtgggcgcatcctacgttgccctggaatgcgcgggattcctagctgggtttggtctagacgtgaccgtgatggtccgctctattctgctgagaggcttcgaccaggagatggccgaaaaggtgggctcctacatggaacagcatggagtgaaatttctgcggaagtttattcctgtgatggtccagcagctcgagaaggggtctcccggtaaactgaaggtgttagccaagtccacagagggaaccgagaccattgaaggcgtttataacacggtgctcctggcaatcggaagagactcttgtacacgcaagattgggttggaaaagatcggagttaaaatcaacgaaaagagcggcaaaataccagtaaacgacgtggagcagaccaacgttccatatgtctatgccgtgggcgacattttggaggataagcccgaactgacacccgtagctatccagtctggcaagttgctcgcccagagactgttcggtgccagcctggaaaaatgcgactatataaatgttcctaccacggtcttcacgcctctggagtacggctgttgtgggcttagtgaggaaaaagcaattgaggtgtacaaaaaggagaacctggagatctaccacacactgttttggcctcttgagtggacagtggccgggagggagaacaatacctgctatgcaaagattatctgtaacaagtttgaccacgaccgcgtaatcggcttccatatccttggcccaaacgctggggaggttacccagggcttcgccgccgcaatgaagtgcgggctcacaaagcagctactggacgacacaatcgggatacacccaacatgcggcgaggtgttcacgaccctggaaattacgaagagctctgggctcgacattacccagaagggttgctgaggctag

SEQ ID NO: 229504 - DNA, 2097 bp, Artificial Sequence
  derived and/or modified sequence
ggagtcggaggtcggggagagaggctcccgaggggattcgcgagagtcgtgagagtcgcttccgaagggtcggtgcggcgaccctctggcccagtgccagctccccaacctcccgcattccggttcgtgagtaggccaggaagagcgcgaagcgagtccgagacactggaacgctcccctccccaatctcctggcccagggaaggcaggagatgctcccaatagacgatccggacatgtacgtggtgccagggtactgtctccacctggacgcagagccagactgtctagcccaggtccttccaggtcttccgaggctagggaggagctgcgtagacacctagttggactgatcgaaaggagcagggtggtgattttcagcaagtcctattgcccccacagtacaagagtcaaagaactgttctccagcttgggggtggagtgtaatgttctggagcttgaccaagttgatgatggggcacgtgttcaggaggttctgagcgaaattactaatcagaaaacggtcccaaatatcttcgtcaacaaagtgcacgtcggaggatgcgatcagactttccaggcgtatcagagcggactactccagaagcttctgcaagaggacttggcctatgattatgatctcatcatcattggcggtggatctggaggcctcagttgtgccaaggaggctgccatactcggcaaaaaggtaatggtgttagatttcgtagtgccgtctccacagggcaccagttgggggctcggcggaacatgcgtgaatgtgggctgtatacctaagaagctcatgcatcaggccgctttactgggtcaggccttgtgcgatagccgcaagttcggctgggaatataaccagcaggttaggcacaactgggaaacaatgacaaaggcaatacagaatcacatcagttctctaaattggggctaccggcttagtctgagggaaaaggcagtggcttatgtgaatagctatggtgaattcgtagaacaccacaagattaaagcaacaaacaaaaagggacaagagacgtactataccgccgcacagttcgtgatcgcaacaggcgagagacctcgctacctggggattcagggcgacaaggaatactgcattacttcagacgacctcttctccctcccctactgtcccggtaaaactctggtggtgggcgcttcgtatgtcgcactggagtgcgcaggttttctggctggctttggacttgatgtgacagtgatggtacgcagcattttgttgaggggattcgatcaagaaatggcagaaaaagtgggaagctatatggaacaacacggggtgaagtttctccggaagtttattcccgtgatggtacagcagctcgagaagggctcccctggtaagctcaaagttctggccaagtctactgaaggaactgagacgattgaaggagtgtacaacacggtcctgctggccatcgggagagactcatgcacccggaagatcggactggagaaaattggtgtgaaaatcaatgaaaaaagcggcaagatacccgttaacgacgttgaacagactaatgtcccctacgtgtacgccgtgggagatatcctcgaggacaaacccgagctaacccctgtagctatccaatcaggaaagttactggcccagagactgttcggcgcttcactggagaaatgtgactacataaatgtgccaaccactgtgttcacccccctcgagtatggttgttgcggactgtcagaggaaaaggcaattgaagtatataaaaaggagaatctcgaaatttatcacaccctattctggccacttgagtggaccgtagctggacgggagaacaacacgtgttacgctaaaatcatttgtaataagtttgaccatgatcgggtgattggcttccacatattaggcccaaacgcgggtgaagtaactcagggatttgctgccgcaatgaagtgtgggctgaccaagcagctgttagacgatacaataggaattcaccccacctgcggcgaggtcttcactacacttgaaatcactaaatcatccggtctcgatattactcagaagggttgctgaggctag

SEQ ID NO: 229505 - DNA, 2950 bp, Artificial Sequence
  derived and/or modified sequence
ggtgttggggggcggggcgagcggctgcctcgcggattcgcgcgggtggtgagagtggccagcgagggcagcgttcgccgcccctcaggccccgtcccggcgccgcagccgcctgcgtttcggtttgtgagcaggcccggccgggccaggagcgagagcgagactctggagcggtcgccgccgcagtcgcccgggccgggaaaggcgggcgatgcccccaaccgccgctcgggccatgtccgaggggcgcgcgtgttgtcgccgccggggcgccgtgcccgcctgtcgtcccccgggcccagccgctcgtccgaggcccgcgaggagctgcgccgccacctcgtgggcctcatcgagcgcagccgggtggtgatcttcagcaagagctactgtccccatagtactcgggtgaaagaactcttttcttctttgggagtcgaatgtaatgtcttggaacttgatcaagttgatgatggggccagggttcaagaagtgctgtcagaaatcactaatcagaaaactgtgcccaatattttcgtgaataaagtgcatgtaggtggatgtgaccaaactttccaggcatatcagagtggtttgttacagaagctccttcaggaagatttggcatatgattatgatctcatcatcatcggtggtggttctggaggcctttcatgtgcgaaggaagctgccattttgggaaagaaagttatggtgctagactttgttgtcccgtcacctcagggcacatcctggggtcttggtggcacttgtgtaaatgtaggttgtattcctaagaaattgatgcatcaggctgcccttttggggcaggcattatgtgactcaaggaaatttggctgggaatataatcaacaagtgaggcacaactgggagacaatgacaaaagcgattcagaaccacatcagctctctaaactggggctacaggttgtctctgagggaaaaggctgtggcctatgtcaattcctatggagaatttgttgaacatcataaaataaaggcaaccaataaaaaaggacaggagacttattatactgctgcacagtttgtcatagcaacgggtgaaaggccacggtatttaggaatccaaggagataaagaatactgtattactagtgatgaccttttttctctgccttattgccctggcaaaacattagtggtgggtgcctcttatgttgccctggagtgtgcagggtttctggctggctttggcctagatgtcacagttatggtacgctcaatccttctccgtggcttcgaccaagaaatggcagaaaaagtgggttcctacatggagcagcatggtgtgaagttcctacggaaattcatacctgtgatggttcaacagttggagaaaggttcacctggaaagctgaaagtgttggctaaatccactgaaggaacagaaacaattgaaggagtctataacacagttttgttagctattggtcgtgactcctgtacaaggaaaataggcttggagaagattggtgtcaaaattaatgagaagagtggaaaaatacctgtaaatgatgtggaacagaccaatgtgccatatgtctatgctgttggtgatattttggaggataagccagagctcactcctgtcgccatacagtcaggcaagctgctagctcagagactttttggggcctctttagaaaagtgtgattatattaatgttccgactacagtgtttactcctctggagtatggttgctgtggattatctgaagagaaagctattgaagtatataaaaaagagaatctagaaatatatcatactttgttctggcctcttgaatggacagtagctggcagagagaacaacacttgttatgcaaagataatctgcaataaattcgaccatgatcgggtgataggatttcatattcttggaccaaacgccggtgaggttacccaaggatttgcagctgcaatgaaatgtgggctcacaaaacagctacttgatgacaccattggaattcaccccacatgtggggaggtgttcacgactttggaaatcacaaagtcgtcaggactagacatcactcagaaaggctgctgaggctaggcctgctgctgtttagttctccttgtcatattctcatttctctcaaagataagaatgctctcggataaaatgagcctgtgctcatgacagctgctctgttactcagggaccagtgcagggctgtcttacgacacttagatgagaaagtagacaaggaaagaggacagcagtgggcatctgccttgtggtcttgctgacagcgagaagcagtgggactgcttccttgacgccttagcttggagccccgttatgaggtgagccaaggctgactctcgcaagccaggactgagcttccctcggaaagacctttgagtggcaccattcacctaagttagcttttctggtcgctattgtttttatcccctttgctttgttgtttctgtgaaaatatattttcagttaagaaatgctataaagtagtggttttctagtgcgtgggcctagaattcacacatgctcactggtgaacagtgtctgtgggctgctgtgggctgcatttggatagctgtctgcattagcaggaagctgtacacactgtgtagggttagtcatctcttttcttttttgaggcacatttaacctactgtcaaaacgctgactcatgcttcaccctcacactcactacttggtggtgataaccttgaagctattctcccctaattaatatctcgagactgagcaaaatatctcatgtaagataaaagtacttgaattgctttttcatgttcatcttaatagtattatttccaaaagtttttaatactgtattatgtgaaatctaactaatttatctgtgaaataattccatcacagtctgtttaatgatgataaagttccataaatgaatacaggt

SEQ ID NO: 229506 - protein, 698 aa, Artificial Sequence
  derived and/or modified sequence
MVPGQAQPQSPEMLLLPLLLPVLGAGSLNKDPSYSLQVQRQVPVPEGLCVIVSCNLSYPRDGWDESTAAYGYWFKGRTSPKTGAPVATNNQSREVEMSTRDRFQLTGDPGKGSCSLVIRDAQREDEAWYFFRVERGSRVRHSFLSNAFFLKVTALTKKPDVYIPETLEPGQPVTVICVFNWAFKKCPAPSFSWTGAALSPRRTRPSTSHFSVLSFTPSPQDHDTDLTCHVDFSRKGVSAQRTVRLRVAYAPKDLIISISHDNTSALELQGNVIYLEVQKGQFLRLLCAADSQPPATLSWVLQDRVLSSSHPWGPRTLGLELRGVRAGDSGRYTCRAENRLGSQQQALDLSVQYPPENLRVMVSQANRTVLENLGNGTSLPVLEGQSLRLVCVTHSSPPARLSWTRWGQTVGPSQPSDPGVLELPPIQMEHEGEFTCHAQHPLGSQHVSLSLSVHYPPQLLGPSCSWEAEGLHCSCSSQASPAPSLRWWLGEELLEGNSSQGSFEVTPSSAGPWANSSLSLHGGLSSGLRLRCKAWNVHGAQSGSVFQLLPGKLEHGGGLGLGAALGAGVAALLAFCSCLVVFRVKICRKEARKRAAAEQDVPSTLGPISQGHQHECSAGSSQDHPPPGAATYTPGKGEEQELHYASLSFQGLRLWEPADQEAPSTTEYSEIKIHTGQPLRGPGFGLQLEREMSGMVPK

SEQ ID NO: 229507 - DNA, 2097 bp, Artificial Sequence
  derived and/or modified sequence
atggtgccaggacaggcccagcctcagtcacctgaaatgctgctcttacctcttctgttacccgtgctgggcgctgggagtctgaacaaagatccctcttactctctccaggtccagcgacaagtgcccgtgcccgaaggactgtgcgtgatcgtgtcctgcaacctgtcttatccccgcgacggctgggatgagtccacagctgcttacggttattggtttaagggacgcacatcacccaagaccggcgcgcccgtggctaccaacaatcagtcgcgagaggttgagatgagtacacgggaccgctttcagctgaccggcgacccgggtaagggatcctgctcactcgtgatacgcgatgcacagagagaggatgaggcatggtactttttcagggttgagcgtggttcacgtgtccggcacagctttctgagtaacgccttctttctcaaggtgactgccttaacaaaaaaacccgatgtttacattccagagactctggagcctggacagcctgtcaccgtgatctgtgtttttaactgggcgttcaaaaaatgtccggccccgtccttttcctggactggcgccgccctcagcccaagacgtacccggccatccacttcccatttcagcgttttgtccttcacgccgtcccctcaggatcatgacaccgacctgacctgccatgtggattttagccggaaaggagtatccgctcagcggaccgtgcgtctgcgggtagcttatgcccctaaagaccttattatctctatttcacatgacaatacctctgcactcgaactgcagggcaatgtgatttacctagaagttcagaagggccaattcctgcgcctcctatgcgctgcagacagccagccacctgctaccctatcttgggtcttgcaggatcgggtcctttcctcttctcatccatggggccctaggacccttggcctggaactgaggggcgtgagggcaggtgattctggacgctacacatgtcgagccgagaatagactgggctcacagcaacaggcactggacctgagtgtacaataccctccagagaaccttcgtgtcatggttagccaggccaacagaactgtgctggaaaaccttggcaacggaacatccctccccgtgctggaaggacagtcactcaggcttgtgtgcgttactcactcctcccctcccgctcgactgtcttggacaaggtgggggcagaccgtcggaccatcccagccaagcgacccgggcgtcctggagctgccgccaatccagatggaacatgaaggggaattcacatgccacgcacagcatccattgggaagccaacacgtgtcactcagcctgtcagtgcattaccctcctcagctgttgggcccgtcctgttcttgggaggccgaaggactgcactgtagttgttcttcacaggcgtctcccgcgcccagtctgcggtggtggctcggagaagagctgctcgaaggtaatagctcccagggcagcttcgaggttacgccctcctctgctgggccgtgggcaaattcaagcctctctctccacggtggcctctcctccggtttgagacttaggtgtaaggcatggaacgtgcatggcgcccaatccgggtctgtgtttcaacttcttcctgggaaactcgagcatggcggcggcctaggcctcggtgctgctctgggcgctggcgtcgccgcactcctcgctttctgctcctgtctggtggtattcagagtcaagatttgtaggaaagaagcccggaaaagagctgccgccgagcaggatgtgccctcaaccttggggcctattagccaaggacatcagcacgagtgttctgcaggtagcagtcaggatcaccctcctccaggggcagcaacatataccccaggaaagggcgaagagcaggaactccactacgcttccctctcctttcagggattacgcctttgggagcctgcagatcaggaggcaccttccaccaccgaatactcggaaataaaaattcacactggtcagcccctccggggcccaggcttcggactgcagttagaacgagagatgagcggcatggtgcctaaatag

SEQ ID NO: 229508 - DNA, 2097 bp, Artificial Sequence
  derived and/or modified sequence
atggtgcccggccaggcccagccccagagccctgagatgctgctgctgcccctgctgctgcctgtgctgggcgccggcagcctgaacaaggaccccagctacagcctgcaggtgcagaggcaggtgcctgtgcctgagggcctgtgtgtgattgtgtcctgcaacctgagctaccccagagatggctgggatgagagcacagctgcctacggctactggttcaagggccgcaccagccccaagacaggagcccctgtggccaccaacaaccagagccgggaggtggagatgagcacccgggaccgcttccagctgaccggggaccccgggaagggcagctgcagcctggtgatcagagatgcccagcgggaggatgaggcctggtacttcttccgggtggagcggggcagccgggtgcgccacagcttcctgagcaatgccttcttcctgaaggtgacagccctgaccaagaagccagatgtgtacatccctgagaccctggagcccggccagcctgtgaccgtcatctgtgtgttcaactgggccttcaagaagtgcccagcccccagcttctcctggacaggagctgccctgagccccaggaggacccggcccagcaccagccacttctctgtgctgtccttcacccccagcccccaggaccatgacacagacctgacctgccacgtggacttcagcaggaaaggagtgtctgcccagaggacagtgcggctgcgggtggcctatgcccccaaggacctgatcatcagcatcagccatgacaacaccagcgccctggagctgcagggcaatgtcatctacctggaggtgcagaagggccagttcctgcggctgctgtgtgccgctgacagccagcccccagccaccctgtcctgggtgctgcaggacagagtgctgagcagcagccacccctggggccccaggaccctgggcctggagctgcggggcgtgcgggccggggacagcggccgctacacctgcagagcagaaaatcggctgggcagccagcagcaggccctggacctgtctgtgcagtacccacctgagaacctgcgggtgatggtgtcccaggccaacagaacagtgctggagaacctgggcaatggcaccagcctgcctgtgctggagggccagagcctgcggctggtgtgtgtgacccacagcagccccccagcccggctgtcctggacccgctggggccagacagtgggccccagccagcccagcgaccccggggtgctggagctgccccccatccagatggagcacgagggggagttcacctgccacgcccagcaccccctgggcagccagcacgtgtccctgagcctgtctgtgcactacccaccccagctgctgggccccagctgctcctgggaggccgagggcctgcactgcagctgcagcagccaggccagccctgcccccagcctgcgctggtggctgggggaggagctgctggagggcaacagcagccagggcagctttgaggtgacccccagcagcgctggcccctgggccaacagcagcctgagcctgcatggaggcctgagcagcggcctgcggctgcgctgcaaggcctggaatgtgcacggggcccagagcggcagcgtcttccagctgctgcccgggaagctggagcacggcggcggcctgggcctgggcgccgccctgggcgccggcgtggccgccctgctggccttctgcagctgcctggtggtgttccgggtgaagatctgcaggaaggaggccaggaagagagctgctgctgagcaggatgtgcccagcaccctgggccccatcagccagggccaccagcatgaatgttctgctggcagcagccaggaccaccccccacctggagctgccacctacacccctgggaagggggaggagcaggagctgcactacgccagcctgtccttccagggcctgcggctgtgggagcctgctgaccaggaggcccccagcaccacagagtacagcgagatcaagatccacacaggccagcccctgcggggccctggcttcggcctgcagctggagcgggagatgagcggcatggtgcccaagtag

SEQ ID NO: 229509 - DNA, 2097 bp, Artificial Sequence
  derived and/or modified sequence
atggtgcccggccaggcccagccccagagccccgagatgctgctgctacctctcctcctcccggtgctaggtgcaggaagcctgaacaaggacccttcatactcacttcaagtccaacggcaggtcccggtaccggaaggcctttgtgtgatagtttcttgtaatctgagctacccccgcgatggatgggacgagagtacagctgcgtatggatactggttcaaggggcgcacatcccccaaaacaggggcccccgttgctacaaataatcagtctcgcgaggtggagatgtcaacacgggaccggtttcagcttacgggagacccaggaaagggaagttgcagtttggtgattcgcgatgcccagcgggaggacgaagcgtggtatttcttcagggtggagcggggttcaagggtcagacactcgtttttgagcaatgccttcttccttaaggtgactgcactcacaaagaaacctgatgtgtatatcccagagacactggagcctggccaaccggtcaccgtgatttgtgtgttcaactgggcttttaagaagtgtcccgcaccatcattcagttggaccggcgccgcactcagtccaaggagaacaagaccttctacttcccacttcagcgtcctgtccttcacaccctctccccaggatcatgatactgacctcacttgccacgtcgactttagcaggaagggggtgagcgcacagcgcacagtcaggctccgcgttgcatacgctccaaaggatctgattatttctatttcccacgataacacctccgcgttggaactccagggcaatgtgatctacctcgaagtgcaaaagggtcagttcctacggctgctgtgtgccgcagattcccaacctccggctacactatcctgggttctgcaggacagggttttatctagcagtcatccatggggtccacggactttgggcctcgagctccgcggtgtgagggcaggagatagcggtcgctacacttgccgggctgagaacaggctgggaagtcagcagcaagcgctggatttatccgttcagtacccccccgagaacctccgggttatggtatcacaagccaatcggaccgtgctggagaacttgggaaacggcacatctcttccggtcctggaaggacaaagcttacggctcgtttgcgtaacccactctagcccccctgctaggctcagctggacccgctgggggcagacagtcggtccgtcccagcctagtgatcctggagtgctggagcttcctccaatacaaatggagcacgagggggagtttacttgtcacgcgcagcatccgctggggagtcaacacgtctcactatcgctgtccgtgcattatccacctcagctgctcgggcccagttgcagctgggaagccgagggcctgcactgtagctgttcctcccaagctagccctgcccctagtttaaggtggtggttgggagaggagttgctggaaggaaattcatctcaggggtcctttgaagtcacgccgtctagcgccggaccctgggccaacagcagcttgagtcttcacggcggactgagttccggcctccggctcaggtgcaaggcctggaacgtgcatggcgctcagagcggatctgtgttccagctgctgccagggaagcttgagcacggtggaggcttgggactaggggccgctctcggagccggcgtggcagcactgttggccttttgttcatgcctggtggtcttcagggtcaagatttgcaggaaagaggcaagaaagcgtgctgcagccgagcaggacgtgccatccaccctgggacctatcagccagggacatcagcacgaatgctctgccgggagttcccaagatcaccccccacccggagcggctacctatacaccaggaaaaggcgaagaacaggaattgcactatgcaagcctctcattccagggacttagactctgggagcctgccgaccaagaggccccatctacaacggaatattctgaaatcaaaattcacacaggccaacccctcagggggccaggctttggactgcagctggaaagagagatgagcgggatggtgcctaagtag

SEQ ID NO: 229510 - DNA, 2097 bp, Artificial Sequence
  derived and/or modified sequence
atggttccagggcaggctcaaccgcagagccccgaaatgctcttattgcctctgttactgcccgttctgggggctggttccctcaataaggaccccagctactccctgcaagttcagcgccaagtgcctgtgcctgagggcctttgcgtgattgtatcttgcaatttatcgtacccccgagacggttgggatgagtccacagcagcctatggttattggtttaaaggtaggacatcaccgaaaaccggagccccagtagccacaaataatcaaagccgagaagtggagatgagcactcgtgaccggttccagctgacaggagatccagggaagggctcatgctctctggtaataagagatgcgcagagggaagacgaggcttggtactttttccgtgtagagagaggctccagggtacgacattcgttcctgtcaaatgccttctttttgaaggttaccgccctgacaaaaaaaccggacgtgtacattcccgagactctcgagccgggacagccagttacggtgatctgtgtgttcaactgggcttttaagaaatgccccgctccttccttttcgtggactggagcagcgctgtctccacggaggaccaggccttccacctcacacttttcagtgctcagtttcactcccagcccgcaggaccacgacaccgacctcacgtgtcatgtcgacttctcacgcaaaggcgtttcagcccagcggacagttagacttcgggttgcttacgcccctaaagatctaataatcagtatttctcacgataatactagtgccttggaacttcaaggcaatgtaatttatctcgaggttcagaagggccaatttctccgtctcctgtgcgcggcagacagtcaaccacctgcgaccttatcttgggtcctgcaggaccgggtattgtcctcctctcacccatggggccctagaaccctggggcttgaactccgaggagtacgggctggcgatagcggcagatacacctgcagggccgaaaatagactgggatcccagcagcaagctctcgatctttccgtgcagtatcccccagagaaccttagagtgatggtgagtcaggccaatcggactgtgctggaaaatctgggcaacggaacttcactgccggttttggagggccagagccttaggttggtttgcgtgacccactccagcccccctgcccgactctcatggacccgctggggccagacagttggcccatctcagccttctgatcctggcgtgctggaacttccacctattcagatggagcacgaaggggaattcacgtgccacgcccagcacccactagggtcccagcatgtgtctctgagcctgtccgttcattacccccctcagctgctgggcccatcatgttcatgggaggccgaaggccttcattgttcatgtagctctcaagcctccccagccccatcacttcgctggtggttgggcgaagaattattggaaggcaattcgtctcaggggagctttgaagtcaccccctccagcgccggaccttgggccaattcgtccctatccctgcacggcggtctgagcagcggattgcgtttgcggtgcaaggcatggaatgtccacggggcacaaagtggttcagtgtttcagctgctgcccggaaaactggaacatggcggaggactgggacttggggcagccctgggcgcaggtgtggccgctctactggccttctgtagctgtctcgtcgtttttcgcgttaagatttgtaggaaagaagccaggaagagggccgcagcagaacaggatgtcccaagtactctgggcccaatatcccagggtcaccagcatgagtgctccgctggctcatcacaggaccatcctccaccgggtgccgctacatatacccctggaaaaggggaagaacaggaactgcattatgcatccttgtccttccagggcctgcgtctgtgggaacccgcagaccaggaggccccttccactacggaatacagtgagataaagattcacaccggacagcccctgaggggcccaggattcgggctacagctggaaagggagatgagtggaatggtgccgaaatag

SEQ ID NO: 229511 - DNA, 3173 bp, Artificial Sequence
  derived and/or modified sequence
cgaggctcctcctctgtggatggtcactgcccctccaccaggcttcctgctggaggagtttccttcccagccaggccggcccagaagccagatggtcccgggacaggcccagccccagagcccagagatgctgctgctgcccctgctgctgcccgtgctgggggcggggtccctgaacaaggatcccagttacagtcttcaagtgcagaggcaggtgccggtgccggagggcctgtgtgtcatcgtgtcttgcaacctctcctacccccgggatggctgggacgagtctactgctgcttatggctactggttcaaaggacggaccagcccaaagacgggtgctcctgtggccactaacaaccagagtcgagaggtggaaatgagcacccgggaccgattccagctcactggggatcccggcaaagggagctgctccttggtgatcagagacgcgcagagggaggatgaggcatggtacttctttcgggtggagagaggaagccgtgtgagacatagtttcctgagcaatgcgttctttctaaaagtaacagccctgactaagaagcctgatgtctacatccccgagaccctggagcccgggcagccggtgacggtcatctgtgtgtttaactgggctttcaagaaatgtccagccccttctttctcctggacgggggctgccctctcccctagaagaaccagaccaagcacctcccacttctcagtgctcagcttcacgcccagcccccaggaccacgacaccgacctcacctgccatgtggacttctccagaaagggtgtgagcgcacagaggaccgtccgactccgtgtggcctatgcccccaaagaccttattatcagcatttcacatgacaacacgtcagccctggaactccagggaaacgtcatatatctggaagttcagaaaggccagttcctgcggctcctctgtgctgctgacagccagccccctgccacgctgagctgggtcctgcaggacagagtcctctcctcgtcccacccctggggccccagaaccctggggctggagctgcgtggggtaagggccggggattcagggcgctacacctgccgagcggagaacaggcttggctcccagcagcaagccctggacctctctgtgcagtatcctccagagaacctgagagtgatggtttcccaagcaaacaggacagtcctggaaaacctcgggaacggcacatccctcccggtcctggagggccaaagcctgcgcctggtctgtgtcacccacagcagccccccagccaggctgagctggacccggtggggacagaccgtgggcccctcccagccctcagaccccggggtcctggagctgccacccattcaaatggagcacgaaggagagttcacctgccacgctcagcaccctctgggctcccagcacgtctctctcagcctctccgtgcactaccctccacagctgctgggcccctcctgctcctgggaggctgagggtctgcactgcagctgctcctcccaggccagcccggccccctctctgcgctggtggcttggggaggagctgctggaggggaacagcagtcagggctccttcgaggtcacccccagctcagccgggccctgggccaacagctccctgagcctccatggagggctcagctccggcctcaggctccgctgtaaggcctggaacgtccacggggcccagagtggctctgtcttccagctgctaccagggaagctggagcatgggggaggacttggcctgggggctgccctgggagctggcgtcgctgccctgctcgctttctgttcctgccttgtcgtcttcagggtgaagatctgcaggaaggaagctcgcaagagggcagcagctgagcaggacgtgccctccaccctgggacccatctcccagggtcaccagcatgaatgctcggcaggcagctcccaagaccacccgcccccaggtgcagccacctacaccccggggaagggggaagagcaggagctccactatgcctccctcagcttccagggcctgaggctctgggagcctgcggaccaggaggcccccagcaccaccgagtactcggagatcaagatccacacaggacagcccctgaggggcccaggctttgggcttcaattggagagggagatgtcagggatggttccaaagtgaagaggtctccatggcaacaggacaccagcaagtgtgtgggagtcgcactggtgtgacggccagaactggactcagatttcagccccatccccaatgaagagcttgagtttgaagattatactttttttgagacagggtctgactctgtcctccaggccagagtccagtggtgcaatctcagctcactgtagcctcaacctgccaggttgaagtgagcctcccatttcagcctcccaagtagctgggactacaattgtgagccaccatgccaggctcattgttatatttttagtagagacagggttttgccatgtttccctggctggtctcagactcctgggctcaagcaatctgcccgcctctgcctcccaaagtgctgggattacagacgtgagccaccacagctggctgaagattatactttcaattcagagcgagtttgaagatgacactttgaggcatcgtgtctatggttcattactacagaagcttctctggatgtgtaaagcacaggaaaccaggcagaggaggcacagggtgctctccagaacgagaagccagctcctggagttgtttgctgcaactgccattccccgttgatgaccatgctcttccttcagaagagggagagtgagaggaccaagtccaagtggttcccatttgaacatttaaaaaaaaaaaaaaggctgggcatggtggctcacgcctgtaatctcaacactttgggaggctgaagtgggtggatcacaagtcaggagttcaagaccagcctgggcaagatggtgaaaccccatctctactaaaaatacaaaaattagccgggcatggtggcgggcgcctaaaatcccagctactcgggagactaggcagagaattggttgaacccgggaggtggaggttgcagtgagccgagatcgtcccactgcactccagcctgggcaacagagtgagactctgtttctaaataaataaatgaataaataaa

SEQ ID NO: 229512 - DNA, 2097 bp, Artificial Sequence
  derived and/or modified sequence
atggtgcccggccaggcccagccccagagccccgagatgctgctgctgcccctgctgctgcccgtgctgggcgccggcagcctgaacaaggaccccagctacagcctgcaggtgcagagacaggtgcccgtgcccgagggcctgtgcgtgatcgtgagctgcaacctgagctaccccagagacggctgggacgagagcaccgccgcctacggctactggttcaagggcagaaccagccccaagaccggcgcccccgtggccaccaacaaccagagcagagaggtggagatgagcaccagagacagattccagctgaccggcgaccccggcaagggcagctgcagcctggtgatcagagacgcccagagagaggacgaggcctggtacttcttcagagtggagagaggcagcagagtgagacacagcttcctgagcaacgccttcttcctgaaggtgaccgccctgaccaagaagcccgacgtgtacatccccgagaccctggagcccggccagcccgtgaccgtgatctgcgtgttcaactgggccttcaagaagtgccccgcccccagcttcagctggaccggcgccgccctgagccccagaagaaccagacccagcaccagccacttcagcgtgctgagcttcacccccagcccccaggaccacgacaccgacctgacctgccacgtggacttcagcagaaagggcgtgagcgcccagagaaccgtgagactgagagtggcctacgcccccaaggacctgatcatcagcatcagccacgacaacaccagcgccctggagctgcagggcaacgtgatctacctggaggtgcagaagggccagttcctgagactgctgtgcgccgccgacagccagccccccgccaccctgagctgggtgctgcaggacagagtgctgagcagcagccacccctggggccccagaaccctgggcctggagctgagaggcgtgagagccggcgacagcggcagatacacctgcagagccgagaacagactgggcagccagcagcaggccctggacctgagcgtgcagtacccccccgagaacctgagagtgatggtgagccaggccaacagaaccgtgctggagaacctgggcaacggcaccagcctgcccgtgctggagggccagagcctgagactggtgtgcgtgacccacagcagcccccccgccagactgagctggaccagatggggccagaccgtgggccccagccagcccagcgaccccggcgtgctggagctgccccccatccagatggagcacgagggcgagttcacctgccacgcccagcaccccctgggcagccagcacgtgagcctgagcctgagcgtgcactaccccccccagctgctgggccccagctgcagctgggaggccgagggcctgcactgcagctgcagcagccaggccagccccgcccccagcctgagatggtggctgggcgaggagctgctggagggcaacagcagccagggcagcttcgaggtgacccccagcagcgccggcccctgggccaacagcagcctgagcctgcacggcggcctgagcagcggcctgagactgagatgcaaggcctggaacgtgcacggcgcccagagcggcagcgtgttccagctgctgcccggcaagctggagcacggcggcggcctgggcctgggcgccgccctgggcgccggcgtggccgccctgctggccttctgcagctgcctggtggtgttcagagtgaagatctgcagaaaggaggccagaaagagagccgccgccgagcaggacgtgcccagcaccctgggccccatcagccagggccaccagcacgagtgcagcgccggcagcagccaggaccaccccccccccggcgccgccacctacacccccggcaagggcgaggagcaggagctgcactacgccagcctgagcttccagggcctgagactgtgggagcccgccgaccaggaggcccccagcaccaccgagtacagcgagatcaagatccacaccggccagcccctgagaggccccggcttcggcctgcagctggagagagagatgagcggcatggtgcccaagtag

SEQ ID NO: 229513 - protein, 648 aa, Artificial Sequence
  derived and/or modified sequence
MSRKASENVEYTLRSLSSLMGERRRKQPEPDAASAAGECSLLAAAESSTSLQSAGAGGGGVGDLERAARRQFQQDETPAFVYVVAVFSALGGFLFGYDTGVVSGAMLLLKRQLSLDALWQELLVSSTVGAAAVSALAGGALNGVFGRRAAILLASALFTAGSAVLAAANNKETLLAGRLVVGLGIGIASMTVPVYIAEVSPPNLRGRLVTINTLFITGGQFFASVVDGAFSYLQKDGWRYMLGLAAVPAVIQFFGFLFLPESPRWLIQKGQTQKARRILSQMRGNQTIDEEYDSIKNNIEEEEKEVGSAGPVICRMLSYPPTRRALIVGCGLQMFQQLSGINTIMYYSATILQMSGVEDDRLAIWLASVTAFTNFIFTLVGVWLVEKVGRRKLTFGSLAGTTVALIILALGFVLSAQVSPRITFKPIAPSGQNATCTRYSYCNECMLDPDCGFCYKMNKSTVIDSSCVPVNKASTNEAAWGRCENETKFKTEDIFWAYNFCPTPYSWTALLGLILYLVFFAPGMGPMPWTVNSEIYPLWARSTGNACSSGINWIFNVLVSLTFLHTAEYLTYYGAFFLYAGFAAVGLLFIYGCLPETKGKKLEEIESLFDNRLCTCGTSDSDEGRYIEYIRVKGSNYHLSDNDASDVE

SEQ ID NO: 229514 - DNA, 1947 bp, Artificial Sequence
  derived and/or modified sequence
atgtcaagaaaagccagcgaaaacgttgaatacaccctgagaagtctgtcctccttgatgggagagaggcgccggaaacagcctgaaccagatgcggccagcgccgcaggcgagtgtagcttgctcgcggcggcagaaagctcaaccagcctgcaatccgccggcgccggtggaggcggtgtaggcgatctcgagcgagctgcgcggaggcagttccagcaggacgaaactccggcttttgtctacgtggttgccgtgttctctgccctgggcggcttcctcttcggctacgacaccggtgttgtctctggcgccatgctcctgctgaaacgtcagctgtccctggacgccctgtggcaggagctcctggtcagtagtacggtaggggcagcagccgtttctgctctggctgggggggctctgaatggtgtatttggtcgcagagcagccatcctcctggcaagtgccctgttcaccgcaggttctgccgtgctggccgctgctaataacaaagaaaccctcctggctggaaggctggtcgttggactcgggatcggaattgcctcaatgactgtccctgtatatattgccgaggtttcaccacccaatctacgaggacgccttgttacaataaacacactgtttataaccggtgggcagtttttcgcaagtgtggttgacggagcttttagctacttgcaaaaggacggctggagatacatgctgggactggcggctgtgcccgctgtcattcagtttttcggttttctctttttgccagaatcccctcggtggttgatccagaaggggcagacgcagaaggctaggagaattctcagtcagatgcgaggcaatcagactatcgacgaggagtacgatagtattaaaaacaacatagaggaagaggagaaggaggtcggtagcgcaggccctgtgatctgccgcatgctgagttatcctcccacccggagggcattaattgtcggttgcggtcttcagatgttccagcagctgtccgggattaacactatcatgtactactctgcaacaatcctccagatgagcggagtcgaggacgatcgcctggccatatggctcgcttccgtaacagctttcactaactttattttcaccctggtcggggtgtggttggtggagaaagtcggcaggaggaagctcacatttggctcacttgccggaaccacagtggcccttataatactggcactgggttttgtgctgtccgcgcaggtgagtcccaggatcacatttaagcctatagccccatccggtcagaatgctacttgcactcgatacagctattgtaatgagtgcatgctggatcctgactgcggtttttgttacaaaatgaataagagcactgtgatagatagttcttgcgtgcccgtaaataaagcttctacaaacgaggccgcctggggacgctgcgaaaacgagacgaaattcaagacagaagatattttctgggcatacaacttttgcccaacaccgtacagttggactgccctcctgggcctgattctgtaccttgtgttcttcgcgccagggatggggccaatgccgtggacagtgaattcagaaatctatccgctttgggctagatccactggcaatgcctgttcttccggtattaactggattttcaacgtgctcgtatctcttacttttcttcacactgcagaatacctcacttactacggggcattctttctgtacgccggcttcgctgctgtgggactcctgtttatttatggttgtcttccagaaacaaaaggaaaaaagctagaagaaatcgagagcctttttgacaatcggctatgcacatgcggcacgtccgattcagatgaaggtcgttatattgagtacatccgagtgaagggaagtaactatcacttaagtgacaacgatgccagcgacgtggagtag

SEQ ID NO: 229515 - DNA, 1947 bp, Artificial Sequence
  derived and/or modified sequence
atgagcaggaaggcctctgaaaatgtggagtacaccctgcggagcctgagcagcctgatgggagagaggaggaggaagcagcctgagccagatgctgccagcgctgctggggagtgcagcctgctggccgctgctgagagcagcaccagcctgcagagcgctggggccggcggcggcggcgtgggggacctggagagagctgcccggcggcagttccagcaggatgagaccccagcctttgtgtatgtggtggccgtgttcagcgccctgggcggcttcctgtttggctatgacacaggagtggtgtctggggccatgctgctgctgaagaggcagctgagcctggatgccctgtggcaggagctgctggtgagcagcacagtgggcgctgctgctgtgtctgccctggccggcggggccctgaatggagtgtttggaagaagagctgccatcctgctggccagcgccctcttcaccgctggcagcgctgtgctggccgccgccaacaacaaggagaccctgctggccggccgcctggtggtgggcctgggcattggaattgcctccatgacagtgcctgtgtacatcgccgaggtgtccccacccaacctgcggggccgcctggtgaccatcaacaccctcttcatcactggaggccagttctttgcctctgtggtggatggagccttctcctacctgcagaaggatggctggagatacatgctgggcctggccgctgtgcctgctgtgatccagttcttcggcttcctgttcctgcctgagagcccccgctggctgatccagaagggccagacccagaaggcccggcgcatcctgagccagatgaggggcaaccagaccattgatgaggagtatgacagcatcaagaacaacatcgaggaggaggagaaggaggtgggcagcgctggccctgtgatctgcaggatgctgagctacccacccacccggcgggccctgattgtgggctgcggcctgcagatgttccagcagctgagcggcatcaacaccatcatgtactacagcgccaccatcctgcagatgtctggagtggaggatgaccggctggccatctggctggcctctgtgacagccttcaccaacttcatcttcaccctggtgggcgtgtggctggtggagaaggtgggccgcaggaagctgaccttcggcagcctggccggcaccaccgtggccctgatcatcctggccctgggctttgtgctgagcgcccaggtgagcccccgcatcaccttcaagcccatcgcccccagcggccagaatgccacctgcacccgctacagctactgcaatgaatgcatgctggaccctgactgtggcttctgctacaagatgaacaagagcacagtgattgacagcagctgtgtgcctgtgaacaaggccagcaccaatgaggccgcctggggccgctgtgaaaatgagaccaagttcaagacagaggacatcttctgggcctacaacttctgccccaccccctacagctggacagccctgctgggcctcatcctgtacctggtgttctttgcccctggcatgggccccatgccctggacagtgaacagcgagatctaccccctgtgggcccggagcactggaaatgcctgcagcagcggcatcaactggatcttcaacgtgctggtgtccctgaccttcctgcacacagctgagtacctgacctactatggagccttcttcctgtatgccggctttgctgctgtgggcctgctcttcatctacggctgcctgcctgagaccaagggcaagaagctggaggagattgagagcctgtttgacaaccggctgtgcacctgtggcaccagtgacagtgatgagggccgctacatcgagtacatccgggtgaagggcagcaactaccacctgagtgacaatgatgccagtgatgtggagtag

SEQ ID NO: 229516 - DNA, 1947 bp, Artificial Sequence
  derived and/or modified sequence
atgagccggaaggccagcgagaacgtggagtacaccctgcggagcctatcctctctcatgggagaaagaaggcggaaacagcctgagcctgatgccgcaagcgctgctggcgagtgttccctgctggctgcggccgaatcatccacttctcttcagtccgccggcgcgggtggcgggggtgtgggtgacttagaacgagccgcccgcaggcaatttcagcaggacgaaactcccgctttcgtctacgtggtcgctgttttttcagctctgggtggatttctctttggatacgacactggcgtggtcagtggagcaatgctgctgctgaaacgacagctgagcttggatgcactgtggcaggagctgctagtttccagtacggtgggcgcggctgccgtgtccgcactggcaggcggggcacttaacggcgtttttggtagacgggcggccattctgttggcatctgcgctattcacagctgggagcgcggtcctggccgctgctaataacaaagaaactctgcttgccggaaggctcgtggtaggcctgggtattgggattgcttccatgaccgtgccggtctacatagctgaggtctctcccccaaatctccgaggtagactcgtcactattaacacactgtttattaccggcggccagttttttgctagtgtggtggatggagcgttctcatacctgcagaaggacggctggagatacatgctgggcctggccgctgtgccggcagtcatccagtttttcggatttctcttcctccctgagtctcctcgatggcttatccaaaagggtcagacccaaaaagcacgcagaattttgtctcagatgagaggaaatcagactatagatgaagagtatgacagcattaagaataacatagaagaagaggagaaggaggtcggcagcgctgggcctgtgatatgtcgcatgctgtcttacccgcccacccgaagagccttgattgttgggtgtggcttacagatgttccaacaactaagcggtattaacaccattatgtattattccgcgaccatcctccagatgtcaggagttgaagacgaccgcctggccatatggcttgctagtgtgactgcttttactaactttatctttactttagtcggcgtctggctagtagaaaaagtcgggagacggaaattgactttcgggagcctagctggaacaactgtagccttgataatactggcactcggctttgtgctcagtgcacaggtgtcgcccaggatcaccttcaagcccattgccccttcgggacagaatgcgacatgcacgcgctatagctattgcaatgaatgcatgctggaccctgactgcggcttctgctacaagatgaataagagtactgtgatagactcctcttgcgtgcccgtcaataaagctagtacgaacgaggcagcttggggccgatgcgagaatgagaccaagttcaagactgaagacattttctgggcttacaatttttgccctactccttactcgtggactgccctgctcggacttatattatacctagtattctttgctccaggaatgggcccaatgccatggacagtgaatagcgaaatctaccctctctgggcccggtctactggcaacgcttgttctagtggaatcaattggattttcaatgtgctcgtgtcacttactttcctacacaccgctgagtatttgacttactatggagccttcttcttgtacgcagggttcgcagccgttggacttctgttcatctacggatgtctgcctgagactaaaggtaagaagctcgaagagatcgaaagtctgttcgataatcgtctgtgtacctgtggcacttctgatagtgacgaaggacgctacatcgaatacatcagggtgaaagggagcaattaccacctcagcgacaatgacgctagcgatgtggagtag

SEQ ID NO: 229517 - DNA, 1947 bp, Artificial Sequence
  derived and/or modified sequence
atgtcacggaaggcgtcagagaatgtggaatatactcttagaagtctctctagcttgatgggagaacgcagaagaaaacagcccgagcccgatgctgcatcagcagctggagaatgctccttgcttgcggctgctgagtcaagcaccagcctccaatctgcaggcgcaggaggcggtggcgtgggtgacttagagcgcgctgccaggagacagtttcagcaggacgagacccccgcattcgtatacgtcgtagcagtctttagcgcactgggtgggttcctgtttgggtacgacacaggcgtggtaagcggggctatgttgctgcttaagcgccagctatctcttgacgccctttggcaggaactcctcgtgtctagtacggtgggagcagctgccgtttctgccttagcaggaggcgctctcaatggagtgttcgggagacgggcagcaattcttcttgcttccgccctctttacagccggatccgctgtgcttgctgctgctaacaataaagagacactgcttgcagggcgtttggtggtgggccttggaattggaatcgcttccatgacagtgcccgtttatatcgccgaggtatcaccgcctaacctgcgcggacgtttagtcactatcaacaccctgttcatcaccggcggacagtttttcgctagcgtggtcgatggggctttttcatatctgcaaaaagacggctggaggtacatgctgggtctggccgctgtgcctgcggttatccaattcttcggttttctgttcctgccagaatctcctcgatggctcatccagaagggccagactcagaaagctagacgcattttaagccagatgcggggaaaccagacaatagacgaggaatacgacagtatcaaaaacaatatcgaggaggaagaaaaagaagtgggatcagctgggcctgtgatttgccgcatgctaagctatccccctacacggagagctctgatagtgggctgtggcctccagatgtttcaacaactgagcgggattaacacaattatgtactactctgcaaccatcttacagatgtcaggcgtagaagacgacaggttggccatatggctggcttctgttacggccttcacgaacttcatttttacgctggtgggcgtatggctggtggaaaaagtcggtagacgtaaactcacatttggcagtctcgcaggcaccaccgtggctttgattatattggccttgggttttgtgctgtccgcccaggtgtctcctcggatcactttcaaacccattgcaccatctgggcaaaatgctacctgcacacggtactcgtattgcaatgaatgcatgttagacccagactgcggcttctgttacaaaatgaataagagtactgtgatagacagctcctgtgtccctgttaacaaggccagcactaacgaagctgcgtgggggaggtgtgagaacgaaacgaagttcaaaacggaggacattttttgggcatacaatttttgccctaccccctactcttggactgcactactcgggctaatattgtacctggtgtttttcgctccgggaatggggcctatgccctggacagttaattccgaaatctaccccctgtgggccagatctacggggaatgcgtgctccagtggtataaactggatcttcaacgtgctcgtttcacttacattccttcacacagctgagtacctgacctattacggcgcattctttctttacgccggattcgcagctgtgggactgctgttcatatacggctgtctccccgagacaaagggaaagaagcttgaagagatcgagagtctttttgacaacagactctgcacttgcggcactagcgacagtgacgaaggacgatacattgagtacatccgagtaaagggctccaattaccatctcagcgacaacgatgcttccgacgtcgaatag

SEQ ID NO: 229518 - DNA, 7003 bp, Artificial Sequence
  derived and/or modified sequence
ctgccggcccgcggagccgcgtccccccgggcagccccgggcccctgccctatgtcccgcaaggcaagcgagaatgtggagtacacgctgcggagcctgagcagcctgatgggcgagcggcgcaggaagcagccggagccggacgcggcgagcgcggccggggagtgcagcctcctggctgccgccgaatcgagcaccagcctgcagagcgcgggcgcgggcggcggcggcgtcggggacctggagcgcgcggcgcggcggcagttccagcaggacgagacccccgccttcgtgtacgtggtggccgtcttctccgcgctgggcggcttcctgtttggctatgacaccggggtggtgtcaggggccatgctgctgctcaagcggcagctcagtctggacgcgctgtggcaggagctgctggtgtccagcacggtgggggcggctgccgtctcggcgctggccggaggcgccctcaacggcgtcttcggccgccgcgctgccatcctcctggccagtgccctcttcaccgccggctccgcggtgctggctgcggccaacaacaaggagacactgctcgccggccgcctggtcgtgggactcggcatcggcattgcttctatgacagtgccagtgtacattgcggaggtctcaccacccaatttaagaggccgattagtcaccattaataccctcttcatcacaggagggcagttctttgcaagtgttgttgatggagccttcagttatctccagaaggatggatggaggtacatgttgggacttgcagcagttccggcggttatacagttttttggctttctctttttgcctgaaagccctcgatggcttattcagaaaggacagactcagaaggcccgtagaattttatctcagatgcgtggtaaccagaccattgatgaggaatatgatagcatcaaaaacaacattgaagaggaggaaaaagaggttggctcagctggacctgtgatctgcagaatgctgagttatcccccaactcgccgagctttaattgtgggttgtggcctacaaatgttccagcagctctcaggcattaacaccatcatgtactacagtgcaaccattctgcagatgtctggtgttgaagatgatagacttgcaatatggctggcttcagttacagccttcacaaatttcattttcacacttgtgggagtctggcttgttgagaaggtgggccgcagaaagcttacctttggtagtttagcaggtaccaccgtagcactcattattcttgccttgggatttgtgctatcagcccaagtttccccacgcatcacttttaagccaatagctccgtcaggtcagaacgccacttgcacaagatacagttactgtaatgaatgtatgttggatccagactgcggtttctgctacaagatgaacaaatcaactgtcattgactcctcctgtgttccagttaataaagcatctacaaatgaggcagcctggggcaggtgtgaaaatgaaaccaagttcaaaacagaagatatattttgggcttacaatttctgccctactccatactcctggactgcacttctgggccttattttatatcttgtcttctttgcacctggaatgggaccaatgccttggactgtgaattctgaaatatatcccctttgggcaagaagtacaggaaatgcatgttcatctggaataaactggattttcaatgtcctggtttcactaacatttttacacacagcagagtatcttacatactatggagctttcttcctctatgctggatttgctgctgtgggactccttttcatctatggctgtcttcctgagaccaaaggcaaaaaattagaggaaattgaatcactctttgacaacaggctatgtacatgtggcacttcagattctgatgaagggagatatattgaatatattcgggtaaagggaagtaactatcatctttctgacaatgatgcttctgatgtggaataattttcagctgctcatatatttagttatttaaacaaactggggggagaagaacagcaattggtgacttcactgccctgcttctaatctggttctttccacagcctagttttgattgacttcatattctagaatacttgattaggaggaagatacaaccatgatgactttttttttccacaaggaacaatattttaaaaaatatttacagagattttaatctaataattcttaagcaaatgtgtgtaatgccttcctgaaatagtctaaaatgaatattgtacccagtgacttcagtggtatccttttttcctaagaccatttataattattagtggcaacagagtcagtgctaatctagccaaattacatatgtataatatatttataaaggattctgggagatggtccaagggtgttctgtgtcaaaagatggcctattggccctcagttttcctacagagtagtggcttatctctgatcagctgttacaaactaaattccatgtaagctttcatcaacaaattccaaagtgcctcctacaagggcacagctgtccgtatctcctttggattccatatttttgtttctctccaattcagatattgggagttcttcagatactgactctgcacactatcttttgaacattatgaaaatataatctgtcgggttgttttcatacttcttttttttgcatcagtgataaggcatacatttgcgcagatgagctaggaagttttgagaagtaccttttatgttcagaaagtaacagattaaaggtttttatgggttccaaattggttagtcacttaggtatgcaattataaatgcaaaatagtgccagatctttaactgtatatcagggtcagtttttgttcatgcccaaatcactacaccttcctcattggccttggagtcctactatttcgtgccttcatttgtgttacatacatagctgcaagcaaaccatttttcccctttcttttattcaaacaataatttttgaaacaaaaaagaggaaggaaatcagtggcagaaataatcctgctgttattggtgtttgtttaataaaaataatgggacttttttcttaactttttattagctcttcctaagggaaatgtcacatattattatttaattgtacttgtctttttttactttaagagcataaactcgtttttattttgcacacttttctcattttcctgagaatttaccagaaaaaaaaaagatacatagatttgtctctgtgtttttcttattcttggcttagtttttccttcttgtgtaaaaattgagattgcctattggaacagataattggttctaatatagcacgtctataagaaatgcaggcttaattatatttccacaatgtctttccaaggtattcattggtttttatggtaattcatcactgaactcttaatttttgcttttctattaagaactatatagtatgtacaaaattacttgatcacaaaattacttgctagttccaggaaaaatatgaatgaatcttctgtggccagttaggaatacatcagtttgatgcatttttaaatggctctaaacatctaataaggtactgtatttggagagaaaaggtggctatctccatattcaaaatatttcttccagtctccaagatactctattcttttaatgtctggcttgttcctatcacagttatcaagctgagaatacagctgaggaagttcattctctaagtcaccagaggtataatatgtgcttaaactgtcaatttagtgccctaaaaatccattaaccaaaaacaaaaacgttttctccctttggtcatttcatataataaaaaaaattaatattttatagaggttttttccttgaattaggtgctttaacaattgatttccaagggaatattagtattgattttttcctcagaaaagcagatatgatttaatagggaaaattattattctattgatatttcttatctcataagaaatttcttatctaatattttacacaggtaaattgaagtgaaaaataagctactatatggtacaatcaaaatataataaggagaaaaagtagaccaataaagtgctctctaaaaatttattttttggacttaatcaaaataattgcctcaatccttctctttattgtatatgtagccttaactaactatatacttataaactcagctgggctgatgcacagtaactttattaaaggagaaactggactcttgttatttcctaaagcagaacatggcctgttctccctgatataagaaaacaatgttttcaactttataaccataaatgcacataataacagggaaaattagccacagttctcctcccctactcccctgagcccctactttaaaggactatttgttatttatatagtgttaaagataatattccatatctttgaagtataagacagagaggcacagtataagaattatttataactttttagaaacaattacttgaaaaggaaccttatacaattagggtattatttttagatttggtgaacatttatagtatattaaaaattaaatgtttaaattttgcaggtttttttatattaggcaccttttaagttcccagcatatttggctaccactatcaacttggaaacattccatttgtagtatcatcaaatatatattttgtaggacaatttatatatgatgtgatttgacctaccatattaaagcagacacagattacgtatcatgctttcaaccaaaattacagacttcctttgaaacatgctgcagatttgatagaggtatattatgtcttaggaaaatacaatgaagaaggtccaaatccctattgaggctggatgtctgatctgcactagacttaagaggatatatcatttcatctgcatataaacacatagggctgaatgtgatgtcaaaagggtttgccgttaataattttcttcaatgtaaacattcctaataattttgattgttgctccttagtcaatcatttcccaaaacatgattatttttaatatatgtaaaatatttaaataataaataataaaaggtaatgtgtccattttaaattttgttcccagccatacacagtagttccctgatacaaaatgctatgagaataccgactattttttcataatttaattttaccactgaacctgattttagtacataagagtctaaatattaagttattcactctaaaaggggaaatcagtaaaagcaaggaatttatgaaatttttgctgtaatttcagtatctgttatacaggggaagaatgatcaggaaaaatataagctgacaacttacccttttgctttttaacaacaaaataatattgaaaatatattagaataactcacagatccagaagttggtggaaatggaagaatgttttagaaaataccatccatatgtttatctaagaaagtctcagaatttagtgacactaatacagttcataaatactgtaatacagtggagagagttggaatgttattttggttttatttcatcagcacaattattaaaaacaacaaaattaatgagacgttttgttataatcagatttttttttaccatattgcaagttataaaatgtcaacttatactaagtacctaacaactgacttttattcacttgttgtgacaagtttttaattaccaaattaagaccttttcagtatctatgagtaaaagaaatagatgattatatcagaccaggagcagagaatttataatatgtgctttatagcaaaatgtattaaattgtggttaaaatttatagctcatatgtagctgctgccaataagaaggctcagaattgttctgtggattaatttttacatcctgttttctgtcacttttaccaatcttcttggcctcatgtacaataatgtaaagccaatttgatgaaatggttcaggttgtagcagtctataaattgtcggtacattcagctcttctaggtgagcaatactgctgctatttttctagaaatagcaatcatttaaaaatgccaaatagctaactgctaccaactctttcttgtatcttgtctctttagagaaggaaatttttgtgtgccagtaatcatcaaagaggtgttttataagagtgttgatgttcagaagttcatgaaagtattttatccgtataatttgctagtgagctaaaacaatataatttatgtaaatctttatatgtacaaaatatatagtctgttgtacttgagtaatttggtctatggaattttaaatgccttcatttagcagtaatattcacatttttattttagacagttaagttcatgtgtttgattttgtcatgtcagcataaatgagaaaaagaagtggatcatgcagctaatgagtaaccaacattttgtaaagttttaaagttttagcaaacaacattattccatctcatttaaaggttaaaaaagaagagacaactctagccaaagtagaaatttatattctacacgtccaaactgtctcctagcagcttttggactatatatcacttgatgttaaagtatcttttatttgtaataaatattcaaatttctatttagaagctctaatgtatacctagattaaatcaaatcacagttttatgcttttaaaatatatgtatttcaaactgtatattttaatttctgagtgcatgttatatagtatttaatacttcagatgtcttggcaaattcaatataagtatttattcccacaagcgatatatgggatatctcttaaaaattatgaatatgtaccatttccttcaaagtcatcctagcctatgctgtatcaaaagtattgtatattttatggagatttagtgatatacatgtaaatgttttttaagttattttattgaagttcaatctttacataaaattaaaatctttttttaaaaaaagtgtcagtgccagaactgtaaatgaaaataatcaaataaaagttaaaataattcattactcattaa

SEQ ID NO: 229519 - DNA, 1947 bp, Artificial Sequence
  derived and/or modified sequence
atgagcagaaaggccagcgagaacgtggagtacaccctgagaagcctgagcagcctgatgggcgagagaagaagaaagcagcccgagcccgacgccgccagcgccgccggcgagtgcagcctgctggccgccgccgagagcagcaccagcctgcagagcgccggcgccggcggcggcggcgtgggcgacctggagagagccgccagaagacagttccagcaggacgagacccccgccttcgtgtacgtggtggccgtgttcagcgccctgggcggcttcctgttcggctacgacaccggcgtggtgagcggcgccatgctgctgctgaagagacagctgagcctggacgccctgtggcaggagctgctggtgagcagcaccgtgggcgccgccgccgtgagcgccctggccggcggcgccctgaacggcgtgttcggcagaagagccgccatcctgctggccagcgccctgttcaccgccggcagcgccgtgctggccgccgccaacaacaaggagaccctgctggccggcagactggtggtgggcctgggcatcggcatcgccagcatgaccgtgcccgtgtacatcgccgaggtgagcccccccaacctgagaggcagactggtgaccatcaacaccctgttcatcaccggcggccagttcttcgccagcgtggtggacggcgccttcagctacctgcagaaggacggctggagatacatgctgggcctggccgccgtgcccgccgtgatccagttcttcggcttcctgttcctgcccgagagccccagatggctgatccagaagggccagacccagaaggccagaagaatcctgagccagatgagaggcaaccagaccatcgacgaggagtacgacagcatcaagaacaacatcgaggaggaggagaaggaggtgggcagcgccggccccgtgatctgcagaatgctgagctacccccccaccagaagagccctgatcgtgggctgcggcctgcagatgttccagcagctgagcggcatcaacaccatcatgtactacagcgccaccatcctgcagatgagcggcgtggaggacgacagactggccatctggctggccagcgtgaccgccttcaccaacttcatcttcaccctggtgggcgtgtggctggtggagaaggtgggcagaagaaagctgaccttcggcagcctggccggcaccaccgtggccctgatcatcctggccctgggcttcgtgctgagcgcccaggtgagccccagaatcaccttcaagcccatcgcccccagcggccagaacgccacctgcaccagatacagctactgcaacgagtgcatgctggaccccgactgcggcttctgctacaagatgaacaagagcaccgtgatcgacagcagctgcgtgcccgtgaacaaggccagcaccaacgaggccgcctggggcagatgcgagaacgagaccaagttcaagaccgaggacatcttctgggcctacaacttctgccccaccccctacagctggaccgccctgctgggcctgatcctgtacctggtgttcttcgcccccggcatgggccccatgccctggaccgtgaacagcgagatctaccccctgtgggccagaagcaccggcaacgcctgcagcagcggcatcaactggatcttcaacgtgctggtgagcctgaccttcctgcacaccgccgagtacctgacctactacggcgccttcttcctgtacgccggcttcgccgccgtgggcctgctgttcatctacggctgcctgcccgagaccaagggcaagaagctggaggagatcgagagcctgttcgacaacagactgtgcacctgcggcaccagcgacagcgacgagggcagatacatcgagtacatcagagtgaagggcagcaactaccacctgagcgacaacgacgccagcgacgtggagtag

SEQ ID NO: 229520 - protein, 947 aa, Artificial Sequence
  derived and/or modified sequence
MSWLRFWGPWPLLTWQLLSLLVKEAQPLVWVKDPLQLTSNPLGPPEPWSSRSSHLPWESPHAPAPPAAPGDFDYLGPSASSQMSALPQEPTENLAPFLKELDSAGELPLGPEPFLAAHQDLNDKRTPEERLPEVVPLLNRDQNQALVQLPRLKWVQTTDLDRAAGHQADEILVPLDSKVSRPTKFVVSPKNLKKDLAERWSLPEIVGIPHQLSKPQRQKQTLPDDYLSMDTLYPGSLPPELRVNADEPPGPPEQVGLSQFHLEPKSQNPETLEDIQSSSLQEEAPAQLLQLPQEVEPSTQQEAPALPPESSMESLAQTPLNHEVTVQPPGEDQAHYNLPKFTVKPADVEVTMTSEPKNETESTQAQQEAPIQPPEEAEPSSTALRTTDPPPEHPEVTLPPSDKGQAQHSHLTEATVQPLDLELSITTEPTTEVKPSPTTEETSAQPPDPGLAITPEPTTEIGHSTALEKTRAPHPDQVQTLHRSLTEVTGPPTKLESSQDSLVQSETAPEEQKASTSTNICELCTCGDETLSCVGLSPKQRLRQVPVPEPDTYNGIFTTLNFQGNYISYLDGNVWKAYSWTEKLILSENYLTELPKDSFEGLLYLQYLDLSCNKIRYIERQTFESLPFLQYINLGCNLITKLSLGTFQAWHGMQFLHNLILNRNPLTTVEDPYLFELPALKYLDMGTTHITLTTLKNILTMTVELEKLILPSHMACCLCQFKNSIEAVCKTVKLHCNTACLTNSIHCPEEASVGNPEGAFMKMLQARKQHMSTQLTIESEAPSDSSGINLSGFGGDQLEIQLTEQLRSLIPNEDVRKFMSHVIRTLKMECSETHVQGSCAKLMLRTGLLMKLLSEQQEAKALNVEWDTDQQKTNYINENMEQNEQKEQKSSELMKEVPGDDYKNKLIFAISVTVILIILIIIFCLIEVNSHKRASEKYKDNPSISGA

SEQ ID NO: 229521 - protein, 896 aa, Artificial Sequence
  derived and/or modified sequence
MSWLRFWGPWPLLTWQLLSLLVKEAQPLVWVKDPLQLTSNPLGPPEPWSSRSSHLPWESPHAPAPPAAPGDFDYLGPSASSQMSALPQEPTENLAPFLKELDSAGELPLGPEPFLAAHQDLNDKRTPEERLPEVVPLLNRDQNQALVQLPRLKWVQTTDLDRAAGHQADEILVPLDSKVSRPTKFVVSPKNLKKDLAERWSLPEIVGIPHQLSKPQRQKQTLPDDYLSMDTLYPGSLPPELRVNADEPPGPPEQVGLSQFHLEPKSQNPETLEDIQSSSLQEEAPAQLLQLPQEVEPSTQQEAPALPPESSMESLAQTPLNHEVTVQPPGEDQAHYNLPKFTVKPADVEVTMTSEPKNETESTQAQQEAPIQPPEEAEPSSTALRTTDPPPEHPEVTLPPSDKGQAQHSHLTEATVQPLDLELSITTEPTTEVKPSPTTEETSAQPPDPGLAITPEPTTEIGHSTALEKTRAPHPDQVQTLHRSLTEVTGPPTKLESSQDSLVQSETAPEEQKASTSTNICELCTCGDETLSCVGLSPKQRLRQVPVPEPDTYNGIFTTLNFQGNYISYLDGNVWKAYSWTEKLILSENYLTELPKDSFEGLLYLQYLILNRNPLTTVEDPYLFELPALKYLDMGTTHITLTTLKNILTMTVELEKLILPSHMACCLCQFKNSIEAVCKTVKLHCNTACLTNSIHCPEEASVGNPEGAFMKMLQARKQHMSTQLTIESEAPSDSSGINLSGFGGDQLEIQLTEQLRSLIPNEDVRKFMSHVIRTLKMECSETHVQGSCAKLMLRTGLLMKLLSEQQEAKALNVEWDTDQQKTNYINENMEQNEQKEQKSSELMKEVPGDDYKNKLIFAISVTVILIILIIIFCLIEVNSHKRASEKYKDNPSISGA

SEQ ID NO: 229522 - DNA, 2844 bp, Artificial Sequence
  derived and/or modified sequence
atgagctggctgagattctggggcccctggcccctgctgacctggcagctgctgagcctgctggtgaaggaggcccagcccctggtgtgggtgaaggaccccctgcagctgaccagcaaccccctgggcccccccgagccctggagcagcagaagcagccacctgccctgggagagcccccacgcccccgccccccccgccgcccccggcgacttcgactacctgggccccagcgccagcagccagatgagcgccctgccccaggagcccaccgagaacctggcccccttcctgaaggagctggacagcgccggcgagctgcccctgggccccgagcccttcctggccgcccaccaggacctgaacgacaagagaacccccgaggagagactgcccgaggtggtgcccctgctgaacagagaccagaaccaggccctggtgcagctgcccagactgaagtgggtgcagaccaccgacctggacagagccgccggccaccaggccgacgagatcctggtgcccctggacagcaaggtgagcagacccaccaagttcgtggtgagccccaagaacctgaagaaggacctggccgagagatggagcctgcccgagatcgtgggcatcccccaccagctgagcaagccccagagacagaagcagaccctgcccgacgactacctgagcatggacaccctgtaccccggcagcctgccccccgagctgagagtgaacgccgacgagccccccggcccccccgagcaggtgggcctgagccagttccacctggagcccaagagccagaaccccgagaccctggaggacatccagagcagcagcctgcaggaggaggcccccgcccagctgctgcagctgccccaggaggtggagcccagcacccagcaggaggcccccgccctgccccccgagagcagcatggagagcctggcccagacccccctgaaccacgaggtgaccgtgcagccccccggcgaggaccaggcccactacaacctgcccaagttcaccgtgaagcccgccgacgtggaggtgaccatgaccagcgagcccaagaacgagaccgagagcacccaggcccagcaggaggcccccatccagccccccgaggaggccgagcccagcagcaccgccctgagaaccaccgaccccccccccgagcaccccgaggtgaccctgccccccagcgacaagggccaggcccagcacagccacctgaccgaggccaccgtgcagcccctggacctggagctgagcatcaccaccgagcccaccaccgaggtgaagcccagccccaccaccgaggagaccagcgcccagccccccgaccccggcctggccatcacccccgagcccaccaccgagatcggccacagcaccgccctggagaagaccagagccccccaccccgaccaggtgcagaccctgcacagaagcctgaccgaggtgaccggcccccccaccaagctggagagcagccaggacagcctggtgcagagcgagaccgcccccgaggagcagaaggccagcaccagcaccaacatctgcgagctgtgcacctgcggcgacgagaccctgagctgcgtgggcctgagccccaagcagagactgagacaggtgcccgtgcccgagcccgacacctacaacggcatcttcaccaccctgaacttccagggcaactacatcagctacctggacggcaacgtgtggaaggcctacagctggaccgagaagctgatcctgagcgagaactacctgaccgagctgcccaaggacagcttcgagggcctgctgtacctgcagtacctggacctgagctgcaacaagatcagatacatcgagagacagaccttcgagagcctgcccttcctgcagtacatcaacctgggctgcaacctgatcaccaagctgagcctgggcaccttccaggcctggcacggcatgcagttcctgcacaacctgatcctgaacagaaaccccctgaccaccgtggaggacccctacctgttcgagctgcccgccctgaagtacctggacatgggcaccacccacatcaccctgaccaccctgaagaacatcctgaccatgaccgtggagctggagaagctgatcctgcccagccacatggcctgctgcctgtgccagttcaagaacagcatcgaggccgtgtgcaagaccgtgaagctgcactgcaacaccgcctgcctgaccaacagcatccactgccccgaggaggccagcgtgggcaaccccgagggcgccttcatgaagatgctgcaggccagaaagcagcacatgagcacccagctgaccatcgagagcgaggcccccagcgacagcagcggcatcaacctgagcggcttcggcggcgaccagctggagatccagctgaccgagcagctgagaagcctgatccccaacgaggacgtgagaaagttcatgagccacgtgatcagaaccctgaagatggagtgcagcgagacccacgtgcagggcagctgcgccaagctgatgctgagaaccggcctgctgatgaagctgctgagcgagcagcaggaggccaaggccctgaacgtggagtgggacaccgaccagcagaagaccaactacatcaacgagaacatggagcagaacgagcagaaggagcagaagagcagcgagctgatgaaggaggtgcccggcgacgactacaagaacaagctgatcttcgccatcagcgtgaccgtgatcctgatcatcctgatcatcatcttctgcctgatcgaggtgaacagccacaagagagccagcgagaagtacaaggacaaccccagcatcagcggcgcctag

SEQ ID NO: 229523 - DNA, 2691 bp, Artificial Sequence
  derived and/or modified sequence
atgagctggctgagattctggggcccctggcccctgctgacctggcagctgctgagcctgctggtgaaggaggcccagcccctggtgtgggtgaaggaccccctgcagctgaccagcaaccccctgggcccccccgagccctggagcagcagaagcagccacctgccctgggagagcccccacgcccccgccccccccgccgcccccggcgacttcgactacctgggccccagcgccagcagccagatgagcgccctgccccaggagcccaccgagaacctggcccccttcctgaaggagctggacagcgccggcgagctgcccctgggccccgagcccttcctggccgcccaccaggacctgaacgacaagagaacccccgaggagagactgcccgaggtggtgcccctgctgaacagagaccagaaccaggccctggtgcagctgcccagactgaagtgggtgcagaccaccgacctggacagagccgccggccaccaggccgacgagatcctggtgcccctggacagcaaggtgagcagacccaccaagttcgtggtgagccccaagaacctgaagaaggacctggccgagagatggagcctgcccgagatcgtgggcatcccccaccagctgagcaagccccagagacagaagcagaccctgcccgacgactacctgagcatggacaccctgtaccccggcagcctgccccccgagctgagagtgaacgccgacgagccccccggcccccccgagcaggtgggcctgagccagttccacctggagcccaagagccagaaccccgagaccctggaggacatccagagcagcagcctgcaggaggaggcccccgcccagctgctgcagctgccccaggaggtggagcccagcacccagcaggaggcccccgccctgccccccgagagcagcatggagagcctggcccagacccccctgaaccacgaggtgaccgtgcagccccccggcgaggaccaggcccactacaacctgcccaagttcaccgtgaagcccgccgacgtggaggtgaccatgaccagcgagcccaagaacgagaccgagagcacccaggcccagcaggaggcccccatccagccccccgaggaggccgagcccagcagcaccgccctgagaaccaccgaccccccccccgagcaccccgaggtgaccctgccccccagcgacaagggccaggcccagcacagccacctgaccgaggccaccgtgcagcccctggacctggagctgagcatcaccaccgagcccaccaccgaggtgaagcccagccccaccaccgaggagaccagcgcccagccccccgaccccggcctggccatcacccccgagcccaccaccgagatcggccacagcaccgccctggagaagaccagagccccccaccccgaccaggtgcagaccctgcacagaagcctgaccgaggtgaccggcccccccaccaagctggagagcagccaggacagcctggtgcagagcgagaccgcccccgaggagcagaaggccagcaccagcaccaacatctgcgagctgtgcacctgcggcgacgagaccctgagctgcgtgggcctgagccccaagcagagactgagacaggtgcccgtgcccgagcccgacacctacaacggcatcttcaccaccctgaacttccagggcaactacatcagctacctggacggcaacgtgtggaaggcctacagctggaccgagaagctgatcctgagcgagaactacctgaccgagctgcccaaggacagcttcgagggcctgctgtacctgcagtacctgatcctgaacagaaaccccctgaccaccgtggaggacccctacctgttcgagctgcccgccctgaagtacctggacatgggcaccacccacatcaccctgaccaccctgaagaacatcctgaccatgaccgtggagctggagaagctgatcctgcccagccacatggcctgctgcctgtgccagttcaagaacagcatcgaggccgtgtgcaagaccgtgaagctgcactgcaacaccgcctgcctgaccaacagcatccactgccccgaggaggccagcgtgggcaaccccgagggcgccttcatgaagatgctgcaggccagaaagcagcacatgagcacccagctgaccatcgagagcgaggcccccagcgacagcagcggcatcaacctgagcggcttcggcggcgaccagctggagatccagctgaccgagcagctgagaagcctgatccccaacgaggacgtgagaaagttcatgagccacgtgatcagaaccctgaagatggagtgcagcgagacccacgtgcagggcagctgcgccaagctgatgctgagaaccggcctgctgatgaagctgctgagcgagcagcaggaggccaaggccctgaacgtggagtgggacaccgaccagcagaagaccaactacatcaacgagaacatggagcagaacgagcagaaggagcagaagagcagcgagctgatgaaggaggtgcccggcgacgactacaagaacaagctgatcttcgccatcagcgtgaccgtgatcctgatcatcctgatcatcatcttctgcctgatcgaggtgaacagccacaagagagccagcgagaagtacaaggacaaccccagcatcagcggcgcctag

SEQ ID NO: 229524 - DNA, 2598 bp, Artificial Sequence
  derived and/or modified sequence
atgagcgccctgccccaggagcccaccgagaacctggcccccttcctgaaggagctggacagcgccggcgagctgcccctgggccccgagcccttcctggccgcccaccaggacctgaacgacaagagaacccccgaggagagactgcccgaggtggtgcccctgctgaacagagaccagaaccaggccctggtgcagctgcccagactgaagtgggtgcagaccaccgacctggacagagccgccggccaccaggccgacgagatcctggtgcccctggacagcaaggtgagcagacccaccaagttcgtggtgagccccaagaacctgaagaaggacctggccgagagatggagcctgcccgagatcgtgggcatcccccaccagctgagcaagccccagagacagaagcagaccctgcccgacgactacctgagcatggacaccctgtaccccggcagcctgccccccgagctgagagtgaacgccgacgagccccccggcccccccgagcaggtgggcctgagccagttccacctggagcccaagagccagaaccccgagaccctggaggacatccagagcagcagcctgcaggaggaggcccccgcccagctgctgcagctgccccaggaggtggagcccagcacccagcaggaggcccccgccctgccccccgagagcagcatggagagcctggcccagacccccctgaaccacgaggtgaccgtgcagccccccggcgaggaccaggcccactacaacctgcccaagttcaccgtgaagcccgccgacgtggaggtgaccatgaccagcgagcccaagaacgagaccgagagcacccaggcccagcaggaggcccccatccagccccccgaggaggccgagcccagcagcaccgccctgagaaccaccgaccccccccccgagcaccccgaggtgaccctgccccccagcgacaagggccaggcccagcacagccacctgaccgaggccaccgtgcagcccctggacctggagctgagcatcaccaccgagcccaccaccgaggtgaagcccagccccaccaccgaggagaccagcgcccagccccccgaccccggcctggccatcacccccgagcccaccaccgagatcggccacagcaccgccctggagaagaccagagccccccaccccgaccaggtgcagaccctgcacagaagcctgaccgaggtgaccggcccccccaccaagctggagagcagccaggacagcctggtgcagagcgagaccgcccccgaggagcagaaggccagcaccagcaccaacatctgcgagctgtgcacctgcggcgacgagaccctgagctgcgtgggcctgagccccaagcagagactgagacaggtgcccgtgcccgagcccgacacctacaacggcatcttcaccaccctgaacttccagggcaactacatcagctacctggacggcaacgtgtggaaggcctacagctggaccgagaagctgatcctgagcgagaactacctgaccgagctgcccaaggacagcttcgagggcctgctgtacctgcagtacctggacctgagctgcaacaagatcagatacatcgagagacagaccttcgagagcctgcccttcctgcagtacatcaacctgggctgcaacctgatcaccaagctgagcctgggcaccttccaggcctggcacggcatgcagttcctgcacaacctgatcctgaacagaaaccccctgaccaccgtggaggacccctacctgttcgagctgcccgccctgaagtacctggacatgggcaccacccacatcaccctgaccaccctgaagaacatcctgaccatgaccgtggagctggagaagctgatcctgcccagccacatggcctgctgcctgtgccagttcaagaacagcatcgaggccgtgtgcaagaccgtgaagctgcactgcaacaccgcctgcctgaccaacagcatccactgccccgaggaggccagcgtgggcaaccccgagggcgccttcatgaagatgctgcaggccagaaagcagcacatgagcacccagctgaccatcgagagcgaggcccccagcgacagcagcggcatcaacctgagcggcttcggcggcgaccagctggagatccagctgaccgagcagctgagaagcctgatccccaacgaggacgtgagaaagttcatgagccacgtgatcagaaccctgaagatggagtgcagcgagacccacgtgcagggcagctgcgccaagctgatgctgagaaccggcctgctgatgaagctgctgagcgagcagcaggaggccaaggccctgaacgtggagtgggacaccgaccagcagaagaccaactacatcaacgagaacatggagcagaacgagcagaaggagcagaagagcagcgagctgatgaaggaggtgcccggcgacgactacaagaacaagctgatcttcgccatcagcgtgaccgtgatcctgatcatcctgatcatcatcttctgcctgatcgaggtgaacagccacaagagagccagcgagaagtacaaggacaaccccagcatcagcggcgcctag

SEQ ID NO: 229525 - DNA, 2844 bp, Artificial Sequence
  derived and/or modified sequence
atgagctggctgaggttttggggaccatggccattattgacctggcagctcctgtctcttctggtgaaggaggcccagccattagtttgggtgaaggaccccctgcagctgacaagcaatcccctaggaccccccgaaccgtggtctagccggagcagccacctgccatgggagagtcctcacgctcctgccccacccgcagcacctggcgactttgattacctgggtccgagcgcttctagtcagatgtccgccttgccccaggagcccacagaaaaccttgcccccttccttaaagagctagatagcgctggagaactcccattggggccggagccgtttctggcagcccaccaggatctgaatgacaagagaacccccgaggagagactaccggaagtcgtgcctttgctgaatagagatcaaaaccaggcactagtacagctccccagactcaaatgggtgcagactactgacttggacagggctgcgggtcaccaagccgacgagattttggtcccattggacagcaaagtgagtaggcctactaagttcgttgtgtccccgaaaaacttaaaaaaggacctcgcagagaggtggtcattacccgagatcgttggaatcccccaccagctgagcaagcctcaacggcagaaacaaactctgccggacgattacctaagtatggacacactgtatcccggatccctgccccccgaactgagggtgaatgcagacgaaccacccggaccccccgagcaggttggcttgtcgcaatttcacctggagcccaagagccagaatccagaaaccttggaggacattcagtccagtagtctgcaggaagaagcccccgctcagctgctacagctcccgcaagaagtcgagccgtctactcagcaggaggctccagcgctgccgcccgaatcaagtatggaatcattagcacagactcctctgaatcacgaggttacagtccagcctccaggtgaagaccaagcccattacaatctacccaaatttactgtcaagcccgccgatgtggaggtgacaatgacctctgaaccgaaaaacgagaccgaaagtacacaggcccagcaagaggcaccaatacagcccccggaagaggccgaacccagctcaaccgctctccgcaccactgaccctcctccagaacacccagaagtgacactcccgccatccgacaagggccaggcccagcactcccatctaacagaggctactgtccaaccgctggatctggagctcagcatcactacagaacctacaaccgaagttaagccttcgcccacgacagaggagacaagcgcccagcctcctgacccaggtcttgctatcacacccgagcccacgactgagattggccactcaaccgctctggaaaaaacgcgagcccctcatcccgatcaagtgcagaccctccacagatccttgacggaggtgaccggaccgccaactaagctggaatcttcccaggacagccttgtacagtctgagactgccccggaggagcaaaaggctagtacctccactaacatctgcgagctgtgcacctgtggcgacgagactttgtcctgtgtgggactctcccctaagcagcgcctacgtcaggtcccagtcccagagcctgatacatacaacgggattttcaccacactgaatttccagggaaattacatttcatacttagatgggaatgtctggaaggcatactcttggactgagaagctgatcctctcagaaaactacctcacagagctccctaaggactcattcgagggactattatatctgcaatacctggacctgtcttgtaacaaaatcaggtacattgagagacagacattcgagtctcttccattcctgcagtatataaacttggggtgtaacctgatcaccaagttgtcacttggcaccttccaggcctggcacggcatgcagtttctgcataatcttatcctgaatcggaaccctctgaccaccgttgaggacccataccttttcgagttacccgccctgaaatacttggatatggggactacgcacattaccctgactacgctcaagaatattttaacgatgacagtggagctggagaaattaatattgccaagccatatggcatgttgtctgtgtcagtttaaaaactcaattgaagccgtttgcaagaccgtcaagctccactgcaacacagcctgtctgaccaactctatccactgccccgaggaggcgagcgttggaaatccggaaggtgccttcatgaaaatgctgcaagcgaggaaacagcacatgtcaacccaactgaccatagagagcgaggctccatcagatagttcggggattaaccttagtggctttgggggggatcagctggagatccagctcactgagcagctaaggagcctgatcccaaacgaagatgtgagaaagttcatgagccacgtcattcggacactcaagatggaatgctcagaaacacatgttcaaggcagctgcgcgaagttgatgcttcggacaggtctgttgatgaagctcctgtccgaacagcaggaggctaaagctctgaacgtggaatgggacactgatcaacaaaagaccaattatattaatgagaatatggaacaaaatgagcagaaggaacaaaaatcaagcgaactaatgaaagaagtacctggcgatgactacaaaaacaagctgattttcgccatttctgtgaccgtgattctcattattctgatcattatcttttgtttgatcgaggtcaatagccataaacgcgcgagtgagaaatataaggacaatcccagtatcagcggggcgtag

SEQ ID NO: 229526 - DNA, 2691 bp, Artificial Sequence
  derived and/or modified sequence
atgagttggctgcgattctggggcccatggccactccttacatggcaactgcttagcctgttggtgaaagaggcccagcctctagtgtgggtgaaggatcctctacagctaacatcaaacccactgggacctccagaaccatggtcttcacgaagctctcacctgccttgggaatctccccacgcccctgcaccccctgccgctcctggagacttcgattacctgggtccgagtgcttccagccagatgtctgcattaccacaggaacccaccgagaacctggctccattcttaaaggaactggatagtgccggcgaactgcccctgggccccgaaccgttccttgctgcccatcaggacttgaatgataagagaactcctgaggagcggctgcccgaagtggtgccgctcctgaatcgcgatcagaatcaggcactggtgcaattaccaagactcaaatgggttcagacgactgatctcgacagggcagctggccatcaggcagatgaaattcttgtcccgttagactcaaaggtctcccgaccaactaagtttgtcgttagtccaaagaatcttaagaaggatctggcggaaaggtggtctctacctgaaattgttggcattccacatcagttatccaaaccgcagaggcaaaagcaaactctgccggacgactatctgtctatggataccctgtacccaggttcactgccaccagagctgagggtcaatgctgacgagccgcctgggccccccgagcaagtcggattatcacaattccatctcgaacccaagtcgcagaatccggagaccctcgaggatatccagagctcttcgctccaggaagaagcgcctgcccagctgcttcagctgccacaggaggtggaaccaagcacgcagcaggaggcacccgcccttcctcctgaaagttccatggagagcctcgcgcagacacccctcaaccacgaagtaactgtgcagcctccgggtgaggaccaggcgcactataacctgccaaagtttaccgtgaagcccgccgatgtagaggtgacaatgactagcgaaccgaaaaacgagacggaatcaacacaggctcagcaggaggcgcccattcagccccctgaggaggccgagccttcctcaacagctctaaggacaaccgaccctcctcccgagcaccctgaggtaacgctgccgcccagcgataagggccaggcccagcattctcacctgacagaggcaactgtgcaacctcttgacctggagctgtccatcacaacagaacccaccactgaggtgaaacccagtcccacaaccgaggagacttcagctcagccccccgatcccggcctggccattacccccgagcccactaccgaaattggccactccactgccctcgaaaaaacacgggccccccatcctgaccaagtgcagaccctgcaccgctccctgaccgaagtgactgggccacctactaaactagagtcctcacaggactcactagtgcaatctgagacggccccagaagaacagaaggcaagcacctcaacaaatatctgcgaactgtgcacatgcggggatgaaaccttgtcctgcgtaggactgtcacccaagcagcggctccgacaggtaccggtaccagaacctgacacctataacgggatttttacgaccttgaatttccaaggaaactacatcagctatctggacggcaatgtgtggaaagcctacagctggactgagaagcttatcctgagcgagaactacctcacagaactccccaaggactcgttcgagggcctcctctatctgcagtatctgattctcaatcgtaaccctttgacaaccgtggaggatccgtacctcttcgagctgccagctctgaagtacctcgatatgggcaccacgcacataaccctcactacactgaagaacatcttaacaatgacagtcgaattggaaaaattaattcttccatctcacatggcctgctgcctgtgtcagttcaaaaattcaattgaggcagtgtgcaagacagttaagttgcattgtaacaccgcatgtttgacaaactctatccactgtcctgaagaggctagtgttggcaacccagaaggagccttcatgaaaatgctgcaagctcgcaagcagcatatgtcaactcagttaacgatcgagtccgaggcgccgtccgactctagtggcatcaacctgtctggatttgggggcgatcagttggagatacaattgaccgagcagctgcggagtttgattccaaatgaggatgtgcggaaatttatgagtcacgtgatcaggacactgaaaatggagtgctcagagacacatgtccagggatcgtgtgccaagctgatgctcaggaccggccttctgatgaagctccttagtgaacagcaggaggcaaaggccttgaatgtcgagtgggataccgaccaacaaaaaacaaactacattaacgaaaatatggaacagaacgaacaaaaagaacaaaaatccagcgaattaatgaaggaagtgcccggcgatgattataagaacaagctcatttttgcaatcagcgtcacagtgatcctgatcatactgatcataattttctgtctgattgaagtcaattctcacaagcgtgcttctgaaaaatataaggataatcctagtatcagtggagcctag

SEQ ID NO: 229527 - DNA, 2598 bp, Artificial Sequence
  derived and/or modified sequence
atgagtgccctgccgcaggagcccacagagaacctggccccattcctaaaagagctcgattctgcaggggagctgcccctcggacctgagccttttttagccgcacaccaggacttaaacgacaaaaggacaccagaggagcgtctgccagaagtagtgccactgctgaaccgggaccagaaccaagctctcgttcaattaccccgcctcaagtgggtccagactaccgacctggaccgggcagcagggcatcaggctgatgagatcctagtgcctcttgattcgaaggtgagtcggccaacaaagtttgtggtaagtcctaagaaccttaagaaggacctcgcagaacgatggtcgctgcccgaaattgtggggatcccccatcagttatctaagccacagcgacaaaagcagaccctccccgatgattatttatctatggacaccctctaccccggcagcctgccacccgaattgcgggtcaatgccgatgaacctcccggcccaccagagcaggtaggactctcacagtttcacctcgaacccaagagccagaatcctgaaaccttagaggatatccagtcctcatcgttgcaagaggaggcccctgcacagctccttcagcttccacaggaggtggaacccagtacccaacaagaggctcccgcgttaccaccagaatcctctatggaatctctcgcccagacccctctgaaccacgaagtgaccgttcaaccccccggcgaagaccaggctcactataacttgccaaagttcacggtaaaacctgcagatgtcgaggtaactatgacaagcgaaccgaagaacgagacagagtcaactcaggctcagcaggaggccccaatccagcccccggaggaagctgagccctcctccaccgcactacggaccacggatcccccccctgagcatccagaggttacacttccacctagtgacaagggtcaggcccagcattcccacctcaccgaagccacggtgcagcctctggatctagagctgtccatcaccacagaacccacaactgaggtgaaaccttcacctaccaccgaggaaacctcagcccagccaccggatccgggattggcaattaccccagagcctacgactgagatcgggcacagcaccgctctggagaagacccgggcacctcatcccgaccaagtgcaaacactgcaccggagtcttactgaagtgactgggcctcctacaaagttggagagtagccaggattcccttgtacagtcagaaaccgctccggaggagcaaaaagcttccacatccacaaatatctgcgagttgtgcacatgcggtgacgagactcttagctgcgtgggtctgagcccaaaacaaagactcaggcaggtgcctgtcccagaacccgacacatataatggtatcttcacaacgctgaacttccaaggcaactatatatcctatctggacggcaacgtgtggaaagcatactcatggactgagaagcttatcttgagcgagaactacctcaccgaactcccaaaggatagtttcgaaggcctactgtaccttcaatatttagatctaagctgcaataagattcggtacattgagcggcagacgttcgagagcctgccctttcttcagtatatcaacctcggttgcaatcttattacaaagctgtccttgggtacattccaggcctggcatgggatgcagttccttcacaaccttatcctgaaccgcaaccctctaacaacggtggaggacccatacctgtttgagctccccgctctgaagtacctggacatgggtactacgcatattaccctgacaaccttgaaaaatatactgactatgacagtggagttggagaagctgatactgccatctcatatggcttgttgcctgtgtcagtttaagaactctattgaagccgtgtgcaagacagtgaaacttcactgcaataccgcctgtttgacaaactcaattcattgcccagaggaggcttcagtggggaaccctgagggtgctttcatgaagatgctgcaagcacgcaagcagcatatgtccacgcagcttaccatcgagtccgaggctccgagcgatagctctggaattaatttgtcaggttttggcggagaccaactggagatacaactgactgagcagcttcggtcactcatacccaatgaagatgtgcgaaagttcatgagccacgtgattcgcaccctgaagatggagtgttctgagacccacgtacagggcagttgcgcgaagcttatgcttagaacaggacttcttatgaaactgctgtcagagcaacaggaggctaaggccttgaacgtagaatgggatactgaccaacagaagacaaattacataaatgagaatatggaacagaacgagcagaaagaacaaaagagctccgagttgatgaaagaggtgcctggagacgactataaaaacaaattgatctttgctatctctgtcaccgtcatcctgattatactgatcataatattttgcttgattgaagtcaacagtcataagcgcgccagcgaaaaatacaaggataatcccagcatcagcggtgcctag

SEQ ID NO: 229528 - DNA, 3025 bp, Artificial Sequence
  derived and/or modified sequence
cagcgtgtgtcatgtcttggctgcgtttctggggcccatggcccctccttacgtggcaactattgtctttactagtcaaggaggctcagcctctggtgtgggtcaaggacccgctccagctgacctctaaccccctggggccacctgagccctggtcttcccgctcctcccatctcccatgggaatctccccatgcacctgctcccccagcagccccgggggactttgattacctggggccctctgcttcttcgcagatgtcagccctgcctcaggaaccaactgaaaatttggctccattcctgaaggaattggattcagctggagagctgcccctggggccagagccgttcttggctgcacatcaggacttaaatgacaagcggactccagaagaaaggctcccagaggtggttccgcttctcaaccgggatcagaaccaggccctagttcagcttcctcgcctcaagtgggttcaaactacagatctagatcgggctgcaggtcatcaggcagatgaaatacttgttccactagacagtaaggtttcaagaccaaccaaatttgttgtttcgcccaagaacctgaagaaagatctagctgaacgttggagccttcctgagattgttgggattccacaccaattatccaaacctcagcgtcagaaacagactttgccagatgattatttgagtatggacacactgtatcccggcagcctacctccagaactccgggtgaacgcagatgagcctccagggcctcctgagcaagttggactttctcaattccatctagagcccaaaagtcaaaatccagagacccttgaagacatccagtcctcttcactccaggaagaagccccagcgcagcttctacagctccctcaggaggtagaaccttcaacccagcaggaggccccagctctgcctccagagtcctctatggagagtctagctcaaactccactgaatcatgaagtgacagttcaacctccaggtgaggatcaagctcattataatttgcccaagtttacagtcaaacctgcagatgtggaggttaccatgacttcagagcctaaaaatgagacagaatctacccaagcccagcaggaggccccaattcagcctcccgaggaggcggaaccttcttctacagccctgaggactacagatcctcctccagaacaccctgaggtgacacttccaccttcagacaagggtcaggctcagcattcacacctgactgaagccacagttcaacctctggacctggagcttagcataactacagagcctactacagaggttaaaccgtctccaaccacggaggaaacctcagctcagcctccagacccggggcttgccataactccagaacccactacagagattggacattccacagccctggagaagactagagctcctcatccagaccaggttcagactctgcatcgaagcctgactgaagtcacaggtccacctacaaagttagaatcttcgcaggattcattggtgcagtctgaaactgcaccagaggaacagaaggcctccacaagcaccaacatatgtgagctctgcacctgcggagatgagactctgtcatgtgttggtctcagcccaaagcagaggctccgccaagtgcctgtgccagagcccgacacctacaatggcatcttcaccaccttaaatttccaaggaaactatatttcataccttgatggaaatgtatggaaagcatacagttggaccgagaaactaattctcagtgaaaattatttgactgaattacctaaggattcatttgaaggcctgctatacctccagtatttagatttatcctgcaataaaatacgatatattgaaagacaaacatttgaatcactaccatttttgcagtatataaatctgggctgcaatttaattacaaaactgagccttggaacatttcaggcctggcacggaatgcagtttttacacaacttaattctcaatcgcaatcctctgactactgtcgaagatccatatctctttgaactgccggcattaaaatatctagacatgggaacaacacacatcacacttacaacacttaagaacattctcacgatgactgttgaactggaaaaactgatcttacctagccatatggcctgctgcctctgccaatttaaaaatagcattgaggctgtctgcaagacagtcaagctgcattgcaacactgcatgtctgactaacagcatacattgtcctgaagaagcatctgtagggaatccagaaggagcgttcatgaagatgttacaagcccggaagcagcacatgagcactcagctgactattgagtcggaggcgccctcagacagcagtggcatcaacttgtcaggctttgggggtgatcagcttgaaattcagctaaccgagcagctacggtccctcatccccaacgaggatgtgagaaagttcatgtctcatgttatccggaccttgaaaatggaatgttcagaaacacatgtgcaagggagctgtgccaagctcatgttgcgaacaggcctcctgatgaagcttctcagcgagcagcaggaagcaaaggcattgaatgtagaatgggatacggaccaacaaaaaacaaattatattaatgagaacatggaacagaatgaacagaaagagcagaagtcaagtgagctcatgaaagaagttccaggagatgactataagaacaaactcatcttcgcaatatctgtgactgtaatactaataattttgattataattttttgtcttatagaggtgaattcacataaaagggcatcagaaaaatacaaagacaacccatcaatatcaggagcctgagcatgagttaaagcatgtggatggcctggagctatgtttttaaaattgttattaaatattggttttttacttaaatcaatgaaaactttctttactttgtggttgtgttcctcaaaatgagaatttttaacaataataaaaataaagcttgttagatcatttttaatggt

SEQ ID NO: 229529 - DNA, 2764 bp, Artificial Sequence
  derived and/or modified sequence
tcagggctgccagaatggcttttgctgagtgcatagcaccagcgtgtgtcatgtcttggctgcgtttctggggcccatggcccctccttacgtggcaactattgtctttactagtcaaggaggctcagcctctggtgtgggtcaaggacccgctccagctgacctctaaccccctggggccacctgagccctggtcttcccgctcctcccatctcccatgggaatctccccatgcacctgctcccccagcagccccgggggactttgattacctggggccctctgcttcttcgcagatgtcagccctgcctcaggaaccaactgaaaatttggctccattcctgaaggaattggattcagctggagagctgcccctggggccagagccgttcttggctgcacatcaggacttaaatgacaagcggactccagaagaaaggctcccagaggtggttccgcttctcaaccgggatcagaaccaggccctagttcagcttcctcgcctcaagtgggttcaaactacagatctagatcgggctgcaggtcatcaggcagatgaaatacttgttccactagacagtaaggtttcaagaccaaccaaatttgttgtttcgcccaagaacctgaagaaagatctagctgaacgttggagccttcctgagattgttgggattccacaccaattatccaaacctcagcgtcagaaacagactttgccagatgattatttgagtatggacacactgtatcccggcagcctacctccagaactccgggtgaacgcagatgagcctccagggcctcctgagcaagttggactttctcaattccatctagagcccaaaagtcaaaatccagagacccttgaagacatccagtcctcttcactccaggaagaagccccagcgcagcttctacagctccctcaggaggtagaaccttcaacccagcaggaggccccagctctgcctccagagtcctctatggagagtctagctcaaactccactgaatcatgaagtgacagttcaacctccaggtgaggatcaagctcattataatttgcccaagtttacagtcaaacctgcagatgtggaggttaccatgacttcagagcctaaaaatgagacagaatctacccaagcccagcaggaggccccaattcagcctcccgaggaggcggaaccttcttctacagccctgaggactacagatcctcctccagaacaccctgaggtgacacttccaccttcagacaagggtcaggctcagcattcacacctgactgaagccacagttcaacctctggacctggagcttagcataactacagagcctactacagaggttaaaccgtctccaaccacggaggaaacctcagctcagcctccagacccggggcttgccataactccagaacccactacagagattggacattccacagccctggagaagactagagctcctcatccagaccaggttcagactctgcatcgaagcctgactgaagtcacaggtccacctacaaagttagaatcttcgcaggattcattggtgcagtctgaaactgcaccagaggaacagaaggcctccacaagcaccaacatatgtgagctctgcacctgcggagatgagactctgtcatgtgttggtctcagcccaaagcagaggctccgccaagtgcctgtgccagagcccgacacctacaatggcatcttcaccaccttaaatttccaaggaaactatatttcataccttgatggaaatgtatggaaagcatacagttggaccgagaaactaattctcagtgaaaattatttgactgaattacctaaggattcatttgaaggcctgctatacctccagtatttaattctcaatcgcaatcctctgactactgtcgaagatccatatctctttgaactgccggcattaaaatatctagacatgggaacaacacacatcacacttacaacacttaagaacattctcacgatgactgttgaactggaaaaactgatcttacctagccatatggcctgctgcctctgccaatttaaaaatagcattgaggctgtctgcaagacagtcaagctgcattgcaacactgcatgtctgactaacagcatacattgtcctgaagaagcatctgtagggaatccagaaggagcgttcatgaagatgttacaagcccggaagcagcacatgagcactcagctgactattgagtcggaggcgccctcagacagcagtggcatcaacttgtcaggctttgggggtgatcagcttgaaattcagctaaccgagcagctacggtccctcatccccaacgaggatgtgagaaagttcatgtctcatgttatccggaccttgaaaatggaatgttcagaaacacatgtgcaagggagctgtgccaagctcatgttgcgaacaggcctcctgatgaagcttctcagcgagcagcaggaagcaaaggcattgaatgtagaatgggatacggaccaacaaaaaacaaattatattaatgagaacatggaacagaatgaacagaaagagcagaagtcaagtgagctcatgaaagaagttccaggagatgactataagaacaaactcatcttcgcaatatctgtgactgtaatactaataattttgattataattttttgtcttatagaggtgaattcacataaaagggcatcagaaaaatacaaagacaacccatcaatatcaggagcctgagcatgagttaaagcatgtggatg

SEQ ID NO: 229530 - DNA, 3061 bp, Artificial Sequence
  derived and/or modified sequence
aactaggaggatgacatggaggaggacgacgatgactccgattatccggaggagctggaagatgacgacgaggacgccagttactccacggaaagcagcttcagcagcactccagaaagtggtaaaatagctgtggagtgcagacccagtgaagagattgtagatgtcagatgggaagaactacacagtttaattcaagtcagttgctctcccctgaaggaagagtattctcggatttcacctcagaggaggaagaattcaggctgccagaactggactagcacttctgaagatcccaaggccagatgtcagccctgcctcaggaaccaactgaaaatttggctccattcctgaaggaattggattcagctggagagctgcccctggggccagagccgttcttggctgcacatcaggacttaaatgacaagcggactccagaagaaaggctcccagaggtggttccgcttctcaaccgggatcagaaccaggccctagttcagcttcctcgcctcaagtgggttcaaactacagatctagatcgggctgcaggtcatcaggcagatgaaatacttgttccactagacagtaaggtttcaagaccaaccaaatttgttgtttcgcccaagaacctgaagaaagatctagctgaacgttggagccttcctgagattgttgggattccacaccaattatccaaacctcagcgtcagaaacagactttgccagatgattatttgagtatggacacactgtatcccggcagcctacctccagaactccgggtgaacgcagatgagcctccagggcctcctgagcaagttggactttctcaattccatctagagcccaaaagtcaaaatccagagacccttgaagacatccagtcctcttcactccaggaagaagccccagcgcagcttctacagctccctcaggaggtagaaccttcaacccagcaggaggccccagctctgcctccagagtcctctatggagagtctagctcaaactccactgaatcatgaagtgacagttcaacctccaggtgaggatcaagctcattataatttgcccaagtttacagtcaaacctgcagatgtggaggttaccatgacttcagagcctaaaaatgagacagaatctacccaagcccagcaggaggccccaattcagcctcccgaggaggcggaaccttcttctacagccctgaggactacagatcctcctccagaacaccctgaggtgacacttccaccttcagacaagggtcaggctcagcattcacacctgactgaagccacagttcaacctctggacctggagcttagcataactacagagcctactacagaggttaaaccgtctccaaccacggaggaaacctcagctcagcctccagacccggggcttgccataactccagaacccactacagagattggacattccacagccctggagaagactagagctcctcatccagaccaggttcagactctgcatcgaagcctgactgaagtcacaggtccacctacaaagttagaatcttcgcaggattcattggtgcagtctgaaactgcaccagaggaacagaaggcctccacaagcaccaacatatgtgagctctgcacctgcggagatgagactctgtcatgtgttggtctcagcccaaagcagaggctccgccaagtgcctgtgccagagcccgacacctacaatggcatcttcaccaccttaaatttccaaggaaactatatttcataccttgatggaaatgtatggaaagcatacagttggaccgagaaactaattctcagtgaaaattatttgactgaattacctaaggattcatttgaaggcctgctatacctccagtatttagatttatcctgcaataaaatacgatatattgaaagacaaacatttgaatcactaccatttttgcagtatataaatctgggctgcaatttaattacaaaactgagccttggaacatttcaggcctggcacggaatgcagtttttacacaacttaattctcaatcgcaatcctctgactactgtcgaagatccatatctctttgaactgccggcattaaaatatctagacatgggaacaacacacatcacacttacaacacttaagaacattctcacgatgactgttgaactggaaaaactgatcttacctagccatatggcctgctgcctctgccaatttaaaaatagcattgaggctgtctgcaagacagtcaagctgcattgcaacactgcatgtctgactaacagcatacattgtcctgaagaagcatctgtagggaatccagaaggagcgttcatgaagatgttacaagcccggaagcagcacatgagcactcagctgactattgagtcggaggcgccctcagacagcagtggcatcaacttgtcaggctttgggggtgatcagcttgaaattcagctaaccgagcagctacggtccctcatccccaacgaggatgtgagaaagttcatgtctcatgttatccggaccttgaaaatggaatgttcagaaacacatgtgcaagggagctgtgccaagctcatgttgcgaacaggcctcctgatgaagcttctcagcgagcagcaggaagcaaaggcattgaatgtagaatgggatacggaccaacaaaaaacaaattatattaatgagaacatggaacagaatgaacagaaagagcagaagtcaagtgagctcatgaaagaagttccaggagatgactataagaacaaactcatcttcgcaatatctgtgactgtaatactaataattttgattataattttttgtcttatagaggtgaattcacataaaagggcatcagaaaaatacaaagacaacccatcaatatcaggagcctgagcatgagttaaagcatgtggatggcctggagctatgtttttaaaattgttattaaatattggttttttacttaaatcaatgaaaactttctttactttgtggttgtgttcctcaaaatgagaatttttaacaataataaaaataaagcttgttagatc

SEQ ID NO: 229531 - DNA, 2844 bp, Artificial Sequence
  derived and/or modified sequence
atgtcctggctgcgcttctggggcccctggcccctgctgacctggcagctgctgagcctgctggtgaaggaggcccagcccctggtgtgggtgaaggaccccctgcagctgaccagcaaccccctgggccccccagagccctggagcagccgcagcagccacctgccctgggagagcccccacgccccagcccctcctgctgcccctggggactttgactacctgggccccagcgccagcagccagatgtctgccctgccccaggagcccacagagaacctggcccccttcctgaaggagctggacagcgctggggagctgcccctgggccctgagcccttcctggccgcccaccaggacctgaatgacaagaggaccccagaggagcggctgcctgaggtggtgcccctgctgaacagagaccagaaccaggccctggtgcagctgccccggctgaagtgggtgcagaccacagacctggacagagctgctggccaccaggctgatgagatcctggtgcccctggacagcaaggtgtcccggcccaccaagtttgtggtgagccccaagaacctgaagaaggacctggccgagcgctggagcctgcctgagatcgtgggcatcccccaccagctgagcaagccccagaggcagaagcagaccctgcctgatgactacctgtccatggacaccctgtacccaggcagcctgcccccagagctgcgggtgaatgctgatgagcccccaggccccccagagcaggtgggcctgagccagttccacctggagcccaagagccagaaccctgagaccctggaggacatccagagcagcagcctgcaggaggaggccccagcccagctgctgcagctgccccaggaggtggagcccagcacccagcaggaggccccagccctgcccccagagagctccatggagagcctggcccagacccccctgaaccacgaggtgacagtgcagcccccaggagaggaccaggcccactacaacctgcccaagttcaccgtgaagccagcagatgtggaggtgaccatgaccagcgagcccaagaatgaaacagagagcacccaggcccagcaggaggcccccatccagcccccagaggaggccgagcccagcagcacagccctgcggaccacagatcctcctcctgagcaccctgaggtgaccctgcccccaagtgacaagggccaggcccagcacagccacctgacagaggccaccgtgcagcccctggacctggagctgagcatcaccacagagcccaccacagaggtgaagcccagccccaccacagaggagaccagcgcccagcccccagaccccggcctggccatcaccccagagcccaccacagaaattggccacagcacagccctggagaagacccgggccccccacccagaccaggtgcagaccctgcacaggagcctgacagaggtgactggaccacccaccaagctggagagcagccaggacagcctggtgcagagcgagacagcccctgaggagcagaaggccagcaccagcaccaacatctgtgagctgtgcacctgtggagatgagaccctgagctgtgtgggcctgagccccaagcagaggctgcggcaggtgcctgtgcctgagccagacacctacaacggcatcttcaccaccctgaacttccagggcaactacatctcctacctggatggaaatgtgtggaaggcctacagctggacagagaagctgatcctgtctgagaactacctgacagagctgcccaaggacagctttgagggcctgctgtacctgcagtacctggacctgagctgcaacaagatccgctacatcgagcggcagacctttgagagcctgcccttcctgcagtacatcaacctgggctgcaacctgatcaccaagctgagcctgggcaccttccaggcctggcacggcatgcagttcctgcacaacctgatcctgaacagaaaccccctgaccaccgtggaggacccctacctgtttgagctgcctgccctgaagtacctggacatgggcaccacccacatcaccctgaccaccctgaagaacatcctgaccatgacagtggagctggagaagctgatcctgcccagccacatggcctgctgcctgtgccagttcaagaacagcattgaagctgtgtgcaagacagtgaagctgcactgcaacacagcctgcctgaccaacagcatccactgcccagaggaggcctctgtgggcaaccctgagggcgccttcatgaagatgctgcaggccaggaagcagcacatgagcacccagctgaccattgaaagtgaggcccccagcgacagcagcggcatcaacctgagcggctttggaggagaccagctggagatccagctgacagagcagctgcggagcctcatccccaatgaagatgtgaggaagttcatgagccacgtgatccgcaccctgaagatggagtgcagcgagacccacgtgcagggcagctgtgccaagctgatgctgaggacaggcctgctgatgaagctgctgtctgagcagcaggaggccaaggccctgaatgtggagtgggacacagaccagcagaagaccaactacatcaatgaaaacatggagcagaatgagcagaaggagcagaagagcagcgagctgatgaaggaggtgcctggagatgactacaagaacaagctgatctttgccatctctgtgaccgtcatcctgatcatcctgatcatcatcttctgcctgattgaggtgaacagccacaagagggccagcgagaagtacaaggacaaccccagcatcagcggggcctag

SEQ ID NO: 229532 - DNA, 2691 bp, Artificial Sequence
  derived and/or modified sequence
atgtcctggctgcgcttctggggcccctggcccctgctgacctggcagctgctgagcctgctggtgaaggaggcccagcccctggtgtgggtgaaggaccccctgcagctgaccagcaaccccctgggccccccagagccctggagcagccgcagcagccacctgccctgggagagcccccacgccccagcccctcctgctgcccctggggactttgactacctgggccccagcgccagcagccagatgtctgccctgccccaggagcccacagagaacctggcccccttcctgaaggagctggacagcgctggggagctgcccctgggccctgagcccttcctggccgcccaccaggacctgaatgacaagaggaccccagaggagcggctgcctgaggtggtgcccctgctgaacagagaccagaaccaggccctggtgcagctgccccggctgaagtgggtgcagaccacagacctggacagagctgctggccaccaggctgatgagatcctggtgcccctggacagcaaggtgtcccggcccaccaagtttgtggtgagccccaagaacctgaagaaggacctggccgagcgctggagcctgcctgagatcgtgggcatcccccaccagctgagcaagccccagaggcagaagcagaccctgcctgatgactacctgtccatggacaccctgtacccaggcagcctgcccccagagctgcgggtgaatgctgatgagcccccaggccccccagagcaggtgggcctgagccagttccacctggagcccaagagccagaaccctgagaccctggaggacatccagagcagcagcctgcaggaggaggccccagcccagctgctgcagctgccccaggaggtggagcccagcacccagcaggaggccccagccctgcccccagagagctccatggagagcctggcccagacccccctgaaccacgaggtgacagtgcagcccccaggagaggaccaggcccactacaacctgcccaagttcaccgtgaagccagcagatgtggaggtgaccatgaccagcgagcccaagaatgaaacagagagcacccaggcccagcaggaggcccccatccagcccccagaggaggccgagcccagcagcacagccctgcggaccacagatcctcctcctgagcaccctgaggtgaccctgcccccaagtgacaagggccaggcccagcacagccacctgacagaggccaccgtgcagcccctggacctggagctgagcatcaccacagagcccaccacagaggtgaagcccagccccaccacagaggagaccagcgcccagcccccagaccccggcctggccatcaccccagagcccaccacagaaattggccacagcacagccctggagaagacccgggccccccacccagaccaggtgcagaccctgcacaggagcctgacagaggtgactggaccacccaccaagctggagagcagccaggacagcctggtgcagagcgagacagcccctgaggagcagaaggccagcaccagcaccaacatctgtgagctgtgcacctgtggagatgagaccctgagctgtgtgggcctgagccccaagcagaggctgcggcaggtgcctgtgcctgagccagacacctacaacggcatcttcaccaccctgaacttccagggcaactacatctcctacctggatggaaatgtgtggaaggcctacagctggacagagaagctgatcctgtctgagaactacctgacagagctgcccaaggacagctttgagggcctgctgtacctgcagtacctgatcctgaacagaaaccccctgaccaccgtggaggacccctacctgtttgagctgcctgccctgaagtacctggacatgggcaccacccacatcaccctgaccaccctgaagaacatcctgaccatgacagtggagctggagaagctgatcctgcccagccacatggcctgctgcctgtgccagttcaagaacagcattgaggccgtgtgcaagacagtgaagctgcactgcaacacagcctgcctgaccaacagcatccactgcccagaggaggcctctgtgggcaaccctgagggcgccttcatgaagatgctgcaggccaggaagcagcacatgagcacccagctgaccatcgagagcgaggcccccagcgacagcagcggcatcaacctgagcggctttggaggagaccagctggagatccagctgacagagcagctgcggagcctcatccccaatgaagatgtgaggaagttcatgagccacgtgatccgcaccctgaagatggagtgcagcgagacccacgtgcagggcagctgtgccaagctgatgctgaggacaggcctgctgatgaagctgctgtctgagcagcaggaggccaaggccctgaatgtggagtgggacacagaccagcagaagaccaactacatcaatgaaaacatggagcagaatgagcagaaggagcagaagagcagcgagctgatgaaggaggtgcctggagatgactacaagaacaagctgatctttgccatctctgtgaccgtcatcctgatcatcctgatcatcatcttctgcctgattgaggtgaacagccacaagagggccagcgagaagtacaaggacaaccccagcatcagcggggcctag

SEQ ID NO: 229533 - DNA, 2598 bp, Artificial Sequence
  derived and/or modified sequence
atgtctgccctgccccaggagcccacagagaacctggcccccttcctgaaggagctggacagcgctggggagctgcccctgggccctgagcccttcctggccgcccaccaggacctgaatgacaagaggaccccagaggagcggctgcctgaggtggtgcccctgctgaacagagaccagaaccaggccctggtgcagctgccccggctgaagtgggtgcagaccacagacctggacagagctgctggccaccaggctgatgagatcctggtgcccctggacagcaaggtgtcccggcccaccaagtttgtggtgagccccaagaacctgaagaaggacctggccgagcgctggagcctgcctgagatcgtgggcatcccccaccagctgagcaagccccagaggcagaagcagaccctgcctgatgactacctgtccatggacaccctgtacccaggcagcctgcccccagagctgcgggtgaatgctgatgagcccccaggccccccagagcaggtgggcctgagccagttccacctggagcccaagagccagaaccctgagaccctggaggacatccagagcagcagcctgcaggaggaggccccagcccagctgctgcagctgccccaggaggtggagcccagcacccagcaggaggccccagccctgcccccagagagctccatggagagcctggcccagacccccctgaaccacgaggtgacagtgcagcccccaggagaggaccaggcccactacaacctgcccaagttcaccgtgaagccagcagatgtggaggtgaccatgaccagcgagcccaagaatgaaacagagagcacccaggcccagcaggaggcccccatccagcccccagaggaggccgagcccagcagcacagccctgcggaccacagatcctcctcctgagcaccctgaggtgaccctgcccccaagtgacaagggccaggcccagcacagccacctgacagaggccaccgtgcagcccctggacctggagctgagcatcaccacagagcccaccacagaggtgaagcccagccccaccacagaggagaccagcgcccagcccccagaccccggcctggccatcaccccagagcccaccacagaaattggccacagcacagccctggagaagacccgggccccccacccagaccaggtgcagaccctgcacaggagcctgacagaggtgactggaccacccaccaagctggagagcagccaggacagcctggtgcagagcgagacagcccctgaggagcagaaggccagcaccagcaccaacatctgtgagctgtgcacctgtggagatgagaccctgagctgtgtgggcctgagccccaagcagaggctgcggcaggtgcctgtgcctgagccagacacctacaacggcatcttcaccaccctgaacttccagggcaactacatctcctacctggatggaaatgtgtggaaggcctacagctggacagagaagctgatcctgtctgagaactacctgacagagctgcccaaggacagctttgagggcctgctgtacctgcagtacctggacctgagctgcaacaagatccgctacatcgagcggcagacctttgagagcctgcccttcctgcagtacatcaacctgggctgcaacctgatcaccaagctgagcctgggcaccttccaggcctggcacggcatgcagttcctgcacaacctgatcctgaacagaaaccccctgaccaccgtggaggacccctacctgtttgagctgcctgccctgaagtacctggacatgggcaccacccacatcaccctgaccaccctgaagaacatcctgaccatgacagtggagctggagaagctgatcctgcccagccacatggcctgctgcctgtgccagttcaagaacagcattgaagctgtgtgcaagacagtgaagctgcactgcaacacagcctgcctgaccaacagcatccactgcccagaggaggcctctgtgggcaaccctgagggcgccttcatgaagatgctgcaggccaggaagcagcacatgagcacccagctgaccattgaaagtgaggcccccagcgacagcagcggcatcaacctgagcggctttggaggagaccagctggagatccagctgacagagcagctgcggagcctcatccccaatgaagatgtgaggaagttcatgagccacgtgatccgcaccctgaagatggagtgcagcgagacccacgtgcagggcagctgtgccaagctgatgctgaggacaggcctgctgatgaagctgctgtctgagcagcaggaggccaaggccctgaatgtggagtgggacacagaccagcagaagaccaactacatcaatgaaaacatggagcagaatgagcagaaggagcagaagagcagcgagctgatgaaggaggtgcctggagatgactacaagaacaagctgatctttgccatctctgtgaccgtcatcctgatcatcctgatcatcatcttctgcctgattgaggtgaacagccacaagagggccagcgagaagtacaaggacaaccccagcatcagcggggcctag

SEQ ID NO: 229534 - DNA, 2844 bp, Artificial Sequence
  derived and/or modified sequence
atgagctggctgcggttctggggcccctggcccctgctgacctggcagctgctcagcctccttgtgaaagaggcacaaccccttgtctgggtcaaggatcctctgcagctgacctccaaccctctcgggccgcctgaaccatggtcttcccgctcatctcaccttccttgggagtcgcctcatgcaccagccccgccagccgctccaggcgacttcgactatctcgggccatcagcgagttctcagatgagcgccctcccgcaggagccgaccgagaatttggctccttttcttaaagaactcgacagtgcgggtgagttgcccctggggcctgagccattccttgctgctcatcaagacttgaacgacaagcggacccctgaggagcggctgcctgaggtggtccccctcctcaatagagaccagaaccaagccctcgtgcagttgcccagattgaagtgggttcagacgactgacctggatagagcagctggtcatcaggccgacgagattctggtgcctctggattcaaaagtctcacgccccaccaagtttgtggttagccccaaaaacctcaagaaagatctagcagagaggtggagccttccagagatagtcggaattccgcaccagctgtccaaaccacagcgccaaaaacagacactgcctgacgattaccttagcatggacaccctctatccaggcagcctgcctcctgagctgcgagttaatgcagacgaacctcctggaccccctgaacaggttgggctatctcagttccacctggagcccaagtcacaaaacccagagacattggaggacattcagagcagttccttgcaggaagaagcacccgcgcagctcttgcagcttcctcaagaagtagagcccagtacgcagcaggaagcccctgccctaccccctgagagttctatggagtcattagctcagactcctttgaatcatgaggtaactgtccaaccccccggggaggatcaggcccattacaatctgccaaaatttactgtcaaacctgctgatgtggaagtaaccatgaccagcgaacctaaaaacgagaccgaaagcacacaggcccaacaggaagccccgattcagccaccagaagaagccgagcctagtagcactgcgctgagaactactgaccctccccctgaacatcctgaggttaccctccctcctagcgacaaggggcaggcccaacatagtcatcttacagaggctacagtgcagccacttgatctggagcttagcataaccaccgagcccacaaccgaggttaaacctagtcctactacggaagaaacgtccgcccagccccccgaccccggactggccatcacccccgagcctacaactgaaattgggcatagcactgctctcgagaagacacgcgcacctcatccagaccaggttcagaccctgcaccgttctctgactgaggtgaccggcccacccacaaaactggagtcatcacaggattctcttgtgcagagcgaaacagctcccgaagaacagaaagcaagtacatccaccaatatctgcgaactgtgcacatgcggcgacgaaactctctcttgtgtgggcctgtccccaaagcagcggctcaggcaagtacctgtacctgaacctgacacatacaatggcattttcactaccctgaattttcagggtaattacatctcctaccttgatggaaacgtgtggaaagcgtactcatggaccgagaagctgatcctaagcgaaaactatctgacggaactgcccaaggattctttcgagggtctgctttacctccagtatctcgacctatcgtgtaacaagattcgttatatagaaagacagacgtttgaaagcctacccttcctgcagtacatcaacctgggatgcaatctgatcaccaaattatcacttggtaccttccaggcatggcatgggatgcagttcctgcataacctgattctcaatcggaacccattgacaaccgtggaggacccctatttattcgaactccccgcattgaagtacctcgatatgggaactacacacatcacgctgacaaccctgaaaaatatcttaactatgactgtggaactggaaaaattgatcctcccatcacatatggcctgttgcctctgccagttcaagaactctatcgaagcggtgtgcaagactgtgaaactgcactgtaacacagcttgccttaccaactcaattcactgtcctgaagaagctagtgtcggcaaccctgaaggtgcctttatgaagatgctccaggccaggaaacagcacatgagtacacagctcaccattgaaagcgaagctccttccgactcatcaggcatcaatctgtcgggttttgggggcgatcagctagaaattcaattgactgaacaactacgttccttgatccctaatgaggatgttcgcaaattcatgtcgcacgtaatcagaactctgaagatggaatgctccgaaacacacgtgcaaggctcctgcgcaaagctgatgctgcggacaggcttattaatgaaacttctgagtgaacaacaagaggcaaaggctctcaacgtcgagtgggataccgaccagcagaagacaaactatatcaacgagaacatggagcaaaacgaacagaaggaacagaagagctctgagttgatgaaggaggttccaggtgacgattacaaaaacaaactgattttcgctatctctgtcacggtcatccttattattcttattatcatcttctgtcttatagaggtcaactctcacaaaagagccagcgagaagtacaaggacaaccctagtatctccggggcttag

SEQ ID NO: 229535 - DNA, 2691 bp, Artificial Sequence
  derived and/or modified sequence
atgagctggctgcggttctggggcccctggcccctgctgacctggcagctgctgtccctcctggtgaaagaggcccagccactcgtttgggtgaaagatccattacagctgacaagtaatccactcggtccacctgaaccctggtcgtccagatcatcacacctcccctgggagtcaccgcatgctcctgctccacccgccgcccccggagattttgactatctcggccccagcgcgtcctcacagatgtctgctcttccgcaggagcccaccgagaatctcgcccccttcttgaaggagctcgatagtgccggcgagttgccgctgggacccgaaccatttctggctgctcatcaggatctgaacgataagcgcacgccagaggagcggcttccagaagttgttccgttactgaacagggatcaaaaccaggccctcgtgcagctgcccagactgaagtgggtacagactacagacctggatagagctgccggccatcaagccgatgaaatcttagtccccttggatagcaaagtttctcgaccaacaaagttcgttgtgtcacctaagaatctcaagaaagacctggcagagcgatggtctctccccgagattgttggaattcctcaccagctctctaaaccacaacggcaaaaacagacgctccctgacgactacctgtccatggatacactatatccgggttctttgcctcctgagttgcgtgttaatgcggatgagccaccaggcccccctgagcaggtgggactgtcccagttccatctcgaacctaagagtcaaaaccctgaaacgctcgaagatattcaaagttccagtttacaggaggaggccccggcccagctgctgcagctgcctcaggaggtagagccatcaactcagcaggaagcacccgccctgccgcctgagagttccatggagagtctcgctcagacacccttaaatcatgaggttacagtccagcctcctggggaggaccaggcccactacaacctacccaaatttacagtgaagccagccgatgtggaggtgacaatgacatcagagcccaaaaatgagacggaatcaacccaggcacagcaggaggctcccatccaacctccggaagaagctgagccaagctcaacagcattaagaacaactgatccccctccggaacatccggaggtcacactccctccgtccgataagggacaggcccagcacagtcacctgaccgaggcaacggtccaaccattagaccttgagctctctatcactaccgaacccaccaccgaggtaaaaccctcacctaccacggaagagacgagtgctcagccccctgacccgggccttgcaatcacgcccgaaccaaccacagagatcggacacagtactgcactggaaaagacccgagcaccccaccctgatcaggttcagactctccatagatctttgaccgaggtcacaggcccgcccactaaactcgagtctagtcaggattcattggtccagagcgaaaccgctcctgaggagcagaaagcctctaccagcacgaacatctgcgagctatgtacgtgtggtgatgagaccctttcttgcgtggggttgtctccaaaacagcggctcagacaggtgcccgtccctgagcctgatacatacaatgggatattcactaccctgaactttcagggaaactatatttcatatcttgatgggaatgtgtggaaggcatatagttggactgagaagttgattttgagcgagaattacctgactgaactgccaaaagattcctttgaaggacttctctatttacagtatctcatcctcaatagaaaccctcttactactgtggaagatccttacctcttcgagttaccagcactaaaatatctggacatgggcactacgcacataacattgacaactctgaaaaatattcttactatgaccgtcgaactggagaagctgattttgccatctcatatggcatgctgcctgtgtcagttcaaaaactccatcgaggctgtatgtaagaccgtgaaactccattgcaataccgcatgtttgaccaatagcatccactgccctgaggaagcatctgtaggcaatcctgagggagcatttatgaaaatgctgcaggctagaaagcagcatatgtcgactcagttgactattgaaagcgaagccccaagtgacagttctggcataaacttgtccgggtttggaggagaccaactggagatccagctcactgagcaactgcggtcactgatccctaatgaggatgtgcgcaagttcatgtcccacgtgatcaggacactgaaaatggaatgctcagaaactcacgtgcagggaagttgtgccaagctgatgctgcggacagggctacttatgaagctcttgtccgagcagcaggaagcgaaagccttaaacgtcgaatgggatacagaccagcagaagacaaactacattaacgagaacatggagcagaatgagcagaaggagcaaaagtcttcggagctcatgaaggaggtgcctggagatgattacaaaaacaagctgatcttcgccatctcggtgacagtcattctcatcattctgattattattttctgcttgatcgaggtgaactcccacaaacgggcttctgaaaaatataaggataacccctccatcagtggcgcctag

SEQ ID NO: 229536 - DNA, 2598 bp, Artificial Sequence
  derived and/or modified sequence
atgagcgccctgccccaggagcccaccgagaacctggcccccttcttaaaggaacttgacagcgcaggagaactcccgctgggtcccgaaccttttttggctgctcaccaggacctcaatgacaagcggacacccgaagagcgactgccagaggttgttcccctgttaaacagagaccagaaccaggccctggtacagctgcctagacttaagtgggtgcagacgacagaccttgatagagccgccggacaccaggcagatgagatcctggtgccactcgatagtaaagtgagtcgccctacgaagtttgtggtgtcacctaagaatctgaaaaaggacctcgccgagcgatggagcctgccagaaatcgtcggaattccacaccaattatccaagccacagcgccagaagcagacattaccagacgactacttgtcaatggacaccctataccctggttcacttccacctgagctacgagtcaacgcggatgagcctccgggacctccagaacaggtgggcctgagccagttccaccttgaaccaaagtcccagaaccccgagacccttgaggacattcagtcctcttccctccaggaagaggcacctgcccagttgttgcagctgcctcaggaagttgagcctagcacgcagcaggaagcaccggctctccccccagagtcaagcatggagtctttggcgcagactcccctgaaccacgaagtgacagtgcagccgcccggagaggatcaggcccattataatctgcccaaattcactgtgaagcccgccgacgtagaggtcactatgacatctgaaccaaagaatgagaccgaatctacacaagcacaacaagaggcccctattcagcccccagaggaagccgagccctcatctaccgctctgcgcaccaccgaccctccaccagaacatcctgaagtgacactacctccgagtgataaggggcaggcccagcatagtcacctcaccgaggctactgtgcagccgctggatctcgaactcagcatcaccacagagcccaccaccgaggtgaagccctcccccactaccgaagaaacaagcgcccagcctcctgaccccggtttagctattacgcctgagcctacgaccgagatagggcacagtaccgcactggagaagacgagggcaccacaccctgatcaggtgcagacccttcaccgttctttgaccgaggtgacagggccacctacaaaactggagtccagccaggattcattggtgcagagcgagactgctccagaggaacaaaaggcttcaacaagcaccaatatttgcgaactatgcacatgtggagatgagaccctctcctgcgtagggttatcacctaaacagaggctaaggcaggtacccgtgcccgagcccgatacctataatggaatcttcacgacccttaacttccagggtaattacatatcctacctggacggcaacgtatggaaagcatacagctggactgaaaagctgattctcagcgagaattacctgaccgaacttcccaaagattcctttgaaggcctgttatacctacagtacctggacttgtcctgcaataaaattcgctatatagagcggcagacatttgagagcctcccctttctgcagtatatcaatctcggttgcaatcttattacaaagctctctctcgggacatttcaggcctggcacggaatgcagttcctgcacaacctaatcttaaacaggaatcctttgacgacagtggaggacccctacctgttcgaactgccggcgctaaagtatctggatatgggtacgacccatattaccttgacgacactcaagaatatcctcactatgaccgttgaacttgagaagctaattctgccatcccacatggcatgttgtctctgtcaatttaaaaactccatcgaagccgtatgtaaaaccgtcaagctccattgcaataccgcatgcctgactaatagtatacattgccccgaggaggcatctgtaggtaaccccgagggggcgttcatgaagatgctgcaggctcgaaaacagcatatgtccactcagcttacaatagaatccgaagccccatcagatagctctgggatcaatctgagcggattcggaggagaccagttagagattcagttgactgagcaattacgatctctgattcctaacgaagatgtgcgaaaattcatgtcacatgtgatccgcactctaaagatggagtgtagcgagacacacgttcagggaagctgtgccaaacttatgctccgtaccggactattgatgaagctcctgtccgagcagcaggaagccaaggccctgaacgttgagtgggataccgatcagcagaaaacaaactacattaacgagaacatggagcagaacgaacagaaggaacagaagagctccgaattgatgaaggaggtgcccggcgacgactataaaaataagcttatcttcgctatatccgtgacggtgattctgatcatccttatcatcatattttgcttgattgaagtgaatagccacaagcgtgcatctgaaaagtacaaggataatcccagtatatctggcgcatag

SEQ ID NO: 229537 - DNA, 2844 bp, Artificial Sequence
  derived and/or modified sequence
atgtcatggctgcggttctggggaccgtggccattgctcacgtggcagttactaagcttactggtgaaggaggctcagccgctcgtatgggtcaaggacccacttcaactgacgtctaacccactggggcctcccgagccatggagtagccggtcctcacatctgccctgggaaagcccccacgcccctgccccacccgcagcccctggtgacttcgactaccttggccctagcgctagctctcagatgtccgccctgccccaggagccaacagagaacctggcgccatttctcaaggagctggactcagccggtgaactccctctcggaccggagcctttcttggctgcccatcaggacttgaatgataaacggacccctgaggagagattgccagaggttgtgccacttctgaacagggaccaaaatcaggcgcttgtgcagttacctcggctcaagtgggtacagacgaccgacctcgaccgagctgctgggcaccaagcggacgagatattggtacctctagattcaaaagtttctcggccaacaaaattcgtagtgtctccaaagaatctgaaaaaggacttggctgaacgctggagtcttcccgagattgtcggcatccctcaccagctcagtaagccacagcgacagaagcaaacccttcctgatgactacctctcaatggataccctgtatcccggaagcttacctcccgagctgagggtaaacgcggacgagcccccaggacctcccgaacaggttggcttgtctcagttccatcttgaacccaaatcacagaatccggagactctggaagatatccagagttcgagccttcaagaggaggcaccagctcagctgctacagcttccacaagaggtggagccgtctacgcagcaggaggctccagcactgcctcctgagtcgtccatggagtcactcgctcagacaccgctgaatcatgaggtaacagtccagcccccaggggaggaccaagcccattacaatctacctaagttcaccgttaaaccggcagacgtggaagttacaatgacatccgaaccgaagaatgaaactgaatcgacccaggctcagcaagaggcccctattcaaccccctgaagaagcggagccctcttccaccgccctccgcaccactgatccaccgcctgagcaccccgaggtcacactgcctcctagtgacaagggccaggcccaacattcacaccttacagaggctaccgttcaacctctggaccttgagctctccattacaaccgaacccactacagaagtgaaaccttcacctacgaccgaagagacatccgctcagccccctgacccaggcctcgccatcacaccggaacctacaaccgagattggacactctacggccttggagaaaacccgtgctccacatcccgaccaggtgcagaccctgcatagaagcttaaccgaggttactgggccacccactaagctcgaatctagccaagacagcctggtgcagtctgaaactgctcccgaagaacaaaaggcatccacctcgacaaacatatgcgaactctgcacctgcggagacgagaccctgtcttgtgtcggactctcacctaagcagcgcctacggcaggtacccgtccccgagcctgacacatataatggaattttcaccacactgaacttccagggcaactacataagctacttagatggaaatgtgtggaaggcttattcctggactgagaagctgatcctcagcgagaactacctgaccgaactgcccaaggattctttcgagggacttctgtacctgcagtatctggacctgagctgtaacaagattcgatacatcgaaaggcaaacgttcgagtccctgccattcctgcagtacatcaacttgggatgtaacctcattactaaactgagtcttggcactttccaagcttggcacggaatgcagtttttgcacaatctcatacttaatagaaatccattgaccaccgtggaggacccatacctctttgaactgcccgctttgaaatatctggatatggggacgactcacatcactctcaccaccctcaaaaacatcctcaccatgaccgtggagctcgagaagctgattctgccttctcacatggcatgctgcctgtgtcagtttaagaactcaatagaagctgtgtgtaaaactgtgaaactgcactgtaatactgcttgcctcaccaactctattcactgccccgaagaggccagcgtcgggaatccagagggggctttcatgaaaatgctgcaggctagaaagcaacatatgagcacccagctgacaattgagagcgaggccccaagtgattcctcgggaatcaacctgagtggcttcgggggtgaccagctagagatccagctgactgaacagctgcgctccctgatccccaatgaggacgtgagaaaatttatgagccatgttattagaaccctcaaaatggagtgtagcgaaacccacgtccaaggaagttgtgctaaattaatgctgagaacaggtttgttgatgaaactcttgtccgaacagcaagaggcaaaggccctcaatgtggagtgggacacagatcaacagaagacgaattatatcaacgaaaacatggagcagaacgagcagaaggaacagaagtctagcgagctgatgaaggaagttcccggtgacgactataagaataaactcatctttgcgatttctgtaactgtaattctcattatcctgattattatcttttgtcttattgaggtgaacagccacaagagagcgtctgagaaatacaaagataaccctagcattagcggagcctag

SEQ ID NO: 229538 - DNA, 2691 bp, Artificial Sequence
  derived and/or modified sequence
atgtcgtggttgcgcttctgggggccttggcccttgctgacctggcagctgttaagtctgctggtaaaggaggcacagccattggtgtgggtaaaagatccactgcagctcacgagcaatcctctcggccctcccgaaccatggagctcccggagtagccatttgccctgggagagtccgcatgctcccgctccccctgctgcccctggtgatttcgattatctcggcccttccgccagttcacagatgtctgccttgcctcaggagccaacagagaatctggccccttttttaaaagaactggattctgctggtgaactgccgcttggtcccgagccattcctggccgcacatcaggatctcaatgacaaaagaacccccgaggaaaggctgccagaggtggtgccattacttaacagagaccagaaccaggccctggtgcagctgccgaggctgaaatgggtacagactacggatctggaccgcgcagctggccaccaagcagatgagattcttgtgccactggattcaaaagtgagccggcctacgaaatttgtggtatcacctaagaacctaaaaaaggacctggccgagcggtggtccctgcccgagatcgtagggatcccgcatcaactgagcaaacctcagaggcagaaacagactctccctgacgattacttgagtatggacaccctgtatcctggaagcctgccccctgagttgcgtgtgaatgctgacgaaccacctggaccaccagagcaggtcggcctaagtcagttccacctggaacctaagagccaaaaccccgagaccttggaagacatccagtccagttctctccaggaggaagcacccgctcaactgttgcaattgccacaggaagtcgagccctccacccagcaggaggccccagctctgccacccgaatcatctatggagtcactagcccaaacacccctcaaccatgaggtgactgtccagcccccaggagaagatcaggcccactacaacctgccaaagtttactgtaaagccagcggacgttgaggtgactatgacaagtgagccgaaaaacgaaacagagtctacacaagcacaacaggaggctcctatccaaccacctgaggaagccgaaccatccagcaccgcactgagaacaacagaccctccacctgagcacccagaagtcacactccccccttcggataaggggcaggcccagcactctcacctgaccgaggccaccgttcagcccctggacttagagctatcaatcactaccgagcctacaactgaggtgaagccgagccccactaccgaggagactagcgcacaacctccggatcctggactagctattactcccgaacccaccaccgagatcggccattccactgccctagaaaagactagggcacctcatcccgatcaggttcagactcttcatagaagtcttacagaggtgacgggcccacctactaaactggagagcagccaggactctttggtacagtcggaaacagcccctgaagaacagaaagcctcaacctccacaaacatctgcgagctgtgcacctgcggtgatgaaacactgagctgcgtcggcctgtctcccaagcaacggctgcggcaagtccccgtgccagaacccgatacctacaatggaatttttaccaccctcaacttccaggggaactatatctcctatctcgacggaaacgtctggaaagcttacagctggactgaaaagctaattctgtccgagaactatctgacagagcttcctaaagatagcttcgaggggctgctgtatctgcagtatctcatcttaaatcgaaaccccctgaccaccgtggaggacccctacctttttgaattgccagctctgaaatacctggacatgggtacaacacatattacactgaccacactgaagaacattctaaccatgactgttgagctggaaaagttaattctgccctctcatatggcctgctgtctttgtcagtttaaaaattccatcgaggccgtttgcaaaaccgtgaagctgcattgtaacactgcctgccttacgaattcgattcactgccctgaggaggcgagcgtcggtaacccagaaggggcattcatgaagatgctgcaggcccgaaagcagcacatgtctacccaattgactattgaaagtgaggctccttcggactccagcgggatcaacctcagtggcttcgggggtgatcagcttgagatccagctcactgaacagttgcggtccctcatcccaaacgaggacgtgcgcaagtttatgtcccacgtcatacggaccctgaaaatggagtgctccgagacacatgtccaaggttcttgcgcaaaacttatgttgcgcaccggactcttaatgaaactcctctcagagcagcaagaagccaaagcgctgaacgtcgaatgggacacagaccagcagaaaacaaattatataaatgaaaacatggagcagaacgagcagaaagagcagaagagctcagagctaatgaaagaagtgcctggggacgactataagaacaaactaatatttgccattagcgttaccgtgatcctgataattctgattatcattttctgtctcattgaggtgaattctcacaagcgggctagcgaaaagtataaggataatccctcgatctctggcgcttag

SEQ ID NO: 229539 - DNA, 2598 bp, Artificial Sequence
  derived and/or modified sequence
atgtcagccctaccgcaggagcctactgagaacctggccccttttcttaaagaactcgactcagcgggagaactgccactggggccagagccattcctagccgctcaccaggacctgaacgataagaggacacccgaggaaagactgcccgaagtggtacccctgctgaaccgggaccagaaccaggcgctagttcagctgccgagactgaaatgggtacagacgacggacctcgatagagccgcaggacaccaggcagacgaaattctggttcccctcgattcgaaggtctctaggcccactaagtttgttgtctcgccaaaaaatcttaaaaaggacttggctgagaggtggtctctgcccgaaattgtcggtatcccacatcagttaagtaaaccccagaggcagaagcaaacactcccagacgattatctgagtatggataccctgtatccaggatccctgcccccagagttgcgcgtcaatgccgacgaaccacctggtccacctgaacaggtgggcctgtctcaatttcacttggaaccaaagtcacagaaccctgagacattagaggacatccaatcctcatccctgcaggaggaagctcctgcccagttgttacagctgccacaagaggttgagccgtcaacgcagcaagaagcgccagccttgccaccggagagctccatggaatcgctggcacaaactccgttgaatcacgaggtgacagtccaacccccaggcgaggaccaggcccactacaatctccccaaatttactgtcaagcccgcagacgttgaggttactatgactagtgagcctaagaacgaaacagaaagcacacaggctcagcaggaggcgccaatacagccgccagaagaagccgagcctagtagtactgcactgcgaacaaccgatcccccacccgagcatcccgaggtaacattaccaccttcagataaggggcaggcccagcactcccacttaacagaggccacagtgcaaccattagacctggaactatctataaccacagaaccaactaccgaggtcaagccttcccctaccacagaggaaacatccgcccagccaccagaccctggcctggcaatcacaccggaaccaacaaccgagatcggccacagcaccgccctggaaaagaccagagctccgcatcctgatcaggtgcagaccctccatagatcactgaccgaagtgaccggtccacccactaagctggagtcctctcaggattctctcgttcagtcagaaacagctcccgaggagcagaaggcaagcacctctaccaatatatgtgagctgtgcacctgtggggatgaaactttaagttgcgtaggcctgtctcctaagcagaggctgcgccaggtaccagttcctgagccagacacttataacggcatattcaccacactgaattttcagggtaactatattagctatctagatggcaatgtttggaaggcatacagctggacagagaagcttatcctatccgagaattaccttaccgagctgcccaaggattcatttgaggggctcctttatctccagtacctcgatttgtcttgtaataagattcggtacatcgaaagacagacctttgagtcacttcccttcctgcagtacattaatcttgggtgcaatctcattaccaagttatccttgggcactttccaggcttggcacggtatgcaattccttcacaatctcattttgaacaggaatcccttgaccaccgtcgaggacccgtacctgttcgagctgcctgctctaaagtatctcgatatgggcaccacgcatatcacacttacgacattgaaaaatattctgacaatgacagtggagcttgaaaagctcatcctccctagccacatggcctgctgcctgtgtcagtttaaaaattccattgaagcagtttgtaaaacagttaaattgcattgcaatacagcatgtttaacgaactctattcattgccccgaggaagcatccgtaggtaatcccgagggagcttttatgaaaatgctgcaggcaagaaaacaacatatgtccacacagctcaccatcgagtctgaggcccctagtgacagtagcgggatcaatttgtctggcttcgggggtgaccaactggagattcaactaacagagcaactgcgaagcttaattccgaacgaagatgtgcggaaattcatgagccatgtcataagaaccctcaagatggagtgctctgagacacacgttcagggttcctgcgccaaactgatgctgagaactgggctcttaatgaagttactgtctgagcagcaagaagctaaagccctgaacgtggagtgggataccgaccagcagaagacaaactatatcaatgagaacatggagcagaacgagcagaaggaacaaaagagcagcgaactaatgaaagaggtacccggagacgactacaagaataagttgatcttcgctatcagtgtgaccgtcattcttatcatcttgattatcatcttttgcctgatagaggtcaactctcacaaaagagcctcagagaagtataaggacaatcccagcattagcggcgcttag

SEQ ID NO: 229540 - protein, 97 aa, Artificial Sequence
  derived and/or modified sequence
MADKVLKEKRKLFIHSMGEGTINGLLDELLQTRVLNQEEMEKVKRENATVMDKTRALIDSVIPKGAQACQICITYICEEDSYLAETLGLSAGPIPGN

SEQ ID NO: 229541 - DNA, 333 bp, Artificial Sequence
  derived and/or modified sequence
atggcagataaggtgttgaaggagaagaggaaactctttattcggagcatgggggaagggacgattaacggcttactcgacgaactcttgcaaactcgcgtgttgaacaaggaggagatggaaaaggtcaaaagagagaatgctaccgttatggataaaactcgagctctgattgatagcgttatcccaaagggcgcgcaggcctgccagatttgcattacctatatatgcgaagaagactcatatttagccggtaccctaggactctcagctgacctctccaacaatggccaggtgaagccacacacaagctgtagccactatctccaatag

SEQ ID NO: 229542 - DNA, 333 bp, Artificial Sequence
  derived and/or modified sequence
atggctgacaaggtgctgaaggagaagaggaagctgttcatccgctccatgggagagggcaccatcaatggcctgctggatgagctgctgcagaccagggtgctgaacaaggaggagatggagaaggtgaagcgggagaatgccaccgtgatggacaagacccgggccctgattgacagcgtcatccccaagggggcccaggcctgccagatctgcatcacctacatctgtgaagaagattcctacctggccggcaccctgggcctgtctgctgacctgagcaacaacggccaggtgaagccccacaccagctgcagccactacctgcagtag

SEQ ID NO: 229543 - DNA, 333 bp, Artificial Sequence
  derived and/or modified sequence
atggccgacaaggtgctgaaggagaagcggaagctgttcatccggagcatgggcgagggaacaattaacgggttgcttgacgagttgttgcagaccagagtactcaacaaagaggagatggagaaggtgaagcgggagaatgccactgtcatggacaaaacacgtgccctcattgactctgtgattccaaagggggcacaggcttgccaaatttgcattacctacatttgtgaggaggactcttaccttgcaggcaccctggggctgtccgccgatttgtccaataacggccaagtgaagccacacacctcgtgcagtcactacctgcagtag

SEQ ID NO: 229544 - DNA, 333 bp, Artificial Sequence
  derived and/or modified sequence
atggcagacaaggtgctcaaggagaagagaaaactgtttatacggagtatgggcgaggggaccatcaatggtctcctcgatgagctgcttcaaacgcgggttctgaacaaagaagaaatggagaaagtcaagagggagaatgcgacagtgatggacaagacaagggccctgatcgactcggtcatccccaagggagcgcaggcctgtcagatctgtattacatacatctgcgaagaagattcttatttggccggtacgttgggactcagtgctgatctgtccaacaatgggcaagttaaacctcatacctcctgcagtcattacctgcagtag

SEQ ID NO: 229545 - DNA, 333 bp, Artificial Sequence
  derived and/or modified sequence
atggccgacaaggtgctgaaggagaagagaaagctgttcatcagaagcatgggcgagggcaccatcaacggcctgctggacgagctgctgcagaccagagtgctgaacaaggaggagatggagaaggtgaagagagagaacgccaccgtgatggacaagaccagagccctgatcgacagcgtgatccccaagggcgcccaggcctgccagatctgcatcacctacatctgcgaggaggacagctacctggccggcaccctgggcctgagcgccgacctgagcaacaacggccaggtgaagccccacaccagctgcagccactacctgcagtag

SEQ ID NO: 229546 - DNA, 294 bp, Artificial Sequence
  derived and/or modified sequence
atggccgacaaggtgctgaaggagaagagaaagctgttcatccacagcatgggcgagggcaccatcaacggcctgctggacgagctgctgcagaccagagtgctgaaccaggaggagatggagaaggtgaagagagagaacgccaccgtgatggacaagaccagagccctgatcgacagcgtgatccccaagggcgcccaggcctgccagatctgcatcacctacatctgcgaggaggacagctacctggccgagaccctgggcctgagcgccggccccatccccggcaactag

SEQ ID NO: 229547 - DNA, 294 bp, Artificial Sequence
  derived and/or modified sequence
atggctgacaaagtgctgaaagagaagcgtaagctttttatccattccatgggcgagggaaccatcaacgggcttttagatgaactgttgcagaccagagtgctgaatcaggaagaaatggaaaaggtgaaacgggagaatgccacagtcatggataaaactcgcgccctcatcgactcagtgatcccaaaaggagcgcaggcatgccaaatttgtataacctatatctgcgaagaggactcctacttggccgaaaccctgggcctatcagccggcccgatacccggcaactag

SEQ ID NO: 229548 - DNA, 294 bp, Artificial Sequence
  derived and/or modified sequence
atggctgataaggtgctgaaggaaaagcgtaaacttttcattcacagcatgggcgagggaactataaatggtctgctcgacgaactgctccagacacgggtgctgaatcaggaagagatggagaaggtgaagcgcgaaaacgcaactgtcatggacaaaacgagagctctgatcgatagcgtcattcccaaaggcgcacaggcgtgtcaaatatgcatcacatatatatgcgaggaggatagctaccttgccgaaaccctcggcctcagtgctggtcccatcccagggaattag

SEQ ID NO: 229549 - DNA, 294 bp, Artificial Sequence
  derived and/or modified sequence
atggctgacaaggtgctgaaggagaagaggaagctgttcatccacagcatgggagagggcaccatcaatggcctgctggatgagctgctgcagaccagggtgctgaaccaggaggagatggagaaggtgaagcgggagaatgccaccgtgatggacaagacccgggccctgattgacagcgtcatccccaagggggcccaggcctgccagatctgcatcacctacatctgtgaagaagattcctacctggccgagaccctgggcctgtctgctggccccatccctggcaactag

SEQ ID NO: 229550 - DNA, 294 bp, Artificial Sequence
  derived and/or modified sequence
atggccgacaaggtgctgaaggagaagcggaagctgttcatccactccatgggagagggcaccattaatggtctcctggacgagttgctgcagaccagggtcctgaatcaagaagagatggaaaaggtgaaacgggaaaatgctaccgtcatggacaaaaccagggcactgatcgattccgtgatccctaaaggggctcaagcatgccagatatgcatcacctacatttgcgaggaggattcctatctcgccgagactctgggtttgtcagctggacccatccctggtaattag

SEQ ID NO: 229551 - DNA, 294 bp, Artificial Sequence
  derived and/or modified sequence
atggccgacaaggtgctgaaggagaagcggaagctgttcatccacagtatgggcgaggggactatcaatggactgctggacgaactgctgcaaacccgggttttgaatcaggaagagatggaaaaggtgaagcgggaaaatgcaactgtgatggataagactagagccctcattgacagcgtcatacccaaaggggcccaggcttgccaaatttgcatcacctatatctgcgaagaagactcttacctggctgaaactctgggattgtccgccggcccaattccaggcaactag

SEQ ID NO: 229552 - DNA, 294 bp, Artificial Sequence
  derived and/or modified sequence
atggccgataaagtgttaaaagagaagcgcaagttattcattcatagcatgggagaaggaactattaacggcttgctagatgaacttctgcagacacgcgtgctcaaccaggaggaaatggaaaaagtcaagagggaaaacgctaccgtcatggacaagacaagagcactgatcgacagcgtaatcccaaaaggagcgcaggcatgccaaatttgcatcacctatatctgcgaggaggactcgtatcttgctgagaccctcgggctatctgcgggtccaatcccaggaaactag

SEQ ID NO: 229553 - DNA, 294 bp, Artificial Sequence
  derived and/or modified sequence
atggcagacaaagtcttgaaggaaaagagaaaactgttcatacattcaatgggagaggggacaattaatgggttgctcgatgagctgctgcagacacgcgttcttaaccaggaagaaatggagaaagttaaacgggaaaacgcaacagttatggacaagactagagctttgatagattccgtgatccccaaaggggcacaagcttgtcagatatgcatcacatatatctgcgaggaagattcctatctggccgaaacactcggtctgagcgctggacccatccccggaaactag

SEQ ID NO: 229554 - protein, 576 aa, Artificial Sequence
  derived and/or modified sequence
MAQGVLWILLGLLLWSDPGTASLPLLMDSVIQALAELEQKVPAAKTRHTASAWLMSAPNSGPHNRLYHFLLGAWSLNATELDPCPLSPELLGLTKEVARHDVREGKEYGVVLAPDGSTVAVEPLLAGLEAGLQGRRVINLPLDSMAAPWETGDTFPDVVAIAPDVRATSSPGLRDGSPDVTTADIGANTPDATKGCPDVQASLPDAKAKSPPTMVDSLLAVTLAGNLGLTFLRGSQTQSHPDLGTEGCWDQLSAPRTFTLLDPKASLLTMAFLNGALDGVILGDYLSRTPEPRPSLSHLLSQYYGAGVARDPGFRSNFRRQNGAALTSASILAQQVWGTLVLLQRLEPVHLQLQCMSQEQLAQVAANATKEFTEAFLGCPAIHPRCRWGAAPYRGRPKLLQLPLGFLYVHHTYVPAPPCTDFTRCAANMRSMQRYHQDTQGWGDIGYSFVVGSDGYVYEGRGWHWVGAHTLGHNSRGFGVAIVGNYTAALPTEAALRTVRDTLPSCAVRAGLLRPDYALLGHRQLVRTDCPGDALFDLLRTWPHFTATVKPRPARSVSKRSRREPPPRTLPATDLQ

SEQ ID NO: 229555 - DNA, 1731 bp, Artificial Sequence
  derived and/or modified sequence
atggctcagggagtcctctggatcttactcggtctgctcctctggagcgaccccggtactgcttccctccccctgttgatggactctgtaatccaagctttggccgaactggagcaaaaggttcctgccgctaaaacaagacacactgcgagtgcttggttaatgtccgctccaaactcaggtcctcacaatcgtttataccacttcttactgggggcttggtcattgaatgcaacagaattagacccctgtccactgagccccgagctgctgggcctgacgaaggaggttgcacgccatgatgttagggagggtaaggaatacggagtcgtgctggcccctgatggctctacagtcgccgtcgaacccctgctcgccggactggaagcgggattacagggccgtagggtgatcaacttgccactcgactcaatggcagccccatgggagaccggggacacgtttccagacgtcgtggctatcgcgcctgacgtgcgagctacctccagcccagggttacgggatggcagtccagatgttaccacggctgacattggggctaacacacctgacgccacgaaggggtgtcctgacgttcaggcgagtctccctgacgcgaaagctaagagtccacctacgatggtcgattctctcctagctgtcacattggctggtaacctgggacttactttcttaagaggatcccaaacccaaagccacccagatctgggcaccgaagggtgctgggaccaactcagcgcccctaggaccttcactctactcgatccgaaagcgtccctgctaactatggccttcctcaacggcgcactagatggcgtcattctcggtgattatttgagccggacacctgagcctcgaccctccctcagccacttgcttagccagtactacggagctggggtcgcccgagatcccggttttcggagcaattttcgaagacagaatggggctgctctgacctctgcctcgattttggcacagcaagtttggggcaccctggtgctgctgcagagactggaacctgtgcatctccagctacagtgcatgtcccaggaacagttggcgcaagtagcggctaatgctacaaaggagtttactgaggccttcctaggctgtcctgccatccatcctcgatgtcgttggggcgcagcaccctatcgagggaggcccaagcttctgcagctgccgctgggctttctctacgtacaccacacttatgtccctgcaccaccctgtacagacttcacccgctgtgcagctaacatgcggagcatgcaacgttaccaccaggacacacaggggtggggggatattggttactccttcgttgtgggttctgacggatacgtgtacgaggggcgaggttggcactgggtaggggctcatactcttggacataatagcagaggctttggcgtagccattgtggggaactacaccgcagccttgcccacagaggcggctcttcggacagtccgcgacaccctaccctcctgtgccgttagggccggactgttgcggcctgattacgccctgcttggccacagacaacttgtgcggactgactgccccggagacgctctgttcgacctgttgagaacgtggccccatttcacagctaccgttaagccaaggccggcacgctcagttagtaaacggagccgtcgggaacctcctccaaggaccctgcctgccacagacctgcagtag

SEQ ID NO: 229556 - DNA, 1731 bp, Artificial Sequence
  derived and/or modified sequence
atggctcagggcgtgttgtggattctgctgggactgttgttgtggtcagaccctggtacagctagtctacccctcctcatggatagcgttatacaagcacttgctgagctggaacagaaggtaccagctgctaaaacaagacatacagcctccgcttggcttatgagtgctcccaacagcggcccacacaatcgactttatcatttcttattgggggcttggtctctcaacgccactgaacttgatccatgccctctgtcacctgagctcctgggcctaactaaagaggtggcacgccatgacgttcgagaaggcaaggaatacggcgtggtgctggcccccgatggttcaacagtggccgtggagcctcttctggctgggttggaggctggcctccagggcaggcgagttattaatctgcctcttgatagtatggccgccccatgggaaactggggacacattcccggatgtggttgccattgcccccgacgtacgggccacctccagtcctggcctgcgcgatggttctcccgacgtcacaacagccgatatcggagcaaacactcctgatgccacaaaaggctgtccagatgttcaggcatccctgcccgacgccaaggcaaaatctccccctaccatggtggatagtcttctagcagtaactctagccggcaatttggggctgacttttcttcggggctctcagactcaaagtcacccagacttgggcactgaagggtgctgggaccagctctccgcgcccagaactttcacactgctagaccctaaagcatccctgttgacaatggctttcctcaacggggccctggatggcgtaattctgggcgattatctctcacgcactccagaaccccggcctagcctgagtcacctgctgagccagtattatggagcaggcgttgcacgggaccctggcttcagaagcaattttcgcagacagaacggagccgcccttacctcagccagcattctcgcacagcaagtttggggaaccctcgtcctgttgcagcgcctggaacccgttcacttacagttacaatgtatgtctcaggaacaactcgcccaggtggcggcaaacgcgacgaaagaatttaccgaggctttcctgggatgccctgccattcatccaagatgtcgctggggggccgccccttaccgtggccgcccgaagctgttacaactgccattaggatttctgtacgtgcatcatacctacgttccggcacccccatgcacagacttcactagatgtgcagccaatatgaggagcatgcagcggtaccatcaagacacccagggctggggcgatattgggtatagctttgtggtgggttcagacggctatgtctacgaaggccgaggctggcattgggtgggtgcccacactttgggtcacaacagtagagggtttggggtggctatagttggaaactacaccgcagctcttcctaccgaggcagcacttaggacagtgagggacaccctcccttcgtgcgccgtaagggccggcttgctgcgtccagattacgcactcctgggacatcgccagctcgtacggacggactgccccggggacgcgttgttcgacttattgaggacgtggcctcattttactgcaacagtaaagccgcgaccagcacgatcggtctctaagcgttccagacgtgagcctccaccaagaacactacccgcaaccgatctccaatag

SEQ ID NO: 229557 - DNA, 1731 bp, Artificial Sequence
  derived and/or modified sequence
atggcccagggcgttctatggattctgttaggattactgctgtggtctgatcctggcacggcctcccttcctttgttgatggactccgtcattcaggctttggctgagctggagcagaaggtaccagcggcgaaaacacgacataccgcttctgcctggcttatgtctgctcccaacagcggcccccataaccgtctttaccactttctgctgggcgcatggtctcttaatgccactgaactggatccttgccccctttcacccgagcttctgggcctgactaaagaagtggccagacatgacgtgcgggaaggaaaagaatacggtgttgtgcttgccccagatggctctactgttgctgtcgagcctttactcgcaggcttggaagctgggctgcagggccgtagagtgattaatcttccgcttgactcaatggcagcaccctgggagaccggtgacacgtttcccgatgttgtcgctattgccccagatgtgcgggccacatccagtccaggattgagggacggttctccagacgtcaccacagcagatattggagctaacactcctgacgctactaaaggttgcccagacgtgcaggcctcactgcctgatgctaaagccaaatctccccctacaatggtcgactcactgctggccgtcacactagcgggtaatctgggcctgacatttctcagaggcagccaaactcagtcccaccccgacctgggcaccgaaggatgctgggatcaattgagcgcccccaggacgtttacgttgctagaccctaaagcatctctgctcaccatggcttttcttaacggcgctttagacggtgtgattttaggcgattacctgtcccgtacacctgagcctaggccctccttgtctcacctgctgtcacagtactatggagctggcgttgcccgggatccaggattcaggagcaacttccggcggcaaaacggggccgccctgacatccgcaagcattcttgcccaacaggtatggggtaccctcgttctgttgcagcgtttggaacctgttcatctccaactccagtgtatgtcccaggaacaactcgcccaggttgcggcaaatgcaacaaaggaatttactgaggcctttctcggatgccctgccatccaccccagatgccggtggggtgctgccccttacagaggacgtcccaaacttcttcaactccccctcggttttttatatgtccatcacacctacgtacctgcgccaccatgtaccgactttactcgctgcgcggccaacatgaggagtatgcaacgctatcaccaggatacccagggctggggagacatcggatactcatttgtcgtcggctccgacggatatgtatatgagggcaggggatggcactgggtgggtgctcatacgcttggacacaattcacggggctttggtgttgctattgtgggtaattacacagccgcactgcccacagaagctgctctgcgcactgtaagggacacgttgcctagttgcgctgttagagccggactgctgagacctgattatgccttgctgggccatagacaactcgttcgtaccgattgcccgggcgatgctctctttgacctgctgagaacatggcctcatttcaccgccactgttaaaccaagacctgcgagatcagtcagtaagcgcagccgccgagaacctccaccaagaaccctgccggcaaccgatctgcaatag

SEQ ID NO: 229558 - DNA, 1731 bp, Artificial Sequence
  derived and/or modified sequence
atggcccagggcgtgctgtggatcctgctgggcctgctgctgtggagcgaccccggcaccgccagcctgcccctgctgatggacagcgtgatccaggccctggccgagctggagcagaaggtgcccgccgccaagaccagacacaccgccagcgcctggctgatgagcgcccccaacagcggcccccacaacagactgtaccacttcctgctgggcgcctggagcctgaacgccaccgagctggacccctgccccctgagccccgagctgctgggcctgaccaaggaggtggccagacacgacgtgagagagggcaaggagtacggcgtggtgctggcccccgacggcagcaccgtggccgtggagcccctgctggccggcctggaggccggcctgcagggcagaagagtgatcaacctgcccctggacagcatggccgccccctgggagaccggcgacaccttccccgacgtggtggccatcgcccccgacgtgagagccaccagcagccccggcctgagagacggcagccccgacgtgaccaccgccgacatcggcgccaacacccccgacgccaccaagggctgccccgacgtgcaggccagcctgcccgacgccaaggccaagagcccccccaccatggtggacagcctgctggccgtgaccctggccggcaacctgggcctgaccttcctgagaggcagccagacccagagccaccccgacctgggcaccgagggctgctgggaccagctgagcgcccccagaaccttcaccctgctggaccccaaggccagcctgctgaccatggccttcctgaacggcgccctggacggcgtgatcctgggcgactacctgagcagaacccccgagcccagacccagcctgagccacctgctgagccagtactacggcgccggcgtggccagagaccccggcttcagaagcaacttcagaagacagaacggcgccgccctgaccagcgccagcatcctggcccagcaggtgtggggcaccctggtgctgctgcagagactggagcccgtgcacctgcagctgcagtgcatgagccaggagcagctggcccaggtggccgccaacgccaccaaggagttcaccgaggccttcctgggctgccccgccatccaccccagatgcagatggggcgccgccccctacagaggcagacccaagctgctgcagctgcccctgggcttcctgtacgtgcaccacacctacgtgcccgcccccccctgcaccgacttcaccagatgcgccgccaacatgagaagcatgcagagataccaccaggacacccagggctggggcgacatcggctacagcttcgtggtgggcagcgacggctacgtgtacgagggcagaggctggcactgggtgggcgcccacaccctgggccacaacagcagaggcttcggcgtggccatcgtgggcaactacaccgccgccctgcccaccgaggccgccctgagaaccgtgagagacaccctgcccagctgcgccgtgagagccggcctgctgagacccgactacgccctgctgggccacagacagctggtgagaaccgactgccccggcgacgccctgttcgacctgctgagaacctggccccacttcaccgccaccgtgaagcccagacccgccagaagcgtgagcaagagaagcagaagagagcccccccccagaaccctgcccgccaccgacctgcagtag

SEQ ID NO: 229559 - DNA, 1731 bp, Artificial Sequence
  derived and/or modified sequence
atggcacagggggtcctatggatactgctggggctactgttgtggagcgacccaggtactgcctctctcccattgctgatggactccgtaattcaggccctggccgagctcgaacaaaaggtacccgcggctaagacccgccacacagcctctgcttggctaatgtccgcaccaaactctgggccacataatcgattgtaccacttcctgctgggcgcatggtcgctcaatgccacggaactagacccatgtcccctgtcacccgaactgctgggacttactaaggaggtggcgcggcacgatgtgcgcgaggggaaggaatacggggtggtcctggcacctgacggatctaccgtagctgttgagccattgctggcgggactagaggctggcctccagggacgaagagtgattaacctcccattagactctatggccgcgccttgggaaaccggcgacacatttcctgatgtggtcgctatcgcccctgacgtgagggctacttcatcccccgggctgcgtgatggctccccagatgttactaccgctgatatcggagccaacacaccagatgctaccaagggatgtcctgacgtacaggcatccctgccggatgctaaagcaaagagccccccaaccatggtggactctctgctggcagtcaccctggccggcaacctggggctcaccttcctgagaggcagccagacgcagtctcatccagacctggggacagaggggtgttgggatcagctgtcggcacctagaacttttacattattggatccaaaagctagcttgttaaccatggcttttctcaatggggccctcgatggcgtgatcctcggtgactatctgagtcggacgcccgagccaaggccaagcttgagccatctgctgagccagtactacggcgctggcgtagcccgcgatcctggatttcgatctaatttcagacgtcaaaacggagccgcacttactagcgcttccatattggcacagcaggtctggggaaccctcgtgttacttcaacgacttgaacctgtgcatctccaattacagtgcatgagccaggagcagctggctcaggtggctgccaacgccactaaagaattcactgaggccttcctcggatgtccagccattcatccccgatgccggtggggtgcagctccatacagaggaagaccaaaactgctccagcttcccctcggattcctgtacgtccaccacacatatgttcccgcaccgccatgcacggattttacacggtgcgcagcgaacatgcggagtatgcagcgctaccatcaggatacccaagggtggggagatatcggatatagctttgtggtgggttccgatgggtacgtgtatgaaggacgcggatggcattgggtgggtgcccacactcttggccataacagccggggcttcggggtcgcaatcgtcgggaactataccgctgccttaccaacagaggctgctcttaggactgtgcgggacaccctgccttcatgcgctgtaagggccggactattgcgccctgactacgccctcctcgggcatagacagcttgtgcggacagattgtccaggtgacgccctctttgatctgctacggacatggccccacttcacagccacggttaagccacgccctgcacgctccgtgagcaagaggtcccggcgtgagcctcctcctcggacactacccgccaccgacttgcaatag

SEQ ID NO: 229560 - DNA, 2230 bp, Artificial Sequence
  derived and/or modified sequence
gcttctctcctctccctcaacacagccggtcttaccagtacagcaggcggcagctgagagtcccctctggtggccagcagcggctacagagccgtcactatggggagggacaggacttgaggggttgcctcggtccacctcactggagaatgggcagagtttatggagtctgaaccacctggtctccaggcccctctggggatgggcctggcttactgaccactgacctcagcctaggagggacagaagagactgggggagaccaggatgcccagatgaccttgacccagggtacgctgccccatgtccctgctgcctcccgcccacagctctacgagaggcaggtctgtcattcgccgctggactttgacagtggtcaaaggctctgctcagttctctgtgcctgtctccctccagcactgccgaggttctctgccgaggccaaccagaaataccccttggaagctggaatcctgcaacaatggcccagggtgtcctctggatcctactcggattgctactgtggtcagacccagggacagcctccctgcccctgctcatggactctgtcatccaggccctggctgagctggagcagaaagtgccagctgccaagaccagacacacagcttctgcgtggctgatgtcagctccaaactctggcccccacaatcgcctctaccacttcctgctgggggcatggagcctcaatgctacagagttggatccctgcccactaagcccagagctgttaggcctgaccaaggaggtggcccgacatgacgtacgagaagggaaggaatatggggtggtgctggcacctgatggctcgaccgtggctgtggagcctctgctggcggggctggaggcagggctgcaagggcgcagggtcataaatttgcccttggacagcatggctgccccttgggagactggagatacctttccagatgttgtggccattgctccagatgtaagagccacctcctccccaggactcagggatggctctccagatgtcaccactgcagatattggagccaacactccagatgctacaaaaggctgtccagatgtccaagcttccttgccagatgccaaagccaagtccccaccgaccatggtggacagcctcctggcagtcaccctggctggaaacctgggcctgaccttcctccgaggttcccagacccagagccatccagacctgggaactgagggctgctgggaccagctctctgcccctcggacctttacgcttttggaccccaaggcatctctgttaaccatggccttcctcaatggcgccctggatggggtcatccttggagactacctgagccggactcctgagccccggccatccctcagccacttgctgagccagtactatggggctggggtggccagagacccagggttccgcagcaacttccgacggcagaacggtgctgctctgacttcagcctccatcctggcccagcaggtgtggggaacccttgtccttctacagaggctggagccagtacacctccagcttcagtgcatgagccaagaacagctggcccaggtggctgccaatgctaccaaggaattcactgaggccttcctgggatgcccggccatccacccccgctgccgctggggagcggcgccttatcggggccgcccgaagctgctgcagctgccgctgggattcttgtacgtgcatcacacctacgtgcctgcaccaccctgcacggacttcacgcgctgcgcagccaacatgcgctccatgcagcgctaccaccaggacacgcaaggctggggagacatcggctacagtttcgtggtgggctcggacggctacgtgtacgagggacgcggctggcactgggtgggcgcccacacgctcggccacaactcccggggcttcggcgtggccatagtgggcaactacaccgcggcgctgcccaccgaggccgctctgcgcacggtgcgcgacacgctcccgagttgtgcggtgcgcgccggcctcctgcggccagactacgcgctgctgggccaccgccagctggtgcgcaccgactgccccggcgacgcgctcttcgacctgctgcgcacctggccgcacttcaccgcgactgttaagccaagacctgccaggagtgtctctaagagatccaggagggagccacccccaaggaccctgccagccacagacctccaataaagacagcatggaaacaaa

SEQ ID NO: 229561 - DNA, 1731 bp, Artificial Sequence
  derived and/or modified sequence
atggcccagggcgtgctgtggatcctgctgggcctgctgctgtggagcgaccccggcacagccagcctgcccctgctgatggattctgtcatccaggccctggccgagctggagcagaaggtgcctgctgccaagaccaggcacacagccagcgcctggctgatgtctgcccccaacagcggcccccacaaccggctgtaccacttcctgctgggcgcctggagcctgaatgccacagagctggacccctgccccctgagccctgagctgctgggcctgaccaaggaggtggcccggcatgatgtgcgggagggcaaggagtatggagtggtgctggccccagatggcagcacagtggccgtggagcccctgctggccggcctggaggccggcctgcagggcagaagagtcatcaacctgcccctggacagcatggccgccccctgggagactggagacaccttcccagatgtggtggccatcgccccagatgtgcgggccaccagcagccctggcctgagagatggcagcccagatgtgaccacagctgacattggagccaacaccccagatgccaccaagggctgcccagatgtgcaggccagcctgcctgatgccaaggccaagagcccccccaccatggtggacagcctgctggccgtgaccctggccggcaacctgggcctgaccttcctgcggggcagccagacccagagccacccagacctgggcacagagggctgctgggaccagctgagcgcccccaggaccttcaccctgctggaccccaaggccagcctgctgaccatggccttcctgaatggagccctggatggagtcatcctgggggactacctgagcaggaccccagagccccggcccagcctgagccacctgctgagccagtactacggggccggcgtggcccgggaccccggcttccgcagcaacttccggcggcagaatggagctgccctgaccagcgccagcatcctggcccagcaggtgtggggcaccctggtgctgctgcagaggctggagcctgtgcacctgcagctgcagtgcatgagccaggagcagctggcccaggtggccgccaatgccaccaaggagttcacagaggccttcctgggctgcccagccatccacccccgctgccgctggggcgccgccccctaccggggccggcccaagctgctgcagctgcccctgggcttcctgtatgtgcaccacacctacgtgcctgccccaccctgcacagacttcacccgctgtgccgccaacatgaggtccatgcagcgctaccaccaggacacccagggctggggagacatcggctacagctttgtggtgggcagtgatggctacgtgtatgagggccggggctggcactgggtgggcgcccacaccctgggccacaacagccggggcttcggcgtggccatcgtgggcaactacacagctgccctgcccacagaggccgccctgaggacagtgcgggacaccctgcccagctgtgctgtgcgggccggcctgctgcggccagactatgccctgctgggccaccggcagctggtgaggacagactgccctggagatgccctgtttgacctgctgcggacctggccccacttcaccgccaccgtgaagcccaggcctgcccggtctgtgtccaagaggagccggcgggagcccccacccaggaccctgcctgccacagacctgcagtag

SEQ ID NO: 229562 - DNA, 1731 bp, Artificial Sequence
  derived and/or modified sequence
atggcccagggcgtgctgtggatcctgctgggcctgctgctgtggtctgatcccgggactgcaagcctgcctctactgatggattcggtaatacaggctctggcggagctcgagcagaaagtccccgccgcaaagacccggcacaccgccagtgcttggctgatgagtgcccctaacagcggcccccacaataggctttatcattttctattgggcgcctggagccttaacgcaaccgagttagatccctgtcctctgagtcccgagcttctgggcctcacaaaagaggtcgcaaggcatgacgtgcgcgagggtaaagagtatggggttgtgctggccccagatgggagtactgtggccgtcgaacccttgctggccggcctggaagccggtctgcagggccgaagggtcattaacctgcccctcgacagcatggctgctccttgggagactggggacaccttccctgatgtggtggcaatcgccccagatgttcgcgccacatctagccccggccttagagatggaagtcccgacgtcactaccgccgatattggtgccaatacacccgatgcaaccaaggggtgtccagacgttcaggcgtccctgcccgacgccaaggccaagagtcccccaacaatggtggacagcctcctggcagtcacccttgccggcaatctgggtctaacttttctacgcggtagccagacacagagccaccccgacttgggaactgaggggtgttgggaccagctgtcagcccccaggaccttcaccctgttggaccctaaagcctccctgctgactatggcattcctaaacggagccctcgacggagtgatcctgggcgactacctgtctcggactccagaacctcggccaagcctcagtcaccttctgtctcagtattatggcgccggggtggcacgcgacccgggctttcgctcaaactttcgacgccaaaacggtgctgcactgacctccgccagcatcctggcccaacaggtgtggggaacactggttctccttcagaggctggagcctgtacaccttcagctccagtgcatgtcccaggagcaattggcgcaggtggccgctaacgccaccaaggagttcactgaggcttttttaggctgccctgctatccacccacgatgccggtggggcgcagccccctatcgcgggagacccaagcttttacaattaccattaggattcctttacgtacaccatacgtacgtcccagcgcctccgtgcactgacttcaccagatgtgcagcgaatatgagatctatgcagaggtatcatcaggacacccaaggatggggagacatcgggtattcttttgtggtcggaagtgacggatacgtatacgaagggaggggttggcattgggtgggtgcccataccctcggtcataattctcgcggattcggggtagccatcgtgggtaattatacagccgcccttcctacagaggccgccctgcggactgttcgggacacactgccaagctgtgctgttcgtgccggattattacggcccgactacgccctcctgggtcacaggcagctggtcagaaccgattgccccggggacgccctattcgaccttctccgtacttggcctcattttaccgcgaccgtgaaacccaggcctgctcgcagtgtttccaaacggtccagaagggagccccctcccagaaccctgcctgccactgatctgcagtag

SEQ ID NO: 229563 - RNA, 1731 nt, Artificial Sequence
  derived and/or modified sequence
auggcucagggcguguuguggauucugcugggacuguuguuguggucagacccugguacagcuagucuaccccuccucauggauagcguuauacaagcacuugcugagcuggaacagaagguaccagcugcuaaaacaagacauacagccuccgcuuggcuuaugagugcucccaacagcggcccacacaaucgacuuuaucauuucuuauugggggcuuggucucucaacgccacugaacuugauccaugcccucugucaccugagcuccugggccuaacuaaagagguggcacgccaugacguucgagaaggcaaggaauacggcguggugcuggcccccgaugguucaacaguggccguggagccucuucuggcuggguuggaggcuggccuccagggcaggcgaguuauuaaucugccucuugauaguauggccgccccaugggaaacuggggacacauucccggaugugguugccauugcccccgacguacgggccaccuccaguccuggccugcgcgaugguucucccgacgucacaacagccgauaucggagcaaacacuccugaugccacaaaaggcuguccagauguucaggcaucccugcccgacgccaaggcaaaaucucccccuaccaugguggauagucuucuagcaguaacucuagccggcaauuuggggcugacuuuucuucggggcucucagacucaaagucacccagacuugggcacugaagggugcugggaccagcucuccgcgcccagaacuuucacacugcuagacccuaaagcaucccuguugacaauggcuuuccucaacggggcccuggauggcguaauucugggcgauuaucucucacgcacuccagaaccccggccuagccugagucaccugcugagccaguauuauggagcaggcguugcacgggacccuggcuucagaagcaauuuucgcagacagaacggagccgcccuuaccucagccagcauucucgcacagcaaguuuggggaacccucguccuguugcagcgccuggaacccguucacuuacaguuacaauguaugucucaggaacaacucgcccagguggcggcaaacgcgacgaaagaauuuaccgaggcuuuccugggaugcccugccauucauccaagaugucgcuggggggccgccccuuaccguggccgcccgaagcuguuacaacugccauuaggauuucuguacgugcaucauaccuacguuccggcacccccaugcacagacuucacuagaugugcagccaauaugaggagcaugcagcgguaccaucaagacacccagggcuggggcgauauuggguauagcuuugugguggguucagacggcuaugucuacgaaggccgaggcuggcauugggugggugcccacacuuugggucacaacaguagaggguuugggguggcuauaguuggaaacuacaccgcagcucuuccuaccgaggcagcacuuaggacagugagggacacccucccuucgugcgccguaagggccggcuugcugcguccagauuacgcacuccugggacaucgccagcucguacggacggacugccccggggacgcguuguucgacuuauugaggacguggccucauuuuacugcaacaguaaagccgcgaccagcacgaucggucucuaagcguuccagacgugagccuccaccaagaacacuacccgcaaccgaucuccaauag

SEQ ID NO: 229564 - RNA, 1731 nt, Artificial Sequence
  derived and/or modified sequence
auggcccagggcguucuauggauucuguuaggauuacugcuguggucugauccuggcacggccucccuuccuuuguugauggacuccgucauucaggcuuuggcugagcuggagcagaagguaccagcggcgaaaacacgacauaccgcuucugccuggcuuaugucugcucccaacagcggcccccauaaccgucuuuaccacuuucugcugggcgcauggucucuuaaugccacugaacuggauccuugcccccuuucacccgagcuucugggccugacuaaagaaguggccagacaugacgugcgggaaggaaaagaauacgguguugugcuugccccagauggcucuacuguugcugucgagccuuuacucgcaggcuuggaagcugggcugcagggccguagagugauuaaucuuccgcuugacucaauggcagcacccugggagaccggugacacguuucccgauguugucgcuauugccccagaugugcgggccacauccaguccaggauugagggacgguucuccagacgucaccacagcagauauuggagcuaacacuccugacgcuacuaaagguugcccagacgugcaggccucacugccugaugcuaaagccaaaucucccccuacaauggucgacucacugcuggccgucacacuagcggguaaucugggccugacauuucucagaggcagccaaacucagucccaccccgaccugggcaccgaaggaugcugggaucaauugagcgcccccaggacguuuacguugcuagacccuaaagcaucucugcucaccauggcuuuucuuaacggcgcuuuagacggugugauuuuaggcgauuaccugucccguacaccugagccuaggcccuccuugucucaccugcugucacaguacuauggagcuggcguugcccgggauccaggauucaggagcaacuuccggcggcaaaacggggccgcccugacauccgcaagcauucuugcccaacagguaugggguacccucguucuguugcagcguuuggaaccuguucaucuccaacuccaguguaugucccaggaacaacucgcccagguugcggcaaaugcaacaaaggaauuuacugaggccuuucucggaugcccugccauccaccccagaugccgguggggugcugccccuuacagaggacgucccaaacuucuucaacucccccucgguuuuuuauauguccaucacaccuacguaccugcgccaccauguaccgacuuuacucgcugcgcggccaacaugaggaguaugcaacgcuaucaccaggauacccagggcuggggagacaucggauacucauuugucgucggcuccgacggauauguauaugagggcaggggauggcacugggugggugcucauacgcuuggacacaauucacggggcuuugguguugcuauuguggguaauuacacagccgcacugcccacagaagcugcucugcgcacuguaagggacacguugccuaguugcgcuguuagagccggacugcugagaccugauuaugccuugcugggccauagacaacucguucguaccgauugcccgggcgaugcucucuuugaccugcugagaacauggccucauuucaccgccacuguuaaaccaagaccugcgagaucagucaguaagcgcagccgccgagaaccuccaccaagaacccugccggcaaccgaucugcaauag

SEQ ID NO: 229565 - protein, 414 aa, Artificial Sequence
  derived and/or modified sequence
MLGALPLPLSLGQPPPSPLLNHSLFGVLTGGGGQPPPEPLLPPPGGPGPPLAPGEPEGPSLLVASLLPPPPSDLLPPPSAPPSNLLASFLPLLALGPTAGDGEGSAEGAGGPSGEPFSGLGDLSPLLFPPLSAPPTLIALNSALLAATLDPPSGTPPQPCVLSAPQPGPPTSSVTTATTDPGASSLGKAPSNSGRPPQLLSPLLGASLLGDLSSLTSSPGALPSLLQPPGPLLSGQLGLQLLPGGGAPPPLSEASSPLACLLQSLQIPPEQPEAPCLPPESPASALEPEPARPPLSALAPPHGSPDPPVPELLTGRGSGKRGRRGGGGLRGINGEARPARGRKPGSRREPGRLALKWGTRGGFNGQMERQEEPTIGSIMGSWLKGVLSPRIHPLPGPILRTLRCPSSQKVSSWP

SEQ ID NO: 229566 - protein, 1003 aa, Artificial Sequence
  derived and/or modified sequence
MNGGNESSGADRAGGPVATSVPIGWQRCVREGAVLYISPSGTELSSLEQTRSYLLSDGTCKCGLECPLNVPKVFNFDPLAPVTPGGAGVGPASEEDMTKLCNHRRKAVAMATLYRSMETTCSHSSPGEGASPQMFHTVSPGPPSARPPCRVPPTTPLNGGPGSLPPEPPSVSQAFPTLAGPGGLFPPRLADPVPSGGSSSPRFLPRGNAPSPAPPPPPAISLNAPSYNWGAALRSSLVPSDLGSPPAPHASSSPPSDPPLFHCSDALTPPPLPPSNNLPAHPGPASQPPVSSATMHLPLVLGPLGGAPTVEGPGAPPFLASSLLSAAAKAQHPPLPPPSTLQGRRPRAQAPSASHSSSLRPSQRRPRRPPTVFRLLEGRGPQTPRRSRPRAPAPVPQPFSLPEPSQPILPSVLSLLGLPTPGPSHSDGSFNLLGSDAHLPPPPTLSSGSPPQPRHPIQPSLPGTTSGSLSSVPGAPAPPAASKAPVVPSPVLQSPSEGLGMGAGPACPLPPLAGGEAFPFPSPEQGLALSGAGFPGMLGALPLPLSLGQPPPSPLLNHSLFGVLTGGGGQPPPEPLLPPPGGPGPPLAPGEPEGPSLLVASLLPPPPSDLLPPPSAPPSNLLASFLPLLALGPTAGDGEGSAEGAGGPSGEPFSGLGDLSPLLFPPLSAPPTLIALNSALLAATLDPPSGTPPQPCVLSAPQPGPPTSSVTTATTDPGASSLGKAPSNSGRPPQLLSPLLGASLLGDLSSLTSSPGALPSLLQPPGPLLSGQLGLQLLPGGGAPPPLSEASSPLACLLQSLQIPPEQPEAPCLPPESPASALEPEPARPPLSALAPPHGSPDPPVPELLTGRGSGKRGRRGGGGLRGINGEARPARGRKPGSRREPGRLALKWGTRGGFNGQMERSPRRTHHWQHNGELAEGGAEPKDPPPPGPHSEDLKVPPGVVRKSRRGRRRKYNPTRNSNSSRQDITLEPSPTARAAVPLPPRARPGRPAKNKRRKLAP

SEQ ID NO: 229567 - protein, 53 aa, Artificial Sequence
  derived and/or modified sequence
MNGGNESSGADRAGGPVATSVPIGWQRCVREGAVLYISPSGTELSSLEQTRSY

SEQ ID NO: 229568 - protein, 73 aa, Artificial Sequence
  derived and/or modified sequence
MNGGNESSGADRAGGPVATSVPIGWQRCVREGAVLYISPSGTELSSLEQTRSYLLSDGTCKCGLECPLNVPKV

SEQ ID NO: 229569 - protein, 148 aa, Artificial Sequence
  derived and/or modified sequence
MNGGNESSGADRAGGPVATSVPIGWQRCVREGAVLYISPSGTELSSLEQTRSYLLSDGTCKCGLECPLNVPKVFNFDPLAPVTPGGAGVGPASEEDMTKLCNHRRKAVAMATLYRSMETTCSHSSPGEGASPQMFHTVSPGPPSARPP

SEQ ID NO: 229570 - protein, 45 aa, Artificial Sequence
  derived and/or modified sequence
MNGGNESSGADRAGGPVATSVPIGWQRCVREGAVLYISPSGTELS

SEQ ID NO: 229571 - protein, 650 aa, Artificial Sequence
  derived and/or modified sequence
MAAKSDGRLKMKKSSDVAFTPLQNSDHSGSVQGLAPGLPSGSGAEDEEAAGGGCCPDGGGCSRCCCCCAGSGGSAGSGGSGGVAGPGGGGAGSAALCLRLGREQRRYSLWDCLWILAAVAVYFADVGTDVWLAVDYYLRGQRWWFGLTLFFVVLGSLSVQVFSFRWFVHDFSTEDSATAAAASSCPQPGADCKTVVGGGSAAGEGEARPSTPQRQASNASKSNIAAANSGSNSSGATRASGKHRSASCSFCIWLLQSLIHILQLGQIWRYFHTIYLGIRSRQSGENDRWRFYWKMVYEYADVSMLHLLATFLESAPQLVLQLCIIVQTHSLQALQGFTAAASLVSLAWALASYQKALRDSRDDKKPISYMAVIIQFCWHFFTIAARVITFALFASVFQLYFGIFIVLHWCIMTFWIVHCETEFCITKWEEIVFDMVVGIIYIFSWFNVKEGRTRCRLFIYYFVILLENTALSALWYLYKAPQIADAFAIPALCVVFSSFLTGVVFMLMYYAFFHPNGPRFGQSPSCACEDPAAAFTLPPDVATSTLRSISNNRSVVSDRDQKFAERDGCVPVFQVRPTAPSTPSSRPPRIEESVIKIDLFRNRYPAWERHVLDRSLRKAILAFECSPSPPRLQYKDDALIQERLEYETTL

SEQ ID NO: 229572 - DNA, 1953 bp, Artificial Sequence
  derived and/or modified sequence
atggccgccaagagcgacggcagactgaagatgaagaagagcagcgacgtggccttcacccccctgcagaacagcgaccacagcggcagcgtgcagggcctggcccccggcctgcccagcggcagcggcgccgaggacgaggaggccgccggcggcggctgctgccccgacggcggcggctgcagcagatgctgctgctgctgcgccggcagcggcggcagcgccggcagcggcggcagcggcggcgtggccggccccggcggcggcggcgccggcagcgccgccctgtgcctgagactgggcagagagcagagaagatacagcctgtgggactgcctgtggatcctggccgccgtggccgtgtacttcgccgacgtgggcaccgacgtgtggctggccgtggactactacctgagaggccagagatggtggttcggcctgaccctgttcttcgtggtgctgggcagcctgagcgtgcaggtgttcagcttcagatggttcgtgcacgacttcagcaccgaggacagcgccaccgccgccgccgccagcagctgcccccagcccggcgccgactgcaagaccgtggtgggcggcggcagcgccgccggcgagggcgaggccagacccagcaccccccagagacaggccagcaacgccagcaagagcaacatcgccgccgccaacagcggcagcaacagcagcggcgccaccagagccagcggcaagcacagaagcgccagctgcagcttctgcatctggctgctgcagagcctgatccacatcctgcagctgggccagatctggagatacttccacaccatctacctgggcatcagaagcagacagagcggcgagaacgacagatggagattctactggaagatggtgtacgagtacgccgacgtgagcatgctgcacctgctggccaccttcctggagagcgccccccagctggtgctgcagctgtgcatcatcgtgcagacccacagcctgcaggccctgcagggcttcaccgccgccgccagcctggtgagcctggcctgggccctggccagctaccagaaggccctgagagacagcagagacgacaagaagcccatcagctacatggccgtgatcatccagttctgctggcacttcttcaccatcgccgccagagtgatcaccttcgccctgttcgccagcgtgttccagctgtacttcggcatcttcatcgtgctgcactggtgcatcatgaccttctggatcgtgcactgcgagaccgagttctgcatcaccaagtgggaggagatcgtgttcgacatggtggtgggcatcatctacatcttcagctggttcaacgtgaaggagggcagaaccagatgcagactgttcatctactacttcgtgatcctgctggagaacaccgccctgagcgccctgtggtacctgtacaaggccccccagatcgccgacgccttcgccatccccgccctgtgcgtggtgttcagcagcttcctgaccggcgtggtgttcatgctgatgtactacgccttcttccaccccaacggccccagattcggccagagccccagctgcgcctgcgaggaccccgccgccgccttcaccctgccccccgacgtggccaccagcaccctgagaagcatcagcaacaacagaagcgtggtgagcgacagagaccagaagttcgccgagagagacggctgcgtgcccgtgttccaggtgagacccaccgcccccagcacccccagcagcagaccccccagaatcgaggagagcgtgatcaagatcgacctgttcagaaacagataccccgcctgggagagacacgtgctggacagaagcctgagaaaggccatcctggccttcgagtgcagccccagcccccccagactgcagtacaaggacgacgccctgatccaggagagactggagtacgagaccaccctgtag

SEQ ID NO: 229573 - DNA, 1953 bp, Artificial Sequence
  derived and/or modified sequence
atggctgccaagtctgacggacgtctgaagatgaagaagtctagcgacgtggcctttacacctctgcagaatagcgaccattcaggtagtgtgcagggcctggctcccggtcttccttcaggaagcggtgcagaggacgaggaggcagctgggggcggttgttgtccagacgggggaggatgttcccggtgctgctgttgctgtgctggctccggcgggagcgctggatccggtgggtcaggtggcgtcgcagggcccgggggaggaggcgccggctctgccgctttgtgcctgcggctaggccgcgaacagcgacgctacagcctctgggattgtctctggatcctcgcggcagtggcagtatattttgcggacgtcggcacagatgtgtggctcgctgtagactactatctgcggggtcaacggtggtggttcgggttgacactgttcttcgtcgtgctggggtcgctgtctgtgcaagtgttcagcttccgttggtttgtccacgatttctcgactgaggattccgctaccgccgcggcagcatctagctgtcctcagcccggcgcagactgcaaaaccgtcgtgggaggtggctccgctgcaggggagggcgaagccagacctagcacccctcagagacaggccagcaacgcctcaaagtccaacatcgcggccgctaattcaggcagtaattcgtcgggagcgactagagcttcaggtaagcatcggtcagccagttgttctttctgtatatggttgctgcagagcctgatccacattctgcagttgggtcagatctggagatactttcatactatctatttaggaatccgctcccggcaatctggagagaatgataggtggcgcttctattggaagatggtatatgaatacgctgatgtcagcatgctgcatctacttgcgaccttcttggaatccgcaccacagctggtattgcagctgtgtattatcgttcagacccattcgctgcaggcactgcaggggtttactgctgcggcctcccttgtgtctcttgcttgggcactcgcctcctaccagaaggccttaagagatagccgagacgacaaaaagccgatctcttatatggctgtgatcattcagttctgttggcatttcttcactatcgctgctcgggtgatcaccttcgcattgtttgcttccgtctttcagctttacttcggaatattcatcgtgctccactggtgcattatgacattttggatcgtacattgcgagaccgagttttgtatcaccaagtgggaagaaatcgtgtttgatatggtggttggcatcatatatatcttctcatggtttaatgtgaaagagggacggacccggtgtagacttttcatttactatttcgttatactcctggaaaatacagctctaagtgcactttggtacctttataaggcaccccagatcgccgacgcattcgcaatcccagccttgtgtgtcgtattctctagctttctgactggggttgtttttatgctgatgtactacgctttctttcacccaaacggacctcgtttcggccagtcccccagctgcgcttgtgaagatcctgccgccgctttcactctcccccctgatgtggccacatcaacccttcggtctattagcaacaacagaagcgtggtgtcagaccgggaccagaagttcgccgaacgcgacggctgtgtgcctgtctttcaagtccgacctactgccccctctacccccagttcaaggcccccccgcatcgaggagtccgtgatcaaaatcgatctgttcaggaaccgataccctgcatgggaacgccatgtcttagatcggagtctgcgcaaagctatactcgcgttcgagtgtagcccttcccctccgagactccagtataaagatgatgcgctgattcaggaaagactggaatatgagaccactctgtag

SEQ ID NO: 229574 - DNA, 1953 bp, Artificial Sequence
  derived and/or modified sequence
atggcggccaaatcggatggaaggctcaaaatgaaaaaatcctcagacgttgctttcacccccctacaaaactccgatcactccggtagcgtgcaggggctggcacctggcttaccctccggttccggcgcagaggacgaagaagccgctggcggagggtgctgccctgatggcggcggttgctcacgttgctgttgttgttgtgctggatcagggggtagcgcaggttcaggcggatccggtggtgtcgccgggcctgggggcgggggagccgggagcgcagccctctgcctcagacttggccgagaacagcgccggtatagtctctgggactgcctatggatcctggccgctgtcgccgtttacttcgctgacgtgggcactgatgtgtggctcgctgtagattactatctccgaggccagcgatggtggtttggcctcacgttgttttttgtggtgctcgggagcctctcagtccaggtgttttccttcagatggttcgtgcatgatttctctacagaagactccgctactgcagcagctgcctcgagctgtccacagccaggagcagactgtaagaccgtggtcggggggggctccgccgcaggggaaggtgaagctcgaccgtctactccacaacgtcaggcaagcaacgcatctaagtccaacatcgcagcggccaactccgggagcaatagttctggggcaactcgagcgtcagggaaacaccggtctgctagttgttctttttgtatatggcttttgcagagcttgatccacatcctgcagttaggtcagatttggagatactttcatactatttacctgggaattaggtcccgacagagcggcgagaacgacaggtggagattttattggaagatggtgtacgagtacgctgacgtctctatgctccacctccttgcaacttttctcgagtcagctccacagctggttttgcagttgtgcatcatagtccagacccacagcctccaggccctgcagggctttactgctgctgccagcctagtatctctagcttgggctcttgcttcatatcagaaggctctgagagattctagagatgataaaaagcccattagttatatggcggtaattatacaattttgttggcacttcttcaccattgctgcaagggtgataactttcgcgcttttcgcatccgtcttccaactgtacttcgggatctttatcgttctccactggtgcattatgactttttggattgtgcactgtgaaacagagttctgcatcacgaaatgggaggagatcgtgtttgatatggtggtgggaatcatttacatctttagctggtttaatgttaaggaaggcagaacccgatgccgactcttcatctactactttgtgatcctacttgaaaataccgctcttagtgcactctggtatctgtataaagcccctcagattgctgatgcttttgccatccctgctctctgtgtggtcttctcatcgtttctgacaggtgtggtattcatgctgatgtattatgcattcttccatccaaatggtccgcgcttcgggcagtctccgtcctgtgcttgcgaggaccccgctgctgcatttactctgccccccgatgtggcgacgagcacgctccggtctattagcaacaacagatccgtagtgtccgacagggaccagaaattcgctgaacgcgacggctgcgtcccagtttttcaagtgcgacctaccgccccttcaaccccttctagccggcctccacgaatcgaggagtccgtgattaaaatcgacttgtttagaaaccggtacccagcatgggaaagacatgtattggatcgatccctgcgcaaggctatattagcgtttgaatgtagcccctccccaccgcggcttcagtataaggacgacgcactcattcaagaaaggctggagtatgaaacaactctatag

SEQ ID NO: 229575 - DNA, 1953 bp, Artificial Sequence
  derived and/or modified sequence
atggccgccaagagtgatggccgcctgaagatgaagaagagcagtgatgtggccttcacccccctgcagaacagcgaccacagcggctctgtgcagggcctggcccctggcctgcccagcggcagcggggctgaagatgaggaggccgccggcggcggctgctgcccagatggcggcggctgcagccgctgctgctgctgctgtgccggcagcggcggcagcgctggcagcggcggcagcggcggcgtggccggccctgggggcggcggggccggcagcgctgccctgtgcctgcggctgggccgggagcagaggcgctacagcctgtgggactgcctgtggatcctggccgctgtggccgtgtactttgctgatgtgggcacagatgtgtggctggccgtggactactacctgcggggccagcgctggtggtttggcctgaccctcttctttgtggtgctgggcagcctgtctgtgcaggtgttctccttccgctggtttgtgcatgacttcagcacagaggacagcgccacagctgctgctgccagcagctgcccccagcccggggctgactgcaagacagtggtgggcggcggcagcgctgctggggagggggaggcccggcccagcaccccccagaggcaggccagcaatgccagcaagagcaacattgctgctgccaacagcggcagcaacagcagcggggccacccgggccagcggcaagcacaggtctgccagctgcagcttctgcatctggctgctgcagagcctcatccacatcctgcagctgggccagatctggagatacttccacaccatctacctgggcatccgcagccggcagagcggagaaaatgaccgctggaggttctactggaagatggtgtatgaatatgcagatgtgtccatgctgcacctgctggccaccttcctggagagcgccccccagctggtgctgcagctgtgcatcatcgtgcagacccacagcctgcaggccctgcagggcttcaccgctgctgccagcctggtgtccctggcctgggccctggccagctaccagaaggccctgcgggacagcagagatgacaagaagcccatctcctacatggctgtgatcatccagttctgctggcacttcttcaccatcgccgcccgggtcatcacctttgccctgtttgcctctgtgttccagctgtacttcggcatcttcatcgtgctgcactggtgcatcatgaccttctggatcgtgcactgtgaaacagagttctgcatcaccaagtgggaggagatcgtgtttgacatggtggtgggcatcatctacatcttctcctggttcaacgtgaaggagggccgcacccgctgccgcctcttcatctactacttcgtcatcctgctggagaacacagccctgagcgccctgtggtacctgtacaaggccccccagattgctgatgcctttgccatcccagccctgtgtgtggtgttcagcagcttcctgactggagtggtgttcatgctgatgtactatgccttcttccaccccaacggcccccgcttcggccagagccccagctgtgcctgtgaagatcctgctgctgccttcaccctgcccccagatgtggccaccagcaccctgcggagcatcagcaacaacagatctgtggtgtctgaccgggaccagaagtttgctgagagagatggctgtgtgcctgtgttccaggtgcggcccacagcccccagcacccccagcagcaggcctccccgcatcgaggagagcgtcatcaagattgacctcttcaggaaccgctacccagcctgggagcggcacgtgctggacaggagcctgaggaaggccatcctggcctttgagtgcagccccagccccccccggctgcagtacaaggatgatgccctgatccaggagcggctggagtatgagaccaccctgtag

SEQ ID NO: 229576 - DNA, 1953 bp, Artificial Sequence
  derived and/or modified sequence
atggccgccaagagcgacggccggctgaagatgaagaagagcagcgatgtcgctttcactccgttacagaacagcgaccactctggttcagtccagggccttgcccccggcctcccctccgggagcggcgcagaggacgaagaggcagctggcggcggatgttgtcctgatggggggggatgttccagatgttgctgctgctgcgcagggtccggcgggtccgcaggctctggcgggtcaggtggagtggcagggcccgggggtggaggggcaggttctgcagcactgtgtttgagactggggcgggaacaaaggaggtacagtctgtgggactgtctttggattcttgcagccgttgccgtgtactttgccgatgttggcaccgacgtatggctcgctgtcgactactaccttagagggcagagatggtggtttgggctaacactcttcttcgtggttctgggaagcctcagtgtacaagttttcagctttaggtggttcgtgcacgatttttccaccgaggattccgctaccgctgctgctgcgtctagctgcccacaaccgggggccgactgcaagaccgtagtgggcggagggtccgccgcaggtgaaggtgaggctagaccaagtacccctcaacgtcaggcatccaacgcatcaaagagcaatattgccgctgccaactcagggtcaaactcgtccggagccacccgggcttccggtaaacatcggtcggcctcgtgtagcttctgtatctggctgttgcagtctctaattcacattttgcagcttggccagatttggagatattttcataccatttatttgggcatcaggagtcggcagagcggagagaatgatcggtggcgcttttactggaaaatggtctacgagtatgccgatgtgtccatgctgcatctgttagccacgtttctcgaaagcgcccctcagctcgtgctgcaactgtgtatcatcgttcagactcattccttacaggcgctccagggattcaccgccgctgcatctttagtaagtctcgcgtgggctctggcttcataccagaaagcccttcgtgacagccgggacgataaaaaaccaatcagctacatggccgtaatcattcagttctgttggcatttctttacaatcgctgccagagtaatcacattcgccctgtttgccagcgtgtttcagctgtattttggaatttttatcgtcctccactggtgtattatgactttctggatcgtgcactgtgaaaccgagttttgtattacgaaatgggaggaaatcgtgttcgacatggtagttggcattatctacattttcagttggtttaatgtcaaggagggccggacccggtgtcgcttgttcatctattacttcgtcattctgctggaaaatacggctctgtcggcactgtggtatttatacaaggccccacaaattgcggatgccttcgctattccagccctctgtgtcgtgttttcttcctttttaaccggtgtcgttttcatgctcatgtattacgctttttttcaccctaacgggccccggtttggacagagtcctagttgtgcttgcgaagacccggctgcagccttcactcttccaccggacgtcgccacatcgacgctccgatctatctcaaacaaccgctcagtggtctccgatagggaccagaaatttgccgaacgagatggatgcgtcccagtcttccaggtgaggcccactgccccctccaccccttcctcaagaccacccaggattgaggagagcgttattaaaatagacctgttccgaaatagatacccagcctgggaacgccatgttctggaccggtctctgcgcaaggcgatccttgccttcgaatgcagtccctcacccccgcgactgcagtataaggacgacgcactgattcaggagcgcctggagtatgagaccaccctgtag

SEQ ID NO: 229577 - DNA, 1953 bp, Artificial Sequence
  derived and/or modified sequence
atggccgccaagagcgacggccggctgaagatgaagaagagcagcgatgtggcctttacacctcttcagaatagtgaccattcgggtagcgtgcaggggttagccccaggtctccccagcgggtcaggagcagaagatgaggaagccgcggggggaggttgctgtccagatggcgggggttgtagtcgatgctgttgttgctgcgcaggatcaggcggatccgcgggttcagggggaagcggtggtgttgcgggccccggggggggaggggctggctctgcggctctctgcttgaggttaggccgcgagcagcggcgctattctctgtgggattgcctatggatacttgctgccgtcgccgtatactttgccgacgttggtacggatgtgtggctagcagtggactactatctgcgtgggcaaagatggtggttcgggctgacactgtttttcgttgtgctggggagcctctccgtccaggtgttttcatttcgttggttcgtccacgatttttccacggaggactcagcaactgctgccgcagccagcagttgtcctcagcctggtgcagactgcaagacagtcgtgggagggggttcagcggccggggagggagaagccagaccttccacccctcagcggcaggcctcaaatgcatccaagagtaatattgccgccgccaacagcggcagtaacagctcaggggcgaccagggccagcgggaagcaccgttccgctagctgttccttctgcatctggctcttgcagtcgttaatccatatcctgcagctggggcagatctggagatacttccatacaatttaccttgggatccgctccaggcagagcggcgagaatgatcggtggcggttttactggaaaatggtctatgaatacgctgatgtgtctatgctacaccttctggcaaccttcctcgagtcggcacctcaactcgtgctccagttatgtatcatagtacagacacacagcctccaggcgcttcagggctttacagcagctgcatccttagtttcactggcatgggccctggcaagttaccagaaggctctccgtgattcccgtgacgataagaagcccatctcatacatggccgtgatcattcagttttgttggcattttttcacaattgcagccagagtcattacatttgcgttattcgcctccgtcttccagctgtactttgggatcttcattgtgctacactggtgtattatgaccttctggatcgtgcactgtgaaacagagttttgcatcacaaaatgggaagaaatagtgttcgacatggtggttggcatcatttacattttctcatggttcaacgttaaagaggggagaaccaggtgtaggctattcatttactatttcgtgattctactggaaaatacagctctgtctgcactctggtacctctacaaagctcctcagatagcagacgcctttgccattccagctctctgtgtggtcttttcctcctttctaaccggagtcgttttcatgttgatgtattatgccttcttccacccaaacggaccccgatttggccaatcacctagttgcgcctgcgaagatccagcggcagccttcaccctaccacctgatgttgccactagcacactccgctccatttctaacaacaggtccgtcgtgtcagacagagaccagaaatttgctgaaagggacgggtgcgtccctgtattccaagtgcggcctaccgccccatccacaccatcctcccgcccacccagaatcgaagagtccgttattaagatcgacttgttccggaatagatatcccgcctgggagcgacatgtcctggacaggagcctgcgcaaagcaattctagcctttgaatgctcacctagtccaccaagacttcagtacaaggacgatgccctgatacaggagaggttagagtatgagacaaccctctag

SEQ ID NO: 229578 - DNA, 1953 bp, Artificial Sequence
  derived and/or modified sequence
atggcagcaaaaagcgacggccgtttaaagatgaagaagagttccgacgtggcctttactccgctccagaatagcgaccacagtggcagcgtccagggccttgccccagggctgccgtccggttccggcgctgaggatgaggaggccgctgggggagggtgctgtcctgatgggggaggctgttcacgttgttgttgttgttgtgcaggctccggcggtagcgcaggcagcggcggatcgggaggcgtggctggacccggaggcggaggggctggctccgctgccctatgcctgagattaggaagggaacagcgacgctacagtttgtgggactgcctctggatactcgcggctgtggcagtatattttgccgacgtgggcacagatgtgtggctggcggtcgactattacctccgaggtcagcggtggtggtttggccttacgttattctttgtcgttctcggttctttgtcggttcaggtgtttagcttcagatggtttgtgcatgacttctccactgaagactccgccacagcagctgccgctagctcatgccctcaacccggtgccgattgcaagactgtcgtggggggtggctcagctgccggtgagggcgaggccaggccatctacacctcagagacaagcctctaatgccagcaaatcaaacattgctgctgctaactctgggtctaactctagtggggctactcgagcttctggcaagcatcgctcagcttcctgcagtttctgcatctggcttctgcagtcacttatccatatcttacagctaggccagatttggcgctacttccataccatttatctggggatccgaagcaggcagtccggagagaatgaccggtggcgtttctactggaagatggtgtacgaatacgccgatgtgagcatgcttcacctgcttgccacatttctcgaaagtgcccctcagctggtcctgcagttgtgcattatcgtgcagactcactctcttcaggccctgcagggcttcactgctgctgcatcactggttagtctggcttgggccctcgcatcctatcagaaggctcttagggatagtcgtgatgacaaaaagccaatatcatacatggcggtcatcatccagttttgctggcacttttttaccatcgccgcaagggtcatcacctttgccctgtttgccagcgtgttccaactgtactttgggatttttattgtcctgcattggtgcataatgacgttctggatagtgcactgcgagaccgagttttgtattaccaagtgggaagaaattgtgttcgatatggtagtgggtattatttacatcttctcatggttcaatgtaaaagagggtaggactcgctgtcgcctctttatttactactttgtcatcctgctggagaatactgctctgagtgcgctctggtacctgtacaaggctccccagattgccgacgcttttgcaattcccgctctgtgcgtggtgtttagcagctttctgactggggtggtgtttatgctgatgtactatgcattcttccacccaaacggccctcggttcggccagagtccctcatgtgcatgtgaggacccagcggcagcctttaccctccccccagatgtcgctacatctaccttgcgaagcatcagcaacaatcgtagcgtcgtttcagaccgcgaccagaagtttgcagaacgcgacggatgcgtcccggtgtttcaagtgaggcccaccgctccatctacaccctccagtcggccaccccgtatcgaggagtcagttatcaaaatcgacctgttccgcaacagataccccgcttgggagagacatgtcctggaccgcagcctgagaaaggctattttagcgtttgagtgctccccatctccacccaggctccagtacaaagatgatgcacttattcaggagcggttggaatatgagacaacactctag

SEQ ID NO: 229579 - DNA, 1953 bp, Artificial Sequence
  derived and/or modified sequence
atggccgctaagtctgatgggcgactcaaaatgaaaaaatcttcagacgtagcctttacacctctccagaattctgatcacagtggaagcgtgcagggattagctccgggtttgcccagcggtagtggcgctgaggacgaggaggcagccggaggtggctgctgtcctgatggcggagggtgttctcgttgttgttgctgttgcgccggatccgggggaagtgcaggtagcgggggtagcggcggagttgcgggaccgggtggaggcggtgcaggttccgcggcactgtgtctgaggctgggaagggaacaacgtcgctattcgttatgggactgcctgtggatcctggcagctgtggcagtgtacttcgctgatgtgggcacggatgtgtggttggctgttgattactatcttcgtggacagcgttggtggtttggcctgactctgttcttcgtcgtgctgggaagtctaagtgtccaggtcttctcattcagatggttcgtccacgacttcagtaccgaagatagcgcgactgcagccgcagcgagctcttgtccgcaaccaggcgcagactgcaaaaccgtggtgggcggagggagcgccgcaggggagggtgaggccaggccaagtacacctcagagacaggcctcaaacgcaagcaagagcaacattgccgctgccaactccggaagtaactcttcaggcgctacacgcgcttccggaaaacacaggagcgcgtcttgttcattctgcatctggttgctgcagtcccttatacacatcttgcagctgggccagatctggaggtatttccatacaatttaccttggaatcagaagccgccagagtggagagaatgatcggtggagattttattggaagatggtctatgagtacgccgatgttagcatgctgcatctcctggccacattcctggagtctgcacctcaattagtcctgcagctgtgtattatcgtacagacgcatagcctgcaggctcttcaagggtttactgctgcagcgtcactggtaagcttagcctgggcccttgctagttatcagaaggccctgagagacagccgcgatgataagaagcccattagctatatggccgtgatcattcagttttgttggcacttctttactatagctgcacgcgtgattacctttgctctgtttgcctctgtgtttcagctctacttcggcatattcatcgtcttgcactggtgtataatgacattctggatcgtgcactgtgagacagaattctgcataactaagtgggaagagatcgtgtttgacatggttgtcggcattatctacatcttttcttggtttaatgtgaaagaagggaggacacgctgcagactcttcatctattattttgttatattgctagaaaataccgcactgagtgctctatggtacctttataaggcgccacagattgctgatgcattcgctatacccgcactgtgcgttgtgttttcatccttccttaccggcgttgtcttcatgctgatgtattacgcttttttccaccctaacggcccaaggtttggacagagcccctcatgtgcgtgcgaggaccccgctgcagcgtttacattacctcccgacgtggccacttcgacactgcgctccatctcaaataatagaagcgtggtgagtgatcgagatcaaaagttcgcagagagggatggatgtgtccctgtgttccaggtgaggcccactgcccctagcacaccgagctctcggcctcctcgaatcgaggagtctgtcattaaaatcgacctgttcagaaacaggtatcctgcctgggaacgacacgtgttggataggagccttcgtaaggccattcttgcctttgaatgttcgccaagtcccccacgcttgcaatacaaggacgacgcattgattcaggagcggctcgagtatgaaaccaccctttag

SEQ ID NO: 229580 - DNA, 3981 bp, Artificial Sequence
  derived and/or modified sequence
ctgggagggaagccggggcgaggcgaggaggtggcgggaggaggagacagcggggaaaggtgtcagataaaggagggctctcctccggtgtggaggcatcatggccgctaaatcagacgggaggctgaaaatgaagaaaagcagcgacgtggcgttcaccccgctgcagaactcggaccactcgggctcggtgcagggattggctccaggcttgccgtcggggtcgggagccgaggacgaggaggcggccgggggcggctgctgcccggacggcggcggctgctcgcgctgctgctgctgctgcgccgggagtggcggctccgcgggctcgggcggctccggcggcgtcgccggcccgggcggcggcggggcgggctcggctgcgctgtgcctgcgcctgggcagggagcagcggcgctactcactgtgggactgcctctggatcctggccgccgtggccgtgtacttcgcggacgtgggcacagacgtctggctcgccgtggactactacctgcgcggccagcgctggtggttcgggctcacgctcttcttcgtggtgctcggctctctgtcggtgcaagtgttcagcttccgctggtttgtgcacgatttcagcaccgaggacagcgccacggccgctgctgcctccagctgcccgcagcctggagccgattgcaagacggtggtcggcggtgggtctgcagccggggaaggcgaggctcgtccttccacgccgcaaaggcaagcatctaacgccagcaagagcaacatcgccgcggccaacagcggcagcaacagcagcggggctacccgggccagtggcaagcacaggtctgcgtcctgctccttctgcatctggctcctgcagtcactcatccacatcttgcagctcgggcaaatctggagatatttccacacaatatacttaggtattcgaagccgacagagtggggagaatgacagatggaggttttactggaaaatggtatatgagtatgcggatgtgagtatgctgcatttgctagccacctttctggaaagtgctccacagctggtcctgcagctctgcattatcgtacagactcatagcttacaggccctccaaggtttcacagcggcagcttccctcgtgtccctggcctgggccttggcctcctaccagaaggccctccgggactctcgagatgacaagaagcccatcagctacatggccgtcatcatccagttctgctggcacttcttcaccatcgccgccagggtcatcacgtttgccctctttgcctcggttttccagctgtactttgggatcttcatcgtccttcactggtgcatcatgaccttctggatcgtccactgtgagacagaattctgtatcaccaaatgggaagagattgtgttcgacatggtggtggggattatctatatcttcagttggttcaatgtcaaggaaggcaggacacgctgcaggctattcatttactattttgtgatccttttggaaaatacagccttgagtgccctctggtacctctacaaggctccccagattgcagacgcatttgccattccagcgctgtgtgtggtgttcagcagctttttaactggcgttgtttttatgctgatgtattatgccttctttcatcccaatggacccagattcgggcagtcaccaagttgtgcttgtgaggacccagccgctgccttcactttgcccccagacgtggccacaagcaccctacggtccatctccaacaaccgcagtgttgtcagcgaccgcgatcagaaattcgcagagcgggatgggtgtgtacctgtctttcaagtgaggcccactgccccatccaccccatcatctcgcccaccacggattgaagaatcagtcattaaaattgacttgttcaggaataggtacccagcatgggagagacatgttttggaccgaagcctccgaaaggctattttagcttttgaatgttccccatctcctccaaggctgcagtacaaagatgatgcccttattcaggagcggttggagtacgaaaccactttataaagcaaaaggagttgcaggacccacaacatccagatgaaggggtgacagcagggctgtggccataatgacacttcatcctagagcagggcagtgagccgtgaagttcctagtgggaccgtcatcaccattatcatttgatcctgtcggctgggggcggctggtctccttccaaagcagctgcacccgagagtctctgactccacctgaaagaatgacgctggcttaataggactctccattgctaccaaactcctcctgcacggtcttgggtgcacccaccagagggtactactattatggaaaaattttgcctccaatcattagggtgtcttgatggcgttaactgatctttccataaaaatagattcagtcatacacacatacacacactaacacacataagttacaccagtcctctgtcaaaaaagcttaggtgacttttcttgatgcaaagctctgattcccacaggaatataaaaacaaagaaagagggaaacatccctcgagaaaaaaaatagtattgcttagaaaagaaaccattttctcatttggaaatccataccatgtgtgaaaatcctatccaacggacagcaaacccaaatgttgtctacacatgtgttagcattgatggagtggttcattttctacacatttcaggatttgttttatattttaaattttcagttgcgaacatcctttttgacagaaatcctatgcagcccatgtacggctttcaacaagaccaaggagctcaataacttcatgatgtaaattaaatagtaatcatgattcagtattcaattgcaaaaatgtaacaggtacacaaagaggaagtggggaaaaaggcaaaatgagagtctgattcccaggcatgtgcagcgcccattgggacataacggcagtgcggcgcgagccagaggaatgggctggaaccggatctgtttccagacgcagaatgagtggctctgtgtgaccataggcagatgctgactctggaagactccgtgccactcctttctagtgccaaacaccatccaaccacaggactgacgtggaagccccaaacaactgagaatgagtggcatgagccccctaaaagcaggcgagagaacgagcaatcaagttctccactgtgtacagacttttcctccccccaatccaaggtcaaagtgatgtgtcttttagaggctttgggacactttttagtaagtatgagcagacaaatgcaatgaatatgctatgaaaaaacccttctgaactgagagagggcttatcactatatccagctaagatttgtatttgaatcatctgtaaagtcgcactcttacaacaagcttctgggttttaaatacctccgtacagcaagtaaacgttccccgctttctgttctcagtgtcctcggtcatggtgcttttcgttgcattaaaagtgccggtcaaactttgatagtatttttttatagttggtgcagagtggaataactcatggattatttcaatatttttgtaataaaaaatatagggtatacacataggcatcatcacattttttatagacctggaatcgtttaaaatactttaagcatcataattacttgggatgtcagaaactggtccacaaattccatcagcctgcctcagcagattgaaaacatttgtctcttgcaagatcaccctactttgcaagttggtgcccccaggaacctggccaggggtgctatcagaatatcaggtgaagagagaatcagcttaaatagaaagggcttgtcaagactggccaatgtttcccaggaaatcaaagatgtaaatgattactttcatccatccattataacaaacctgaccacagtggaagctgtcttaaacttccttccctggttttatattaacccaactgatagattaagtattagtcaaaccactaaaaaa

SEQ ID NO: 229581 - DNA, 3907 bp, Artificial Sequence
  derived and/or modified sequence
aaaggagggctctcctccggtgtggaggcatcatggccgctaaatcagacgggaggctgaaaatgaagaaaagcagcgacgtggcgttcaccccgctgcagaactcggaccactcgggctcggtgcagggattggctccaggcttgccgtcggggtcgggagccgaggacgaggaggcggccgggggcggctgctgcccggacggcggcggctgctcgcgctgctgctgctgctgcgccgggagtggcggctccgcgggctcgggcggctccggcggcgtcgccggcccgggcggcggcggggcgggctcggctgcgctgtgcctgcgcctgggcagggagcagcggcgctactcactgtgggactgcctctggatcctggccgccgtggccgtgtacttcgcggacgtgggcacagacgtctggctcgccgtggactactacctgcgcggccagcgctggtggttcgggctcacgctcttcttcgtggtgctcggctctctgtcggtgcaagtgttcagcttccgctggtttgtgcacgatttcagcaccgaggacagcgccacggccgctgctgcctccagctgcccgcagcctggagccgattgcaagacggtggtcggcggtgggtctgcagccggggaaggcgaggctcgtccttccacgccgcaaaggcaagcatctaacgccagcaagagcaacatcgccgcggccaacagcggcagcaacagcagcggggctacccgggccagtggcaagcacaggtctgcgtcctgctccttctgcatctggctcctgcagtcactcatccacatcttgcagctcgggcaaatctggagatatttccacacaatatacttaggtattcgaagccgacagagtggggagaatgacagatggaggttttactggaaaatggtatatgagtatgcggatgtgagtatgctgcatttgctagccacctttctggaaagtgctccacagctggtcctgcagctctgcattatcgtacagactcatagcttacaggccctccaaggtttcacagcggcagcttccctcgtgtccctggcctgggccttggcctcctaccagaaggccctccgggactctcgagatgacaagaagcccatcagctacatggccgtcatcatccagttctgctggcacttcttcaccatcgccgccagggtcatcacgtttgccctctttgcctcggttttccagctgtactttgggatcttcatcgtccttcactggtgcatcatgaccttctggatcgtccactgtgagacagaattctgtatcaccaaatgggaagagattgtgttcgacatggtggtggggattatctatatcttcagttggttcaatgtcaaggaaggcaggacacgctgcaggctattcatttactattttgtgatccttttggaaaatacagccttgagtgccctctggtacctctacaaggctccccagattgcagacgcatttgccattccagcgctgtgtgtggtgttcagcagctttttaactggcgttgtttttatgctgatgtattatgccttctttcatcccaatggacccagattcgggcagtcaccaagttgtgcttgtgaggacccagccgctgccttcactttgcccccagacgtggccacaagcaccctacggtccatctccaacaaccgcagtgttgtcagcgaccgcgatcagaaattcgcagagcgggatgggtgtgtacctgtctttcaagtgaggcccactgccccatccaccccatcatctcgcccaccacggattgaagaatcagtcattaaaattgacttgttcaggaataggtacccagcatgggagagacatgttttggaccgaagcctccgaaaggctattttagcttttgaatgttccccatctcctccaaggctgcagtacaaagatgatgcccttattcaggagcggttggagtacgaaaccactttataaagcaaaaggagttgcaggacccacaacatccagatgaaggggtgacagcagggctgtggccataatgacacttcatcctagagcagggcagtgagccgtgaagttcctagtgggaccgtcatcaccattatcatttgatcctgtcggctgggggcggctggtctccttccaaagcagctgcacccgagagtctctgactccacctgaaagaatgacgctggcttaataggactctccattgctaccaaactcctcctgcacggtcttgggtgcacccaccagagggtactactattatggaaaaattttgcctccaatcattagggtgtcttgatggcgttaactgatctttccataaaaatagattcagtcatacacacatacacacactaacacacataagttacaccagtcctctgtcaaaaaagcttaggtgacttttcttgatgcaaagctctgattcccacaggaatataaaaacaaagaaagagggaaacatccctcgagaaaaaaaatagtattgcttagaaaagaaaccattttctcatttggaaatccataccatgtgtgaaaatcctatccaacggacagcaaacccaaatgttgtctacacatgtgttagcattgatggagtggttcattttctacacatttcaggatttgttttatattttaaattttcagttgcgaacatcctttttgacagaaatcctatgcagcccatgtacggctttcaacaagaccaaggagctcaataacttcatgatgtaaattaaatagtaatcatgattcagtattcaattgcaaaaatgtaacaggtacacaaagaggaagtggggaaaaaggcaaaatgagagtctgattcccaggcatgtgcagcgcccattgggacataacggcagtgcggcgcgagccagaggaatgggctggaaccggatctgtttccagacgcagaatgagtggctctgtgtgaccataggcagatgctgactctggaagactccgtgccactcctttctagtgccaaacaccatccaaccacaggactgacgtggaagccccaaacaactgagaatgagtggcatgagccccctaaaagcaggcgagagaacgagcaatcaagttctccactgtgtacagacttttcctccccccaatccaaggtcaaagtgatgtgtcttttagaggctttgggacactttttagtaagtatgagcagacaaatgcaatgaatatgctatgaaaaaacccttctgaactgagagagggcttatcactatatccagctaagatttgtatttgaatcatctgtaaagtcgcactcttacaacaagcttctgggttttaaatacctccgtacagcaagtaaacgttccccgctttctgttctcagtgtcctcggtcatggtgcttttcgttgcattaaaagtgccggtcaaactttgatagtatttttttatagttggtgcagagtggaataactcatggattatttcaatatttttgtaataaaaaatatagggtatacacataggcatcatcacattttttatagacctggaatcgtttaaaatactttaagcatcataattacttgggatgtcagaaactggtccacaaattccatcagcctgcctcagcagattgaaaacatttgtctcttgcaagatcaccctactttgcaagttggtgcccccaggaacctggccaggggtgctatcagaatatcaggtgaagagagaatcagcttaaatagaaagggcttgtcaagactggccaatgtttcccaggaaatcaaagatgtaaatgattactttcatccatccattataacaaacctgaccacagtggaagctgtcttaaacttccttccctggttttatattaacccaactgatagattaagtattagtcaaaccact

SEQ ID NO: 229582 - protein, 3538 aa, Artificial Sequence
  derived and/or modified sequence
MKGIRKGESRAKESKPWEPGKRRCAKCGRLDFILMKKMGIKSGFTFWNLVFLLTVSCVKGFIYTCGGTLKGLNGTIESPGFPYGYPNGANCTWVIIAEERNRIQIVFQSFALEEEYDYLSLYDGHPHPTNFRTRLTGFHLPPPVTSTKSVFSLRLTSDFAVSAHGFKVYYEELQSSSCGNPGVPPKGVLYGTRFDVGDKIRYSCVTGYILDGHPQLTCIANSVNTASWDFPVPICRAEDACGGTMRGSSGIISSPSFPNEYHNNADCTWTIVAEPGDTISLIFTDFQMEEKYDYLEIEGSEPPTIWLSGMNIPPPIISNKNWLRLHFVTDSNHRYRGFSAPYQVKKAIDFKSRGFKLFPGKDNSNKFSILNEGGIKTASNLCPDPGEPENGKRIGSDFSLGSTVQFSCDEDYVLQGAKSITCQRIAEVFAAWSDHRPVCKVKTCGSNLQGPSGTFTSPNFPFQYDSNAQCVWVITAVNTNKVIQINFEEFDLEIGYDTLTIGDGGEVGDPRTVLQVLTGSFVPDLIVSMSSQMWLHLQTDESVGSVGFKVNYKEIEKESCGDPGTPLYGIREGDGFSNRDVLRFECQFGFELIGEKSIVCQENNQWSANIPICIFPCLSNFTAPMGTVLSPDYPEGYGNNLNCIWTIISDPGSRIHLSFNDFDLESQFDFLAVKDGDSPESPILGTFTGAEVPSHLTSNSHILRLEFQADHSMSGRGFNITYNTFGHNECPDPGIPINARRFGDNFQLGSSISVICEEGFIKTQGTETITCILMDGKVMWSGLIPKCGAPCGGHFSAPSGVILSPGWPGYYKDSLNCEWVIEAEPGHSIKITFERFQTELNYDVLEVHDGPNLLSPLLGSYNGTQVPQFLFSSSNFIYLLFTTDNSRSNNGFKIHYESVTVNTYSCLDPGIPVHGRRYGHDFSIGSTVSFSCDSGYRLSHEEPLLCEKNHWWSHPLPTCDALCGGDVRGPSGTILSPGYPEFYPNSLNCTWTVDVTHGKGVQFNFHTFHLEDHHDYLLITENGSFTQPLARLTGSDLPPTINAGLYGNFRAQLRFISDFSISYEGFNITFSEYNLEPCEDPGIPQYGSRIGFNFGIGDTLTFSCSSGYRLEGTSEIICLGGGRRVWSAPLPRCVAECGASATNNEGILLSPNYPLNYENNHECIYSIQVQAGKGINISARTFHLAQGDVLKIYDGKDKTTHLLGAFTGASMRGLTLSSTSNQLWLEFNSDTEGTDEGFQLVYTSFELSHCEDPGIPQFGYKISDQGHFAGSTIIYGCNPGYTLHGSSLLKCMTGERRAWDYPLPSCIAECGGRFKGESSGRILSPGYPFPYDNNLRCMWMIEVDPGNIVSLQFLAFDTEASHDILRVWDGPPENDMLLKEISGSLIPEGIHSTLNIVTIQFDTDFYISKSGFAIQFSSSVATACRDPGVPMNGTRNGDGREPGDTVVFQCDPGYELQGEERITCIQVENRYFWQPSPPVCIAPCGGNLTGSSGFILSPNFPHPYPHSRDCDWTITVNADYVISLAFISFSIEPNYDFLYIYDGPDSNSPLIGSFQDSKLPERIESSSNTMHLAFRSDGSVSYTGFHLEYKAKLRESCFDPGNIMNGTRLGMDYKLGSTVTYYCDAGYVLQGYSTLTCIMGDDGRPGWNRALPSCHAPCGSRSTGSEGTVLSPNYPKNYSVGHNCVYSIAVPKEFVVFGQFVFFQTSLHDVVEVYDGPTQQSSLLSSLSGSHSGESLPLSSGNQITIRFTSVGPITAKGFHFVYQAVPRTSSTQCSSVPEPRFGRRIGNEFAVGSSVLFDCNPGYILHGSIAIRCETVPNSLAQWNDSLPTCIVPCGGILTKRKGTILSPGYPEPYDNNLNCVWKITVPEGAGIQVQVVSFATEHNWDSLDFYDGGDNNAPRLGSYSGTTIPHLLNSTSNNLYLNFQSDISVSAAGFHLEYTAIGLDSCPEPQTPSSGIKIGDRYMVGDVVSFQCDQGYSLQGHSHITCMPGPVRRWNYPIPICLAQCGGAMSDFSGVILSPGFPGNYPSSLDCTWTINLPIGFGVHLQFVNFSTETIHDYLEVRSGSSETSTVIGRLSGPQIPSSLFSTTHETSLYFHSDYSQNKQGFHIVYQAYQLQSCPDPRPFRNGFVIGNDFTVGQTISFECFPGYTLIGNSALTCLHGVSRNWNHPLPRCEALCGGNITAMNGTIYSPGYPDEYPNFQDCFWLVRVPPGNGIYINFTVLQTEPIYDFITVWDGPDQNSPQIGQFSGNTALESVYSTSNQILIKFHSDFTTSGFFVLSYHAYQLRVCQPPPPVPNAEILTEDDEFEIGDIIRYQCLPGFTLVGNAILTCRLGERLQMDGAPPVCQVLCPANELRLDSTGVILSPGYPDSYPNLQMCAWSISVEKGYNITMFVEFFQTEKEFDVLQVYDGPNIQSPVLISLSGDYSSAFNITSNGHEVFLQWSADHGNNKKGFRIRYIAFYCSTPESPPHGYIISQTGGQLNSVVRWACDRGFRLVGKSSAVCRKSSYGYHAWDAPVPACQAISCGIPKAPTNGGILTTDYLVGTRVTYFCNDGYRLSSKELTTAVCQSDGTWSNHNKTPRCVVISCGELPTPPNGNKIGTQTSYGSTAIFTCDLGFMLVGSAVRECLSSGLWSESETRCLAGHCGIPELIVNGQVIGENYGYRDTVVYQCNPGFRLIGSSVRICQQDHNWSGQLPSCVPVSCGHPGSPIYGRTSGNGFNFNDVVTFSCNIGYLMQGPTKAQCQANRQWSHPPPMCKVVNCSDPGIPANSKRESKIEHGNFTYGTVVFYDCNPGYFLFGSSVLICQPNGQWDKPLPECIMIDCGHPGVPPNAVLSGEKYTFGSTVHYSCTGKRSLLGQSSRTCQLNGHWSGSQPHCSGDATGTCGDPGTPGHGSRQESNFRTKSTVRYACDTGYILHGSEERTCLANGSWTGRQPECKAVQCGNPGTTANGKVFRIDGTTFSSSVIYSCMEGYILSGPSVRQCTANGTWSGTLPNCTIISCGDPGIPANGLRYGDDYVVGQNVSYMCQPGYTMELNGSRIRTCTINGTWSGVMPTCRAVTCPTPPQISNGRLEGTNFDWGFSISYICSPGYELSFPAVLTCVGNGTWSGEVPQCLPKFCGDPGIPAQGKREGKSFIYQSEVSFSCNFPFILVGSSTRICQADGTWSGSSPHCIEPTQTSCENPGVPRHGSQNNTFGFQVGSVVQFHCKKGHLLQGSTTRTCLPDLTWSGIQPECIPHSCKQPETPAHANVVGMDLPSHGYTLIYTCQPGFFLAGGTEHRVCRSDNTWTGKVPICEAGSKILVKDPRPALGTPSPKLSVPDDVFAQNYIWKGSYNFKGRKQPMTLTVTSFNASTGRVNATLSNSNMELLLSGVYKSQEARLMLRIYLIKVPAHASVKKMKEENWAMDGFVSAEPDGATYVFQGFIQGKDYGQFGLQRLGLNMSEGSNSSNQPHGTNSSSVAIAILVPFFALIFAGFGFYLYKQRTAPKTQYTGCSVHENNNGQAAFENPMYDTNAKSVEGKAVRFDPNLNTVCTMV

SEQ ID NO: 229583 - DNA, 10617 bp, Artificial Sequence
  derived and/or modified sequence
atgaaaggaattcggaaaggcgaaagtagggccaaagagagtaagccttgggagcccggtaagagaaggtgtgcaaagtgcgggcggttggatttcatactgatgaagaagatggggatcaagtccggatttaccttctggaatctagtgtttctcctgaccgtgtcctgtgtgaaaggtttcatctatacttgtggcgggacattaaaaggactcaacggcacaattgagagccccggtttcccctatggctatccgaacggagccaattgcacttgggtcattatcgccgaggagagaaataggatccaaatagtctttcagtccttcgccctggaagaggagtacgattacctctccctctatgatgggcatccccatccaactaacttcagaacacgcctgactggttttcatcttcctccccccgtaacttcaactaagagcgtattcagcctcaggttgactagcgattttgctgtcagcgcgcacggattcaaggtgtactatgaagaactccagagcagttcatgtggaaatccaggggtcccacctaaaggcgtcctgtatggtacccggttcgacgtcggcgacaagatccggtattcttgtgtaaccggttatattcttgatggccatcctcagctcacctgcattgccaacagcgtcaatacagcctcctgggacttcccggtgccgatctgcagagccgaggacgcatgcggaggtaccatgcgcggctccagcggaattatctctagcccttcattccccaacgaataccacaataacgccgactgcacctggacaatcgttgctgaacctggcgacactatcagcctaatcttcacggattttcagatggaagagaagtatgactacctggagattgagggctcagagccccctaccatatggctctcagggatgaacattccacccccaataatttcaaataaaaactggctgaggttgcactttgtcactgattccaaccaccgttaccggggctttagtgcaccttatcaggtcaagaaagcgatagatttcaagtcacggggttttaaactcttccctggaaaagacaattctaacaaattcagtatattgaatgagggggggatcaaaactgcctccaacctgtgccctgaccctggagaacctgaaaacgggaaaaggataggaagtgatttctccctgggttctaccgtacaattcagctgcgacgaggattacgtgctgcagggcgccaagtccattacctgtcaaaggatagccgaggtgtttgccgcatggtctgaccaccgccctgtgtgcaaagtgaaaacttgtgggtcaaacctgcaggggccatcaggcacgtttacttctcctaacttcccgtttcagtacgacagtaacgctcaatgcgtgtgggtgatcactgccgtgaataccaacaaagtcatccagatcaatttcgaggaatttgaccttgagatcggctatgacactctgacaatcggagacgggggcgaggtgggagaccctcggaccgtcctacaagtcctgacagggtcgttcgtgcccgacttgattgtgagtatgagttcccagatgtggcttcaccttcagaccgatgaatccgtgggcagcgtggggttcaaggtgaattataaggagatcgaaaaggaaagctgcggcgacccggggacgcccttatacggtatacgcgagggagatggctttagcaaccgagacgtgcttcggtttgaatgtcagtttggctttgagctcattggggaaaagagcattgtgtgccaggaaaacaatcagtggagtgccaacatcccgatctgcattttcccctgtctcagcaacttcactgctccaatgggcacagtgctatctcccgattatcctgagggctatggtaataacttaaactgtatttggacaataatctctgaccctggaagccgaattcacctctcattcaatgattttgacctagagtcccagttcgactttttagcagtgaaggacggggacagccctgaatcccctattctggggacttttacaggtgcagaggtgcccagtcacctgactagcaactcccacattctgcgcttggaatttcaggctgaccactcaatgtccggtcgggggtttaatatcacatataatacctttggacataacgaatgccctgatcctgggatcccaatcaacgcccgaaggtttggtgacaattttcagcttggatctagcatttccgtaatttgcgaagaaggctttattaagacacaaggcactgaaaccattacttgcattttgatggacggtaaagtgatgtggtcaggccttattccaaagtgtggcgcaccgtgcgggggacactttagcgctccctccggcgtcattctctctcctggttggcctggctactataaagattctctgaactgtgagtgggtgatagaggctgagccaggccactccataaagatcactttcgagaggttccagacagagctcaactatgatgtgctggaggttcacgatggccctaacttactctcacccctcctgggttcttacaacggcacccaggtgcctcagttcctgttttcatcctccaattttatctaccttttattcaccaccgataattccaggtctaacaacggattcaagatccattacgagtcagtcacagtgaacacttattcatgtctggatcctggtatccccgtgcatggccgccgatacggtcacgacttttccataggttctaccgtttcttttagctgcgacagtggttaccgcctgagtcacgaagaacctttgctttgcgagaagaaccactggtggtcccatccactacctacttgcgacgcactgtgtggaggcgatgtgcgagggcctagcggcaccattctgtctcctgggtatccagaattttaccctaacagccttaactgcacctggacagtcgatgtgactcatggtaagggggtgcaattcaatttccacaccttccatttggaggatcaccacgactacctcctgataactgagaatggcagctttacccagccactggcacggcttacaggttcagacttaccgcccactatcaatgccggactgtacgggaattttcgagcacagctgagattcatcagcgatttctcaattagctacgaaggattcaacatcacattctctgaatataacctggagccgtgtgaggatccaggcattccacaatatggctctcggatcgggttcaactttggcataggggatacattaactttctcttgttcttcaggatacagacttgaagggacatccgagattatttgcctgggaggcggaaggcgggtttggagcgccccactccccagatgcgtggctgagtgcggggctagtgctactaacaatgaaggcatcctgctctcccccaattaccccctgaattatgagaacaatcacgagtgtatttactcaatccaagtccaagccggcaagggtatcaacatcagtgcccgtaccttccatttagcccagggtgatgtattgaagatatacgacggaaaggataaaacaacgcacttgctgggcgctttcacaggggcctcgatgcgaggacttacccttagctccaccagtaaccagctctggctggaattcaacagcgataccgagggtaccgacgaaggttttcagctggtatacaccagcttcgaactgagccattgcgaggatcctggcatcccccagtttggctataaaatttccgaccagggtcacttcgctggttcgactataatttatgggtgcaaccccggatatacactgcacgggtcaagcctcttaaaatgtatgaccggcgaaagaagggcatgggactatccactgccctcatgcattgcagaatgtggcgggcgttttaaaggcgaatcctccggtagaatactgagtcccgggtatcccttcccttatgataacaacctccggtgcatgtggatgatcgaagtggatcccggaaatatcgtcagccttcaattccttgcttttgataccgaggccagccacgacatcctgcgggtgtgggatggaccccctgagaacgatatgttgctgaaggagatctcaggttcccttattcctgagggcattcattctactttaaacattgtaaccattcagtttgatacagacttctatatatcgaaatcagggttcgccatccagtttagttcttcagtagccactgcctgtagggaccccggcgtcccgatgaacggtacacggaacggagacggaagagaacccggcgacactgtcgtgtttcagtgtgatccgggatacgaacttcagggggaggaaaggattacgtgtatccaggtagaaaaccgctacttctggcaaccttctccacctgtgtgtatcgctccttgtggcggaaacctgactggatcatccggcttcattctgagcccgaactttcctcacccttatcctcatagcagagattgtgattggactattaccgtcaacgctgattacgtgatcagcctggcttttatcagctttagcatagagcccaactacgattttctctacatctatgatggacctgattcaaatagccccttgataggctctttccaggactccaagcttcccgaacgaatcgaatcatcctctaatactatgcatttagctttccgatccgatggttcagttagttacactggcttccacctggagtacaaagcaaaactgcgcgaaagttgtttcgacccagggaatataatgaatggtactagattggggatggattacaagctcggcagtacggtgacctactactgcgatgccgggtatgtcctgcagggttatagcacgcttacctgtattatgggggacgacgggcggcctggttggaaccgtgcactgccgagttgtcacgctccttgtggctctcgaagtacaggcagcgaaggcacagttctgtccccgaactatccaaagaactacagtgttggccacaactgcgtgtatagcattgccgtacctaaggagttcgttgtattcggtcaattcgtgttcttccagaccagcctccatgacgtggtcgaagtgtacgacggccccactcagcagtcctcattattgtcctccctgtccggcagccactccggcgagagtctgcctctgtcatccggcaaccagatcactattagattcaccagcgtaggccctatcaccgctaaaggctttcacttcgtgtatcaggccgttccacggaccagcagtacgcagtgcagctctgtgcctgaaccgaggtttggccgaaggattggaaatgagttcgccgtgggctcttccgtcctgttcgactgtaatcccggatatatccttcatggtagcatcgccatccggtgtgagactgtgccgaattctctggctcaatggaatgatagcttgcctacatgtattgtcccttgcgggggaatactgaccaaaaggaaaggcaccattctctcaccaggataccccgaaccctacgacaataacttgaactgtgtatggaaaatcaccgtgcctgagggggctggtatacaggtccaggtggtgtccttcgcaaccgagcataactgggatagcttagacttttatgacggaggtgacaacaatgccccgcggctcgggtcatactccggcactacaataccgcatctgctgaactcaacgtcaaataatttgtatctgaacttccagtccgatatctcagtatccgcagccggtttccatctggagtataccgctattgggttggattcgtgccccgagccacagactccgtcctctggtattaagatcggagatcgctatatggtgggggatgtggtgtcctttcagtgcgaccaagggtattccttgcaaggccactctcacattacatgtatgcccgggcctgtgcggaggtggaactatcctattcctatctgtttggcccagtgcggcggtgctatgtccgatttcagcggggtgatattgtcacctgggttccctggcaactacccctcttccctcgattgcacatggacaataaacctccctattggattcggcgtgcacctgcaattcgtgaatttcagtacagagactatccatgactacctggaagtgaggagtggctcaagtgaaaccagcactgtgattggccggctcagtggcccacagattccttcttcactatttagcacgacccacgagaccagcctgtacttccactcagactactcgcagaataaacaaggtttccacattgtgtaccaggcctatcagctgcagtcttgtccggacccaagacctttcaggaacgggttcgtgatcggcaacgatttcacagttggtcagaccatcagcttcgaatgcttcccaggctataccttgatcggaaacagcgctctgacatgtctgcacggcgtttcccgcaattggaaccatcccctgcccagatgcgaggctttatgcggcggcaatataaccgcgatgaatggcaccatctattcacctggataccccgacgaatatcctaattttcaggactgcttctggctggtgcgagtccccccagggaatgggatctatattaatttcacggtcctccagaccgagcccatatacgactttatcaccgtctgggacgggccagaccagaattccccacaaatcgggcagttcagcggcaatactgccctcgaatccgtctatagtacgagcaaccagatcctcatcaaattccactccgactttactacatccggattctttgtgttgtcttaccatgcttaccagctgcgggtgtgccaacctccgcctcccgtgcctaacgccgagatcctcactgaggacgacgaatttgagatcggtgatatcatccggtatcaatgtcttcctggctttacccttgttggcaacgctattctgacctgccggctaggtgaaagacttcagatggacggggcgcccccagtttgtcaggtcctgtgtcctgccaacgagctcaggctggactccaccggggtgattctcagcccgggctatccagattcatatccaaacctgcagatgtgcgcatggagtatcagcgtggagaagggatacaatataaccatgttcgtagaattttttcagacagagaaggagttcgacgttttacaggtctacgatggtcccaatatccagagtccagtactgatttctctgtccggggattactcctcagctttcaacattactagtaacgggcatgaagtgttcctccagtggagtgctgaccacggaaacaacaaaaagggttttcgtatccgatatatcgcattctattgtagcacccctgaaagtccaccccatgggtatatcatatcacagaccgggggccaactaaattcggttgtgaggtgggcctgcgatcgaggcttcagactcgtgggaaagtcctcagcggtttgcaggaaatcatcctatggttatcacgcttgggacgcgccggtccctgcctgtcaggcgatcagctgtggcattccaaaagcccccaccaatggtggcattctgactacagactacctggtgggtacacgggttacttacttttgtaatgatggatacaggctaagtagcaaggagcttacaacggccgtctgtcagtctgacgggacatggtctaaccataataagacaccacgctgcgttgtgatatcatgcggggaactgccaactcctcctaacgggaacaaaatcggcacacaaacatcctacgggtccaccgctatcttcacgtgcgacctcgggttcatgttagtgggctctgccgtgcgcgagtgcctgtcaagtggtctgtggtcagagagtgaaaccaggtgtctcgctggccattgcgggatccccgagttaatcgtgaacggtcaggttataggagaaaattacggctatcgggacacagtggtttaccagtgtaatccaggatttaggttaatcggatcttccgtgaggatctgtcagcaagatcataattggtcagggcaactgcctagctgtgtacctgtgagttgtggacacccaggttccccgatttacggccggaccagcggaaatggattcaactttaatgatgtagtcaccttctcatgcaacatcggctatctgatgcagggccccacaaaggcgcaatgccaggccaatcgacagtggtcacaccccccaccaatgtgcaaggttgtgaattgctcggatcctgggattcccgctaactcgaaacgcgaatcaaaaatcgaacacggtaacttcacctatggcacggtggtgttctatgactgcaaccctggctatttcctgttcggatcgtccgtcctaatatgccaacctaatggacagtgggataaaccactccctgagtgtatcatgatcgactgcggacatcccggcgtgccaccaaacgctgttctctctggtgaaaaatatacctttggatccaccgtgcattattcatgtaccgggaagcgctctctccttggacaatcttctcgtacctgccagttgaacggccactggtctggtagccagccgcattgcagcggagatgccaccggaacgtgtggcgatcccggaacccccggccatggcagccgccaggagagcaactttcgcactaagagtacagtgagatatgcttgtgatactgggtatattctgcatggctctgaggagaggacctgtctagctaatggctcatggaccggtcgccagcccgagtgtaaggctgtgcagtgcggaaatccggggaccacagccaacggaaaagtgttcagaatagacggtacaacattctccagttctgttatatattcttgtatggagggatacatactgtcaggtccgagtgtgaggcagtgcaccgctaacggaacatggtctgggactctgccaaactgcacgattattagctgcggggacccagggattcctgcgaatggactgcggtacggcgatgattacgtggttgggcagaacgtttcttatatgtgccagcctggatataccatggagctcaatgggtcccgcatacgaacctgcactatcaacggcacctggagcggcgtgatgccgacctgtcgtgctgtgacatgtcctacaccgccacaaatctctaatggtcgtttagaggggactaactttgattggggcttcagtatctcttacatctgttccccaggatacgagctctcctttcctgccgtgctgacgtgtgttggaaatggaacctggtctggagaggtgcctcagtgccttcccaaattctgtggcgaccccggcattcccgcccaaggtaagcgagaggggaagtcctttatctatcagtcggaagtgagtttttcatgtaacttccccttcattctggtcgggagctccaccagaatctgtcaggcagacgggacctggtccggtagctcaccacactgcatcgagccgacacaaaccagctgtgagaatccgggggttcctagacatggttctcagaataacactttcgggtttcaggtaggaagcgtggttcagtttcattgtaaaaaaggccatctgctgcaaggctccacaacgagaacttgcttaccggacttaacatggtccgggatccagcctgagtgtatccctcactcttgcaaacagccagaaacacccgcacacgccaacgttgtgggtatggatttgccctcacatggctacaccctgatctacacctgccagcccggcttcttccttgctggtgggacggagcaccgcgtttgcagatccgataacacatggacaggaaaagtgcctatatgcgaagcggggtcaaagattctagttaaggatccccgccccgcactcggcacccccagccctaaactatcagtgcccgacgatgtgtttgcgcagaactacatttggaaggggagctacaacttcaaggggcgcaagcagccaatgaccctgacagtgacgagttttaatgcaagtaccggcagagtgaatgctaccctgtctaactccaacatggaactcctgctgagcggtgtttacaaatcgcaagaggcccgccttatgcttcgcatctacctgatcaaagttccggcacacgcttctgtgaagaagatgaaagaggagaattgggcgatggacgggttcgtgtcagctgaacctgacggagctacctacgtgttccaagggttcattcagggaaaggactacggacagtttggactgcagaggctagggctcaacatgtctgaaggatcaaactctagtaaccagcctcacggcacaaactcttcatcagtggccatcgccatcctggtgccattctttgctctcatctttgctggatttggattctacctgtataagcaaagaactgcaccaaagacccaatataccggctgttcagttcacgagaacaataatggccaggccgccttcgaaaatccgatgtacgacactaacgcaaagagcgtagaaggaaaagccgtcaggttcgatcccaatttaaatacggtctgcacaatggtgtag

SEQ ID NO: 229584 - DNA, 10617 bp, Artificial Sequence
  derived and/or modified sequence
atgaagggcatcaggaagggggagagccgggccaaggagagcaagccctgggagcccgggaagaggcgctgtgccaagtgtggccgcctggacttcatcctgatgaagaagatgggcatcaagagcggcttcaccttctggaacctggtgttcctgctgactgtgtcctgtgtgaagggcttcatctacacctgtggcggcaccctgaagggcctgaatggcaccatcgagagccctggcttcccctacggctacccaaatggagccaactgcacctgggtgatcatcgccgaggagaggaaccgcatccagatcgtgttccagagctttgccctggaggaggagtatgactacctgagcctgtatgatggccacccccaccccaccaacttccgcacccggctgaccggcttccacctgcccccacctgtgaccagcaccaagtctgtgttcagcctgcggctgaccagtgactttgctgtgtctgcccacggcttcaaggtgtactatgaggagctgcagagcagcagctgtggcaaccctggggtgccccccaagggcgtgctgtatggcaccaggtttgatgtgggggacaagatccgctacagctgtgtgacaggctacatcctggatggccacccccagctgacctgcatcgccaacagcgtgaacacagcctcctgggacttccctgtgcccatctgcagagcagaagatgcctgtggcggcaccatgaggggcagcagcggcatcatcagcagccccagcttccccaatgagtaccacaacaatgctgactgcacctggaccatcgtggccgagcccggggacaccatcagcctcatcttcacagacttccagatggaggagaagtatgactacctggagattgagggcagcgagccccccaccatctggctgagcggcatgaacatccccccacccatcatcagcaacaagaactggctgcggctgcactttgtgacagacagcaaccaccgctaccggggcttcagcgccccctaccaggtgaagaaggccatcgacttcaagagccggggcttcaagctgtttcctgggaaggacaacagcaacaagttcagcatcctgaatgaaggaggcatcaagacagccagcaacctgtgcccagaccctggagagccagaaaatggcaagagaattggaagtgacttcagcctgggcagcacagtgcagttcagctgtgatgaggactatgtgctgcagggcgccaagagcatcacctgccagagaattgctgaggtgtttgctgcctggagcgaccacaggcctgtgtgcaaggtgaagacctgtggcagcaacctgcagggccccagcggcaccttcaccagccccaacttccccttccagtatgacagcaatgcccagtgtgtgtgggtgatcacagctgtgaacaccaacaaggtgatccagatcaactttgaggagtttgacctggagatcggctatgacaccctgaccatcggagatggaggagaggtgggggaccccaggacagtgctgcaggtgctgaccggcagctttgtgcctgacctgattgtgtccatgagcagccagatgtggctgcacctgcagacagatgagagcgtgggctctgtgggcttcaaggtgaactacaaggagattgagaaggagagctgtggggaccccggcacccccctgtatggcatccgggagggagatggcttcagcaacagagatgtgctgcgctttgagtgccagtttggatttgagctgattggagagaagagcatcgtgtgccaggagaacaaccagtggagcgccaacatccccatctgcatcttcccctgcctgagcaacttcaccgcccccatgggcaccgtgctgagcccagactacccagagggctacggcaacaacctgaactgcatctggaccatcatcagtgaccccggcagccgcatccacctgtccttcaatgactttgacctggagagccagtttgacttcctggccgtgaaggatggagacagccctgagagccccatcctgggcaccttcaccggggctgaggtgcccagccacctgaccagcaacagccacatcctgcggctggagttccaggccgaccacagcatgagcggccggggcttcaacatcacctacaacaccttcggccacaatgaatgtcctgaccccggcatccccatcaatgccaggagatttggagacaacttccagctgggcagcagcatcagcgtcatctgtgaggagggcttcatcaagacccagggcacagagaccatcacctgcatcctgatggatggcaaggtgatgtggagcggcctcatccccaagtgtggggccccctgtggcggccacttcagcgcccccagcggggtcatcctgagccctggctggccaggctactacaaggacagcctgaactgtgagtgggtgattgaagctgagcccggccacagcatcaagatcacctttgagcgcttccagacagagctgaactatgatgtgctggaggtgcatgatggccccaacctgctgagccccctgctgggcagctacaacggcacccaggtgccccagttcctgttcagcagcagcaacttcatctacctgctcttcaccacagacaacagccgcagcaacaacggcttcaagatccactatgagagcgtgacagtgaacacctacagctgcctggaccccggcatccctgtgcacggccgccgctatggccatgacttcagcatcggcagcacagtgtccttcagctgtgacagcggctaccgcctgagccatgaggagcccctgctgtgtgagaagaaccactggtggagccaccccctgcccacctgtgatgccctgtgtggaggagatgtgcggggccccagcggcaccatcctgagccctggctacccagagttctaccccaacagcctgaactgcacctggacagtggatgtgacccatggaaaaggagtgcagttcaacttccacaccttccacctggaggaccaccacgactacctgctgatcacagaaaatggcagcttcacccagcccctggcccggctgactggaagtgacctgccccccaccatcaatgccggcctgtatggcaacttccgggcccagctgcgcttcatcagtgacttcagcatctcctatgagggcttcaacatcaccttcagcgagtacaacctggagccctgtgaagatcctggcatcccccagtatggcagccgcatcggcttcaactttggcatcggggacaccctgaccttcagctgcagcagcggctaccgcctggagggcaccagcgagatcatctgcctgggcggcggcagaagagtgtggagcgcccccctgccccgctgtgtggccgagtgtggggccagcgccaccaacaatgaaggcatcctgctgagccccaactaccccctgaactatgagaacaaccacgagtgcatctacagcatccaggtgcaggccggcaagggcatcaacatcagcgcccggaccttccacctggcccagggagatgtgctgaagatctatgatggcaaggacaagaccacccacctgctgggcgccttcaccggggcctccatgaggggcctgaccctgagcagcaccagcaaccagctgtggctggagttcaacagcgacacagagggcacagatgagggcttccagctggtgtacaccagctttgagctgagccactgtgaagatcctggcatcccccagtttggctacaagatcagtgaccagggccactttgctggcagcaccatcatctacggctgcaaccctggctacaccctgcacggcagcagcctgctgaagtgcatgactggagagcggcgggcctgggactaccccctgcccagctgcatcgcagaatgtggcggccgcttcaagggggagagcagcggccgcatcctgagccctggctaccccttcccctatgacaacaacctgcgctgcatgtggatgattgaggtggaccccggcaacatcgtgtccctgcagttcctggcctttgacacagaggccagccatgacatcctgcgggtgtgggatggccccccagaaaatgacatgctgctgaaggagatcagcggcagcctcatccctgagggcatccacagcaccctgaacatcgtgaccatccagtttgacacagacttctacatcagcaagagcggctttgccatccagttcagcagctctgtggccacagcctgccgggaccccggggtgcccatgaatggcaccagaaatggagatggccgggagcccggggacacagtggtgttccagtgtgaccccggctatgagctgcagggcgaggagcgcatcacctgcatccaggtggagaaccgctacttctggcagcccagcccccctgtgtgcatcgccccctgtggcggcaacctgaccggcagcagcggcttcatcctgagccccaacttcccccacccctacccccacagccgggactgtgactggaccatcaccgtgaatgctgactatgtgatcagcctggccttcatctccttcagcattgagcccaactatgacttcctgtacatctatgatggccctgacagcaacagccccctgattggcagcttccaggacagcaagctgcctgagagaattgagagcagcagcaacaccatgcacctggccttcagaagtgatggctctgtgtcctacacaggcttccacctggagtacaaggccaagctgcgggagagctgctttgaccccggcaacatcatgaatggcacccggctgggcatggactacaagctgggcagcacagtgacctactactgtgatgctggctacgtgctgcagggctacagcaccctgacctgcatcatgggagatgatggccggcccggctggaacagagccctgcccagctgccacgccccctgtggcagccgcagcactggaagtgagggcaccgtgctgagccccaactaccccaagaactacagcgtgggccacaactgtgtgtacagcattgctgtgcccaaggagtttgtggtgtttggccagtttgtgttcttccagaccagcctgcatgatgtggtggaggtgtatgatggccccacccagcagagcagcctgctgagcagcctgagcggcagccacagcggggagagcctgcccctgagcagcggcaaccagatcaccatccgcttcacctctgtgggccccatcacagccaagggcttccactttgtgtaccaggccgtgcccaggaccagcagcacccagtgcagctctgtgcctgagccccgcttcggcagaagaattggaaatgaatttgctgtgggcagctctgtgctgtttgactgcaaccctggctacatcctgcacggcagcatcgccatccgctgtgagaccgtgcccaacagcctggcccagtggaatgacagcctgcccacctgcatcgtgccctgtggcggcatcctgaccaagaggaagggcaccatcctgagccctggctacccagagccctatgacaacaacctgaactgtgtgtggaagatcaccgtgcctgagggcgccggcatccaggtgcaggtggtgtcctttgccacagagcacaactgggacagcctggacttctatgatggaggagacaacaatgccccccggctgggcagctacagcggcaccaccatcccccacctgctgaacagcaccagcaacaacctgtacctgaacttccagagcgacatctctgtgtctgctgctggcttccacctggagtacacagccatcggcctggacagctgcccagagccccagacccccagcagcggcatcaagatcggggaccgctacatggtgggagatgtggtgtccttccagtgtgaccagggctacagcctgcagggccacagccacatcacctgcatgcctggccctgtgcggcgctggaactaccccatccccatctgcctggcccagtgtggcggggccatgtctgacttctctggagtcatcctgagccctggcttccctggcaactaccccagcagcctggactgcacctggaccatcaacctgcccatcggctttggagtgcacctgcagtttgtgaacttcagcacagagaccatccatgactacctggaggtgcgcagcggcagcagcgagaccagcaccgtcatcggccgcctgagcggcccccagatccccagcagcctcttcagcaccacccatgagaccagcctgtacttccacagcgactacagccagaacaagcagggcttccacatcgtgtaccaggcctaccagctgcagagctgcccagacccccggcccttcagaaatggatttgtgattggaaatgacttcaccgtgggccagaccatcagctttgagtgcttccctggctacaccctgattggcaacagcgccctgacctgcctgcacggcgtgtccaggaactggaaccaccccctgccccgctgtgaggccctgtgtggcggcaacatcacagccatgaatggcaccatctacagccctggctacccagatgagtaccccaacttccaggactgcttctggctggtgcgggtgcccccaggaaatggcatctacatcaacttcaccgtgctgcagacagagcccatctatgacttcatcaccgtgtgggatggccctgaccagaacagcccccagatcggccagttcagcggcaacacagccctggagagcgtgtacagcaccagcaaccagatcctgatcaagttccacagcgacttcaccaccagcggcttctttgtgctgagctaccacgcctaccagctgcgggtgtgccagcccccacctcctgtgcccaatgctgagatcctgacagaagatgatgaatttgaaattggagacatcatccgctaccagtgcctgcccggcttcaccctggtgggcaatgccatcctgacctgccgcctgggggagcggctgcagatggatggagcccctcctgtgtgccaggtgctgtgcccagccaatgagctgcggctggacagcactggagtcatcctgagccctggctacccagacagctaccccaacctgcagatgtgtgcctggagcatctctgtggagaagggctacaacatcaccatgtttgtggagttcttccagacagagaaggagtttgatgtgctgcaggtgtatgatggccccaacatccagagccctgtgctgatcagcctgagcggggactacagcagcgccttcaacatcaccagcaatggacatgaggtgttcctgcagtggagcgctgaccacggcaacaacaagaagggcttccgcatccgctacatcgccttctactgcagcaccccagagagcccccctcatggctacatcatcagccagacaggaggccagctgaacagcgtggtgcgctgggcctgtgaccggggcttccggctggtgggcaagagcagcgctgtgtgcaggaagagcagctatggctaccacgcctgggatgcccctgtgcctgcctgccaggccatcagctgtggcatccccaaggcccccaccaacggcggcatcctgaccacagactacctggtgggcaccagggtgacctacttctgcaatgatggctaccgcctgagcagcaaggagctgaccacagctgtgtgccagagtgatggcacctggagcaaccacaacaagaccccccgctgtgtggtgatcagctgtggggagctgcccaccccacccaacggcaacaagattggcacccagaccagctatggcagcacagccatcttcacctgtgacctgggcttcatgctggtgggcagcgctgtgagagaatgtctgagcagcggcctgtggagcgagagcgagacccgctgcctggccggccactgcggcatccctgagctgattgtgaatggccaggtgattggagagaactacggctacagagacacagtggtgtaccagtgcaaccctggcttccggctgattggcagctctgtgcgcatctgccagcaggaccacaactggagcggccagctgcccagctgtgtgcctgtgtcctgtggccaccctggcagccccatctacggccgcaccagcggaaatggcttcaacttcaatgatgtggtgaccttcagctgcaacatcggctacctgatgcagggccccaccaaggcccagtgccaggccaaccggcagtggagccaccccccacccatgtgcaaggtggtgaactgcagcgaccccggcatcccagccaacagcaagcgggagagcaagattgaacatggcaacttcacctacggcaccgtggtgttctatgactgcaaccctggctacttcctgtttggcagctctgtgctgatctgccagcccaacggccagtgggacaagcccctgcctgagtgcatcatgattgactgtggccaccctggggtgcccccaaatgctgtgctgagcggggagaagtacaccttcggcagcacagtgcactacagctgcaccgggaagaggagcctgctgggccagagcagcaggacctgccagctgaatggccactggagcggcagccagccccactgcagcggagatgccaccggcacctgtggggaccccggcaccccaggccacggcagccggcaggagagcaacttccgcaccaagagcacagtgcgctatgcctgtgacaccggctacatcctgcacggcagcgaggagaggacctgcctggccaacggctcctggacaggccggcagcctgagtgcaaggctgtgcagtgtggcaaccctggcaccacagccaacgggaaggtgttcagaattgatggcaccaccttcagcagcagcgtcatctacagctgcatggagggctacatcctgagcggccccagcgtgcggcagtgcacagccaacggcacctggagcggcaccctgcccaactgcaccatcatcagctgtggggaccccggcatcccagccaacggcctgcgctatggagatgattatgtggtgggccagaatgtgtcctacatgtgccagcccggctacaccatggagctgaatggcagccgcatccgcacctgcaccatcaatggcacctggagcggcgtgatgcccacctgcagagctgtgacctgccccaccccaccccagatcagcaatggccgcctggagggcaccaactttgactggggcttcagcatctcctacatctgcagccctggctatgagctgtccttccctgctgtgctgacctgtgtgggcaatggcacctggagcggggaggtgccccagtgcctgcccaagttctgtggggaccccggcatcccagcccagggcaagcgggagggcaagagcttcatctaccagagcgaggtgtccttcagctgcaacttccccttcatcctggtgggcagcagcacccgcatctgccaggctgatggcacctggagcggcagcagcccccactgcatcgagcccacccagaccagctgtgagaaccctggggtgcccaggcatggcagccagaacaacaccttcggcttccaggtgggctctgtggtgcagttccactgcaagaagggccacctgctgcagggcagcaccaccaggacctgcctgcctgacctgacctggagcggcatccagcctgagtgcatcccccacagctgcaagcagcctgagaccccagcccacgccaacgtggtgggcatggacctgcccagccacggctacaccctcatctacacctgccagcccggcttcttcctggccggcggcacagagcaccgggtgtgccgcagtgacaacacctggacaggcaaggtgcccatctgtgaggccggcagcaagatcctggtgaaggaccccaggcctgccctgggcacccccagccccaagctgtctgtgcctgatgatgtgtttgcccagaactacatctggaagggcagctacaacttcaagggcaggaagcagcccatgaccctgactgtgaccagcttcaatgccagcacaggccgggtgaatgccaccctgagcaacagcaacatggagctgctgctgtctggagtgtacaagagccaggaggcccggctgatgctgcgcatctacctgatcaaggtgcctgcccacgcctctgtgaagaagatgaaggaggagaactgggccatggatggctttgtgtctgctgagccagatggagccacctacgtgttccagggcttcatccagggcaaggactatggccagtttggcctgcagaggctgggcctgaacatgtctgagggcagcaacagcagcaaccagccccacggcaccaacagcagctctgtggccatcgccatcctggtgcccttctttgccctgatctttgctggcttcggcttctacctgtacaagcagaggacagcccccaagacccagtacacaggctgcagcgtgcatgagaacaacaacggccaggccgcctttgagaaccccatgtatgacaccaatgccaagtctgtggagggcaaggctgtgcgctttgaccccaacctgaacacagtgtgcaccatggtgtag

SEQ ID NO: 229585 - DNA, 10617 bp, Artificial Sequence
  derived and/or modified sequence
atgaagggcatccggaagggcgagagccgggccaaggagagcaagccttgggagccgggcaaacggcgctgcgcaaaatgtggcaggttagacttcattctgatgaagaagatgggaatcaagtcgggatttactttttggaacctggtttttctacttactgtgagctgtgtgaaaggcttcatttatacctgcggagggaccctgaagggactgaatggcaccatcgaaagccctggcttcccgtacgggtacccaaatggagccaactgtacctgggtcatcattgccgaggagaggaaccgcattcagattgtcttccagtctttcgctttggaggaagaatacgactatctgtccctgtacgacgggcacccacatcctacaaactttagaactcggctgacaggattccacctgccccccccagtgacctccactaaatccgtgttttccttgcgcctgacatctgattttgccgtctctgcccatggttttaaagtgtactacgaggagctccagtcctcgagctgcggaaaccccggagtgccaccaaaaggagtgctatacggaactaggttcgacgttggcgacaaaatccgctatagctgtgtgacaggatatattttggacggccacccccaactcacttgcattgcgaacagcgtcaacacagcaagttgggattttcccgtcccgatttgtagggctgaagatgcctgcggagggacaatgcgcgggtcatcaggcatcatctcttcaccatcctttccaaacgaataccataacaacgcggactgcacatggaccattgttgctgagccaggcgataccatttctctcatcttcacggactttcagatggaggagaaatatgattacctggaaattgaggggagcgaacctccaacaatatggctctctggcatgaacattcctccgcccataatttctaacaagaactggcttcgtttacattttgtgaccgattcaaaccaccggtacaggggatttagtgcgccctatcaggttaaaaaggccattgatttcaagagtcgcggcttcaaattatttcctgggaaagataactccaataagttcagtatcttgaatgaggggggaatcaaaactgcctctaacttatgtccagatccgggagaacctgagaacggaaaaagaattgggtccgactttagcctgggtagtacggtccaattcagctgtgacgaagactacgtacttcagggtgccaagtccattacctgccagcgcatcgccgaagtgttcgctgcttggtcagaccacagacctgtttgtaaagttaaaacctgtggaagcaacctccagggccccagcggaacatttactagtcctaattttcccttccagtatgactcgaatgcgcaatgcgtgtgggttataacggctgtaaacacgaacaaggtcatccagatcaactttgaagagttcgacctggagatcggctacgacacacttaccataggcgatggcggggaggttggggaccctcggactgtgctacaagtgctgacagggagcttcgtgccagatttaatcgtctctatgagtagccagatgtggctgcacctacagaccgacgagagcgtcgggtcagtcgggtttaaagtcaattataaggagatagaaaaagaatcttgcggcgatcccgggactcctttgtacggaatccgagagggggatgggttctctaacagagacgtactaaggtttgagtgccagttcggctttgaactgattggtgaaaaatcaatcgtatgtcaagagaacaatcaatggagcgccaatattcctatctgtatattcccctgcctgtccaactttaccgccccaatgggcaccgtgctcagcccagactatcctgaaggctatggtaataatttaaactgcatctggaccattatcagcgaccccggcagtcgcattcacctgtctttcaacgactttgatcttgagtctcagttcgacttcctggctgttaaagacggagacagccccgaatccccgattcttgggacatttaccggcgccgaggtccctagccatctgactagcaactctcacattctgagactggaatttcaggccgatcacagtatgagcggccgaggattcaacatcacatacaacaccttcgggcacaatgagtgtccggatcctggcattcccatcaatgcaaggcgattcggagacaactttcagctgggctccagcatatcagttatttgtgaggagggttttataaagacacagggcaccgaaacaataacctgtattttaatggacggtaaagtgatgtggtcagggctgatccccaagtgcggggctccttgtgggggccactttagcgcgccatcgggcgtgattctttcacctgggtggcccggatactacaaagatagcctgaactgtgaatgggtgatcgaagctgaacctggtcatagcatcaagatcactttcgagagatttcagaccgaacttaactacgacgtcttggaagtccatgacgggcctaacctgctctctcccctgctcgggtcttataacgggacccaggtcccgcagtttcttttctcctctagcaacttcatttacttactgtttacaacagataatagcagatctaacaacgggttcaaaatccattatgaatctgtgactgtgaatacctactcctgtttggacccaggaatcccggtacacgggagacggtatggccatgatttcagcatcggatctaccgtcagtttctcttgtgacagcgggtatagacttagccatgaggaaccactgctttgtgagaaaaaccattggtggtcccaccctctcccgacctgtgacgcgctttgtgggggcgatgtgagaggacctagcggaaccatcctgtcaccaggatacccagagttttacccgaactcactgaattgtacatggacagtggatgtgacccacggtaagggggtgcagtttaattttcacacatttcacctcgaggaccaccatgactacctgttgattacggaaaatggctctttcacccagccactggcccggctcaccggttcagacctaccacctaccataaatgcaggactgtacgggaacttcagagcgcagctacgcttcatttctgacttctctatcagctatgagggctttaatataacattcagcgagtataatcttgagccgtgtgaagaccctggaatacctcagtatggcagcaggataggatttaatttcggcattggagatactttaacatttagttgtagctctggctaccgacttgaaggaacatcagagataatttgcctagggggaggccggagagtctggtctgcccccctgcctcgctgcgtcgccgagtgcggagcgtcagccaccaataatgaaggcatactactgagcccaaattacccgctgaattacgagaataatcatgagtgtatctactctatccaggttcaagctgggaaaggtattaacatctccgcgagaaccttccatctagctcaaggagatgtgttgaagatttacgacggtaaggataagaccacgcatctgttgggggcgtttaccggggcaagtatgcgggggttgaccctttcaagcacaagtaaccagctgtggctggagtttaacagcgatactgaaggcacagacgagggatttcagctggtgtatactagtttcgaactctctcactgcgaggaccctggcattccacagttcgggtacaaaatttctgatcagggacactttgccgggagtacgatcatttacggctgtaatccaggttacacattgcatgggtcaagtctgctaaagtgtatgacaggcgagcgacgggcatgggattaccccttgccttcatgcatcgccgagtgcgggggacgctttaagggcgaaagctcaggaaggatactgtctcccggctatccctttccctatgacaataatttgaggtgcatgtggatgatcgaagtagaccccggcaacatcgtcagccttcagttcttagcttttgatacagaagcatcacatgacatccttcgggtctgggatggcccccctgagaatgacatgctgctgaaggagatatctggctccttgataccagaagggattcactccacactcaacatcgtcacaatccagttcgacactgatttttacatcagtaagtcaggatttgcaatccagttctcctcttcggtagctacagcgtgtagggatcccggagttcccatgaacgggacgcggaatggagacggacgggaacctggggacacagtcgtgttccagtgcgaccccgggtatgaactgcaaggggaggagagaatcacctgcattcaagtggaaaataggtatttctggcagccatctcccccagtatgcattgccccctgcggtgggaacctcacaggctcaagcggtttcattctctctcctaatttcccacacccgtacccgcacagcagggattgtgattggacgattacggttaatgctgactatgtgatttctttggcctttatcagcttctctatcgagcctaattatgattttctgtacatatacgacggaccggactccaattccccgctcatcggctctttccaagatagcaaactgcctgaacgaatcgaaagcagctcaaatactatgcatttggccttccgcagtgacggtagtgtcagttacactgggtttcatctagaatataaggcgaagctgcgagaaagttgctttgaccctggaaatatcatgaacggcactagactgggaatggactataagcttggttctaccgtgacatattattgcgacgctgggtatgtgctacagggttactccacacttacctgcattatgggtgatgatggacgccctgggtggaacagggcccttcccagctgccacgctccatgcggctccaggtctaccggttcagaggggacagtcctgagtcccaactaccctaagaactattccgtaggtcataattgtgtttactcaatcgcggtccctaaggagttcgttgtttttggccaatttgtgtttttccaaactagtctgcacgacgtggtggaggtgtacgacgggcctacacaacagtcaagcctacttagttcactgtccgggtcacactctggggagagtcttcccctctccagcggcaatcagattactattagatttaccagtgtcgggcctattacagccaaagggttccatttcgtgtatcaggctgtgcctagaaccagcagtacccagtgcagctctgtgcccgagcccaggtttggacgcagaatcgggaacgagttcgccgtgggttcttcagtgctgtttgattgtaatccagggtatatacttcatgggagcatagccatcagatgtgaaacggtccctaatagtctcgcacagtggaatgatagcctgcctacctgtatagtcccatgcggagggatcctcacaaagcggaaaggcactattttgtctcccggttacccagagccctacgataacaacctgaattgcgtgtggaaaataacagtgccagagggcgctggcatacaagtccaggtggtgagctttgcaactgagcataactgggactccctggacttctacgacggtggggacaacaacgcgcctagacttggaagctacagcggaactacaatcccccaccttctcaacagcacaagtaataatctgtacctgaactttcagagcgacatcagcgtgtccgcagcagggtttcacctcgaatacaccgccattggactggacagttgccccgaaccccagaccccctcgagcggcataaagatcggggatagatatatggtgggggacgtggtcagttttcaatgtgaccaaggatacagcctgcagggccactctcatataacatgcatgcccggcccagtacggcgatggaattatcccattcccatatgtctggcacaatgcgggggggccatgtccgacttctcaggggtcattctcagccccgggtttcccggcaattatccaagtagtctggactgcacttggaccatcaatctccccattggcttcggagtccacctgcaatttgtaaatttttccaccgaaactatccacgactacctggaagtgcgcagcgggtcaagtgagacatcgactgtcatcggccgcttgtccgggcctcagatcccttcctccctgttttccacaacccacgagacctccctctacttccactcagattatagccagaacaagcaaggcttccatatagtgtatcaggcttatcaactccagtcttgtcccgatcccagaccatttaggaacgggttcgtaatcggcaatgattttaccgtaggccagacgatcagttttgaatgcttccctggatatacattgattggaaacagtgccctgacctgcctccatggcgtgagtcggaattggaaccatcccctcccacgatgcgaagccctatgtggcggtaacattaccgccatgaacggcacaatttatagcccaggttatcctgacgagtatcccaactttcaggattgcttttggcttgtgcgtgtccccccaggaaatgggatatatatcaattttactgtgctccagacggaacctatatacgacttcattaccgtttgggacggtcccgatcagaactctcctcaaataggccaattcagtgggaacacggctttagaatccgtgtatagcacgtccaatcagatactcattaaatttcattctgactttaccactagtggattcttcgtcctctcataccacgcgtaccagctgcgtgtgtgccagcctccccctccagtgcctaacgctgaaattctgacagaggatgatgaattcgagatcggcgacataatccggtaccaatgtctccccggattcacactcgtaggcaacgcaatactgacctgccgactgggggagcgactgcaaatggacggagcacctcccgtgtgtcaggtgctgtgccccgcaaacgaactgcgcctggattccacgggcgtgatcctgagccctgggtaccctgatagttatcctaatctgcaaatgtgtgcctggtctatatcagtcgaaaaaggatataacatcacaatgtttgtcgaattcttccaaacagagaaggaattcgacgtgctgcaggtgtatgatggccccaacattcagtcccccgtacttattagcctgtctggcgactattcatctgccttcaacataacatccaacgggcacgaagtgtttctgcagtggtccgccgaccacggaaacaataagaaaggattccgcatacgctacattgcattctactgtagcacacccgagtctcccccacatggatacatcataagtcagactggcggtcagctcaacagtgtggtgcgatgggcttgcgatcgggggtttaggctcgtcggtaagtcgagtgctgtttgccgcaagtctagctacgggtaccacgcatgggacgctcccgtcccggcgtgccaggctatcagttgtggaattccgaaagccccaactaatggcggcatcctgaccacagactatctggttgggacgcgcgttacatacttctgcaatgatggttaccggctttcttcaaaggaattaacaactgctgtgtgtcagagcgacggaacctggagcaaccacaacaagaccccgcgatgtgtcgtgattagctgtggggaacttccaacacccccgaacgggaacaaaattggaactcagaccagctacgggtcgaccgcgatatttacatgtgacttagggtttatgttggttggtagcgcagttcgggagtgcctgtcatccggactgtggtcagaatccgagacaagatgcctggctggtcattgcggaataccagagttgatcgtgaatggacaggtaatcggagaaaattacgggtaccgtgatacagttgtataccaatgcaaccctggctttagattaatagggtccagcgttagaatttgtcagcaagaccacaattggagcggacaattaccctcatgcgtacccgtcagctgtggtcacccgggatccccaatatacggtcggaccagcggaaatgggttcaacttcaacgacgtcgtgaccttctcctgtaacatcggatacctgatgcaaggtccgacaaaggcccagtgtcaagctaatcgacagtggtcgcacccgccccccatgtgcaaagttgtcaattgttctgatcctggtatccccgcgaactctaagagagagagcaagatcgagcacggaaacttcacttatggaacggtggtcttctatgactgtaatccaggctacttcttgtttggctccagtgtcctgatatgccagccaaatggacagtgggataagcctctcccagaatgtattatgatcgattgcggacaccctggcgtgccaccaaacgccgtcttgagcggcgagaaatataccttcgggtcgaccgtgcactattcatgtacagggaagagatctctgctcggtcagtcgtccagaacctgtcagctgaatggacactggtccgggagccagccgcactgctctggggacgccaccggaacatgtggcgatcccggcaccccaggacacggttctaggcaggaatctaatttccgcaccaaaagcacggtgcgctatgcctgcgacaccgggtacatccttcacggaagcgaggagcggacatgtctagccaatgggtcttggaccgggcgccagccagagtgtaaggctgtgcagtgcgggaatccaggcaccactgctaatgggaaagtgttcaggattgacgggaccaccttttcatcatcagttatatattcgtgcatggaaggttatattctgagcgggccatccgttcggcaatgcactgctaacggaacctggtccgggacccttccgaattgcaccataatatcctgtggggatccgggaatcccggctaatggcctaagatacggagacgattatgtagtggggcaaaacgtctcttatatgtgccaacccgggtacaccatggagcttaacggctctcgaatccgtacctgtactattaacggaacttggtctggcgttatgccgacgtgccgagcagtgacatgccccacacctccacagatttccaacgggcgactagagggaacaaacttcgattggggattctccatcagttatatctgctctccgggctatgagctcagctttcctgctgttcttacatgtgtcggcaacgggacctggtccggcgaggtcccccagtgccttcccaaattctgtggcgatccaggtatcccagctcagggaaaacgcgaaggtaagtcattcatctatcagtctgaggtgagcttttcttgcaatttcccgttcatactggtaggatccagcacaaggatttgccaagccgacggcacttggtcaggatcctctccccactgcatcgaacctactcagacatcctgtgagaaccctggagtaccgcgtcatggtagtcagaataatacatttggctttcaagttggatcagtggtgcagtttcactgcaaaaagggacatctcctgcagggttccaccacacggacctgtttgccagatctcacatggtctgggattcagcctgagtgcataccccactcttgtaagcaacctgaaacaccagctcacgcgaacgtggtgggaatggatctgccttcacacggatacaccttgatttacacttgccaacccgggttttttttagccgggggcaccgaacatagagtgtgccgttctgataatacctggactggtaaggtgcctatttgtgaggccggttccaagatcctggtgaaagatcctagacccgcactggggactccttctccgaagctgagcgtgccggacgacgtcttcgcgcaaaactacatctggaagggaagttataacttcaaggggcggaagcagccaatgactctgacggtgacatcattcaatgccagtactgggcgagttaatgcaactctgagtaattctaatatggaactccttctctccggggtttacaaatcccaggaagcacgcctgatgttgcgcatttatctcatcaaggtcccagcccatgcatcagtgaagaaaatgaaagaagagaattgggccatggatggatttgtgtcggcagagcctgatggtgccacctacgtgtttcaaggttttatccagggaaaagattacggacagtttggtcttcaacggctgggcctcaatatgtccgaaggaagcaactcttcaaatcagccccacggcaccaattccagctccgtggctatcgccatcctcgtgccttttttcgctctgattttcgctgggttcggtttctatctttataaacaaagaacagcccccaagacccagtacaccggttgcagtgtgcatgagaataataacgggcaggcagcgttcgagaatcccatgtacgatactaatgctaagtcagtggaaggcaaggccgtgagatttgatcccaacttgaatacagtttgcacaatggtatag

SEQ ID NO: 229586 - DNA, 10617 bp, Artificial Sequence
  derived and/or modified sequence
atgaaaggcattagaaagggggagtctagggccaaggaatccaagccttgggaaccaggtaaaagacgctgcgctaaatgtggcaggctggactttattctcatgaaaaaaatggggattaagtccgggtttaccttctggaatctagtcttcctcttaacggtttcttgcgtgaagggttttatctacacctgtgggggaacccttaagggcctgaacggcacgattgaaagccctggatttccatacggctacccaaacggagccaattgtacgtgggtgatcatcgctgaagagcgcaacaggatacagatagtgttccagtcttttgccttggaggaagagtacgattacttatcgctgtatgatggtcatcctcatcctacaaacttccggactaggctgaccgggtttcaccttccacctcctgtcacttcaacaaagtcagttttctcattgaggctaacaagcgattttgccgtatccgcacacgggtttaaagtgtattacgaagaactgcagtctagctcttgcggtaacccgggagtcccaccaaaaggggtcctctatggaacccgctttgatgtgggcgacaagattcgatactcatgtgttaccggctacatcttggatggtcatcctcagctgacatgcatcgctaactccgtaaatactgccagctgggatttccctgtaccaatctgcagggctgaagacgcctgcggcggtacaatgcggggatccagtgggattatcagcagcccaagcttccctaacgagtaccacaataacgccgattgcacctggacaattgtggcagaacccggtgacacaatatctctgatctttaccgacttccaaatggaagagaagtacgactacctggaaatcgagggctccgagcctccgacaatctggctctctggcatgaatataccacctcccatcatatctaacaaaaactggctgaggctccactttgtaactgactctaaccatcgatatcggggattttctgcaccatatcaggtgaaaaaagccattgacttcaaaagtcggggttttaagctcttccccggtaaagataactctaacaagttcagcatacttaatgaagggggtatcaagaccgcctccaatctctgccctgatccgggagaaccggagaacggcaagcggattgggtccgatttcagcctaggctccactgtgcaatttagttgcgatgaagattacgtgctgcaaggggctaagtccattacttgccagcgaatagccgaagttttcgcggcttggtctgatcacagaccggtgtgtaaagttaagacgtgtggatctaacctccaggggccttctggaacattcacttcccccaatttcccattccagtatgactctaacgcccaatgtgtctgggttataacggctgtgaatactaacaaggtcatacagatcaatttcgaagagttcgatctggagattggatatgacacgttgactatcggcgatggcggagaggttggcgaccccaggaccgtcttacaggttctcaccgggtccttcgtccctgacctgatagtgtctatgtcaagccagatgtggcttcatctccagacggatgaaagcgtgggatcagtgggattcaaggtgaactacaaggaaatagaaaaagaatcttgtggagacccgggtacaccgctatatggcataagggagggagacggtttttctaaccgcgacgttttacgattcgaatgtcagtttgggtttgagttaatcggcgagaagagtattgtatgtcaggagaataatcagtggtcggcaaacatccctatatgcatcttcccttgtctctccaactttaccgcacctatgggcacggtgttaagcccagactacccagagggctatgggaataacctaaattgtatatggacaataatctctgatcccggaagccgtatccatctgtcctttaatgacttcgacctggaatctcaattcgattttttggctgtgaaagacggggacagcccggagtcgcccattctgggaaccttcaccggcgctgaggtgccctcgcatctcacgtctaattctcatatcctgcggctggagtttcaggccgatcactccatgagtggccgagggttcaatattacttacaacacttttgggcacaatgaatgtcctgaccccggaatcccaatcaacgctaggagattcggagacaatttccaactggggtcttcaatcagcgtgatttgcgaggagggctttatcaaaactcaaggtacagaaactattacatgtatcctcatggatggaaaggttatgtggtctggactgattcctaaatgcggcgctccatgcggagggcatttcagtgcgccatcaggcgtgatcttatcacctggctggccaggctactataaggatagcctgaattgcgagtgggtgattgaggcggaaccagggcactccataaaaattacgttcgagcggtttcagacagaattaaattatgacgtccttgaagtccacgacgggcctaatctgctctctccgttactcgggagctataatggtacacaggtgcctcagtttctattcagcagcagtaacttcatctacctcctgttcactacggataattctcgctcgaacaatggctttaagatccattatgaaagcgttactgtcaacacctacagttgcctggacccgggtattccggtccacggcaggagatatggccatgacttttctatcgggtccaccgtgagtttctcttgtgactccgggtatagactaagccacgaggaacccctcttgtgtgaaaaaaaccattggtggagtcaccccctgccgacctgcgacgccctgtgcggtggcgacgtaagaggcccttctggaactatactgtccccgggatacccagagttttatccgaactctctgaactgcacctggacagttgatgttacccacggaaaaggtgtgcagttcaatttccatacattccaccttgaagatcatcacgattatttactcatcactgaaaatggttcattcacacagccattggcacggctcacaggctcagacttaccgcctacaataaacgctggactatacggcaatttcagggcccaactgcggtttatctcagacttctccatatcctacgagggtttcaacattacatttagtgagtataatctcgaaccctgcgaggatcctgggatcccgcagtatggtagccggatcggattcaatttcggtattggggataccctgaccttctcctgttccagcgggtatcgcctggagggcacatccgaaatcatttgcctcgggggaggtaggcgcgtgtggagcgctcccttacccaggtgcgtcgccgagtgcggagcctcagctacgaataatgagggcattcttctcagcccaaactaccccctcaactatgaaaataaccacgaatgtatatattcgattcaggtccaagccggaaagggcattaacatttcggcgaggacgtttcacctcgcgcagggagatgtcctgaagatttacgacgggaaagataagactactcacttactgggcgcttttacaggcgcttcaatgaggggccttactttgagctcgacgagtaatcaattgtggctagaattcaacagcgatacggaaggcaccgacgaagggttccagttggtgtacacctcatttgagctgagtcattgcgaggaccccggtatacctcagttcgggtacaaaatcagcgaccagggccacttcgcgggaagtactatcatctatggctgcaaccccggttatactttacatggcagttctctgctcaagtgcatgactggcgaacgaagagcttgggattacccactcccatcgtgcatagcggaatgcggcggtaggttcaaaggggaatcttcaggaagaatcctgtcccccggttacccattcccatacgataataacttaaggtgtatgtggatgatcgaagtagatcctgggaatatcgtgtccctgcagttcctcgcattcgatactgaagcttctcacgacatccttagggtttgggacggccctccggagaacgacatgttgctgaaagaaatttccggttcactcattcccgaggggatccactccactctcaatattgtgacaattcagtttgacacagatttttatattagcaagtcaggcttcgccatccagttctctagcagcgttgctactgcctgccgcgaccctggggtaccaatgaatggcactcggaatggagacggacgggagcccggtgacaccgtggtcttccagtgtgatcccggatacgagctccagggtgaagagaggataacctgcatacaggtggagaaccgttacttctggcagccatcaccaccagtatgtattgccccttgcgggggtaatttaaccggctcctccggcttcatcctctcacccaactttccccatccgtatcctcactcccgcgactgcgactggaccattaccgtaaacgccgattatgtcattagtctcgcattcataagcttctccatcgagcccaactacgacttcctctatatatacgacggcccagactctaatagccctctgattggatcattccaggactccaaactacctgagcgcattgaatcttcttccaataccatgcacctggcgttcaggtccgacggatcagtgagttacactggatttcatcttgaatataaggcgaagctgagggaatcgtgttttgatccaggcaacattatgaatgggacacgtttaggcatggactacaagctaggaagcacagtgacttactactgcgacgctggatacgtgctgcagggctactccactcttacttgcattatgggcgatgatggacggccaggatggaatcgagccctccctagctgccacgcgccttgcggatctcgttccacggggtcagagggcaccgtgctgagccctaattacccgaaaaattacagtgtggggcacaattgcgtgtactccattgcggtgccaaaggagttcgtagtgtttggccaatttgttttcttccaaacatccctacacgatgtggttgaagtgtacgatggcccaacccaacagagctcgctcttgtcttctcttagcgggtcccactcaggcgaatcactgccactgtcatcagggaatcaaattacaatacggttcactagtgtgggaccaatcacagcaaagggcttccacttcgtgtaccaagcagtgcctagaactagctctactcagtgcagctcagttcctgaacctagatttgggagacgaatcggcaacgagtttgcagtcggctcttccgtgctctttgattgtaatccaggttacattttgcacggatccatcgctatccggtgcgagaccgttccaaactccctcgctcagtggaacgacagtctcccaacttgtatagttccatgcggaggaatcctgaccaagaggaagggaactattctttcccccggatatcctgagccttacgataacaatttgaattgtgtgtggaaaatcacagtgcccgaaggcgcagggatacaggtgcaggtggtgtccttcgcgactgagcacaattgggactcgctagatttctacgatggtggggacaataacgcaccgaggctgggctcatatagtggaacgacgatccctcacctgctgaactcaactagcaacaacctctaccttaatttccagagcgatatttctgtgagcgccgctgggtttcatctggagtacactgccattggcctggacagctgtcccgaaccccagacccctagttccggcattaagattggtgacagatatatggtgggggatgtagtgtcatttcaatgtgatcaggggtacagtctgcagggccactcccatatcacctgcatgcccggaccggttcggaggtggaattatccaattccgatttgtctggcccagtgtggaggtgcgatgtctgatttcagtggcgtaatcctttctccgggattccccggaaactaccccagttctcttgactgtacttggactattaatctacctattggatttggagtccacctccaatttgtaaatttcagcaccgaaacaattcacgactatcttgaggtccggagcggtagcagcgaaacatcaactgtgatcggcaggctgtctggaccgcagataccgtcgtctcttttttctactacccacgagaccagcctgtattttcacagcgactattcccagaacaaacaaggattccacatagtgtaccaggcataccagctgcagagttgtcccgaccccaggccgtttaggaacggattcgtcatcggaaacgacttcacagtaggacagactattagttttgaatgctttcctggttacacgttaatcgggaatagtgctcttacctgcctccacggcgtgagccgcaactggaaccaccctttacctcggtgtgaggcgctctgcggcggtaatatcactgccatgaacggcactatctacagcccgggatacccagacgaataccccaatttccaagattgcttttggctggtacgcgtgccgccaggcaacggcatctatataaattttactgtccttcagaccgagcctatttacgactttattacagtctgggacgggcctgaccagaacagtccacagatcggccagttctccgggaataccgccttggagagtgtttactctacttcaaaccagattttgattaaatttcactctgattttaccacatcgggtttcttcgtgctaagctaccatgcttatcagctgcgagtctgtcagccaccaccgcctgtgcccaacgccgaaattcttactgaggacgatgaatttgagattggtgacattatccggtaccaatgtctgccaggattcacactggtgggcaacgcaatactgacctgtagattgggggagagactgcagatggacggcgcacccccagtgtgccaagttttatgccctgcgaacgaactcaggcttgattccaccggggtgatactgtcgcctggctatcccgactcctatcccaatcttcaaatgtgtgcatggagcatctcggttgaaaaagggtacaacattactatgttcgtggagttcttccaaactgaaaaagagtttgatgtgcttcaggtgtatgatggccctaatatacagtcccccgtgttgatttcactgagtggggactacagcagtgcttttaacattacctccaatggccacgaagtgtttcttcagtggagcgctgatcatgggaacaacaaaaagggattcagaattaggtacattgccttttattgctctacacccgaatccccccctcatggctacatcatctcacaaacgggcggacagctaaactctgtcgtgagatgggcttgcgacaggggatttcggctggtgggaaagtctagcgctgtgtgccgcaagtccagttatggataccacgcctgggatgcccctgtgcctgcctgccaagctatcagctgtggtatcccaaaggctccaaccaatggcggtatcctgactacagactatctcgtgggtacccgtgtaacgtacttttgcaatgatggataccggctcagttcgaaggaactgacaaccgcggtgtgtcagtctgacggaacttggagcaatcacaacaaaaccccccgatgcgtcgtaatcagttgcggcgaactgcccaccccacccaacggcaacaagatcggcacacaaacctcttatggtagtactgccattttcacatgtgacctgggttttatgctagtgggctctgcagtgagagaatgccttagcagcggcctttggtccgagtctgagactaggtgcctggcaggccattgtggcatcccagagctgatcgtgaatggccaggtaatcggggagaactacggctatagagataccgtggtttaccagtgcaatcccggattcaggctgattggatcatctgttaggatctgccagcaggaccataattggtcgggtcagctgcccagttgcgtccctgtgtcttgcgggcatcccggatcccccatctacggtcgcaccagtgggaacggcttcaactttaatgacgtggtcacctttagctgcaatattggatacctcatgcagggcccaacaaaggcacaatgccaagctaatagacagtggtcccaccccccaccgatgtgtaaggtcgttaactgcagcgatcccggaatccccgctaactcaaaacgcgagagcaaaattgagcatggtaacttcacgtatggcactgtggtgttttatgactgtaatccaggatacttcctttttgggtcctccgtgctgatctgtcagcccaatggtcaatgggacaaacccctcccggaatgcattatgatcgactgcggtcatccaggggtgccgcctaacgccgttctatcaggtgagaagtacacattcggcagtaccgtacattattcgtgtaccggtaagcgctctctccttggacagagcagcagaacatgccaactgaacggccattggtctggctcccagcctcactgcagcggcgacgcaaccggcacctgtggcgacccaggcacaccaggccatggcagcaggcaggagtctaatttccggactaaatcaacagtaagatatgcttgtgacactggctatatactccacggatccgaggagcgaacttgccttgccaacggaagctggactggcaggcagcccgagtgtaaggcggtgcagtgtggcaatcctggaacaaccgccaacggcaaagtctttcgcatcgacgggaccacatttagcagcagtgtgatctactcctgtatggagggctatatcctgtccggtcctagcgtcaggcaatgcacagctaacgggacctggagtgggacactgccgaattgcacaattataagctgtggtgatcctggtattcctgctaatggcctccgctatggcgacgattatgtggtcggccagaacgtttcgtacatgtgccaacccggttataccatggagctgaatgggtcaagaatcagaacctgcacaatcaatggcacttggtccggagtgatgcctacttgcagggccgttacctgtcccacacccccacagatttcgaacgggaggcttgagggaacaaatttcgattggggtttctcaatctcctacatatgtagtccaggctatgaacttagttttcctgccgtgttaacttgcgtcggaaatggaacctggtctggggaagtgccacagtgtctgccgaaattttgcggagaccctggaatccccgcacagggtaaacgcgaggggaaatctttcatctatcagagtgaagtgtctttctcctgtaacttccccttcatcctcgttggcagctctactaggatttgtcaggcggatggcacctggagtggtagctcccctcattgcattgaacctacccaaacttcttgtgaaaacccgggagtgccaagacacggatcccagaacaatacatttggttttcaggtgggctctgttgtacaatttcactgcaagaaagggcatttgttacagggctcgactacacgcacgtgcctacccgaccttacgtggtcgggtatccagccggaatgcatccctcactcatgtaaacagcccgaaactcctgcccacgctaatgtggttggcatggacttgccttcccacggctacaccctgatctacacatgtcagcctggcttctttctggccggaggtacagagcacagggtttgtcggagcgacaacacatggacaggcaaagtgcctatatgtgaggccggaagcaaaatcctggtgaaggatccgaggccagcgctgggtacaccctcaccaaagctttccgtccccgatgacgttttcgctcaaaattacatttggaagggcagctacaactttaagggacgaaaacagccaatgacactcactgttaccagtttcaacgcatcgactggcagagtgaacgccaccctgagcaacagcaacatggaattattgctgtccggcgtgtataaatcacaagaggcgcgactaatgctgcggatctacctgattaaagtgcccgctcatgcttctgtcaaaaaaatgaaagaggagaactgggccatggacgggttcgtgtcagctgaaccagacggtgccacatacgtgtttcaggggttcatccaaggtaaagattacggccaatttggtctgcagaggctcggtctgaatatgagtgagggttcaaatagttccaaccagcctcatggtaccaacagcagttcagtcgccatcgcaattctggtgccattcttcgcgctgatctttgcagggttcggtttctacctgtataagcaaaggactgctcctaaaacacaatacaccgggtgctcggtgcacgagaacaataatggacaggccgcttttgagaatcctatgtacgatacaaatgccaaaagcgtggaggggaaggcagttagattcgacccgaatttaaacactgtctgcacgatggtatag

SEQ ID NO: 229587 - DNA, 12485 bp, Artificial Sequence
  derived and/or modified sequence
ggagcaggaattaggagctcgcgaataatatgaaagggatccgcaaaggggaaagccgagcaaaggaatccaaaccctgggagcctggcaagcgaagatgcgctaaatgtggccgcctagacttcatcctgatgaagaaaatggggattaaaagtggatttacgttttggaacctcgtctttttattgacggtgtcttgtgtgaaaggatttatttatacatgtggtggaactttaaaaggacttaatggcactatagaaagccctggttttccatatggatatccaaatggtgcaaactgcacatgggtaataatagcagaagaacgaaatagaatacaaattgtttttcagtcatttgctctagaagaagaatacgactacttatcattatatgatggacatcctcatcctacaaactttaggacaaggttaacaggattccatctgccacctccagtgacaagtaccaaatctgtgttctcactacgtttgaccagtgattttgcagttagtgctcatggatttaaggtatattacgaagaattgcagagtagctcttgtggaaatcctggtgttccacccaaaggtgtattatatggcacaagattcgacgtcggggacaagatccgctacagctgtgtaactggatacatccttgatggccaccctcagctcacctgcatagccaattcagttaatacagcttcgtgggattttcctgttcctatctgtagagctgaagatgcttgtggaggaacaatgagaggatccagtggcatcatatccagccctagttttcctaatgagtaccataacaatgctgattgcacttggaccattgtagcagagcctggggacacaatttcactcatatttactgattttcaaatggaagagaaatatgattacttagaaatagaaggttctgagccacctaccatatggttatctggaatgaatataccaccaccaattatcagcaacaaaaactggctcagactgcattttgttacagacagcaatcatcgataccgtggatttagtgctccctatcaagtgaaaaaggccatagattttaaatctagaggatttaaattgtttccagggaaagacaacagcaacaagttttctatcttaaatgagggaggtattaaaacagcttccaatttatgcccagatccaggagaaccagaaaatgggaagagaatcggatcagattttagccttggatcaactgtgcagttctcttgtgatgaagattatgtcctacagggcgcaaagagcatcacctgtcaacggatagctgaagtttttgctgcttggagtgatcacaggcctgtgtgtaaagtgaaaacgtgtggctctaatcttcaaggaccaagtggtacctttacatctcccaactttccgttccagtatgacagcaatgcacaatgtgtctgggtcatcacagcagtgaatacaaataaggttatccagataaattttgaagaatttgatctggagattggctatgataccttgacaattggcgatgggggcgaagttggagatcctaggacagtgctccaagtgctgactggaagctttgtaccagacttgatagtgagcatgagtagccaaatgtggctgcaccttcaaacggacgaaagtgttggatctgttggtttcaaggttaactacaaagaaattgagaaagaaagttgtggtgatcctggtacacccttatatggaattagagaaggcgatggattttctaatcgtgatgttttaaggtttgaatgccagtttgggtttgaattaattggagagaaatccattgtttgtcaagagaataaccaatggtctgcaaacatacccatctgtatctttccctgcctgtctaactttactgcaccaatgggaacagttctttctcctgattacccagaagggtatggaaataatttaaattgcatctggacgataatctctgatccagggagccggatacatctttctttcaatgactttgacctggaatcccagtttgatttccttgctgttaaagatggtgactctccagaatccccaattcttggaacctttactggggctgaggtgccttcccatcttactagtaatagtcacatactgcgattggaatttcaggctgaccactcaatgtcaggacgtggctttaacatcacttacaacacatttggacataatgaatgccctgatcctggaataccaatcaatgcacggcggtttggggacaactttcaattaggaagttcaatttcagttatttgtgaagaaggatttattaaaacccagggaacagaaacaattacatgtattcttatggatggaaaagtaatgtggagtggactgattccaaaatgtggagccccatgtggtggccatttttcagctcccagtggagtgattctctcaccaggatggccaggatactacaaagactctttgaattgtgagtgggtgattgaagctgaacctggacactctatcaaaattacatttgaaagatttcagactgaactgaattatgatgttctggaagttcatgatgggccaaatcttctgtcacccttgcttggatcttacaatggcacccaagtgccccagtttctatttagtagcagtaattttatataccttctatttacaacagacaacagtcgttccaataatggtttcaagattcattatgaaagtgttacagtgaacacgtattcttgtttggaccctggcatacctgtacatggccgtcgctatggtcatgatttctccattggctctactgtttcatttagttgtgattcaggatacaggttgagtcatgaagagccccttctatgcgaaaaaaaccactggtggagtcatccacttccaacctgtgatgcattatgtggaggagatgttagagggcctagtggaacaatcttatcacctggttacccggaattttatccaaattctctgaattgtacatggactgttgatgtaacccatggaaaaggtgtgcagttcaacttccacacttttcatttggaagaccatcatgactacttactgatcacagagaatggcagttttacccaaccactggcacgcctgactggttcagatcttcctccaacaatcaatgctggtctctatggaaatttcagggctcaattgcgtttcatttcagatttttcaatatcatatgaaggatttaacataacattctctgaatataaccttgaaccttgtgaagatcctggcattcctcaatatggtagtcgaatcgggttcaactttgggattggtgacactctgaccttctcatgctcttcgggttatcgactggaaggaacatcagagatcatctgtcttggtggtggccgacgagtgtggagtgcacctctgccaaggtgtgtggctgaatgtggtgcatctgcaacgaataatgaaggaattttgctgtctccaaattatccactcaactatgaaaacaaccatgaatgcatttatagtattcaggttcaagcaggaaagggaatcaatatttcagccagaacatttcatttagcacaaggagatgttcttaagatttatgatggaaaagataaaacgactcatctactaggtgcttttactggtgcatctatgcgcggactgacacttagtagtacttcaaatcaactctggctagaatttaattccgatactgaagggacagatgaaggctttcaacttgtgtataccagttttgaactctcacactgtgaagatcctggcattccacaatttggatacaagatcagtgaccaaggccactttgctggtagcaccatcatttatggatgcaatccaggctacactctccacggaagtagccttctcaagtgcatgacaggggagagaagggcatgggactatcctctgccttcctgtattgctgaatgtggaggtcgttttaaaggagaatcatcaggaagaatcttatctcctggctatccttttccatatgacaataacctgcgttgcatgtggatgattgaggtagatcctggaaatattgtcagcttgcagtttcttgcttttgatacggaagcatcacatgatatactccgagtctgggacggtccaccagaaaatgatatgcttttaaaggaaattagtggatctcttattcctgaaggaattcatagcaccctcaatatagtaaccatccagtttgacacggatttttatattagcaaatctggatttgcaattcagttttcaagttctgttgccactgcgtgtcgtgacccaggggtccccatgaatgggactcgaaatggggatggaagagaacctggggacactgttgtttttcaatgtgacccaggatatgaacttcaaggagaggaaagaataacctgcattcaggtagaaaatcggtacttctggcagcccagcccaccagtctgtatagcaccctgtggaggcaatttaacaggatcttcaggctttattctttcaccaaacttccctcatccatatccgcatagcagagactgtgactggactatcaccgtcaatgcagactatgttatctccttggcgttcatcagttttagcatagaaccaaactatgacttcctctatatctatgatggaccagacagtaatagcccactgattggaagttttcaagacagcaagttaccagagagaatagaaagcagctcaaatacaatgcatttggcttttcggagtgatggatctgttagttacactggatttcatctagaatacaaagcaaaactgcgagagtcctgctttgatccaggcaatataatgaatggcaccagacttggaatggattataaattagggtcaacagtcacctattactgtgatgctggttatgttcttcaaggttattcaacactcacctgtatcatgggagatgatggaagacctggatggaatagagccttgccaagttgtcatgcgccctgtggaagtcgttcaacaggttcagaaggcactgttctatcaccaaactatccaaaaaattacagtgtgggacataattgtgtttattctatagcagttccaaaggagtttgtggtgtttggccagtttgtatttttccagacatcactccacgatgttgttgaggtgtatgatgggccaactcagcaatcttctctgttatcttccctctcaggatcccattcaggagaatcacttccactgagttcaggtaatcagatcacaattcgatttacttcagttggaccaataacagctaagggatttcactttgtttaccaagctgttcctagaacaagttctacacaatgcagttctgtgcctgaaccaagattcggaagaagaattggcaatgaatttgcagtcggttcatcggttctttttgattgtaatccaggatatattctccatggatccatagcaattaggtgtgaaacagtgcccaattctttggcccagtggaatgattccttacctacttgtattgtgccctgtggtggaattttaactaagcgcaaagggactattttgtcacctggataccctgagccttatgacaacaatctgaattgtgtgtggaagatcacagtgccagagggagctggcattcaagtgcaagttgttagctttgctacagaacataattgggattctctggacttttatgatgggggagacaacaatgctccaagacttggaagctattcaggaacaacaataccccatcttttgaatagtacgtctaataatctgtatctaaattttcaatcagacatcagtgtttctgctgcaggatttcatcttgaatacacagcaattggtttggattcctgtcctgaaccacaaactcctagcagtggaattaaaattggagacagatatatggttggagatgtagtatcctttcagtgtgatcaaggatattctcttcagggtcactctcacattacatgtatgccaggacctgtaagaagatggaattatccaatcccaatttgtttagctcagtgtggtggtgctatgtcagacttcagtggtgtgatcctcagtcctgggtttcctggaaactatcccagcagtttagattgcacatggacaataaatctacccataggttttggtgtacatctccagtttgtaaatttttctacagaaaccatacatgattatttggaagtacgaagtggatcctcagaaactagtactgttattggccggcttagtggtcctcaaataccatcttccttattcagcaccacccatgaaaccagcttatattttcacagtgactattcacaaaacaaacaagggtttcatattgtataccaagcctatcagttgcaaagctgtcctgatccacgcccgtttcgaaatggttttgtaattggtaatgattttactgtgggtcaaaccatttcatttgaatgtttcccaggatacacattaattggaaattcagctctcacatgccttcacggagtcagtcgtaattggaatcatccacttccaaggtgtgaagctctttgtggtgggaatataactgcaatgaatggcaccatttattctcctgggtatcctgatgaatatccaaactttcaagattgtttttggcttgtaagagtaccccctgggaatggcatctacatcaattttactgtccttcaaacagaaccaatatatgatttcattactgtatgggatggaccagaccaaaattcacctcagatcggtcagttcagtggcaataccgctttggaatcagtctacagtacttcaaatcagattctaatcaaattccacagtgatttcacaacaagtggcttttttgtgctcagttatcacgcctatcaactaagggtgtgccaacctccaccacctgtgcccaatgctgaaattttgacggaagatgatgaatttgaaataggtgatattattaggtatcagtgtcttccaggatttactttagttggtaatgcaattctgacgtgcagattaggagaacgactgcagatggatggagcacctccagtttgtcaagtgctctgtcctgccaatgaattacggctagattctactggagtcatattgagccctggatatcctgacagttacccaaatcttcaaatgtgtgcatggagcatttcagtggaaaagggttataatatcaccatgtttgtagaattcttccagacagaaaaggaatttgatgttcttcaggtgtatgatggaccaaatattcaaagtccagtgcttatttccctcagtggggattattcatctgcttttaatataacaagcaatggtcatgaagtatttcttcagtggtcagcagatcatggcaataacaaaaaaggcttccggataagatatatagctttctactgtagtacaccagaatccccacctcatggatatattatcagtcagacaggtgggcagcttaacagtgtggtccgttgggcctgtgatcgaggattccgacttgttggaaaaagcagtgctgtgtgcagaaagtcttcctatgggtatcatgcatgggatgcgccagtccctgcctgtcaagcaatttcctgtgggattcctaaagctccaacaaatggaggaatactaacaacagactatttggtaggaacgcgagttacctatttttgtaatgatggatatcgattgtcatccaaagaactcactacagctgtatgccaatcagatggaacatggagcaatcataacaagacccctcgctgtgttgttatttcctgtggagaactacctacacctccaaatggaaataagattggaactcaaacttcatatggctcaacagctatctttacctgcgacttgggattcatgcttgtgggctctgctgtaagggaatgcctttcctcaggtctttggagtgaatctgaaaccagatgcctagcgggtcattgtggaattccagaactgattgtgaatggtcaagtcattggagaaaattatggatatagagacacagttgtatatcaatgtaatcctggttttcgattgattggttcttcagtgaggatatgtcaacaggatcacaattggtctggtcagctcccatcctgtgtgcctgttagctgtggtcaccctggtagtccaatttatggaagaacaagtggaaatgggttcaactttaatgatgtggtaacattctcatgcaatattgggtatcttatgcaagggccaacaaaggcacagtgccaggccaacagacagtggagccatcctccacctatgtgcaaagtggtcaactgttctgatcctggaattccagccaattctaaaagagaaagtaaaatagaacatggaaattttacttacggcactgtggtattctatgactgcaatcctggatattttttatttggatcttcagttttgatatgtcaaccaaatggacaatgggacaaacctttaccagaatgtatcatgattgactgtggacaccctggcgttcctcctaatgcagtcctgtctggcgagaagtatacttttgggtctactgttcactattcctgcacaggaaagcgttcccttttaggccagtcatcaagaacctgccaattgaatggccattggagtggatcacaacctcattgttcaggtgatgctactgggacatgtggcgatccaggtactcccggccatggctctagacaggaaagcaatttcagaactaaaagtactgtacgttatgcttgtgatactggttacatccttcatggctcagaagaaagaacatgtttagctaatggcagttggaccggaaggcagccagagtgcaaagctgtgcagtgtggtaacccaggaaccacagccaatgggaaagtcttccgaattgatggcacaacattttctagttcagtcatttattcctgcatggagggatacatcctttctggaccttcagttagacagtgcacagccaatggaacatggtctggaactttacctaactgtacaataatcagttgtggagacccaggtataccagccaatggactgagatatggagatgattatgtggttggacaaaatgtttcttacatgtgccagccaggctacacgatggaattgaatggctccagaatcaggacttgtacaattaatggcacatggagtggagtaatgccaacttgtagagctgttacctgcccaactcctccccagatctctaatggaaggctggaaggaacaaatttcgactggggctttagtattagctacatctgttctccaggctatgagctatccttccctgctgttttgacctgtgtagggaatggtacctggagtggtgaagtaccgcagtgcttaccaaagttttgtggtgaccctggtatacctgcccaaggaaaaagagaaggcaaaagctttatataccagtcagaggtttcattcagctgcaattttcctttcatattagtgggatcaagcaccagaatatgtcaagcagatggcacttggagtggttcatcacctcactgcatagagcctacccaaacctcttgtgaaaacccaggtgtgcctcggcatggatctcagaacaatacattcggatttcaagtaggaagtgttgtacagttccattgcaaaaaaggacaccttctccaagggtctacaacacgcacctgcctccctgatcttacgtggagtgggattcagcctgaatgcataccccacagctgtaaacagccagaaactcctgctcatgcaaatgtcgtagggatggaccttccatctcatgggtatacactgatttatacctgtcagcctggcttcttcttagcaggtggaacagaacatagagtgtgtagatccgataacacctggactggaaaagttcccatttgtgaagctggttctaaaatattggtgaaagatcctagacctgcactgggaacacccagcccaaagctaagtgttcctgatgatgtatttgcccaaaattatatatggaaaggctcttacaatttcaaaggaaggaaacaacccatgaccttaacagttactagtttcaatgcttccactgggagagttaacgcaacactgagcaatagcaacatggagctgctactttcaggggtatataaaagccaggaagctcgcctaatgttacgcatatatcttattaaagtacctgctcatgcttctgtgaagaaaatgaaggaagaaaattgggcaatggatggctttgtttctgctgagcctgatggagctacttatgtatttcaaggatttattcaaggcaaagattatggacaatttggcctacaaagactgggactgaatatgtcagaaggttcaaattcttcaaatcaacctcatggtacaaatagtagttctgtagccattgctattcttgtgcctttttttgcacttatatttgcaggatttggattttatctttataaacaaaggactgcacctaaaacacagtatacaggatgttcagttcatgaaaataacaatggccaagcagcttttgaaaatcccatgtatgacaccaacgcaaagtcagtggaagggaaggcggtacgatttgatcccaacttgaacacggtttgcacaatggtataacgaggcaacctttgccttcttcagaagcttggaaatcgacacacaaaacagtgcacatttagttcactgctaaacaaattaaagcacacttttcaggacttgctgggtcaccttttcctgaggaatgatacagaagagtgttttttcataaactggaccataattcttcatgtttaccatggagagttttacagaaatttggctgcactctgagagtgcttactcacagtttatttgctttttttaaaaaggagattattctaaaatataaacttatttgcatatattggaggagcatccactatcagtatttctgtgctttataaactatattagagggactgggtttaaaaaaaaagatatagggtagaaataagagctatacttacaagagtcaatagatcactgacttctctttaactgtcctgagctacatcacgcccacaaatctgtctttcataccactctatctgccattcattcttgttaaatgaggcattgttttctttatttaagattgagttatgactttaaatgtttatgagctagtttatgcctcggaagacataaggtttcccattccaatttgaatctttctatttctttagcatcatattgctcttcttcttttagactggttgtcatagtttctgcaaagggcaagttcattgtgctaccctcccaattcccccattatggagtaaccagtattattcagtgagctatggggtagtgtttcactccttgcttcaatatggttttttcctatttatttttattattttttaatcccaaatgtgatagtagcttcagtatgtttcctcacccaaaaaccatttggctggcagaaattatctagaaaaattattattttgcagttatctgagacaccaaacttaccatcctttattttacaatatttttgatcgaccaaataaaatgtcctaataatctactctatttatatctacatttccttccagctgagtcttcaaatttagcattattttgacacttttaattttcatttaacaatggattagaaaaatattttggtctagccactaaacataatgactgaaaaaaattattattataaatcaccaatataaatttattgcctacaattgtggacttatcatatttttatatatttttaaatttctgtacctttattgttaaacaccaagtttcacatacaagaggtttctttcattgtcaaattaagatatgtatttgtaagttattggtggctcatttaaactgtatcatacagtaatgccagcatttttatttaataggtcatcgtcttccttttatagctgttttacttcattgaatacgatcatgtacccagtgttaactctttgttgttgtccctttcaaatatggataactctgtgaacagtcttgactttttgtatcatgagacagagtgcctaagagaaacccttgcacctgggagcgctgcttggctctatctctacaacatttaatgaatttcttgtaaaccactttgagatacattgttttggaaattcatacaattttctcaacatggtactctactggcaggatgcagttttaaattttatgccatcagttatttattcttgtttattcaaatgactgcaataacaatgattcattcattaatgttaaggctaatacatttaagatcttgtttaaacaatgtttcttctgcaactggctactcctcttatattaatgcatacacttttgtaaagaagtatatttttatgaaaagaaactttgtaaaagtatgatgtaaattttcagtgcaatgtaaacaaaataaaaatggataattgcttttgt

SEQ ID NO: 229588 - DNA, 10617 bp, Artificial Sequence
  derived and/or modified sequence
atgaagggcatcagaaagggcgagagcagagccaaggagagcaagccctgggagcccggcaagagaagatgcgccaagtgcggcagactggacttcatcctgatgaagaagatgggcatcaagagcggcttcaccttctggaacctggtgttcctgctgaccgtgagctgcgtgaagggcttcatctacacctgcggcggcaccctgaagggcctgaacggcaccatcgagagccccggcttcccctacggctaccccaacggcgccaactgcacctgggtgatcatcgccgaggagagaaacagaatccagatcgtgttccagagcttcgccctggaggaggagtacgactacctgagcctgtacgacggccacccccaccccaccaacttcagaaccagactgaccggcttccacctgcccccccccgtgaccagcaccaagagcgtgttcagcctgagactgaccagcgacttcgccgtgagcgcccacggcttcaaggtgtactacgaggagctgcagagcagcagctgcggcaaccccggcgtgccccccaagggcgtgctgtacggcaccagattcgacgtgggcgacaagatcagatacagctgcgtgaccggctacatcctggacggccacccccagctgacctgcatcgccaacagcgtgaacaccgccagctgggacttccccgtgcccatctgcagagccgaggacgcctgcggcggcaccatgagaggcagcagcggcatcatcagcagccccagcttccccaacgagtaccacaacaacgccgactgcacctggaccatcgtggccgagcccggcgacaccatcagcctgatcttcaccgacttccagatggaggagaagtacgactacctggagatcgagggcagcgagccccccaccatctggctgagcggcatgaacatccccccccccatcatcagcaacaagaactggctgagactgcacttcgtgaccgacagcaaccacagatacagaggcttcagcgccccctaccaggtgaagaaggccatcgacttcaagagcagaggcttcaagctgttccccggcaaggacaacagcaacaagttcagcatcctgaacgagggcggcatcaagaccgccagcaacctgtgccccgaccccggcgagcccgagaacggcaagagaatcggcagcgacttcagcctgggcagcaccgtgcagttcagctgcgacgaggactacgtgctgcagggcgccaagagcatcacctgccagagaatcgccgaggtgttcgccgcctggagcgaccacagacccgtgtgcaaggtgaagacctgcggcagcaacctgcagggccccagcggcaccttcaccagccccaacttccccttccagtacgacagcaacgcccagtgcgtgtgggtgatcaccgccgtgaacaccaacaaggtgatccagatcaacttcgaggagttcgacctggagatcggctacgacaccctgaccatcggcgacggcggcgaggtgggcgaccccagaaccgtgctgcaggtgctgaccggcagcttcgtgcccgacctgatcgtgagcatgagcagccagatgtggctgcacctgcagaccgacgagagcgtgggcagcgtgggcttcaaggtgaactacaaggagatcgagaaggagagctgcggcgaccccggcacccccctgtacggcatcagagagggcgacggcttcagcaacagagacgtgctgagattcgagtgccagttcggcttcgagctgatcggcgagaagagcatcgtgtgccaggagaacaaccagtggagcgccaacatccccatctgcatcttcccctgcctgagcaacttcaccgcccccatgggcaccgtgctgagccccgactaccccgagggctacggcaacaacctgaactgcatctggaccatcatcagcgaccccggcagcagaatccacctgagcttcaacgacttcgacctggagagccagttcgacttcctggccgtgaaggacggcgacagccccgagagccccatcctgggcaccttcaccggcgccgaggtgcccagccacctgaccagcaacagccacatcctgagactggagttccaggccgaccacagcatgagcggcagaggcttcaacatcacctacaacaccttcggccacaacgagtgccccgaccccggcatccccatcaacgccagaagattcggcgacaacttccagctgggcagcagcatcagcgtgatctgcgaggagggcttcatcaagacccagggcaccgagaccatcacctgcatcctgatggacggcaaggtgatgtggagcggcctgatccccaagtgcggcgccccctgcggcggccacttcagcgcccccagcggcgtgatcctgagccccggctggcccggctactacaaggacagcctgaactgcgagtgggtgatcgaggccgagcccggccacagcatcaagatcaccttcgagagattccagaccgagctgaactacgacgtgctggaggtgcacgacggccccaacctgctgagccccctgctgggcagctacaacggcacccaggtgccccagttcctgttcagcagcagcaacttcatctacctgctgttcaccaccgacaacagcagaagcaacaacggcttcaagatccactacgagagcgtgaccgtgaacacctacagctgcctggaccccggcatccccgtgcacggcagaagatacggccacgacttcagcatcggcagcaccgtgagcttcagctgcgacagcggctacagactgagccacgaggagcccctgctgtgcgagaagaaccactggtggagccaccccctgcccacctgcgacgccctgtgcggcggcgacgtgagaggccccagcggcaccatcctgagccccggctaccccgagttctaccccaacagcctgaactgcacctggaccgtggacgtgacccacggcaagggcgtgcagttcaacttccacaccttccacctggaggaccaccacgactacctgctgatcaccgagaacggcagcttcacccagcccctggccagactgaccggcagcgacctgccccccaccatcaacgccggcctgtacggcaacttcagagcccagctgagattcatcagcgacttcagcatcagctacgagggcttcaacatcaccttcagcgagtacaacctggagccctgcgaggaccccggcatcccccagtacggcagcagaatcggcttcaacttcggcatcggcgacaccctgaccttcagctgcagcagcggctacagactggagggcaccagcgagatcatctgcctgggcggcggcagaagagtgtggagcgcccccctgcccagatgcgtggccgagtgcggcgccagcgccaccaacaacgagggcatcctgctgagccccaactaccccctgaactacgagaacaaccacgagtgcatctacagcatccaggtgcaggccggcaagggcatcaacatcagcgccagaaccttccacctggcccagggcgacgtgctgaagatctacgacggcaaggacaagaccacccacctgctgggcgccttcaccggcgccagcatgagaggcctgaccctgagcagcaccagcaaccagctgtggctggagttcaacagcgacaccgagggcaccgacgagggcttccagctggtgtacaccagcttcgagctgagccactgcgaggaccccggcatcccccagttcggctacaagatcagcgaccagggccacttcgccggcagcaccatcatctacggctgcaaccccggctacaccctgcacggcagcagcctgctgaagtgcatgaccggcgagagaagagcctgggactaccccctgcccagctgcatcgccgagtgcggcggcagattcaagggcgagagcagcggcagaatcctgagccccggctaccccttcccctacgacaacaacctgagatgcatgtggatgatcgaggtggaccccggcaacatcgtgagcctgcagttcctggccttcgacaccgaggccagccacgacatcctgagagtgtgggacggcccccccgagaacgacatgctgctgaaggagatcagcggcagcctgatccccgagggcatccacagcaccctgaacatcgtgaccatccagttcgacaccgacttctacatcagcaagagcggcttcgccatccagttcagcagcagcgtggccaccgcctgcagagaccccggcgtgcccatgaacggcaccagaaacggcgacggcagagagcccggcgacaccgtggtgttccagtgcgaccccggctacgagctgcagggcgaggagagaatcacctgcatccaggtggagaacagatacttctggcagcccagcccccccgtgtgcatcgccccctgcggcggcaacctgaccggcagcagcggcttcatcctgagccccaacttcccccacccctacccccacagcagagactgcgactggaccatcaccgtgaacgccgactacgtgatcagcctggccttcatcagcttcagcatcgagcccaactacgacttcctgtacatctacgacggccccgacagcaacagccccctgatcggcagcttccaggacagcaagctgcccgagagaatcgagagcagcagcaacaccatgcacctggccttcagaagcgacggcagcgtgagctacaccggcttccacctggagtacaaggccaagctgagagagagctgcttcgaccccggcaacatcatgaacggcaccagactgggcatggactacaagctgggcagcaccgtgacctactactgcgacgccggctacgtgctgcagggctacagcaccctgacctgcatcatgggcgacgacggcagacccggctggaacagagccctgcccagctgccacgccccctgcggcagcagaagcaccggcagcgagggcaccgtgctgagccccaactaccccaagaactacagcgtgggccacaactgcgtgtacagcatcgccgtgcccaaggagttcgtggtgttcggccagttcgtgttcttccagaccagcctgcacgacgtggtggaggtgtacgacggccccacccagcagagcagcctgctgagcagcctgagcggcagccacagcggcgagagcctgcccctgagcagcggcaaccagatcaccatcagattcaccagcgtgggccccatcaccgccaagggcttccacttcgtgtaccaggccgtgcccagaaccagcagcacccagtgcagcagcgtgcccgagcccagattcggcagaagaatcggcaacgagttcgccgtgggcagcagcgtgctgttcgactgcaaccccggctacatcctgcacggcagcatcgccatcagatgcgagaccgtgcccaacagcctggcccagtggaacgacagcctgcccacctgcatcgtgccctgcggcggcatcctgaccaagagaaagggcaccatcctgagccccggctaccccgagccctacgacaacaacctgaactgcgtgtggaagatcaccgtgcccgagggcgccggcatccaggtgcaggtggtgagcttcgccaccgagcacaactgggacagcctggacttctacgacggcggcgacaacaacgcccccagactgggcagctacagcggcaccaccatcccccacctgctgaacagcaccagcaacaacctgtacctgaacttccagagcgacatcagcgtgagcgccgccggcttccacctggagtacaccgccatcggcctggacagctgccccgagccccagacccccagcagcggcatcaagatcggcgacagatacatggtgggcgacgtggtgagcttccagtgcgaccagggctacagcctgcagggccacagccacatcacctgcatgcccggccccgtgagaagatggaactaccccatccccatctgcctggcccagtgcggcggcgccatgagcgacttcagcggcgtgatcctgagccccggcttccccggcaactaccccagcagcctggactgcacctggaccatcaacctgcccatcggcttcggcgtgcacctgcagttcgtgaacttcagcaccgagaccatccacgactacctggaggtgagaagcggcagcagcgagaccagcaccgtgatcggcagactgagcggcccccagatccccagcagcctgttcagcaccacccacgagaccagcctgtacttccacagcgactacagccagaacaagcagggcttccacatcgtgtaccaggcctaccagctgcagagctgccccgaccccagacccttcagaaacggcttcgtgatcggcaacgacttcaccgtgggccagaccatcagcttcgagtgcttccccggctacaccctgatcggcaacagcgccctgacctgcctgcacggcgtgagcagaaactggaaccaccccctgcccagatgcgaggccctgtgcggcggcaacatcaccgccatgaacggcaccatctacagccccggctaccccgacgagtaccccaacttccaggactgcttctggctggtgagagtgccccccggcaacggcatctacatcaacttcaccgtgctgcagaccgagcccatctacgacttcatcaccgtgtgggacggccccgaccagaacagcccccagatcggccagttcagcggcaacaccgccctggagagcgtgtacagcaccagcaaccagatcctgatcaagttccacagcgacttcaccaccagcggcttcttcgtgctgagctaccacgcctaccagctgagagtgtgccagccccccccccccgtgcccaacgccgagatcctgaccgaggacgacgagttcgagatcggcgacatcatcagataccagtgcctgcccggcttcaccctggtgggcaacgccatcctgacctgcagactgggcgagagactgcagatggacggcgccccccccgtgtgccaggtgctgtgccccgccaacgagctgagactggacagcaccggcgtgatcctgagccccggctaccccgacagctaccccaacctgcagatgtgcgcctggagcatcagcgtggagaagggctacaacatcaccatgttcgtggagttcttccagaccgagaaggagttcgacgtgctgcaggtgtacgacggccccaacatccagagccccgtgctgatcagcctgagcggcgactacagcagcgccttcaacatcaccagcaacggccacgaggtgttcctgcagtggagcgccgaccacggcaacaacaagaagggcttcagaatcagatacatcgccttctactgcagcacccccgagagccccccccacggctacatcatcagccagaccggcggccagctgaacagcgtggtgagatgggcctgcgacagaggcttcagactggtgggcaagagcagcgccgtgtgcagaaagagcagctacggctaccacgcctgggacgcccccgtgcccgcctgccaggccatcagctgcggcatccccaaggcccccaccaacggcggcatcctgaccaccgactacctggtgggcaccagagtgacctacttctgcaacgacggctacagactgagcagcaaggagctgaccaccgccgtgtgccagagcgacggcacctggagcaaccacaacaagacccccagatgcgtggtgatcagctgcggcgagctgcccaccccccccaacggcaacaagatcggcacccagaccagctacggcagcaccgccatcttcacctgcgacctgggcttcatgctggtgggcagcgccgtgagagagtgcctgagcagcggcctgtggagcgagagcgagaccagatgcctggccggccactgcggcatccccgagctgatcgtgaacggccaggtgatcggcgagaactacggctacagagacaccgtggtgtaccagtgcaaccccggcttcagactgatcggcagcagcgtgagaatctgccagcaggaccacaactggagcggccagctgcccagctgcgtgcccgtgagctgcggccaccccggcagccccatctacggcagaaccagcggcaacggcttcaacttcaacgacgtggtgaccttcagctgcaacatcggctacctgatgcagggccccaccaaggcccagtgccaggccaacagacagtggagccaccccccccccatgtgcaaggtggtgaactgcagcgaccccggcatccccgccaacagcaagagagagagcaagatcgagcacggcaacttcacctacggcaccgtggtgttctacgactgcaaccccggctacttcctgttcggcagcagcgtgctgatctgccagcccaacggccagtgggacaagcccctgcccgagtgcatcatgatcgactgcggccaccccggcgtgccccccaacgccgtgctgagcggcgagaagtacaccttcggcagcaccgtgcactacagctgcaccggcaagagaagcctgctgggccagagcagcagaacctgccagctgaacggccactggagcggcagccagccccactgcagcggcgacgccaccggcacctgcggcgaccccggcacccccggccacggcagcagacaggagagcaacttcagaaccaagagcaccgtgagatacgcctgcgacaccggctacatcctgcacggcagcgaggagagaacctgcctggccaacggcagctggaccggcagacagcccgagtgcaaggccgtgcagtgcggcaaccccggcaccaccgccaacggcaaggtgttcagaatcgacggcaccaccttcagcagcagcgtgatctacagctgcatggagggctacatcctgagcggccccagcgtgagacagtgcaccgccaacggcacctggagcggcaccctgcccaactgcaccatcatcagctgcggcgaccccggcatccccgccaacggcctgagatacggcgacgactacgtggtgggccagaacgtgagctacatgtgccagcccggctacaccatggagctgaacggcagcagaatcagaacctgcaccatcaacggcacctggagcggcgtgatgcccacctgcagagccgtgacctgccccacccccccccagatcagcaacggcagactggagggcaccaacttcgactggggcttcagcatcagctacatctgcagccccggctacgagctgagcttccccgccgtgctgacctgcgtgggcaacggcacctggagcggcgaggtgccccagtgcctgcccaagttctgcggcgaccccggcatccccgcccagggcaagagagagggcaagagcttcatctaccagagcgaggtgagcttcagctgcaacttccccttcatcctggtgggcagcagcaccagaatctgccaggccgacggcacctggagcggcagcagcccccactgcatcgagcccacccagaccagctgcgagaaccccggcgtgcccagacacggcagccagaacaacaccttcggcttccaggtgggcagcgtggtgcagttccactgcaagaagggccacctgctgcagggcagcaccaccagaacctgcctgcccgacctgacctggagcggcatccagcccgagtgcatcccccacagctgcaagcagcccgagacccccgcccacgccaacgtggtgggcatggacctgcccagccacggctacaccctgatctacacctgccagcccggcttcttcctggccggcggcaccgagcacagagtgtgcagaagcgacaacacctggaccggcaaggtgcccatctgcgaggccggcagcaagatcctggtgaaggaccccagacccgccctgggcacccccagccccaagctgagcgtgcccgacgacgtgttcgcccagaactacatctggaagggcagctacaacttcaagggcagaaagcagcccatgaccctgaccgtgaccagcttcaacgccagcaccggcagagtgaacgccaccctgagcaacagcaacatggagctgctgctgagcggcgtgtacaagagccaggaggccagactgatgctgagaatctacctgatcaaggtgcccgcccacgccagcgtgaagaagatgaaggaggagaactgggccatggacggcttcgtgagcgccgagcccgacggcgccacctacgtgttccagggcttcatccagggcaaggactacggccagttcggcctgcagagactgggcctgaacatgagcgagggcagcaacagcagcaaccagccccacggcaccaacagcagcagcgtggccatcgccatcctggtgcccttcttcgccctgatcttcgccggcttcggcttctacctgtacaagcagagaaccgcccccaagacccagtacaccggctgcagcgtgcacgagaacaacaacggccaggccgccttcgagaaccccatgtacgacaccaacgccaagagcgtggagggcaaggccgtgagattcgaccccaacctgaacaccgtgtgcaccatggtgtag

SEQ ID NO: 229589 - protein, 469 aa, Artificial Sequence
  derived and/or modified sequence
MLCLCLYVPVIGEAQTEFQYFESKGLPAELKSIFKLSVFIPSQEFSTYRQWKQKIVQAGDKDLDGQLDFEEFVHYLQDHEKKLRLVFKSLDKKNDGRIDAQEIMQSLRDLGVKISEQQAEKILKSMDKNGTMTIDWNEWRDYHLLHPVENIPEIILYWKHSTIFDVGENLTVPDEFTVEERQTGMWWRHLVAGGGAGAVSRTCTAPLDRLKVLMQVHASRSNNMGIVGGFTQMIREGGARSLWRGNGINVLKIAPESAIKFMAYEQIKRLVGSDQETLRIHERLVAGSLAGAIAQSSIYPMEVLKTRMALRKTGQYSGMLDCARRILAREGVAAFYKGYVPNMLGIIPYAGIDLAVYETLKNAWLQHYAVNSADPGVFVLLACGTMSSTCGQLASYPLALVRTRMQAQASIEGAPEVTMSSLFKHILRTEGAFGLYRGLAPNFMKVIPAVSISYVVYENLKITLGVQSR

SEQ ID NO: 229590 - protein, 366 aa, Artificial Sequence
  derived and/or modified sequence
MQSLRDLGVKISEQQAEKILKSMDKNGTMTIDWNEWRDYHLLHPVENIPEIILYWKHSTIFDVGENLTVPDEFTVEERQTGMWWRHLVAGGGAGAVSRTCTAPLDRLKVLMQVHASRSNNMGIVGGFTQMIREGGARSLWRGNGINVLKIAPESAIKFMAYEQIKRLVGSDQETLRIHERLVAGSLAGAIAQSSIYPMEVLKTRMALRKTGQYSGMLDCARRILAREGVAAFYKGYVPNMLGIIPYAGIDLAVYETLKNAWLQHYAVNSADPGVFVLLACGTMSSTCGQLASYPLALVRTRMQAQASIEGAPEVTMSSLFKHILRTEGAFGLYRGLAPNFMKVIPAVSISYVVYENLKITLGVQSR

SEQ ID NO: 229591 - DNA, 1410 bp, Artificial Sequence
  derived and/or modified sequence
atgctgtgcctgtgcctgtacgtgcccgtgatcggcgaggcccagaccgagttccagtacttcgagagcaagggcctgcccgccgagctgaagagcatcttcaagctgagcgtgttcatccccagccaggagttcagcacctacagacagtggaagcagaagatcgtgcaggccggcgacaaggacctggacggccagctggacttcgaggagttcgtgcactacctgcaggaccacgagaagaagctgagactggtgttcaagagcctggacaagaagaacgacggcagaatcgacgcccaggagatcatgcagagcctgagagacctgggcgtgaagatcagcgagcagcaggccgagaagatcctgaagagcatggacaagaacggcaccatgaccatcgactggaacgagtggagagactaccacctgctgcaccccgtggagaacatccccgagatcatcctgtactggaagcacagcaccatcttcgacgtgggcgagaacctgaccgtgcccgacgagttcaccgtggaggagagacagaccggcatgtggtggagacacctggtggccggcggcggcgccggcgccgtgagcagaacctgcaccgcccccctggacagactgaaggtgctgatgcaggtgcacgccagcagaagcaacaacatgggcatcgtgggcggcttcacccagatgatcagagagggcggcgccagaagcctgtggagaggcaacggcatcaacgtgctgaagatcgcccccgagagcgccatcaagttcatggcctacgagcagatcaagagactggtgggcagcgaccaggagaccctgagaatccacgagagactggtggccggcagcctggccggcgccatcgcccagagcagcatctaccccatggaggtgctgaagaccagaatggccctgagaaagaccggccagtacagcggcatgctggactgcgccagaagaatcctggccagagagggcgtggccgccttctacaagggctacgtgcccaacatgctgggcatcatcccctacgccggcatcgacctggccgtgtacgagaccctgaagaacgcctggctgcagcactacgccgtgaacagcgccgaccccggcgtgttcgtgctgctggcctgcggcaccatgagcagcacctgcggccagctggccagctaccccctggccctggtgagaaccagaatgcaggcccaggccagcatcgagggcgcccccgaggtgaccatgagcagcctgttcaagcacatcctgagaaccgagggcgccttcggcctgtacagaggcctggcccccaacttcatgaaggtgatccccgccgtgagcatcagctacgtggtgtacgagaacctgaagatcaccctgggcgtgcagagcagatag

SEQ ID NO: 229592 - DNA, 1410 bp, Artificial Sequence
  derived and/or modified sequence
atgctgtgcttatgcttgtacgtaccagtgatcggcgaggcccagactgaatttcaatactttgagtcaaaaggcctgccagcagagctcaaaagcatatttaagctgagtgttttcatcccaagccaggaattcagcacttatcgccagtggaaacagaagattgtgcaggctggcgacaaggatctggatgggcagttagatttcgaagaatttgtccattacctgcaagaccatgagaagaagctgcgactggtattcaagtcactggacaagaagaatgacggaagaatcgatgctcaggagatcatgcagagcctgcgggacctgggggtaaaaatctctgaacagcaggcggagaaaatcttgaagtccatggacaaaaatgggacaatgacaatagactggaacgagtggagggattaccatctgttgcatccggttgagaatattccagaaatcatcctgtattggaagcattccaccatttttgacgttggcgagaatctcaccgtccctgatgagtttactgtagaggaaagacagacaggaatgtggtggaggcacctcgtagccggtggcggtgctggtgcggtaagccgcacctgcaccgcgcctctcgacaggctgaaagtactgatgcaggttcacgcgtctcgctcaaacaatatggggatagtcgggggcttcacccagatgattagggagggcggtgcccgatcactgtggagagggaatggcatcaacgttctgaagattgctcccgagagcgccataaagtttatggcctatgaacaaatcaaacgtctcgttgggtcagaccaggaaacacttaggatccacgagcgacttgttgccgggtcccttgcaggcgccatcgctcaatcttcgatttatcctatggaggtgctgaagacgaggatggcccttagaaaaaccggtcaatattctgggatgctcgactgtgctcgacgaatcctggcacgagagggggtagccgcattttataagggctacgtgccaaatatgctcggaatcatcccgtacgccggcatcgacctcgccgtctacgagactctcaagaacgcatggcttcagcattacgcagtgaacagcgccgatcctggggtgtttgtcctgctggcctgtggtactatgtccagtacctgtgggcaactggcctcctaccctctcgcgctggttcgcactagaatgcaagctcaggcctccatagagggagctcccgaagtgaccatgagtagtctgttcaagcacatcttgaggactgaaggcgcctttggcttgtaccgcggactggcaccgaactttatgaaagtgatccccgctgtatcgatctcatatgtggtatacgaaaaccttaagattactcttggcgtgcaaagtcgatag

SEQ ID NO: 229593 - DNA, 1410 bp, Artificial Sequence
  derived and/or modified sequence
atgctgtgcctgtgcctgtatgtgcctgtgattggagaggcccagacagagttccagtactttgagagcaagggcctgcctgctgagctgaagagcatcttcaagctgtctgtgttcatccccagccaggagttcagcacctaccggcagtggaagcagaagatcgtgcaggccggggacaaggacctggatggccagctggactttgaggagtttgtgcactacctgcaggaccacgagaagaagctgcggctggtgttcaagagcctggacaagaagaatgatggaagaattgatgcccaggagatcatgcagagcctgcgggacctgggcgtgaagatcagcgagcagcaggccgagaagatcctgaagtccatggacaagaatggcaccatgaccatcgactggaatgagtggagggactaccacctgctgcaccctgtggagaacatccctgagatcatcctgtactggaagcacagcaccatctttgatgtgggggagaacctgactgtgcctgatgagttcaccgtggaggagcggcagacaggcatgtggtggaggcacctggtggccggcggcggggccggggctgtgtccaggacctgcacagcccccctggaccggctgaaggtgctgatgcaggtgcacgccagccgcagcaacaacatgggcatcgtgggcggcttcacccagatgatccgggagggcggggcccggagcctgtggagaggaaatggcatcaacgtgctgaagatcgcccctgagagcgccatcaagttcatggcctatgagcagatcaagaggctggtgggcagtgaccaggagaccctgcgcatccacgagcggctggtggccggcagcctggccggggccatcgcccagagcagcatctaccccatggaggtgctgaagaccaggatggccctgaggaagacaggccagtacagcggcatgctggactgtgcccggcgcatcctggcccgggagggcgtggccgccttctacaagggctacgtgcccaacatgctgggcatcatcccctatgccggcatcgacctggccgtgtatgagaccctgaagaatgcctggctgcagcactatgctgtgaacagcgctgaccccggggtgtttgtgctgctggcctgtggcaccatgagcagcacctgtggccagctggccagctaccccctggccctggtgaggaccaggatgcaggcccaggccagcattgaaggagcccctgaggtgaccatgagcagcctcttcaagcacatcctgaggacagaaggagccttcggcctgtaccggggcctggcccccaacttcatgaaggtgatcccagctgtgtccatctcctatgtggtgtatgagaacctgaagatcaccctgggcgtgcagagcaggtag

SEQ ID NO: 229594 - DNA, 1410 bp, Artificial Sequence
  derived and/or modified sequence
atgctgtgcctgtgcctgtacgtgcccgtgatcggcgaggcccagacagaattccagtatttcgagtctaaaggactgccggccgagcttaagtctattttcaaactgagcgtcttcatacccagtcaggagtttagtacctatcggcagtggaagcagaagattgtccaggccggcgacaaagacctggatggccaattagacttcgaagagttcgtccactatctgcaggaccacgagaagaagctcaggctcgtattcaaatctctggataagaaaaacgatggcaggatcgatgcccaggagatcatgcagtcactcagagatctgggggtcaaaataagcgaacagcaggcggaaaagattctcaaatctatggacaagaacggaactatgacaatcgactggaatgagtggagggactaccacctgctccatcccgtggagaacataccagagatcatcctatattggaaacattctaccatcttcgatgtgggtgagaatctcaccgtcccagacgaattcactgtggaggagagacagacgggtatgtggtggcgacacctcgtcgccggcggaggagctggggctgtttccaggacgtgtacggctcctttggacaggctaaaggtcttgatgcaggttcacgcttctcgctccaacaacatgggcatcgtgggtggtttcacccagatgattagagagggcggggcacgaagtttgtggagggggaatggcattaacgtgctgaaaatagcccccgagtctgccatcaagttcatggcctacgagcaaatcaagaggctggtcggatccgatcaggagactctgcgtatccatgaaagacttgttgctggtagtctggccggggctatcgcgcagtcctctatataccctatggaagtgctcaaaacccggatggcacttcggaaaacaggtcagtactctggcatgctagactgcgctcgtagaatcctggcccgagagggtgttgctgcattctacaaaggatatgtgcctaacatgttgggaataatcccatacgccggcatcgacctcgctgtttatgagactctcaagaacgcttggttacagcattatgcagtgaactccgccgaccctggcgtatttgtacttctggcgtgcggtaccatgagtagcacctgcggacagctggcctcatatcctctagctctggtgagaacgcggatgcaagcccaggcctcgatcgagggggccccagaggtcactatgtctagcctcttcaaacacattctccgcaccgagggggccttcggcttatataggggtctggcgcctaatttcatgaaagtcatccctgcagtgtctattagctacgttgtctatgaaaatctgaaaattactctcggggtccagagccgttag

SEQ ID NO: 229595 - DNA, 1410 bp, Artificial Sequence
  derived and/or modified sequence
atgttgtgtctttgtttatacgtgccagttatcggagaagcacaaaccgagttccagtacttcgagtctaaaggtctgcccgctgaactcaaatccatttttaaactgtcagtgttcattccaagccaggagttcagcacatatcggcagtggaagcagaagatcgtacaggcaggcgacaaggatctcgatgggcagctcgatttcgaggaattcgtacattacttgcaggatcacgagaagaagctcaggctcgtgtttaaatccctggacaagaaaaatgacggccgaatagacgcgcaagaaatcatgcagagcttacgtgacttgggtgtcaaaatctccgagcagcaggccgagaagatccttaagtcaatggacaaaaacggcacaatgacaatagattggaacgagtggagggactatcacctacttcatcctgtcgaaaacatcccagagattatcctctactggaagcattcaacaatattcgatgtgggagagaatcttaccgtccccgacgagttcaccgtggaggaacgacagaccgggatgtggtggagacacctggttgccggaggcggagcaggggctgtatcccgcacgtgcacagcacctctggacaggctcaaagtgttgatgcaagtgcacgcctctagaagcaacaatatgggcatagtggggggtttcacgcagatgatacgtgaaggcggtgccaggtccctgtggagaggtaatggcattaatgttctgaagatagctccggaatctgctatcaaatttatggcctacgagcaaatcaagcgcctcgtaggatctgatcaagaaacccttcggatccatgaacgacttgtggccggaagcctcgctggcgctattgctcaatcaagtatctaccccatggaagtccttaaaacaagaatggccctaagaaaaaccggacagtattcgggcatgttggactgtgccaggcgaatcctggccagggagggggtggctgcattttataagggttatgttccaaacatgctggggattatcccctatgctggcatcgaccttgccgtgtacgaaacccttaagaatgcttggctccagcactatgctgtgaattccgccgatccgggagtgttcgtactgttggcctgtgggaccatgtcatccacgtgcggacagcttgcctcctaccctttagccctcgtccgcacgcgcatgcaggcccaggcatcaattgaaggcgcacccgaagtgacaatgtcctctctctttaaacacatcctcagaacggagggtgccttcggactttaccgcggattagcgcctaatttcatgaaagtcatccccgctgtgtcaatcagttacgttgtatatgaaaacttgaaaattaccctcggagtgcagagccgctag

SEQ ID NO: 229596 - DNA, 3474 bp, Artificial Sequence
  derived and/or modified sequence
cggtgacgtcagccctgatctttgtgcctctcacttgagcaacctgatgccaccttctcccccgggctctgtgttcattggctgttggcaggacttgccgtgggagggcttttttcttttttcaattaagtaaaagggcagggcttaagcagccaatgacagctgaggccaggcttgtcttatgcaagtttcccgggaccggcagcatttagggaacttgctcccggtggtgagggcagtggagcacccagcaggccgccaacatgctctgtctgtgcctgtatgtgccggtcatcggggaagcccagaccgagttccagtactttgagtcgaaggggctccctgccgagctgaagtccattttcaagctcagtgtcttcatcccctcccaggaattctccacctaccgccagtggaagcagaaaattgtacaagctggagataaggaccttgatgggcagctagactttgaagaatttgtccattatctccaagatcatgagaagaagctgaggctggtgtttaagagtttggacaaaaagaatgatggacgcattgacgcgcaggagatcatgcagtccctgcgggacttgggagtcaagatatctgaacagcaggcagaaaaaattctcaagagcatggataaaaacggcacgatgaccattgactggaacgagtggagagactaccacctcctccaccccgtggaaaacatccccgagatcatcctctactggaagcattccacgatctttgatgtgggtgagaatctaacggtcccggatgagttcacagtggaggagaggcagacggggatgtggtggagacacctggtggcaggaggtggggcaggggccgtatccagaacctgcacggcccccctggacaggctcaaggtgctcatgcaggtccatgcctcccgcagcaacaacatgggcatcgttggtggcttcactcagatgattcgagaaggaggggccaggtcactctggcggggcaatggcatcaacgtcctcaaaattgcccccgaatcagccatcaaattcatggcctatgagcagatcaagcgccttgttggtagtgaccaggagactctgaggattcacgagaggcttgtggcagggtccttggcaggggccatcgcccagagcagcatctacccaatggaggtcctgaagacccggatggcgctgcggaagacaggccagtactcaggaatgctggactgcgccaggaggatcctggccagagagggggtggccgccttctacaaaggctatgtccccaacatgctgggcatcatcccctatgccggcatcgaccttgcagtctacgagacgctcaagaatgcctggctgcagcactatgcagtgaacagcgcggaccccggcgtgtttgtgctcctggcctgtggcaccatgtccagtacctgtggccagctggccagctaccccctggccctagtcaggacccggatgcaggcgcaagcctctattgagggcgctccggaggtgaccatgagcagcctcttcaaacatatcctgcggaccgagggggccttcgggctgtacagggggctggcccccaacttcatgaaggtcatcccagctgtgagcatcagctacgtggtctacgagaacctgaagatcaccctgggcgtgcagtcgcggtgacggggggagggccgcccggcagtggactcgctgatcctgggccgcagcctggggtgtgcagccatctcattctgtgaatgtgccaacactaagctgtctcgagccaagctgtgaaaaccctagacgcacccgcagggagggtggggagagctggcaggcccagggcttgtcctgctgaccccagcagaccctcctgttggttccagcgaagaccacaggcattccttagggtccagggtcagcaggctccgggctcacatgtgtaaggacaggacattttctgcagtgcctgccaatagcgagcttggagcctggaggccggcttagttcttccatttcacccttgcagccagctgttggccacggcccctgccctctggtctgccgtgcatctccctgtgccctcttgctgcctgcctgtctgctgaggtaaggtgggaggagggctacagcccacatcccaccccctcgtccaatcccataatccatgatgaaaggtgaggtcacgtggcctcccaggcctgacttcccaacctacagcattgacgccaacttggctgtgaaggaagaggaaaggatctggccttgtggtcactggcatctgagccctgctgatggctggggctctcgggcatgcttgggagtgcagggggctcgggctgcctggcctggctgcacagaaggcaagtgctggggctcatggtgctctgagctggcctggaccctgtcaggatgggccccacctcagaaccaaactcactgtccccactgtggcatgagggcagtggagcaccatgtttgagggcgaagggcagagcgtttgtgtgttctggggagggaaggaaaaggtgttggaggccttaattatggactgttgggaaaagggttttgtccagaaggacaagccggacaaatgagcgacttctgtgcttccagaggaagacgagggagcaggagcttggctgactgctcagagtctgttctgacgccctgggggttcctgtccaaccccagcaggggcgcagcgggaccagccccacattccacttgtgtcactgcttggaacctatttattttgtatttatttgaacagagttatgtcctaactatttttatagatttgtttaattaatagcttgtcattttcaagttcattttttattcatatttatgttcatggttgattgtaccttcccaagcccgcccagtgggatgggaggaggaggagaaggggggccttgggccgctgcagtcacatctgtccagagaaattccttttgggactggaggcagaaaagcggccagaaggcagcagccctggctcctttcctttggcaggttggggaagggcttgcccccagccttaggatttcagggtttgactgggggcgtggagagagagggaggaacctcaataaccttgaaggtggaatccagttatttcctgcgctgcgagggtttctttatttcactcttttctgaatgtcaaggcagtgaggtgcctctcactgtgaatttgtggtgggcgggggctggaggagagggtgggggactggctccgtccctcccagccttctgctgcccttgcttaacaatgccggccaactggcgacctcacggttgcacttccattccaccagaatgacctgatgaggaaatcttcaataggatgcaaagatcaatgcaaaaattgttatatatgaacatataactggagtcgtcaaaaagcaaattaagaaagaattggacgttagaagttgtcatttaaagcagccttctaataaagttgtttcaaagctga

SEQ ID NO: 229597 - DNA, 3264 bp, Artificial Sequence
  derived and/or modified sequence
ggccgccaacatgctctgtctgtgcctgtatgtgccggtcatcggggaagcccagaccgagttccagtactttgagtcgaaggggctccctgccgagctgaagtccattttcaagctcagtgtcttcatcccctcccaggaattctccacctaccgccagtggaagcaggtctgtggggtgaccgcgcggaagggagaggcgcattcaaccgaaaattgtacaagctggagataaggaccttgatgggcagctagactttgaagaatttgtccattatctccaagatcatgagaagaagctgaggctggtgtttaagagtttggacaaaaagaatgatggacgcattgacgcgcaggagatcatgcagtccctgcgggacttgggagtcaagatatctgaacagcaggcagaaaaaattctcaagagcatggataaaaacggcacgatgaccattgactggaacgagtggagagactaccacctcctccaccccgtggaaaacatccccgagatcatcctctactggaagcattccacgatctttgatgtgggtgagaatctaacggtcccggatgagttcacagtggaggagaggcagacggggatgtggtggagacacctggtggcaggaggtggggcaggggccgtatccagaacctgcacggcccccctggacaggctcaaggtgctcatgcaggtccatgcctcccgcagcaacaacatgggcatcgttggtggcttcactcagatgattcgagaaggaggggccaggtcactctggcggggcaatggcatcaacgtcctcaaaattgcccccgaatcagccatcaaattcatggcctatgagcagatcaagcgccttgttggtagtgaccaggagactctgaggattcacgagaggcttgtggcagggtccttggcaggggccatcgcccagagcagcatctacccaatggaggtcctgaagacccggatggcgctgcggaagacaggccagtactcaggaatgctggactgcgccaggaggatcctggccagagagggggtggccgccttctacaaaggctatgtccccaacatgctgggcatcatcccctatgccggcatcgaccttgcagtctacgagacgctcaagaatgcctggctgcagcactatgcagtgaacagcgcggaccccggcgtgtttgtgctcctggcctgtggcaccatgtccagtacctgtggccagctggccagctaccccctggccctagtcaggacccggatgcaggcgcaagcctctattgagggcgctccggaggtgaccatgagcagcctcttcaaacatatcctgcggaccgagggggccttcgggctgtacagggggctggcccccaacttcatgaaggtcatcccagctgtgagcatcagctacgtggtctacgagaacctgaagatcaccctgggcgtgcagtcgcggtgacggggggagggccgcccggcagtggactcgctgatcctgggccgcagcctggggtgtgcagccatctcattctgtgaatgtgccaacactaagctgtctcgagccaagctgtgaaaaccctagacgcacccgcagggagggtggggagagctggcaggcccagggcttgtcctgctgaccccagcagaccctcctgttggttccagcgaagaccacaggcattccttagggtccagggtcagcaggctccgggctcacatgtgtaaggacaggacattttctgcagtgcctgccaatagcgagcttggagcctggaggccggcttagttcttccatttcacccttgcagccagctgttggccacggcccctgccctctggtctgccgtgcatctccctgtgccctcttgctgcctgcctgtctgctgaggtaaggtgggaggagggctacagcccacatcccaccccctcgtccaatcccataatccatgatgaaaggtgaggtcacgtggcctcccaggcctgacttcccaacctacagcattgacgccaacttggctgtgaaggaagaggaaaggatctggccttgtggtcactggcatctgagccctgctgatggctggggctctcgggcatgcttgggagtgcagggggctcgggctgcctggcctggctgcacagaaggcaagtgctggggctcatggtgctctgagctggcctggaccctgtcaggatgggccccacctcagaaccaaactcactgtccccactgtggcatgagggcagtggagcaccatgtttgagggcgaagggcagagcgtttgtgtgttctggggagggaaggaaaaggtgttggaggccttaattatggactgttgggaaaagggttttgtccagaaggacaagccggacaaatgagcgacttctgtgcttccagaggaagacgagggagcaggagcttggctgactgctcagagtctgttctgacgccctgggggttcctgtccaaccccagcaggggcgcagcgggaccagccccacattccacttgtgtcactgcttggaacctatttattttgtatttatttgaacagagttatgtcctaactatttttatagatttgtttaattaatagcttgtcattttcaagttcattttttattcatatttatgttcatggttgattgtaccttcccaagcccgcccagtgggatgggaggaggaggagaaggggggccttgggccgctgcagtcacatctgtccagagaaattccttttgggactggaggcagaaaagcggccagaaggcagcagccctggctcctttcctttggcaggttggggaagggcttgcccccagccttaggatttcagggtttgactgggggcgtggagagagagggaggaacctcaataaccttgaaggtggaatccagttatttcctgcgctgcgagggtttctttatttcactcttttctgaatgtcaaggcagtgaggtgcctctcactgtgaatttgtggtgggcgggggctggaggagagggtgggggactggctccgtccctcccagccttctgctgcccttgcttaacaatgccggccaactggcgacctcacggttgcacttccattccaccagaatgacctgatgaggaaatcttcaataggatgcaaagatcaatgcaaaaattgttatatatgaacatataactggagtcgtcaaaaagcaaattaagaaagaattggacgttagaagttgtcatttaaagcagccttctaataaagttgtttcaaagctga

SEQ ID NO: 229598 - protein, 1099 aa, Artificial Sequence
  derived and/or modified sequence
RFGSAPQRPVAMTTAQRDSLLWKLAGLLRESGDVVLSGCSTLSLLTPTLQQLNHVFELHLGPWGPGQTGFVALPSHPADSPVILQLQFLFDVLQKTLSLKLVHVAGPGPTGPIKIFPFKSLRHLELRGVPLHCLHGLRGIYSQLETLICSRSLQALEELLSACGGDFCSALPWLALLSANFSYNALTALDSSLRLLSALRFLNLSHNQVQDCQGFLMDLCELHHLDISYNRLHLVPRMGPSGAALGVLILRGNELRSLHGLEQLRNLRHLDLAYNLLEGHRELSPLWLLAELRKLYLEGNPLWFHPEHRAATAQYLSPRARDAATGFLLDGKVLSLTDFQTHTSLGLSPMGPPLPWPVGSTPETSGGPDLSDSLSSGGVVTQPLLHKVKSRVRVRRASISEPSDTDPEPRTLNPSPAGWFVQQHPELELMSSFRERFGRNWLQYRSHLEPSGNPLPATPTTSAPSAPPASSQGPDTAPRPSPPQEEARGPQESPQKMSEEVRAEPQEEEEEKEGKEEKEEGEMVEQGEEEAGEEEEEEQDQKEVEAELCRPLLVCPLEGPEGVRGRECFLRVTSAHLFEVELQAARTLERLELQSLEAAEIEPEAQAQRSPRPTGSDLLPGAPILSLRFSYICPDRQLRRYLVLEPDAHAAVQELLAVLTPVTNVAREQLGEARDLLLGRFQCLRCGHEFKPEEPRMGLDSEEGWRPLFQKTESPAVCPNCGSDHVVLLAVSRGTPNRERKQGEQSLAPSPSASPVCHPPGHGDHLDRAKNSPPQAPSTRDHGSWSLSPPPERCGLRSVDHRLRLFLDVEVFSDAQEEFQCCLKVPVALAGHTGEFMCLVVVSDRRLYLLKVTGEMREPPASWLQLTLAVPLQDLSGIELGLAGQSLRLEWAAGAGRCVLLPRDARHCRAFLEELLDVLQSLPPAWRNCVSATEEEVTPQHRLWPLLEKDSSLEARQFFYLRAFLVEGPSTCLVSLLLTPSTLFLLDEDAAGSPAEPSPPAASGEASEKVPPSGPGPAVRVREQQPLSSLSSVLLYRSAPEDLRLLFYDEVSRLESFWALRVVCQEQLTALLAWIREPWEELFSIGLRTVIQEALALDR

SEQ ID NO: 229599 - DNA, 3300 bp, Artificial Sequence
  derived and/or modified sequence
cgctttggatctgctccacaaagacccgtagccatgactacagcacaacgggactctctactttggaagctggctggactcttacgagagtccggcgatgtggttctgagcgggtgctccacccttagcctgttgacacctaccctgcagcagctgaatcacgtgttcgaactccacctcggtccatgggggcctgggcaaactggttttgtcgcgttgccgtcgcatcctgcagacagccccgtgatcctgcagctgcagttcctctttgacgtgctacaaaagacactctctctgaaacttgttcatgtggccggtcccggtccaactggacctataaaaattttcccattcaaatcactccgccacctggagcttagaggcgtacctctccattgcctgcacggcctgagagggatttatagccagctggaaaccctgatctgttcgcgcagcctgcaggccttggaggaactgctgtcggcctgtggcggcgatttctgtagtgcactcccatggttagccctgcttagtgcgaatttttcatacaacgcactcactgcccttgactccagtctccgtttgctctcggccctaaggttcctgaacctgagccacaaccaagtgcaggactgtcaaggttttctgatggacttgtgtgagctgcatcacctggatatctcctacaatcgtttgcatttagtcccccgaatgggacccagtggggccgcccttggcgtcctgatccttcgtggcaacgagttgcgatctttacacggtctcgagcagctgcgaaacttgagacatctagacctggcttataatctgctcgaaggtcatagggaactgagtcccctgtggttgctggcagagctgaggaagctgtatcttgaaggcaacccactgtggttccatccggaacacagagctgccacggctcagtatttatctcccagagctagggatgcagccaccggcttcctgctcgacgggaaagttcttagtctaacagacttccagacccatactagcttgggactgagcccaatgggaccgcccttaccttggcctgttggctcaactcccgaaacatccggggggcccgatctgtccgacagtctgtcttccggaggggtggtcacccagcccctcctgcacaaggttaagagccgcgtacgcgtgagacgggcttctatttcagaaccatccgatacagacccagaacctaggacgttaaacccatctcccgcgggttggttcgtgcagcagcaccccgagttggaattgatgtccagcttccgcgagaggttcggtcggaactggctacagtataggagtcacctcgaaccctccggaaatccactccctgctacacccacgacaagtgcgcccagcgccccacctgcatccagccagggacctgataccgcccctcgcccatcacctccacaagaagaagcccgaggaccacaggaaagccctcagaaaatgtccgaagaagttagggctgaaccgcaggaggaggaagaagagaaggagggcaaggaagaaaaggaggagggggagatggtggagcagggagaagaagaagccggagaggaggaagaggaggaacaggatcaaaaggaagttgaggccgaactgtgcagacccttactagtttgtcctttagaaggccctgaaggggtgcgggggcgggaatgtttcttgcgggtaaccagcgcccatttattcgaagtagagctgcaggcggctagaacgttggagaggctcgaactgcagtcgctcgaggccgccgagatcgaaccagaagctcaagcccaaaggtcccccagacctaccggatcagacctacttccaggcgctccaatactttccctccgcttttcctatatatgcccagacagacaactgcggcgctaccttgtcctggagccagacgcccacgctgccgtgcaggagctccttgctgtcctgactccagtaactaatgttgcgcgggagcagctgggggaagcacgtgatcttctgctaggaagatttcaatgtcttagatgcggtcatgaattcaagccagaggaaccaaggatgggcctggactcagaggagggctggcgtccattgtttcaaaaaaccgaatcccctgccgtttgccctaattgcggcagcgaccacgttgtgcttctggccgtaagccgaggtacacccaacagagaacgaaagcaaggagagcagtctctggccccctcgccctccgcctctccagtgtgtcatcctcccggtcatggcgaccacctggaccgagccaaaaatagtccacctcaggcgccatcaactcgagatcatggatcatggagcctgtctcctccccccgagaggtgtgggctgaggtcggtggatcaccggctcaggcttttcctggatgttgaggtcttttccgacgcacaggaggagtttcagtgttgcttgaaagttccagtcgccctggccggccacaccggagagttcatgtgcttagtcgtagtctctgatagacgtttgtacctgttaaaggtcaccggagagatgcgggaaccacctgcatcttggctgcagctgacactagctgtaccgctccaggacctgagtggaattgagctgggtttggcaggccagagtctgaggctcgagtgggccgccggagctgggaggtgtgtccttcttcccagagatgcgcgacattgcagggcattcttggaggagctgctggatgttttgcagagtctcccccctgcctggcgaaactgcgtttccgcgacggaggaagaggttacaccgcagcatcgcctgtggcctttgttggaaaaagatagcagtttggaggccaggcaattcttttacctcagagccttcctggtcgaagggccatctacctgcctggtctctctgttattgacacctagtacactcttcctgctggacgaggacgccgccggatcccccgcggagccatccccgcccgcagcctcgggcgaggcctcagagaaagtgcctccatccggccctggccctgctgtgagggtgagggaacagcagccattaagcagtctgtccagcgtcctactgtatcggagcgctcccgaggatttacgactgctattctatgatgaggtgagccggctcgagtccttttgggcgttaagagtggtctgccaggagcagctcaccgcgcttctggcatggatccgcgaaccctgggaggaacttttctctatcgggcttcgcaccgtcattcaggaggctctcgctctggaccgatag

SEQ ID NO: 229600 - DNA, 3300 bp, Artificial Sequence
  derived and/or modified sequence
cgcttcggcagcgccccccagaggcctgtggccatgaccacagcccagagggacagcctgctgtggaagctggccggcctgctgcgggagagcggagatgtggtgctgagcggctgcagcaccctgagcctgctgacccccaccctgcagcagctgaaccacgtgtttgagctgcacctgggcccctggggccctggccagacaggctttgtggccctgcccagccaccctgctgacagccctgtgatcctgcagctgcagttcctgtttgatgtgctgcagaagaccctgagcctgaagctggtgcacgtggccggccctggccccaccggccccatcaagatcttccccttcaagagcctgcggcacctggagctgcggggcgtgcccctgcactgcctgcacggcctgcggggcatctacagccagctggagaccctcatctgcagccgcagcctgcaggccctggaggagctgctgagcgcctgtggcggggacttctgcagcgccctgccctggctggccctgctgagcgccaacttctcctacaatgccctgacagccctggacagcagcctgcggctgctgagcgccctgcgcttcctgaacctgagccacaaccaggtgcaggactgccagggcttcctgatggacctgtgtgagctgcaccacctggacatctcctacaaccggctgcacctggtgcccaggatgggccccagcggggccgccctgggcgtgctgatcctgcggggaaatgagctgcggagcctgcacggcctggagcagctgaggaacctgcggcacctggacctggcctacaacctgctggagggccaccgggagctgagccccctgtggctgctggccgagctgaggaagctgtacctggagggcaaccccctgtggttccaccctgagcaccgggccgccacagcccagtacctgagcccccgggccagagatgctgccaccggcttcctgctggatggcaaggtgctgagcctgacagacttccagacccacaccagcctgggcctgagccccatgggcccccccctgccctggcctgtgggcagcaccccagagaccagcggcggccctgacctgagtgacagcctgagcagcggcggcgtggtgacccagcccctgctgcacaaggtgaagagccgggtgcgggtgagaagagccagcatcagcgagcccagcgacacagatcctgagcccaggaccctgaaccccagccctgctggctggtttgtgcagcagcaccctgagctggagctgatgagcagcttccgggagagatttggaagaaactggctgcagtaccgcagccacctggagcccagcggcaaccccctgcctgccacccccaccaccagcgcccccagcgcccccccagccagcagccagggccctgacacagccccccggcccagccccccccaggaggaggcccggggcccccaggagagcccccagaagatgtctgaggaggtgcgggcagagccccaggaggaggaggaggagaaggagggcaaggaggagaaggaggagggggagatggtggagcagggcgaggaggaggccggggaggaggaggaggaggagcaggaccagaaggaggtggaggccgagctgtgccggcccctgctggtgtgccccctggagggccctgagggcgtgcggggccgggagtgcttcctgcgggtgaccagcgcccacctgtttgaggtggagctgcaggccgcccggaccctggagcggctggagctgcagagcctggaggccgctgagattgagcctgaggcccaggcccagaggagcccccggcccaccggcagtgacctgctgcccggggcccccatcctgagcctgcgcttctcctacatctgcccagaccggcagctgcggcgctacctggtgctggagccagatgcccacgccgctgtgcaggagctgctggccgtgctgacccctgtgaccaacgtggcccgggagcagctgggggaggcccgggacctgctgctgggccgcttccagtgcctgcgctgtggccacgagttcaagccagaggagcccaggatgggcctggacagcgaggagggctggaggcccctcttccagaagacagagagccctgctgtgtgccccaactgtggcagtgaccacgtggtgctgctggccgtgtcccggggcacccccaaccgggagaggaagcagggcgagcagagcctggcccccagccccagcgccagccctgtgtgccaccccccaggccacggggaccacctggaccgggccaagaacagccccccccaggcccccagcacccgggaccacggctcctggagcctgagccccccacctgagcgctgtggcctgcggtctgtggaccaccggctgcggctcttcctggatgtggaggtgttcagtgatgcccaggaggagttccagtgctgcctgaaggtgcctgtggccctggccggccacactggagagttcatgtgcctggtggtggtgtctgacagaagactctacctgctgaaggtgactggagagatgagggagcccccagcctcctggctgcagctgaccctggccgtgcccctgcaggacctgagcggcatcgagctgggcctggccggccagagcctgcggctggagtgggccgccggggccggccgctgtgtgctgctgcccagagatgcccggcactgccgggccttcctggaggagctgctggatgtgctgcagagcctgcccccagcctggaggaactgtgtgtctgccacagaggaggaggtgaccccccagcaccggctgtggcccctgctggagaaggacagcagcctggaggcccggcagttcttctacctgcgggccttcctggtggagggccccagcacctgcctggtgtccctgctgctgacccccagcaccctcttcctgctggatgaagatgctgctggcagccctgctgagcccagccccccagctgccagcggggaggccagcgagaaggtgcccccatctggccctggccctgctgtgcgggtgcgggagcagcagcccctgagcagcctgagctctgtgctgctgtaccgcagcgcccctgaggacctgcggctgctcttctatgatgaggtgtcccggctggagagcttctgggccctgcgggtggtgtgccaggagcagctgacagccctgctggcctggatccgggagccctgggaggagctgttcagcatcggcctgaggacagtcatccaggaggccctggccctggacagatag

SEQ ID NO: 229601 - DNA, 3300 bp, Artificial Sequence
  derived and/or modified sequence
cggttcggcagcgccccccagcggcccgtggccatgaccaccgcccagcgcgactccctcttatggaaacttgccggcctgctgcgcgagtcgggagacgtggtattgtctggttgttcaactttgtcccttttgactcccaccctccaacaactgaaccatgtgtttgagctgcacctgggcccttggggaccagggcagacaggcttcgtggccttacctagccatccggcggacagtcctgtaattcttcagctgcagtttttatttgacgtactgcagaaaacactgtccctaaaactagtgcacgtggcaggacccggcccaacaggtccaattaagatcttcccattcaaaagcctgcggcacttggaattgaggggggtgccactacattgcttgcacgggttacgcggcatctacagccagttggaaacactgatttgttccaggagcttgcaggcccttgaagaactgctgtcagcctgcggcggtgacttctgcagtgcactgccttggctcgcccttctgagcgccaacttctcgtacaacgctctgaccgcccttgactcctcactgcgccttctctccgcgctcagatttctgaacctgagccacaaccaagttcaagattgtcagggtttcctaatggatttatgtgagctgcaccatttggacatcagttacaaccgcttgcatctagtgcccagaatgggtccaagcggggctgcgctgggtgtactgatactccgcggcaatgagctccggtctttacatggtctcgagcaacttcgcaacctgcggcacctcgatctggcatacaacttactagaaggccaccgtgaattaagcccgctgtggctcctcgcagagctcagaaagctatacttggagggaaaccctctgtggttccaccctgagcaccgcgccgccacagcccaatacctcagtcccagggctagggatgctgctacgggctttctgctggatggcaaagtcctaagcctgaccgatttccagactcatacatcactagggctttctccaatgggacctccacttccttggcccgtaggtagcacaccagaaaccagtgggggtccggatctcagcgactccttatctagtggaggtgtggtcacccaaccgctcctccacaaggtcaagtcacgcgtccgcgtgcgccgggcgtcgatctcagaaccctcggataccgacccagagcctcggacacttaacccatctcccgctggctggttcgtccagcagcaccctgagctggagctgatgtcttcttttagggagcgtttcggacggaactggctgcaatacaggtctcacctggagcccagcggtaatcccctacctgccacgcccacaactagtgctccaagcgccccgccagcttcctcgcaggggcctgatacagcccctcgcccctctcccccacaagaggaagcgcgcgggcctcaagagtctccgcagaagatgtccgaggaagttagagccgagccacaggaagaggaggaagagaaggaagggaaggaggaaaaggaggaaggagagatggtcgagcagggagaggaagaagccggcgaggaggaagaggaggagcaagatcagaaggaggttgaggctgagctgtgccggcccttactggtatgcccactcgagggaccagaaggggtccgcggtagagagtgctttttgcgggtgacatcagcgcatttgtttgaggttgagcttcaggctgccagaactctggagcgcctggagctgcagtccctggaagccgccgaaattgagcccgaggcgcaagcccagcgctcaccccgtcctactggttctgatctgttgccaggagctccaatactcagtctcagattcagttacatctgtccagataggcaactcagacggtaccttgttctggagcccgatgcccacgccgccgtgcaggaactcttggccgtgctgactccagtcactaacgtagctagggagcaactaggagaagctcgcgatctgttgctcggcaggttccaatgcctgaggtgtgggcatgaatttaagccagaagaaccgagaatggggctcgacagtgaggaaggctggcggcctttattccagaaaacagaatccccggcggtatgcccaaactgcgggagcgaccatgtggtcctgttggcagtgtcccgaggtacccctaatcgggaacgaaaacagggagagcaaagcctagctcccagcccatcagcctcacctgtatgccatcctccagggcacggggaccacctagacagggcaaagaattcacctcctcaagcaccgagcaccagagaccacggaagttggtccctgtcgcctcccccagagaggtgtgggctacgcagcgtcgatcatcgattaaggctattcctggatgtcgaggtgttttcagacgctcaggaggaatttcagtgctgcctgaaggtgcctgttgcactcgcaggccataccggggagtttatgtgtctggtggttgtgtccgatagacggttatatcttctgaaggtcactggagagatgagggaaccacctgctagctggctccaacttaccctggccgtgcctctgcaggacttatccggtatcgagctggggctggctggacaaagtctgcgtctggaatgggccgctggggccgggcggtgtgtcctgttaccaagagacgctagacactgtcgcgctttcctcgaagaattgctagacgtgctgcagtcactcccacctgcctggcggaattgtgtctctgctacggaggaggaggttaccccacagcatcggttatggccactgctcgaaaaagattcaagtctagaggctcgacagtttttctacctgagggcttttctggttgagggcccaagcacatgtctggtgtctctactgttgaccccctcgactttgtttctcctcgacgaagatgcagcaggtagtcctgccgaaccaagccctccagccgccagtggcgaggcatcagagaaggtgccaccttcgggcccaggacccgcggtccgcgtccgcgagcagcagccactgagcagtctcagctccgtgttactctaccggtcagcacccgaagatcttcggctgctgttttacgatgaagtgtcccgtttagagtctttctgggccctacgagtggtgtgccaggagcagctgacagccttacttgcgtggatccgggaaccctgggaagagttgttctctattgggctgcggaccgtgatacaggaagccctcgccttggatagatag

SEQ ID NO: 229602 - DNA, 3300 bp, Artificial Sequence
  derived and/or modified sequence
cgcttcggtagcgctccacagagacccgtggccatgacaaccgcacaacgcgactctcttctgtggaagttagccggactcctgcgagagagtggagacgtggttttgtcaggctgctccaccctgtccctactgacacccacactccaacagttgaaccacgtattcgaattacacctcggcccatggggcccagggcaaacgggcttcgtggcactaccctcccatcctgcagatagcccagttattctccagctacagttcctgttcgacgtcctccaaaaaacactaagcctgaagttggttcacgtggctggcccaggcccaaccggaccaattaagatatttccttttaagagcctcaggcatctcgaactgcggggtgtgccacttcattgtctgcacggcctgcggggtatctacagccagctggaaaccctgatctgcagccgtagcttgcaggcactggaagaattgctctccgcctgcgggggagacttctgttccgctcttccatggctcgctctgttgagtgccaacttctcttacaatgcgctaactgcgctcgactcttcactgcggctactttctgccctgcggtttctgaacctttctcacaatcaagttcaggactgtcagggttttctgatggacctgtgcgagctgcaccacctggacatcagttataatagactgcatctagtgcccaggatgggacctagtggggcagccttgggggtgctgatcttgaggggcaacgagcttcgcagcttacatgggctggagcagctgagaaatttgaggcatttggacctagcttacaatctgttagagggtcaccgggagctctcccctttgtggctgttggccgagctgaggaagctatatttggaagggaacccactgtggttccatcccgaacaccgcgctgcaacagcccagtaccttagcccacgggcacgtgatgccgctacaggcttcttgttggacggcaaagttctctctttaaccgatttccagacgcacacaagcctggggctatctccaatggggccaccactgccttggcctgtaggatctacccctgagacatcaggaggtcccgatctgagtgattctctgtcttccggcggagtagttactcagccgttgcttcataaggtcaagagccgcgtgcgcgttcgcagggcaagtatcagcgagcccagcgacacggacccagaaccccgtactctcaatccgtcccccgctggctggtttgtgcagcagcaccctgaactggagctcatgagcagttttcgcgagagatttgggaggaactggctgcagtaccgaagtcacctcgaaccaagcggcaatcctcttccagctacacccacaacctctgccccatcagccccacccgcttcctcacaggggcctgataccgccccaagacctagtccccctcaggaagaggctagggggccacaggagagccctcagaaaatgtcagaagaagtgagggctgagccccaggaagaggaagaggaaaaagaggggaaagaagaaaaagaggaaggcgaaatggtcgaacaaggagaagaagaagccggtgaagaggaggaggaagagcaggaccagaaagaggtggaggccgagctgtgccgacccctcctcgtatgtccactcgaagggccagaaggagtgcgcggaagggaatgtttcctgagagtgacttcggcacacctgttcgaggtcgaactccaagcagccagaaccttggagcggttagaactccagagcctggaggcggctgaaattgagcctgaggcccaggcccagcgaagtccacggccaaccggttcagatctgttgcctggggctccgatactatctctacgcttctcgtatatctgtcctgatagacagctgcgcagatatctggtgttggagccagatgcacacgctgccgtgcaggaattattggctgtactgacaccagtaactaacgtcgctcgggaacagctgggagaggccagagatctgttacttggcagattccagtgtctgcgctgcgggcacgagttcaagccggaggaacctaggatgggactggacagtgaagaggggtggagaccacttttccaaaagaccgaaagtccggcagtttgccctaattgtgggtctgaccacgtggtgctgctagccgtttctcgaggaactcctaacagggaaagaaagcagggtgagcagtccctcgccccttcaccgtcagcttcccctgtttgccatcctccaggccacggcgaccacctggatcgggcaaagaattctccccctcaagcgcctagtacaagagatcatggcagttggtcactgtcccctcctcccgagcgctgcggactacggagcgtggatcacagactgcgcctgttcttagacgtagaggtcttctctgacgctcaagaagagttccagtgttgcctgaaggtgccagtcgcattagccggacataccggggagttcatgtgcctggttgtggtctctgacagacgcctgtacctactcaaagtcaccggcgaaatgcgcgaaccaccagcttcatggctgcaactaacactcgctgtaccgctgcaggacctgagcgggatcgaattgggccttgctgggcagagcctgcgcttggaatgggctgctggagccggtcgctgtgtcctgctgcccagagacgcccgtcactgcagagccttcctagaagagctgctcgacgtgctccagtctctgccccctgcttggcgtaattgcgtaagcgccaccgaggaggaagttacgccgcagcacagactttggcccctccttgaaaaggatagctcgttagaggccagacagtttttctatttgagggcattcctggtggagggccctagtacctgcctggtgagcctgttgttaacccccagcaccttattcctgttggatgaggatgccgctggaagtccagctgagcccagcccacccgctgcctctggtgaggccagtgaaaaagtgcccccttctggcccagggccagcagtgcgggtaagggagcagcagccactctctagcctaagctctgttctcttgtatcggtctgcgccagaagatctgcgtcttttgttctacgacgaagtgtccagactcgaatctttctgggcactcagagtcgtgtgccaggaacaactcacagcactgctggcctggatcagggagccatgggaagagctcttttctatagggcttcgcaccgtgatccaggaggcactcgccctggacagatag

SEQ ID NO: 229603 - DNA, 3601 bp, Artificial Sequence
  derived and/or modified sequence
gataggcgccgggcagctgagctggtaggaggaccagacggggaggttcggctccgccccccagcgtcccgtggccatgacgaccgctcagagggactccctgttgtggaagctcgcggggttgctgcgggagtccggggatgtggtcctgtctggctgtagcaccctgagcctgctgactcccacactgcaacagctgaaccacgtatttgagctgcacctggggccatggggccctggccagacaggctttgtggctctgccctcccatcctgccgactcccctgttattcttcagcttcagtttctcttcgatgtgctgcagaaaacactttcactcaagctggtccatgttgctggtcctggccccacagggcccatcaagattttccccttcaaatcccttcggcacctggagctccgaggtgttcccctccactgtctgcatggcctccgaggcatctactcccagctggagaccctgatttgcagcaggagcctccaggcattagaggagctcctctcagcctgcggcggcgacttctgctctgccctcccttggctggctctgctttctgccaacttcagctacaatgcactgaccgccttagacagctccctgcgcctcttgtcagctctgcgtttcttgaacctaagccacaatcaagtccaggactgtcagggattcctgatggatttgtgtgagctccaccatctggacatctcctataatcgcctgcatttggtgccaagaatgggaccctcaggggctgctctgggggtcctgatactgcgaggcaatgagcttcggagcctgcatggcctagagcagctgaggaatctgcggcacctggatttggcatacaacctgctggaaggacaccgggagctgtcaccactgtggctgctggctgagctccgcaagctctacctggaggggaaccctctttggttccaccctgagcaccgagcagccactgcccagtacttgtcaccccgggccagggatgctgctactggcttccttctcgatggcaaggtcttgtcactgacagattttcagactcacacatccttggggctcagccccatgggcccacctttgccctggccagtggggagtactcctgaaacctcaggtggccctgacctgagtgacagcctctcctcagggggtgttgtgacccagcccctgcttcataaggttaagagccgagtccgtgtgaggcgggcaagcatctctgaacccagtgatacggacccggagccccgaactctgaacccctctccggctggatggttcgtgcagcagcacccggagctggagctcatgagcagcttccgggaacggttcggccgcaactggctgcagtacaggagtcacctggagccctccggaaaccctctgccggccacccccactacttctgcacccagtgcacctccagccagctcccagggccccgacactgcacccagaccttcacccccgcaggaggaagccagaggcccccaggagtcaccacagaaaatgtcagaggaggtcagggcggagccacaggaggaggaagaggagaaggaggggaaggaggagaaggaggagggggagatggtggaacagggagaagaggaggcaggagaggaggaagaagaggagcaggaccagaaggaagtggaagcggaactctgtcgccccttgttggtgtgtcccctggaggggcctgagggcgtacggggcagggaatgctttctcagggtcacttctgcccacctgtttgaggtggaactccaagcagctcgcaccttggagcgactggagctccagagtctggaggcagctgagatagagccggaggcccaggcccagaggtcgcccaggcccacgggctcagatctgctccctggagcccccatcctcagtctgcgcttctcctacatctgccctgaccggcagttgcgtcgctatttggtgctggagcctgatgcccacgcagctgtccaggagctgcttgccgtgttgaccccagtcaccaatgtggctcgggaacagcttggggaggccagggacctcctgctgggtagattccagtgtctacgctgtggccatgagttcaagccagaggagcccaggatgggattagacagtgaggaaggctggaggcctctgttccaaaagacagaatctcctgctgtgtgtcctaactgtggtagtgaccacgtggttctcctcgctgtgtctcggggaacccccaacagggagcggaaacagggagagcagtctctggctccttctccgtctgccagccctgtctgccaccctcctggccatggtgaccaccttgacagggccaagaacagcccacctcaggcaccgagcacccgtgaccatggtagttggagcctcagtcccccccctgagcgctgtggcctccgctctgtggaccaccgactccggctcttcctggatgttgaggtgttcagcgatgcccaggaggagttccagtgctgcctcaaggtgccagtggcattggcaggccacactggggagttcatgtgccttgtggttgtgtctgaccgcaggctgtacctgttgaaggtgactggggagatgcgtgagcctccagctagctggctgcagctgaccctggctgttcccctgcaggatctgagtggcatagagctgggcctggcaggccagagcctgcggctagagtgggcagctggggcgggccgctgtgtgctgctgccccgagatgccaggcattgccgggccttcctagaggagctccttgatgtcttgcagtctctgccccctgcctggaggaactgtgtcagtgccacagaggaggaggtcaccccccagcaccggctctggccattgctggaaaaagactcatccttggaggctcgccagttcttctaccttcgggcgttcctggttgaaggcccttccacctgcctcgtatccctgttgctgactccgtccaccctgttcctgttagatgaggatgctgcagggtccccggcagagccctctcctccagcagcatctggcgaagcctctgagaaggtgcctccctcggggccgggccctgctgtgcgtgtcagggagcagcagccactcagcagcctgagctccgtgctgctctaccgctcagcccctgaggacttgcggctgctcttctacgatgaggtgtcccggctggagagcttttgggcactccgtgtggtgtgtcaggagcagctgacagccctgcttgcctggatccgggaaccatgggaggagctgttttccatcggactccggacagtgatccaagaggcgctggcccttgaccgatgagggtcccacgctgaccttggccctgacctcaggagccacgctgtagacattccctctcctggtctctgggtctggcttccaggctctggctgtggatgtcttcagcctctgggtgctggccagtgaggtcccaaatgacccagggcttaagggagaggcgagagaatgatctggcctcaggggacaggccacctggtcaggaggaatatttttcctgcactttttctcaggtatcaataaagttgtttccaactcata

SEQ ID NO: 229604 - DNA, 3300 bp, Artificial Sequence
  derived and/or modified sequence
agattcggcagcgccccccagagacccgtggccatgaccaccgcccagagagacagcctgctgtggaagctggccggcctgctgagagagagcggcgacgtggtgctgagcggctgcagcaccctgagcctgctgacccccaccctgcagcagctgaaccacgtgttcgagctgcacctgggcccctggggccccggccagaccggcttcgtggccctgcccagccaccccgccgacagccccgtgatcctgcagctgcagttcctgttcgacgtgctgcagaagaccctgagcctgaagctggtgcacgtggccggccccggccccaccggccccatcaagatcttccccttcaagagcctgagacacctggagctgagaggcgtgcccctgcactgcctgcacggcctgagaggcatctacagccagctggagaccctgatctgcagcagaagcctgcaggccctggaggagctgctgagcgcctgcggcggcgacttctgcagcgccctgccctggctggccctgctgagcgccaacttcagctacaacgccctgaccgccctggacagcagcctgagactgctgagcgccctgagattcctgaacctgagccacaaccaggtgcaggactgccagggcttcctgatggacctgtgcgagctgcaccacctggacatcagctacaacagactgcacctggtgcccagaatgggccccagcggcgccgccctgggcgtgctgatcctgagaggcaacgagctgagaagcctgcacggcctggagcagctgagaaacctgagacacctggacctggcctacaacctgctggagggccacagagagctgagccccctgtggctgctggccgagctgagaaagctgtacctggagggcaaccccctgtggttccaccccgagcacagagccgccaccgcccagtacctgagccccagagccagagacgccgccaccggcttcctgctggacggcaaggtgctgagcctgaccgacttccagacccacaccagcctgggcctgagccccatgggcccccccctgccctggcccgtgggcagcacccccgagaccagcggcggccccgacctgagcgacagcctgagcagcggcggcgtggtgacccagcccctgctgcacaaggtgaagagcagagtgagagtgagaagagccagcatcagcgagcccagcgacaccgaccccgagcccagaaccctgaaccccagccccgccggctggttcgtgcagcagcaccccgagctggagctgatgagcagcttcagagagagattcggcagaaactggctgcagtacagaagccacctggagcccagcggcaaccccctgcccgccacccccaccaccagcgcccccagcgccccccccgccagcagccagggccccgacaccgcccccagacccagccccccccaggaggaggccagaggcccccaggagagcccccagaagatgagcgaggaggtgagagccgagccccaggaggaggaggaggagaaggagggcaaggaggagaaggaggagggcgagatggtggagcagggcgaggaggaggccggcgaggaggaggaggaggagcaggaccagaaggaggtggaggccgagctgtgcagacccctgctggtgtgccccctggagggccccgagggcgtgagaggcagagagtgcttcctgagagtgaccagcgcccacctgttcgaggtggagctgcaggccgccagaaccctggagagactggagctgcagagcctggaggccgccgagatcgagcccgaggcccaggcccagagaagccccagacccaccggcagcgacctgctgcccggcgcccccatcctgagcctgagattcagctacatctgccccgacagacagctgagaagatacctggtgctggagcccgacgcccacgccgccgtgcaggagctgctggccgtgctgacccccgtgaccaacgtggccagagagcagctgggcgaggccagagacctgctgctgggcagattccagtgcctgagatgcggccacgagttcaagcccgaggagcccagaatgggcctggacagcgaggagggctggagacccctgttccagaagaccgagagccccgccgtgtgccccaactgcggcagcgaccacgtggtgctgctggccgtgagcagaggcacccccaacagagagagaaagcagggcgagcagagcctggcccccagccccagcgccagccccgtgtgccacccccccggccacggcgaccacctggacagagccaagaacagccccccccaggcccccagcaccagagaccacggcagctggagcctgagccccccccccgagagatgcggcctgagaagcgtggaccacagactgagactgttcctggacgtggaggtgttcagcgacgcccaggaggagttccagtgctgcctgaaggtgcccgtggccctggccggccacaccggcgagttcatgtgcctggtggtggtgagcgacagaagactgtacctgctgaaggtgaccggcgagatgagagagccccccgccagctggctgcagctgaccctggccgtgcccctgcaggacctgagcggcatcgagctgggcctggccggccagagcctgagactggagtgggccgccggcgccggcagatgcgtgctgctgcccagagacgccagacactgcagagccttcctggaggagctgctggacgtgctgcagagcctgccccccgcctggagaaactgcgtgagcgccaccgaggaggaggtgaccccccagcacagactgtggcccctgctggagaaggacagcagcctggaggccagacagttcttctacctgagagccttcctggtggagggccccagcacctgcctggtgagcctgctgctgacccccagcaccctgttcctgctggacgaggacgccgccggcagccccgccgagcccagcccccccgccgccagcggcgaggccagcgagaaggtgccccccagcggccccggccccgccgtgagagtgagagagcagcagcccctgagcagcctgagcagcgtgctgctgtacagaagcgcccccgaggacctgagactgctgttctacgacgaggtgagcagactggagagcttctgggccctgagagtggtgtgccaggagcagctgaccgccctgctggcctggatcagagagccctgggaggagctgttcagcatcggcctgagaaccgtgatccaggaggccctggccctggacagatag

SEQ ID NO: 229605 - protein, 1024 aa, Artificial Sequence
  derived and/or modified sequence
MARHGPPWSRLDAQQERDVRELVRGVAGLQDEADPNFQLALNFAWSNFRFHRFLDVNSHKIEKTIEGIYEKFVIHSDLSKAASWKRLTEEFLNAPLPSIKEIKTDAHYSILSLLLCLSDSPSNSSYVETPRNKEVEKKDDFDWGKYLMEDEEMDIGPYMDTPNWSEESEEENDQQPLSREDSGIQVDRTPLEEQDQNRKLDPCISWKDEPDDRSWLEHHVVHQYWTARPSQFPHSLHLHSNLAAVWDQHLYSSDPLYVPDDRVLVTETQVIRETLWLLSGVKKLFIFQLIDGKVTVRNNIIVTHLTHSCLRSVLEQIAAYGQVVFRLQEFIDEVMGHSSESMLPGSGSVPKKSTEAPFRTYQAFMWALYKYFISFKEELAEIEKCIINNDTTITLAIVVDKLAPRLSQLKVLHKVFSTGVAEVPPDTRNVVRASHLLNTLYKAILEYDNVGEASEQTVSLLFSLWVETVRPYLQTVDEWIVHGHLWDGAREFIIQRNKNVPVNHRDFWYATYTLYSVSEKTENEEKMSDNASASSGSDQGPSSRQHTMVSFLKPVLKQIIMAGKSMQLLKNLQCAESTTCQAGARDAERKSLYTLFLESVQSRLRHGEDSTPQVLTEQQATKENLMKMQSIAESHLELDDVHDPLLAINFARMYLEQSDFHEKFAGGDVCVDRSSESVTCQTFELTLRSCLYPHIDKQYLDCCGNLMQTLKKDYRLVEYLQAMRNFFLMEGGDTMYDFYTSIFDKIREKETWQNVSFLNVQLQEAVGQRYPEDSSRLSISFENVDTAKKKLPVHILDGLTLSYKVPWPVDIVISLECQKIYNQVFLLLLQIKWAKYSLDVLLFGELVSTAEKPRLKEGLIHEQDTVAQFGPQKEPVRQQIHRMFLLRVKLMHFVNSLHNYIMTRILHSTGLEFQHQVEEAKDLDQLIKIHYRYLSTIHDRCLLREKVSFVKEAIMKVLNLALMFADGWQAGLGTWRMESIEKMESDFKNCHMFLVTILNKAVCRGSFPHLESLALSLMAGMEQS

SEQ ID NO: 229606 - DNA, 3075 bp, Artificial Sequence
  derived and/or modified sequence
atggccagacacggccccccctggagcagactggacgcccagcaggagagagacgtgagagagctggtgagaggcgtggccggcctgcaggacgaggccgaccccaacttccagctggccctgaacttcgcctggagcaacttcagattccacagattcctggacgtgaacagccacaagatcgagaagaccatcgagggcatctacgagaagttcgtgatccacagcgacctgagcaaggccgccagctggaagagactgaccgaggagttcctgaacgcccccctgcccagcatcaaggagatcaagaccgacgcccactacagcatcctgagcctgctgctgtgcctgagcgacagccccagcaacagcagctacgtggagacccccagaaacaaggaggtggagaagaaggacgacttcgactggggcaagtacctgatggaggacgaggagatggacatcggcccctacatggacacccccaactggagcgaggagagcgaggaggagaacgaccagcagcccctgagcagagaggacagcggcatccaggtggacagaacccccctggaggagcaggaccagaacagaaagctggacccctgcatcagctggaaggacgagcccgacgacagaagctggctggagcaccacgtggtgcaccagtactggaccgccagacccagccagttcccccacagcctgcacctgcacagcaacctggccgccgtgtgggaccagcacctgtacagcagcgaccccctgtacgtgcccgacgacagagtgctggtgaccgagacccaggtgatcagagagaccctgtggctgctgagcggcgtgaagaagctgttcatcttccagctgatcgacggcaaggtgaccgtgagaaacaacatcatcgtgacccacctgacccacagctgcctgagaagcgtgctggagcagatcgccgcctacggccaggtggtgttcagactgcaggagttcatcgacgaggtgatgggccacagcagcgagagcatgctgcccggcagcggcagcgtgcccaagaagagcaccgaggcccccttcagaacctaccaggccttcatgtgggccctgtacaagtacttcatcagcttcaaggaggagctggccgagatcgagaagtgcatcatcaacaacgacaccaccatcaccctggccatcgtggtggacaagctggcccccagactgagccagctgaaggtgctgcacaaggtgttcagcaccggcgtggccgaggtgccccccgacaccagaaacgtggtgagagccagccacctgctgaacaccctgtacaaggccatcctggagtacgacaacgtgggcgaggccagcgagcagaccgtgagcctgctgttcagcctgtgggtggagaccgtgagaccctacctgcagaccgtggacgagtggatcgtgcacggccacctgtgggacggcgccagagagttcatcatccagagaaacaagaacgtgcccgtgaaccacagagacttctggtacgccacctacaccctgtacagcgtgagcgagaagaccgagaacgaggagaagatgagcgacaacgccagcgccagcagcggcagcgaccagggccccagcagcagacagcacaccatggtgagcttcctgaagcccgtgctgaagcagatcatcatggccggcaagagcatgcagctgctgaagaacctgcagtgcgccgagagcaccacctgccaggccggcgccagagacgccgagagaaagagcctgtacaccctgttcctggagagcgtgcagagcagactgagacacggcgaggacagcaccccccaggtgctgaccgagcagcaggccaccaaggagaacctgatgaagatgcagagcatcgccgagagccacctggagctggacgacgtgcacgaccccctgctggccatcaacttcgccagaatgtacctggagcagagcgacttccacgagaagttcgccggcggcgacgtgtgcgtggacagaagcagcgagagcgtgacctgccagaccttcgagctgaccctgagaagctgcctgtacccccacatcgacaagcagtacctggactgctgcggcaacctgatgcagaccctgaagaaggactacagactggtggagtacctgcaggccatgagaaacttcttcctgatggagggcggcgacaccatgtacgacttctacaccagcatcttcgacaagatcagagagaaggagacctggcagaacgtgagcttcctgaacgtgcagctgcaggaggccgtgggccagagataccccgaggacagcagcagactgagcatcagcttcgagaacgtggacaccgccaagaagaagctgcccgtgcacatcctggacggcctgaccctgagctacaaggtgccctggcccgtggacatcgtgatcagcctggagtgccagaagatctacaaccaggtgttcctgctgctgctgcagatcaagtgggccaagtacagcctggacgtgctgctgttcggcgagctggtgagcaccgccgagaagcccagactgaaggagggcctgatccacgagcaggacaccgtggcccagttcggcccccagaaggagcccgtgagacagcagatccacagaatgttcctgctgagagtgaagctgatgcacttcgtgaacagcctgcacaactacatcatgaccagaatcctgcacagcaccggcctggagttccagcaccaggtggaggaggccaaggacctggaccagctgatcaagatccactacagatacctgagcaccatccacgacagatgcctgctgagagagaaggtgagcttcgtgaaggaggccatcatgaaggtgctgaacctggccctgatgttcgccgacggctggcaggccggcctgggcacctggagaatggagagcatcgagaagatggagagcgacttcaagaactgccacatgttcctggtgaccatcctgaacaaggccgtgtgcagaggcagcttcccccacctggagagcctggccctgagcctgatggccggcatggagcagagctag

SEQ ID NO: 229607 - DNA, 3075 bp, Artificial Sequence
  derived and/or modified sequence
atggctagacatgggccgccatggtccaggctggatgctcagcaggagagggacgttcgggagctggtgcggggagtcgcaggactgcaggatgaggctgaccccaattttcagctagcgttgaacttcgcctggtctaactttcgcttccaccgctttctcgatgtcaatagtcacaagatagagaaaacaatagagggcatatatgagaagttcgttatccactccgatttaagcaaagctgcgtcatggaagcgtctcaccgaggaatttctgaacgcgccactgccctccattaaggagataaagacagacgctcactactccattctttctttgctgttgtgtcttagtgacagcccctccaacagttcatatgtcgagacacctcgcaataaggaggtggaaaaaaaggacgattttgattgggggaaataccttatggaggatgaggagatggatattggaccatatatggatacaccaaattggagtgaggagagcgaggaagaaaatgaccaacagcccctttcccgtgaagattcaggaatccaggtggacaggacccctttggaggagcaagatcagaataggaagctggacccatgtatcagttggaaggacgagcctgatgaccgctcttggctggagcatcacgtagtgcatcagtattggacagccagaccctctcagtttccacacagtctccacctgcattctaatctggcagccgtgtgggatcagcatctgtactcaagcgatcccctttacgtgcccgacgatcgcgtattggtcaccgagacacaggtcatcagggagactctgtggctcctcagtggcgtgaaaaagttgttcatatttcagctgatcgatggcaaggtcaccgtccgtaacaatatcatcgtgacccatctaactcacagctgtcttaggagtgttctggaacagatcgctgcatacggccaggttgtgttccgcttacaagaatttatcgacgaggtcatgggtcactcaagtgagagcatgcttccgggaagcgggtcggtacccaagaagagcactgaggcgccatttcgtacgtatcaggcttttatgtgggctctgtacaagtattttatttcgtttaaagaagaactggcggagatagagaagtgcattatcaacaacgatacgacaatcaccctggcgatagtcgtggataaattagctcctcgtctgagccagctaaaggtgcttcacaaggtgtttagcacaggggtggcggaggtgccaccggacaccaggaatgtggtgcgcgcatctcacttactgaacactctctataaggcaatccttgaatacgataatgtcggagaagccagcgaacagacagtctccctcctcttcagcctctgggtggagacggttcggccatatcttcagactgtcgacgaatggatcgtacatggtcacctttgggatggagccagggaatttattatacaacgaaacaaaaacgtcccagtcaaccaccgagacttttggtacgcaacctatacactctatagcgtgagtgaaaaaacagaaaatgaagagaagatgagcgacaacgcttctgcaagcagcggttctgatcaggggcctagctccaggcaacacactatggtgagttttcttaagcccgttctgaaacagatcattatggccggaaagagcatgcagctcctgaagaatctgcaatgcgctgagtctaccacttgccaggcaggtgctagggacgccgagagaaaatctttatatacattatttctcgaaagcgtacagtcaagactaagacatggggaagatagtacacctcaggtgctgactgagcagcaggctacaaaagagaacctcatgaagatgcagagcatagctgagagtcaccttgaacttgatgacgtgcatgatccattgctggcgatcaactttgcccgtatgtacctggagcaatccgacttccacgagaagtttgctggcggcgatgtgtgtgtcgatcgctctagcgagagcgtgacatgccagaccttcgagctgaccctgcgcagctgcctgtacccacatatcgataagcagtatctcgattgctgcggaaatctgatgcagacgctgaaaaaggactataggctggtcgaatacctacaagcaatgcgcaattttttcctcatggaaggcggggataccatgtacgatttctacacctccatctttgataagattagagagaaggaaacttggcagaatgtgtctttcttaaatgtgcagctgcaggaggctgtaggccaaagatacccagaggactcttctcggttatccatcagcttcgaaaacgtagacacagccaagaaaaagttgcccgtgcacattctcgacggtttgactctctcgtacaaggtgccctggcccgtggacatcgtgattagccttgaatgtcagaaaatatataatcaggttttcctgctgcttctgcagataaaatgggctaagtactccctggatgtgctcttgttcggtgagctggtgtcaacggccgagaagcctagacttaaagaaggacttatccatgagcaggatacagtggcccagttcggccctcagaaagagccggtgaggcagcagatacatcgtatgttccttttgcgagtgaaattaatgcactttgtgaacagtcttcacaactacataatgaccagaatcctgcactcaacggggctggagttccagcatcaggttgaggaagcgaaggatcttgatcagctcatcaagatacactatcgctacctgtctacaatacatgacaggtgcctgcttcgggagaaggtgagtttcgtgaaagaagccatcatgaaagtactcaatcttgccctgatgttcgcagatggctggcaggccgggctgggaacctggcggatggaatccatcgagaagatggagagtgactttaagaactgccacatgttcctcgtcacaattttaaataaggccgtctgccggggctcttttccacatcttgaatccttggccctgtccttgatggccggtatggaacaaagctag

SEQ ID NO: 229608 - DNA, 3075 bp, Artificial Sequence
  derived and/or modified sequence
atggcccggcacggccccccctggagccggctggatgcccagcaggagagagatgtgcgggagctggtgcggggcgtggccggcctgcaggatgaagctgaccccaacttccagctggccctgaactttgcctggagcaacttccgcttccaccgcttcctggatgtgaacagccacaagattgagaagaccatcgagggcatctatgagaagtttgtgatccacagcgacctgagcaaggccgcctcctggaagaggctgacagaggagttcctgaatgcccccctgcccagcatcaaggagatcaagacagatgcccactacagcatcctgagcctgctgctgtgcctgagtgacagccccagcaacagcagctatgtggagaccccaagaaacaaggaggtggagaagaaggatgactttgactggggcaagtacctgatggaggatgaggagatggacatcggcccctacatggacacccccaactggagcgaggagagcgaggaggagaatgaccagcagcccctgagccgggaggacagcggcatccaggtggacaggacccccctggaggagcaggaccagaacaggaagctggacccctgcatctcctggaaggatgagccagatgaccgctcctggctggagcaccacgtggtgcaccagtactggacagcccggcccagccagttcccccacagcctgcacctgcacagcaacctggccgctgtgtgggaccagcacctgtacagcagtgaccccctgtatgtgcctgatgacagagtgctggtgacagagacccaggtgatccgggagaccctgtggctgctgtctggagtgaagaagctgttcatcttccagctgattgatggcaaggtgacagtgaggaacaacatcatcgtgacccacctgacccacagctgcctgcggtctgtgctggagcagattgctgcctacggccaggtggtgttccggctgcaggagttcattgatgaggtgatgggccacagcagcgagagcatgctgcccggcagcggctctgtgcccaagaagagcacagaggcccccttccgcacctaccaggccttcatgtgggccctgtacaagtacttcatctccttcaaggaggagctggccgagattgagaagtgcatcatcaacaatgacaccaccatcaccctggccatcgtggtggacaagctggccccccggctgagccagctgaaggtgctgcacaaggtgttcagcactggagtggccgaggtgcccccagacaccagaaatgtggtgcgggccagccacctgctgaacaccctgtacaaggccatcctggagtatgacaacgtgggggaggccagcgagcagacagtgtccctgctcttcagcctgtgggtggagaccgtgcggccctacctgcagacagtggatgagtggatcgtgcacggccacctgtgggatggagcccgggagttcatcatccagaggaacaagaatgtgcctgtgaaccaccgggacttctggtacgccacctacaccctgtacagcgtgtctgagaagacagaaaatgaggagaagatgtctgacaatgccagcgccagcagcggcagtgaccagggccccagcagccggcagcacaccatggtgtccttcctgaagcctgtgctgaagcagatcatcatggccggcaagtccatgcagctgctgaagaacctgcagtgtgccgagagcaccacctgccaggccggggccagagatgctgagaggaagagcctgtacaccctcttcctggagagcgtgcagagccggctgcggcacggggaggacagcaccccccaggtgctgacagagcagcaggccaccaaggagaacctgatgaagatgcagagcattgctgagagccacctggagctggatgatgtgcatgaccccctgctggccatcaactttgccaggatgtacctggagcagagcgacttccacgagaagtttgctggaggagatgtgtgtgtggacaggagcagcgagagcgtgacctgccagacctttgagctgaccctgcggagctgcctgtacccccacatcgacaagcagtacctggactgctgcggcaacctgatgcagaccctgaagaaggactaccgcctggtggagtacctgcaggccatgaggaacttcttcctgatggagggcggggacaccatgtatgacttctacaccagcatctttgacaagatccgggagaaggagacctggcagaatgtgtccttcctgaatgtgcagctgcaggaggccgtgggccagcgctacccagaggacagcagccggctgagcatcagctttgaaaatgtggacacagccaagaagaagctgcctgtgcacatcctggatggcctgaccctgagctacaaggtgccctggcctgtggacatcgtcatcagcctggagtgccagaagatctacaaccaggtgttcctgctgctgctgcagatcaagtgggccaagtacagcctggatgtgctgctgtttggagagctggtgtccacagctgagaagccccggctgaaggagggcctcatccacgagcaggacacagtggcccagtttggcccccagaaggagcctgtgcggcagcagatccacaggatgttcctgctgcgggtgaagctgatgcactttgtgaacagcctgcacaactacatcatgacccgcatcctgcacagcacaggcctggagttccagcaccaggtggaggaggccaaggacctggaccagctgatcaagatccactaccgctacctgagcaccatccatgaccgctgcctgctgcgggagaaggtgtcctttgtgaaggaggccatcatgaaggtgctgaacctggccctgatgtttgctgatggctggcaggccggcctgggcacctggaggatggagagcattgagaagatggagagtgacttcaagaactgccacatgttcctggtgaccatcctgaacaaggctgtgtgccggggcagcttcccccacctggagagcctggccctgagcctgatggccggcatggagcagagctag

SEQ ID NO: 229609 - DNA, 3075 bp, Artificial Sequence
  derived and/or modified sequence
atggcccggcacggccccccctggagccggctggacgcccagcaggaacgggatgtgcgggaactggtccgcggtgtggccggactgcaggacgaagccgatcctaacttccagctggcgctcaatttcgcttggtccaatttccgattccaccggttcctcgatgtaaactctcataaaatcgaaaagacaatagaaggcatatacgagaagttcgtcatacatagtgacctttctaaagcagcctcatggaaacgactcacagaggaatttctgaacgcccctcttccttccatcaaggaaattaagacggatgctcactactccattttgagcctgctgctttgtctgtcagacagtccctcgaattcaagctacgttgagacacccaggaacaaagaggtggaaaaaaaagacgacttcgattggggtaaatacttgatggaggatgaggagatggacatcggaccgtatatggatacaccaaattggtctgaggaaagcgaagaagagaatgaccagcagcccttaagcagagaggatagcggtatccaagtagatcgaactcccctagaggaacaggatcagaaccgcaagcttgacccatgcatcagctggaaggatgagccagacgacaggtcctggttagagcatcatgtggtccatcagtattggacagcccgtccatcgcaatttccacactctctacatcttcactccaacttggccgcggtgtgggaccagcatctttactcttccgatccactctatgtacctgatgatagggtgcttgtgacagaaacccaagtgatcagggaaaccctgtggctgcttagcggcgtcaagaaactgtttattttccagctcatcgatggcaaagtcacggtgaggaataatatcatagtgacgcacctcacgcattcatgtctgcgctcggtgctggagcagattgcggcgtacgggcaggtagtgtttcggctccaggaatttatagacgaagtgatgggccattcgagtgaaagtatgctccctggaagcggtagtgtccctaagaaatccacggaggcaccatttcgtacgtatcaggcattcatgtgggctctgtataagtattttattagcttcaaagaagagctcgcagagatagagaagtgtataattaacaacgacaccacgatcaccttggccatcgtggtggacaagctggcaccgcgcttatcgcagctgaaagttctccacaaggtgttttcaacaggtgtggcggaggtgcctccggatactcgcaacgtagtaagggcctcacatctgctgaatacactctacaaagccattctagaatatgataatgtgggggaggcttcagagcagaccgtttctcttctgtttagcttatgggtagagacagtccgaccataccttcagacggtcgatgagtggatagtgcacggccatctatgggacggcgcgagggagttcattatccagcgaaacaaaaatgtgccggtcaaccatcgcgatttctggtacgcaacatataccctgtacagcgtttccgaaaagactgaaaacgaggaaaagatgagcgacaacgcctccgccagctcaggctcggaccagggaccttccagccgccagcatacaatggtaagttttttaaaacctgtcctgaagcagataataatggctggaaagagcatgcagctcctaaaaaatctacaatgtgccgaatccacaacttgtcaggcaggcgctagagacgccgagagaaaatccctatacactttatttctggaatccgtgcaatccaggttgcggcacggagaggatagcacaccacaggttctgaccgaacagcaagcaactaaagagaacctgatgaagatgcagtcgattgccgagagccatcttgaattggatgatgtgcatgatcccctgctggctattaattttgctagaatgtacctggagcaatcggattttcacgaaaagttcgccgggggtgatgtctgcgtggacaggtccagcgagtcggtcacttgccagacttttgaactaaccttgaggtcctgcctgtaccctcacatagataaacaatatctcgactgttgcggcaaccttatgcaaactctaaagaaagattacagactcgtagagtatctgcaggcaatgcgcaacttctttctgatggagggaggagatacaatgtacgacttctacacgagtattttcgacaaaatcagggaaaaggaaacgtggcagaatgtatccttccttaacgtgcaattgcaggaggccgtgggacagcggtatcctgaagattcctctcgccttagtatttcattcgagaatgtcgatacagccaaaaaaaaattgcccgtgcacattctggacggccttaccctcagctacaaggtaccctggccggtggacattgttatttccctcgagtgccagaaaatctacaaccaagtatttcttcttctgttgcagataaagtgggcaaagtattcactggatgttctactattcggggagttagttagcactgcggagaagcccagattaaaagaggggctcattcacgagcaggatactgtggcacagtttggcccccagaaggagccggtgcgccagcagatccatcgaatgtttctgctcagagttaaactcatgcactttgtaaacagcctccacaattacatcatgacaaggattctacactctactggtctagaatttcagcaccaggtggaagaggcaaaagacttagatcaactcatcaagattcactatcggtacctgagtaccatccatgacaggtgtctgctgagagaaaaggtgtcattcgtaaaagaagctataatgaaggtgctaaatctggcgctgatgtttgccgatgggtggcaggctggacttggcacatggagaatggagtccattgaaaagatggagtctgatttcaagaactgccatatgtttttggtgacaatcctgaacaaggcggtctgtaggggcagttttccgcacttggagagcttagcacttagtctcatggccggtatggagcagtcctag

SEQ ID NO: 229610 - DNA, 3075 bp, Artificial Sequence
  derived and/or modified sequence
atggcccgacacggtccaccttggagtaggctggatgctcagcaggagagggatgtacgcgagctggtgagaggagttgcgggtctgcaggacgaagctgaccctaattttcagctcgctctcaacttcgcgtggagtaattttcggttccatcgatttctcgacgtaaactcacacaagatcgagaaaacgatcgagggtatttatgagaaattcgtgatccacagcgacctgtcaaaggcagcctcctggaagaggctgacagaagagttcctcaatgccccactgcctagcataaaggaaattaaaacagatgcacactattccatcttgagcttattgctctgtctgagcgactctccctctaactccagctacgtggaaacacccagaaataaagaagtggagaaaaaagatgatttcgactggggaaaatacctcatggaagacgaagagatggacatcggaccatacatggacacccctaattggagtgaggagtccgaagaagagaatgatcaacagccacttagtcgggaggatagcgggatccaggtcgacagaacacccctggaggaacaggaccaaaaccgcaagcttgatccatgtatcagttggaaggacgaaccggacgatcggtcttggcttgagcaccacgttgtccatcagtactggaccgcccgtccgtcccagttcccgcactctctgcatcttcactccaatctcgccgctgtctgggatcagcacctgtacagttcagaccccctctacgtcccagatgacagggtccttgtgactgaaacccaggtaatccgcgaaactctatggctgttgtctggcgtaaaaaagctgttcattttccagctgattgatggaaaggtcacagtgcggaataacattattgtcacacacctgacccattcctgccttcgctctgtcttggaacaaattgcggcatacggacaggtggttttccgcttgcaagagttcatcgacgaggtcatgggtcatagtagtgagtctatgctgcctggctctggaagcgtacctaagaaatctaccgaagctccattcagaacctaccaggcatttatgtgggcactgtataaatacttcatttcatttaaagaggaacttgcagaaattgagaagtgcattatcaacaacgatacgacaatcacgcttgccatcgtagtcgataagctggcgccaagattgagtcagctaaaggtgcttcacaaggtcttcagtaccggcgtggccgaggtgccacctgacactaggaatgtggtcagggccagtcacctgctcaacactttgtacaaagcaatcttggaatatgacaacgtcggggaggcctccgagcagaccgtgtcactcctcttctccctgtgggtggagaccgtacgcccttacctgcagacagtggatgagtggatcgttcatggccacctctgggatggagccagggaatttatcatccagaggaataagaacgtgccagtcaaccatcgtgacttttggtacgcaacctacacactgtacagcgtctcagaaaagactgagaatgaggagaaaatgtccgacaatgccagtgcatcttctggatccgatcagggcccatccagtcggcagcacacaatggtttcatttctgaaacccgttctcaagcaaattattatggccggtaaatccatgcagctgctgaaaaacctccagtgcgcggaatcgacaacctgccaggcaggagcacgagatgccgagcgcaagagcctctacaccctcttcctggagagtgtgcagtcaaggctccgacacggggaagacagcacaccccaggtactgaccgagcaacaagccacaaaggagaatctgatgaagatgcagagtatcgccgaatcacacctggaactggacgacgtgcacgacccactgcttgctatcaactttgcacggatgtatctggagcaaagcgactttcacgaaaaatttgccggaggcgatgtgtgcgtggatcgctcctccgagtccgtgacttgccagacgttcgagttgaccctgagatcatgcttatacccccacatcgacaagcaatacctggattgttgtggaaatctgatgcagaccctgaagaaggactataggttagtcgagtatttacaggccatgcgcaatttcttcttgatggaaggaggggacactatgtatgatttttacactagcatcttcgataaaattagagaaaaggagacttggcagaacgtcagtttcctcaacgtgcagctgcaggaagcggtgggacagagatatcccgaagattcaagccgtctcagcatatccttcgaaaacgtcgacacagcaaaaaagaagcttcccgtacatatcctggacggactcacactgagttacaaggtcccatggcctgtcgatattgtaatatccctcgagtgccagaaaatctacaatcaggtgtttttgcttttgctgcaaattaagtgggccaagtactcactagatgtgctgctgttcggagaactggtgagtactgctgaaaagcctagactaaaagagggtctaatccacgaacaggatactgtcgctcagttcgggcctcagaaggagcccgtccgccagcagattcacagaatgtttctgttgcgcgtgaaactaatgcattttgtgaattcattacacaattacattatgacccgaatcttacacagcacgggattagaattccaacaccaggtagaggaagccaaggacttagatcagctgataaaaattcattaccgatatctgtccactatccatgatagatgcctgttgcgtgagaaagtaagctttgtcaaggaggcgatcatgaaggtcttaaatcttgccttgatgtttgcagacgggtggcaggcagggctggggacatggcggatggaaagcattgagaaaatggaaagcgattttaaaaattgccatatgtttttagtgaccattctaaacaaggctgtgtgtaggggatctttcccgcacctggagtctctcgccctatctctgatggccggtatggagcaatcttag

SEQ ID NO: 229611 - DNA, 3849 bp, Artificial Sequence
  derived and/or modified sequence
gaagtcgcccggcgcgggagcgcgaactctcgcgagaatgccgccagctccggaggcgactgcggcaggagcccgagctctcgcgcgacaggcaccaattcgttagacgcgcgctgcaggagcgcggaacatggcgcggcacgggccaccgtggagtcggttggacgcgcagcaggagcgcgacgtgcgggagctcgtccggggtgtcgccggcctccaggacgaggcagaccccaacttccagctcgccctaaacttcgcctggtccaacttcagatttcatcgtttcttggatgtcaacagccacaaaatagaaaaaacaatcgaaggaatttatgaaaaatttgtcattcattctgatctaagcaaagctgctagttggaagagattaacggaggaatttctaaatgcaccacttcccagtataaaggaaataaagacagatgcacattattccatactgtcacttcttctgtgtctgtcagactctccttcaaacagcagttatgtggagacaccaagaaataaagaagtggaaaagaaagatgatttcgactggggaaaatacttgatggaagatgaagaaatggacattggtccgtacatggacacaccaaattggtctgaagaaagtgaagaggaaaatgatcaacagcccttaagcagagaggactctggaattcaggtagacaggacaccgttagaagaacaagatcaaaacagaaaactggatccttgtatcagttggaaagatgagccagatgaccgaagctggctggaacatcatgtggtccatcagtactggacagccaggccctcccagtttcctcatagtttacatttgcactctaatttagctgctgtctgggaccaacacttgtacagcagtgatccattgtatgttccagatgacagggttttggttactgagactcaggttattcgggaaaccctatggttactttcaggagtgaaaaagctctttatatttcagttgatagatgggaaggtaactgtgagaaacaatattatagtaactcatttaacacatagctgtttacgatctgtgctggaacaaatagcagcatatggccaggttgtgtttcgactccaggagttcattgatgaagtcatgggacacagttctgagagcatgctgcctggaagtgggtctgttcctaagaagtcaactgaagctccctttagaacctaccaggctttcatgtgggccctgtacaaatatttcattagtttcaaagaggaacttgcagaaattgagaagtgcatcatcaataatgatactacaataactcttgcaatagtggtggacaagttggcacctcgattgtctcagctcaaggttctgcacaaagtgtttagtactggagtagcagaagttccacctgatactcgaaatgtcgtccgggcctctcacctgcttaacaccctgtacaaggccattcttgaatatgacaatgttggagaagcctctgagcaaaccgtctccctccttttctctctctgggtggaaacggtgcggccttacctgcagacggtggacgagtggatcgtgcacgggcacctgtgggatggcgccagggagttcatcatccagagaaacaaaaatgttccagttaatcacagagacttctggtatgcaacttacacgttatatagcgtatcagaaaagacagaaaatgaagaaaaaatgagtgataacgctagtgcgagttccggcagtgaccaggggccctccagcaggcagcacaccatggtgtccttcctcaaacctgtcctgaagcagatcataatggctggcaagtcgatgcagctgctgaagaacctgcagtgtgcggagagcaccacctgccaggcaggagccagagatgcagaaagaaaaagtttatacactctctttctggaatctgtacagtcccgtcttcgacatggagaagattccactccacaggttcttactgagcaacaggcaaccaaggagaacctgatgaagatgcagtccattgctgaaagccatcttgaactggatgatgttcatgatccactgcttgccattaactttgcaaggatgtatttggagcagagtgactttcacgagaagtttgctggtggtgatgtatgtgtggatagatcatcggaatctgtgacatgccagacttttgaattaacgctgagatcctgcctctatcctcatattgacaagcagtatctagattgctgtggaaatctcatgcaaactctaaaaaaagattacaggttggtagaatacttgcaagctatgaggaattttttcttaatggaaggaggagataccatgtatgacttctacacgtcaatttttgataaaataagagaaaaggaaacatggcagaatgtgtcttttcttaatgtccaactccaagaagcagtaggacagcgttatcctgaagatagttcacgtctatctatatcttttgaaaatgttgacacagctaagaagaagctgcctgttcatatcttagatggtctgaccctcagctacaaggtcccatggcccgtggacattgttataagtttggaatgtcaaaaaatttataatcaagtgtttcttctcttattgcaaataaagtgggcaaaatatagtctggatgttttactttttggtgaactggttagtactgcagaaaaaccacgacttaaagaaggccttatacatgaacaagacacagttgctcagttcggaccacaaaaagaaccagtaagacagcagattcatcgcatgttcctcttaagagtgaagctcatgcatttcgtgaacagcttgcacaactacatcatgaccaggattctacacagtacagggctggagtttcaacatcaagtcgaggaagccaaggatttagatcaattgattaaaattcactataggtatctgtcaaccatccatgaccggtgtctgctgagagaaaaggtcagctttgtgaaagaagctatcatgaaggtgttgaacttggctctcatgtttgcagacggttggcaggcaggcctgggcacttggcgaatggaatctatagagaaaatggaatctgattttaaaaactgccatatgtttcttgtaaccattttaaacaaagccgtctgtagaggatcctttccccatttggaatctctagcgttgtcactcatggctggcatggaacaaagttaaatgtcttcagcgtaataaatatctccgactttgtcatcatacatgtacatttccaccatgtgcagctgaaaagtgaaaatatttttattttggtttatttgtaaaacttgtccacagtcagcctggcacagtcgctcatgcctctaatcccagcacgatgggaggccaagacaggcagatcacttgagcccaggagtttgaggccagcctgggcaacatggtgaaacccggtgtctaccaaaaatacaaaatgtatccagacatggtggtgtgtacctgtagtcccagctactcaggaggcaaagatgggaggattacttgagcccaggaggtcaaggctacagtgagccatgattgcactactgcagtgcaacctgggtgacagagtgagaccctgactcagaaagaaccacttgcccacagtccagacagatggattgtaggtgggttttctggagattagtagatactgtatagagttgtatacataaaattgtgtcagtagtacaaagtgtatataggctgtttactcttacatttcctactgtaagatacagatttatggtactgatacctttaaattatatcatattttgaaaatgtaattactgatattcaaaataaattaaaggacttaaaatcat

SEQ ID NO: 229612 - protein, 1092 aa, Artificial Sequence
  derived and/or modified sequence
MGNAGSMDSQQTDFRAHNVPLKLPMPEPGELEERFAIVLNAMNLPPDKARLLRQYDNEKKWELICDQERFQVKNPPHTYIQKLKGYLDPAVTRKKFRRRVQESTQVLRELEISLRTNHIGWVREFLNEENKGLDVLVEYLSFAQYAVTFDFESVESTVESSVDKSKPWSRSIEDLHRGSNLPSPVGNSVSRSGRHSALRYNTLPSRRTLKNSRLVSKKDDVHVCIMCLRAIMNYQYGFNMVMSHPHAVNEIALSLNNKNPRTKALVLELLAAVCLVRGGHEIILSAFDNFKEVCGEKQRFEKLMEHFRNEDNNIDFMVASMQFINIVVHSVEDMNFRVHLQYEFTKLGLDEYLDKLKHTESDKLQVQIQAYLDNVFDVGALLEDAETKNAALERVEELEENISHLSEKLQDTENEAMSKIVELEKQLMQRNKELDVVREIYKDANTQVHTLRKMVKEKEEAIQRQSTLEKKIHELEKQGTIKIQKKGDGDIAILPVVASGTLSMGSEVVAGNSVGPTMGAASSGPLPPPPPPLPPSSDTPETVQNGPVTPPMPPPPPPPPPPPPPPPPPPPPPLPGPAAETVPAPPLAPPLPSAPPLPGTSSPTVVFNSGLAAVKIKKPIKTKFRMPVFNWVALKPNQINGTVFNEIDDERILEDLNVDEFEEIFKTKAQGPAIDLSSSKQKIPQKGSNKVTLLEANRAKNLAITLRKAGKTADEICKAIHVFDLKTLPVDFVECLMRFLPTENEVKVLRLYERERKPLENLSDEDRFMMQFSKIERLMQKMTIMAFIGNFAESIQMLTPQLHAIIAASVSIKSSQKLKKILEIILALGNYMNSSKRGAVYGFKLQSLDLLLDTKSTDRKQTLLHYISNVVKEKYHQVSLFYNELHYVEKAAAVSLENVLLDVKELQRGMDLTKREYTMHDHNTLLKEFILNNEGKLKKLQDDAKIAQDAFDDVVKYFGENPKTTPPSVFFPVFVRFVKAYKQAEEENELRKKQEQALMEKLLEQEALMEQQDPKSPSHKSKRQQQELIAELRRRQVKDNRHVYEGKDGAIEDIITDLRNQPYRRADAVRRSVRRRFDDQNLRSVNGAEITM

SEQ ID NO: 229613 - DNA, 3279 bp, Artificial Sequence
  derived and/or modified sequence
atgggcaacgccggcagcatggacagccagcagaccgacttcagagcccacaacgtgcccctgaagctgcccatgcccgagcccggcgagctggaggagagattcgccatcgtgctgaacgccatgaacctgccccccgacaaggccagactgctgagacagtacgacaacgagaagaagtgggagctgatctgcgaccaggagagattccaggtgaagaaccccccccacacctacatccagaagctgaagggctacctggaccccgccgtgaccagaaagaagttcagaagaagagtgcaggagagcacccaggtgctgagagagctggagatcagcctgagaaccaaccacatcggctgggtgagagagttcctgaacgaggagaacaagggcctggacgtgctggtggagtacctgagcttcgcccagtacgccgtgaccttcgacttcgagagcgtggagagcaccgtggagagcagcgtggacaagagcaagccctggagcagaagcatcgaggacctgcacagaggcagcaacctgcccagccccgtgggcaacagcgtgagcagaagcggcagacacagcgccctgagatacaacaccctgcccagcagaagaaccctgaagaacagcagactggtgagcaagaaggacgacgtgcacgtgtgcatcatgtgcctgagagccatcatgaactaccagtacggcttcaacatggtgatgagccacccccacgccgtgaacgagatcgccctgagcctgaacaacaagaaccccagaaccaaggccctggtgctggagctgctggccgccgtgtgcctggtgagaggcggccacgagatcatcctgagcgccttcgacaacttcaaggaggtgtgcggcgagaagcagagattcgagaagctgatggagcacttcagaaacgaggacaacaacatcgacttcatggtggccagcatgcagttcatcaacatcgtggtgcacagcgtggaggacatgaacttcagagtgcacctgcagtacgagttcaccaagctgggcctggacgagtacctggacaagctgaagcacaccgagagcgacaagctgcaggtgcagatccaggcctacctggacaacgtgttcgacgtgggcgccctgctggaggacgccgagaccaagaacgccgccctggagagagtggaggagctggaggagaacatcagccacctgagcgagaagctgcaggacaccgagaacgaggccatgagcaagatcgtggagctggagaagcagctgatgcagagaaacaaggagctggacgtggtgagagagatctacaaggacgccaacacccaggtgcacaccctgagaaagatggtgaaggagaaggaggaggccatccagagacagagcaccctggagaagaagatccacgagctggagaagcagggcaccatcaagatccagaagaagggcgacggcgacatcgccatcctgcccgtggtggccagcggcaccctgagcatgggcagcgaggtggtggccggcaacagcgtgggccccaccatgggcgccgccagcagcggccccctgccccccccccccccccccctgccccccagcagcgacacccccgagaccgtgcagaacggccccgtgaccccccccatgcccccccccccccccccccccccccccccccccccccccccccccccccccccccccccccccctgcccggccccgccgccgagaccgtgcccgccccccccctggccccccccctgcccagcgccccccccctgcccggcaccagcagccccaccgtggtgttcaacagcggcctggccgccgtgaagatcaagaagcccatcaagaccaagttcagaatgcccgtgttcaactgggtggccctgaagcccaaccagatcaacggcaccgtgttcaacgagatcgacgacgagagaatcctggaggacctgaacgtggacgagttcgaggagatcttcaagaccaaggcccagggccccgccatcgacctgagcagcagcaagcagaagatcccccagaagggcagcaacaaggtgaccctgctggaggccaacagagccaagaacctggccatcaccctgagaaaggccggcaagaccgccgacgagatctgcaaggccatccacgtgttcgacctgaagaccctgcccgtggacttcgtggagtgcctgatgagattcctgcccaccgagaacgaggtgaaggtgctgagactgtacgagagagagagaaagcccctggagaacctgagcgacgaggacagattcatgatgcagttcagcaagatcgagagactgatgcagaagatgaccatcatggccttcatcggcaacttcgccgagagcatccagatgctgaccccccagctgcacgccatcatcgccgccagcgtgagcatcaagagcagccagaagctgaagaagatcctggagatcatcctggccctgggcaactacatgaacagcagcaagagaggcgccgtgtacggcttcaagctgcagagcctggacctgctgctggacaccaagagcaccgacagaaagcagaccctgctgcactacatcagcaacgtggtgaaggagaagtaccaccaggtgagcctgttctacaacgagctgcactacgtggagaaggccgccgccgtgagcctggagaacgtgctgctggacgtgaaggagctgcagagaggcatggacctgaccaagagagagtacaccatgcacgaccacaacaccctgctgaaggagttcatcctgaacaacgagggcaagctgaagaagctgcaggacgacgccaagatcgcccaggacgccttcgacgacgtggtgaagtacttcggcgagaaccccaagaccaccccccccagcgtgttcttccccgtgttcgtgagattcgtgaaggcctacaagcaggccgaggaggagaacgagctgagaaagaagcaggagcaggccctgatggagaagctgctggagcaggaggccctgatggagcagcaggaccccaagagccccagccacaagagcaagagacagcagcaggagctgatcgccgagctgagaagaagacaggtgaaggacaacagacacgtgtacgagggcaaggacggcgccatcgaggacatcatcaccgacctgagaaaccagccctacagaagagccgacgccgtgagaagaagcgtgagaagaagattcgacgaccagaacctgagaagcgtgaacggcgccgagatcaccatgtag

SEQ ID NO: 229614 - DNA, 3279 bp, Artificial Sequence
  derived and/or modified sequence
atggggaatgcaggatctatggactcccagcagacagacttcagggcccacaatgtgccccttaagctgccaatgcctgaaccgggggagctagaggaaaggttcgctatcgtgcttaacgccatgaacctgcctcctgataaggctcggcttcttcggcagtatgataacgagaagaagtgggagctcatttgcgatcaggagagatttcaagttaagaatccgccacacacttatatccaaaaactgaaggggtatcttgatccggcggttactaggaaaaagttcaggcgccgggttcaggagtcgacccaggtgctgcgagagcttgaaatttcccttcgcaccaaccacatcggatgggtgcgcgaattcctcaacgaagaaaataaaggactggatgtcctggtggagtaccttagtttcgctcagtacgcggttaccttcgactttgagtccgtcgagtccaccgtggaatcttccgtagacaaaagcaaaccttggtccagatctatcgaggaccttcatagaggatccaatctaccctcccccgtcggaaactccgtcagccggtccggccgccactcggcgctcaggtataatacactgccttccaggagaacgctgaaaaacagtcggcttgtttctaagaaagatgacgtgcatgtgtgtatcatgtgcttgagggctatcatgaattaccagtacggcttcaacatggtcatgagccatccccatgccgttaatgagatcgcactgtctctgaataacaaaaatccgaggacaaaagctctggttctagagttgctagcagcggtctgtctcgtgagaggtggacacgaaatcatactctctgccttcgataacttcaaggaagtatgcggcgagaagcagagatttgaaaagctcatggagcattttcgcaatgaggataataatatagacttcatggtcgcgtccatgcaatttatcaacatagtggtacacagtgtcgaagacatgaactttcgcgtccatcttcagtacgaatttacaaaattgggtcttgatgaatatctggacaagctcaaacacacagaatccgacaaactacaggtgcagatccaagcttacctggacaatgtttttgatgttggtgcgctgctggaagatgctgagacaaagaacgctgccctggagagagttgaggagttggaagagaacataagccatctctctgagaaacttcaggatactgagaacgaggccatgagtaaaattgtagagctggaaaaacagctaatgcagcgcaataaggaactggatgtggtgcgcgagatctacaaggacgcaaacacacaggtgcacaccttacgcaaaatggtgaaggaaaaggaagaagcaattcaaagacaaagcacactggagaagaagattcatgaactggagaagcagggtacaattaaaatccagaagaaaggagatggggatatcgcgatcttgccggtggttgctagtgggacattgtctatgggaagcgaggtggtcgctggtaatagcgtgggcccaaccatgggagcagcatcctcaggacccctacctccccccccgccacccctgcctccgagcagcgacactcctgagaccgtgcagaacggccccgtgaccccccctatgccaccccccccaccgcctccccctcccccgcccccccctccgccgccccctccccccccgcctctgccaggccctgccgctgaaactgtaccggctccccctcttgcaccgcccttgccgtccgccccccccctgcctggaacgtcatcacctaccgtagtctttaattccggcctggcggcagtgaaaatcaaaaaaccaattaagacaaaattccggatgccagtgtttaactgggtggcactgaagcctaaccagattaacggaactgttttcaatgagattgatgatgaacggatactcgaggacctcaacgtggacgaattcgaggagatttttaaaaccaaggcacaggggccggcgatagatctttcgagcagcaaacagaagattccgcagaagggctctaacaaggttaccctgctcgaagctaaccgggctaagaatctggctattaccctgcgcaaagccggcaaaactgccgacgaaatttgcaaagcaatacatgtctttgatctgaaaactctacctgtggactttgtggaatgcttgatgaggttcctgccaacagaaaatgaagttaaggtattgcggctatacgagagggagcggaaacccctcgaaaacctctccgacgaggaccgcttcatgatgcagttttccaaaatcgagcggctcatgcagaaaatgaccatcatggccttcatcggcaattttgccgagagcattcagatgctcacaccgcagctccatgcaataattgccgcaagcgtgtccattaagagctcacagaagttaaagaagatcctggaaatcatcttagccctcggtaactacatgaactcttccaagcgcggtgccgtgtacggcttcaaactgcaaagtctggacttgctactcgataccaagtcgaccgataggaaacagactctcttgcactatattagcaacgtggtcaaggagaaataccaccaggtgagcctgttttataacgagctgcactacgtggagaaggccgcagcagtaagcctggaaaatgtgctcttagacgttaaagaactccagcgcgggatggacctcactaaacgcgaatacaccatgcacgaccacaacactctgctgaaagaatttatcctgaacaacgaaggaaaattaaagaaacttcaagatgatgctaagatcgcacaggacgctttcgacgatgtggtaaaatactttggcgagaatcctaagactactccccccagcgtcttcttcccagtttttgtccgcttcgtaaaagcctataagcaggccgaagaggagaacgagctgagaaaaaaacaggaacaggctctaatggagaagctgctggaacaggaggcactgatggagcaacaggatcccaagtcaccgagccataagtcaaagagacaacagcaagaactgatagcagaactccgtcgccggcaagtgaaagataacaggcacgtttatgaaggcaaggacggcgcgatcgaagacataatcaccgatttaaggaaccagccttatcgccgagccgacgcagtgaggcgctctgtgcggcgaagatttgacgatcagaatcttcgcagcgtgaatggcgcggaaatcacaatgtag

SEQ ID NO: 229615 - DNA, 5575 bp, Artificial Sequence
  derived and/or modified sequence
gcggccgcgggcccggcagaaggccgagtaggagggaccacgcgccgggggccgcgatctctggcagggggcggtgtgccagcggagcaccatgcacataggcgcccagcgccccaactacccctcccgaggaaaagaggccggggccgcgctggggcggcggagagcatgagggaggccggggggcggctcggcttggagcgctgctagggagcggtgcgcgccgcacacccgcctgggcgcggcggagggcggggagccgggcaggtcgcgcctgcgggcggcagccgaccgccgggagctgttctgatttccgacgcgcacgctaggggcccggagcagcccccggccccggcgcgccgccgacatgggcaacgcagggagcatggattcgcagcagaccgatttcagggcgcacaacgtgcctttgaagctgccgatgccagagccaggtgaactggaggagcgatttgccatcgtgctgaatgctatgaacctacctcctgacaaagccaggttactgcggcagtatgataatgagaaaaaatgggaactgatttgtgatcaggaacgattccaggtgaagaatcctccccatacatacattcaaaagctcaaaggctatctggatccagctgtaaccaggaagaaattcagacggcgtgttcaagaatctacacaagtgctaagagaactggaaatttctttgagaactaaccacattggatgggtcagagaatttctgaatgaagaaaacaaaggtcttgatgttctagtggaatatctctcatttgcacagtacgcggtaacttttgactttgaaagtgtggagagtactgtggagagctcggtggacaaatcaaagccctggagtaggtccatcgaggacctgcacagagggagcaacctgccctcacctgtgggcaacagtgtctcccgctctggaagacattctgcactgcgatataatacattgccaagcagaagaactctgaaaaattcaagattagtgagtaagaaagatgatgtgcatgtctgtatcatgtgtttacgtgccatcatgaattatcagtatggtttcaacatggtcatgtctcatccacacgctgtcaatgagattgcactaagcctgaacaacaagaatcccagaacaaaagcccttgtcttagaactgttggcagccgtttgtcttgtcagaggcgggcatgaaatcattttatcagcatttgataactttaaagaggtttgtggagaaaaacagcgctttgagaagttgatggaacatttcaggaatgaagacaataacatagattttatggtggcttctatgcagtttattaatattgtagtccattcagtagaagatatgaatttcagagttcacctgcagtatgaatttaccaaattaggcctggacgaatacttggacaagctgaaacacactgagagtgacaagcttcaagtccagatccaggcttacctggacaatgtttttgatgtaggagctctactggaagatgctgaaactaagaatgctgccttggagagggtggaagaactggaagaaaacatttctcatttatctgaaaaactgcaagacacagagaatgaagccatgtccaagattgtggaactggaaaagcaactcatgcagaggaacaaggagctggatgtcgttcgggaaatctacaaagatgcaaatactcaagttcacacattaagaaaaatggtcaaagaaaaagaagaagcaattcaaagacagtctaccctggaaaaaaagattcatgagctagagaaacaagggaccattaaaattcagaagaaaggggatggggatatcgccatactgccagttgtggcttctggcacattgtccatggggtcagaagtggtagcaggtaactctgtgggacccacaatgggggccgcttcctcaggacccttgccccctcctccaccaccactgcctccctcatcagacacacctgaaacagtgcaaaatggtccagtaacaccacctatgccaccgccgccgccgccccctcctccacctcctcctcccccaccgccccctccgcctcctcctctcccaggccctgcagctgagactgtaccagctcctcccttagcacctccccttccctctgcacctccgctgcctggaacatcttcacccacagtggttttcaactcaggattagcagctgtgaaaattaagaagccaatcaagacgaagttcagaatgccagtgtttaactgggttgctctgaagcccaatcagatcaatggcacagtcttcaatgaaattgatgatgagcgaattctggaggatttaaatgtggatgaatttgaggaaatattcaagacaaaagcccaaggacctgccattgatctttcttcaagcaaacagaagataccacagaagggatcaaacaaagtgacattactagaagcaaacagggccaaaaatcttgccataactttaaggaaagctggaaagactgctgatgaaatatgtaaagctattcatgtatttgacttgaagacactgcctgtggactttgtggaatgcttgatgcggttcctaccaactgagaatgaagtgaaagtgcttcggctctacgagcgggaaaggaagcctctggaaaacttgtcagatgaagatcggttcatgatgcagtttagtaaaatcgagaggctcatgcagaagatgaccatcatggccttcattgggaactttgctgaaagcattcagatgctgactcctcaactacatgcgattatagcagcatctgtctctataaagtcgtcccaaaaactcaagaaaattctggagatcatcttagcccttggaaactacatgaatagcagtaaaagaggagcagtttatggatttaaacttcagagtttagatctgctcttagatacaaagtcaacagacagaaagcaaacactgttgcactatatatccaatgtggtgaaagaaaaatatcaccaagtgtccctgttttataatgagcttcattatgtggaaaaagctgctgcagtctcccttgagaatgttttgctggatgtcaaggagctccagaggggaatggacttgaccaagagagagtacaccatgcatgaccataacacgctgctgaaggagttcatcctcaacaatgaggggaagctgaagaagctgcaggatgatgccaagatcgcacaggatgcctttgatgatgttgtgaagtattttggagaaaaccccaagacaacaccaccctctgtcttctttcctgtctttgtccggtttgtgaaagcatataagcaagcagaagaggaaaatgagctgaggaaaaagcaggaacaagctctcatggaaaaactcctagagcaagaagctctgatggagcagcaggatccaaagtctccttctcataaatcaaagaggcagcagcaagagttaattgcagaattaagaagacgacaagttaaagataacagacatgtatatgagggaaaagatggtgccattgaagatattatcacagatcttagaaaccaaccatacagacgagccgatgcggtgaggagaagcgtcaggcggcgctttgatgatcagaacttgcgttctgttaatggtgccgaaataacaatgtgaacctgagactggcctgcatgaatacagggtgtgcgtgaatgaaactgcccacatgaactttatgtgctacgatttaactgcagccttgaacacacacaaaaatattcttaagggctcagatttagcaaacacggaagaattttaaaatgagctctcctttcaacccttgttaacaagtgcctaaaaatggaagtacctgttcagattaatcaaagcaataggatttgatttgattaggtatctttttacaccagtatgttatttttaaccaaaatgtaaagttcttattaaactcattacctgccattgtgattgtcccatcatggcccacctggtttcctgatgttgtaaataacatcaatgcatctgctgtgggtcctttgctgagatgtcttcgaaggaattttgttttagccatatccatcaactttgtattttacttgcaatttggaagaaggaaagtcacatgatgaaactccttttgtctataaccaggccctggcaaagtgcaaacaggatgcaactgcagtggcacaaaggtcactcaatcctttgtttccagtttcacattctactacttctgcgctagagaacgatgctctgtgagaggcattcactagtatgaatgtggggatatagtgtataagacttatttgcagtactgtgttcttcagctagaggcagctttttaaataatgcaagtgtatttattagcattaaaattaacatctcagtaatcagcattagcatttctgaggaccattattaattctgagaacagaaattggtgccttgcaaggaagtttactagctctatcaacaagcattcaaggttacatctgctagcagagtagtgttaggaacctggccttactctcctctgacaatcgcaattttttcttattttttataaattcaagaagatacacttggcatcgtgtatcgaggctaagtttttcatgcatttcccagactacttatggagaattgcagtttaagttgctgaaaagtattaacatggtattaagcttaaataatacgtaatgggactagatggcccactaagccactgttattttccttcctctctggcagggcacttgatccattccaaagtcaaaaactggactgaagctaaatttgtacttttcataatatacattctgcttctggcttatcttcttggtacatcaatatattaattgtaaagtttattgtatagtatttaaccgctgaagttcctattttatgttgtgcttatgtgaaccccttggtgaaggtcccttttccttggatgtgtagttatatgatctttttaaatgtacagatattttgctataaaatcggtgcagttttttatggtttttacacttctctttaattcccacctaagcctctgggtaatattgtaaatattgttttaaaatgcatcagcctatgctatacaatctgaatgttattttaacttatagttttttttaatatatatatttaactataaggacagtttagggaacaagttacctaccacatttcactttagtgtacctatttacagaaagattaaactgccacctgcgggcacattcccataaatgtgtactttactttaaaaagaacatgccacgattttgtctttctgtggactcaacattcacttcgattaaaaatagcaatttgaccaagttggacttccactacaaagcagctgttttccaaagttcaatgctgacatatatgtatattaaaataattgcctatttattaatctacaaatagacaacgttggcatgttcttttctgtttgtctattaatgggcctgcttcttagcaatattagaatgttttataaaagcaattcatgttacttttctggtcttttcatggcatatgagcaaataataaactatttacactactattctgtaa

SEQ ID NO: 229616 - DNA, 3279 bp, Artificial Sequence
  derived and/or modified sequence
atgggaaatgccggctccatggacagccagcagacagacttccgggcccacaacgtgcccctgaagctgcccatgcctgagcccggggagctggaggagagatttgccatcgtgctgaatgccatgaacctgcccccagacaaggcccggctgctgcggcagtatgacaatgagaagaagtgggagctgatctgtgaccaggagcgcttccaggtgaagaaccccccccacacctacatccagaagctgaagggctacctggaccctgctgtgaccaggaagaagttcagaagaagagtgcaggagagcacccaggtgctgcgggagctggagatcagcctgcggaccaaccacatcggctgggtgcgggagttcctgaatgaagaaaataaaggcctggatgtgctggtggagtacctgagctttgcccagtatgctgtgacctttgattttgaatctgtggagagcacagtggagagctctgtggacaagagcaagccctggagccgcagcattgaggacctgcaccggggcagcaacctgcccagccctgtgggcaacagcgtgagccgcagcggccgccacagcgccctgcgctacaacaccctgcccagcaggaggaccctgaagaacagccggctggtgtccaagaaggatgatgtgcacgtgtgcatcatgtgcctgcgggccatcatgaactaccagtatggcttcaacatggtgatgagccacccccatgctgtgaatgaaattgccctgagcctgaacaacaagaaccccaggaccaaggccctggtgctggagctgctggccgctgtgtgcctggtgcggggcggccacgagatcatcctgagcgcctttgacaacttcaaggaggtgtgtggggagaagcagagatttgagaagctgatggagcacttcagaaatgaagacaacaacatcgacttcatggtggcctccatgcagttcatcaacatcgtggtgcacagcgtggaggacatgaacttccgggtgcacctgcagtatgagttcaccaagctgggcctggatgagtacctggacaagctgaagcacacagaaagtgacaagctgcaggtgcagatccaggcctacctggacaacgtgtttgatgtgggcgccctgctggaggatgctgagaccaagaatgctgccctggagcgggtggaggagctggaggagaacatcagccacctgtctgagaagctgcaggacacagaaaatgaggccatgagcaagatcgtggagctggagaagcagctgatgcagaggaacaaggagctggatgtggtgcgggagatctacaaggatgccaacacccaggtgcacaccctgaggaagatggtgaaggagaaggaggaggccatccagaggcagagcaccctggagaagaagatccacgagctggagaagcagggcaccatcaagatccagaagaagggagatggagacatcgccatcctgcctgtggtggccagcggcaccctgtccatgggcagcgaggtggtggccggcaacagcgtgggccccaccatgggcgccgccagcagcggccccctgcccccacctcctccacccctgccccccagcagtgacaccccagagaccgtgcagaatggacctgtgaccccacccatgcctcctcctcctcctcctcctcctcctcctcctcctcctcctcctcctcctcctcctccacccctgcccggccctgctgctgagaccgtgcctgccccacccctggccccacccctgcccagcgccccacccctgcccggcaccagcagccccaccgtggtgttcaacagcggcctggccgctgtgaagatcaagaagcccatcaagaccaagttcaggatgcctgtgttcaactgggtggccctgaagcccaaccagatcaatggcaccgtcttcaatgaaattgatgatgagcgcatcctggaggacctgaatgtggatgaatttgaggagatcttcaagaccaaggcccagggccctgccatcgacctgagcagcagcaagcagaagatcccccagaagggcagcaacaaggtgaccctgctggaggccaacagagccaagaacctggccatcaccctgaggaaggccggcaagacagcagatgagatctgcaaggccatccacgtgtttgacctgaagaccctgcctgtggactttgtggagtgcctgatgaggttcctgcccacagaaaatgaggtgaaggtgctgcggctgtatgaaagagagaggaagcccctggagaacctgagtgatgaagatcgcttcatgatgcagttcagcaagattgagcggctgatgcagaagatgaccatcatggccttcatcggcaactttgctgagagcatccagatgctgaccccccagctgcacgccatcatcgccgcctctgtgtccatcaagagcagccagaagctgaagaagatcctggagatcatcctggccctgggcaactacatgaacagcagcaagagaggagctgtgtatggcttcaagctgcagagcctggacctgctgctggacaccaagagcacagacaggaagcagaccctgctgcactacatcagcaatgtggtgaaggagaagtaccaccaggtgtccctcttctacaatgagctgcactacgtggagaaggctgctgctgtgtccctggagaatgtgctgctggatgtgaaggagctgcagaggggcatggacctgaccaagcgggagtacaccatgcatgaccacaacaccctgctgaaggagttcatcctgaacaatgaaggcaagctgaagaagctgcaggatgatgccaagatcgcccaggatgcctttgatgatgtggtgaagtactttggagagaaccccaagaccaccccacccagcgtcttcttccctgtgtttgtgcgctttgtgaaggcctacaagcaggccgaggaggagaatgagctgaggaagaagcaggagcaggccctgatggagaagctgctggagcaggaggccctgatggagcagcaggaccccaagagccccagccacaagagcaagaggcagcagcaggagctgattgctgagctgcggcggcggcaggtgaaggacaacagacatgtgtatgagggcaaggatggagccatcgaggacatcatcacagacctgaggaaccagccctaccgccgggcagatgctgtgcggcgctctgtgagaagaagatttgatgaccagaacctgcggtctgtgaatggagctgagatcaccatgtag

SEQ ID NO: 229617 - DNA, 3279 bp, Artificial Sequence
  derived and/or modified sequence
atgggcaacgccggcagcatggacagccagcagaccgacttccgggcacacaacgtgcccctgaagctgccaatgccagagcccggggagctcgaagagagatttgcaatcgtcctgaacgctatgaatctacctcccgataaggccagactgctcaggcaatacgataacgagaagaaatgggaactgatatgtgaccaggaacgctttcaggtaaagaatccccctcacacatacatccaaaagctcaaaggctatcttgaccccgcagtaacaaggaaaaagttccgtaggcgtgtccaagagagcacccaggtgctaagagagctggagatctctctccgaactaaccatattggatgggtgcgtgagtttctgaatgaggagaataagggactggacgttctggtggagtacctgagttttgcccagtacgcagtaacttttgacttcgaatcagtggaaagcaccgtggagtctagtgtggataaatcgaaaccctggagccgcagcatcgaggacttgcacaggggctctaacctcccaagccccgtcggcaacagcgtgtcacgctccggcaggcactccgcactgcggtacaatactctgccttccagaaggacactgaagaatagtcgattggtcagcaagaaggacgacgtccatgtgtgcattatgtgcctgcgcgccatcatgaattatcagtacggattcaacatggtgatgagtcacccacatgccgtgaatgagattgccctgagccttaataataagaacccccggaccaaggctttggtgttggagctgttggccgccgtgtgcctcgttcggggggggcacgagatcattttgtcagcctttgacaattttaaggaggtgtgtggcgagaaacagcgtttcgagaagctgatggaacacttccgtaatgaggacaacaatattgactttatggttgcctctatgcagttcatcaacatagttgtgcatagcgtagaagatatgaacttcagggtccacctgcagtacgagttcacaaagttgggcttggatgagtatttagacaaactgaagcatacggaaagcgataaacttcaagttcaaatccaggcctacctcgataacgtatttgatgtcggggcactgttggaagatgccgaaactaagaatgctgccctggagagagtggaggaactggaggagaatattagccacctgtctgaaaagctccaggacacagaaaacgaggctatgtcaaaaatagtagaattagaaaagcagctgatgcagcggaacaaggagctagacgtggtccgagagatttataaggacgccaatacgcaggtccacactctccgcaaaatggtcaaggaaaaggaagaagcaattcaacgacagagcacacttgagaagaaaatccacgagttagaaaagcagggcaccattaaaatccaaaagaaaggcgatggagacatcgcgattctcccagtcgttgcctcgggcaccctgtctatgggaagtgaagtcgtcgctgggaatagtgtgggacctaccatgggcgctgcatcctcaggcccgctgccccctccccccccacctctgcctccctcatcagacacccccgagacagtgcagaatggccccgttaccccgcccatgcctccaccccccccaccccccccaccccccccgccccctccccctccccccccccccccccctcttccgggcccggccgcagagacagttcccgccccaccgcttgctccacccctcccctcagcgcccccactgcccgggacaagtagccctaccgtggtcttcaactcaggattagccgcagtgaagattaagaaaccaatcaaaacgaaattcaggatgcccgtttttaattgggtggcattgaagcccaatcaaataaatgggacagtcttcaacgagatcgatgacgaacgtattctcgaagaccttaatgtggacgagtttgaagaaatcttcaagacaaaggcccagggccccgctattgacttatcgtcaagcaagcagaagatacctcagaaaggtagcaataaagtaactcttctagaggcaaatagggctaaaaacctagctattacgttgaggaaagctgggaaaactgcagacgagatatgcaaagctattcacgtattcgatttgaagacactgccagtggacttcgtcgagtgtctcatgagattcctgcccacggagaatgaagtgaaagtgctaaggctctatgagagggagaggaagccacttgaaaatctgtcagatgaagacagattcatgatgcagtttagcaagatcgaacggctgatgcaaaagatgacaatcatggcgttcatcggaaacttcgccgagagcattcaaatgctgaccccacaactacatgccataattgccgccagtgtgagcataaagagcagtcagaagctgaagaagatcctggagatcatcctagcccttgggaattatatgaactcgtccaaacgcggagcagtgtacgggttcaaattacagtcactcgatctgctgttagatactaaatccaccgatagaaagcagacgttgctacactacatctctaacgtggtcaaagaaaaataccaccaggttagtctgttctataatgagctgcactacgttgagaaggccgccgccgtaagtctggaaaatgtcctgctcgatgttaaggagctacagcgcgggatggatttgaccaagcgagagtacaccatgcacgatcacaataccctgcttaaagagttcatcttgaataatgagggcaaactaaagaagctccaagatgatgccaagattgcacaagatgcattcgatgatgtggtgaagtactttggagagaatccaaaaaccaccccaccttctgtatttttccctgtattcgtccgctttgtcaaagcctacaagcaggcagaggaagaaaatgaactgaggaagaaacaagagcaggcattgatggaaaagcttttggagcaggaagcactgatggaacagcaggatcccaaaagcccctcccacaagtccaagaggcaacagcaggaactgatcgcggagctaaggcgcagacaggtgaaagacaaccggcacgtgtacgaagggaaagacggtgccatagaagacatcatcaccgatctcaggaatcaaccgtacagacgcgctgacgccgtcagaagaagtgtgcgtaggcgctttgatgatcagaacctgcgctccgtgaatggggcagaaatcactatgtag

SEQ ID NO: 229618 - DNA, 3279 bp, Artificial Sequence
  derived and/or modified sequence
atgggtaatgccggaagtatggactcacagcagacagattttcgagcacacaacgtacccctgaaactgcctatgcctgagccaggggagttggaggagcgatttgctattgtgctgaacgccatgaatctgccgcctgataaggcaaggctgctcaggcagtacgataacgagaagaagtgggaattgatctgcgaccaagagcggtttcaggtgaaaaatcccccacatacatacatacagaaactcaaaggctaccttgaccctgctgtcacacggaagaaatttaggcggcgagtgcaggagagtacacaagtcctgagagaactggaaatctccctcagaacgaaccacataggatgggttcgcgaatttttgaacgaagaaaacaaagggttggatgtcttagtggagtatctgagtttcgcgcaatacgcagtaactttcgatttcgagtctgtggaaagtactgtcgagagctcggtggacaagagtaagccctggtcgagaagcattgaggatctgcaccgagggtctaatcttcccagcccagtgggcaactctgtctcacgctccgggcgacattccgccttacgttacaataccctgccgagcaggcggaccttaaaaaatagccggttagtctccaagaaagacgacgtccacgtgtgcattatgtgtctcagggccattatgaactatcaatacggctttaacatggtgatgtcccatccccatgcagtgaacgaaatagccctgtccttaaataacaaaaacccccgaaccaaagcactcgtgctggagcttcttgccgctgtgtgccttgtcagaggaggtcacgaaatcatcctctcagcttttgacaattttaaagaagtatgtggcgagaagcagcgctttgagaagttaatggagcatttcaggaacgaggataataacattgatttcatggtggcaagcatgcagttcattaatattgtggttcattctgttgaagacatgaatttcagggtccatcttcagtacgagttcacaaagcttgggttggacgagtatctggacaaattgaaacatacggagagtgataagcttcaggtgcaaattcaggcatacttggacaatgtttttgacgttggcgctctgctggaggacgccgaaacgaagaacgcagctcttgaaagggtcgaggaactggaggagaacatctctcacctgagcgagaagcttcaagacaccgaaaacgaggccatgtccaagatcgttgaattggaaaaacagctcatgcagcgaaataaggagctcgatgtcgtgcgggagatttataaggatgcaaacacgcaggtccacacactccgaaaaatggtgaaggaaaaggaagaagcaatccagcgccaaagcacactggaaaaaaaaatccacgagcttgagaaacagggtacaattaagattcagaagaagggagacggcgatatagccatcctccccgtagtagcatccggcacactgagcatgggatccgaagtggtggccggtaatagcgtgggccctaccatgggggcagcctcatctggacctttgccacctccaccccctcctcttcccccatcatcagacacccccgagaccgtacagaatgggcctgtcactcccccaatgccaccacccccacccccacctccaccaccgcctcctcctccccctccacctccccctcctccattaccagggcctgctgcagaaacagtgccggcacccccactggcaccgccattgccatctgcaccccctctccctggcacttccagtccaacagtcgtgttcaatagcggtctggcagcagtcaagataaaaaagcccatcaagaccaaattcagaatgcccgtcttcaattgggtggctttgaagcctaaccaaatcaacggaaccgtgtttaacgaaatagatgacgagagaatcctggaggatctgaatgtcgatgaatttgaggagattttcaaaaccaaagctcaggggcctgctatcgatctgtcctcgtccaagcaaaagatacctcagaaaggctccaataaggttaccctgctagaggcaaatcgggcaaaaaacctggcgattaccctgcggaaggcaggcaagaccgcagatgagatttgcaaggccattcacgtgtttgatctaaagactcttccagtggactttgtcgagtgtctcatgcgctttttgcccactgaaaacgaggtgaaagtgcttcggctttacgagagagaacgaaagccccttgaaaatctgtccgacgaagatagattcatgatgcaatttagtaaaatcgaacgacttatgcagaaaatgactattatggcgttcatcggtaactttgccgagtccatacagatgttaacaccccaactgcacgccattatcgccgcttccgtctccataaaatctagtcaaaaactgaaaaagatcctggaaattatcctggcattaggcaattatatgaattcgtcgaagcgaggagccgtttacgggttcaagcttcaatctctggacctgctgttggataccaaatctaccgacagaaaacagacccttttgcactatattagtaacgtcgtgaaagagaagtaccatcaagtgagcttgttttacaatgagctgcactacgtcgaaaaagccgcagcggtgtcactggaaaatgttttgttggacgtgaaagaactgcagcgtggcatggacctcacaaaaagagagtacactatgcatgatcacaataccctgttgaaggagttcattctgaacaatgagggcaagttaaaaaaactccaagacgatgccaagatcgcgcaagatgcatttgacgatgtggtgaaatatttcggtgagaaccccaagaccaccccaccatcggtgttctttccagtgtttgtccgcttcgttaaggcatacaaacaggccgaagaggaaaacgaattgagaaagaagcaggaacaggccctgatggagaagctgctagagcaggaggctttgatggagcaacaagaccccaagtcccccagtcataaaagcaaacgtcaacagcaggagctgatcgctgagttacggagacggcaggtcaaggacaaccggcatgtctacgagggcaaagacggcgctatagaggatattatcacagaccttcggaatcagccctatagaagagctgacgcagtgcggcgttccgtgcggcgacgcttcgacgaccagaatctgcgaagcgtgaatggggcagagatcacgatgtag

SEQ ID NO: 229619 - protein, 1078 aa, Artificial Sequence
  derived and/or modified sequence
MFGAASRMDTTAVCTGGVTESRGIVDSLQKFSSLPAYLPTNLHISNAEESFFLKEANQDLTRNSSLQARVEPFFIYRARTPPIINASYGPFSVEKIIPQELLLTSTAFGNMDKFPFNWKLKSHILDSSIYSNRPKVQTLFYVTGMGWDDSDLTEDLPCVKMFAFPEAREVAASCRLQGAPGLCVAELELLPEWFSSGLDLEPEEEIPALLGGTTMELFFTLYPADKAGQCPLEEEGKWENNIHSGLESPQQAFPARERIGSVVVYPTQDDLKWSLVSLDENVVISVPLNLVREGDTATFLVSLTSSSVADQFTLRIKAAAGVKITAVRVSSEDQWAVQEEIDNGSTQTSATLTCMGHRPDTQSRVNGSFYEILQVDFGIDNSSDLAGAQQITWQVEYPIEDSMSELVVSEIFVSQTTFVGIVPLAMDTEVLNTAILTGKPVSVPVKVVGVQEDGSVVDVSESVECKSADEDVIKVSNNCDSIFVNGKEMKSKVDTIVNFTHQHFTSQFEVTVWAPRLPLQIEISDTELSQIKGWRIPVAANRRPTRESDDEDDEEKKGRGCSLQYQHATVRVLTQFVAESPDLGQLTYMLGPDWQFDITDLVTEFMKVEEPKIAQLQDGRTLAGREPGITTVQVLSPLSDSILAEKTVIVLDDRVTIAELGVQLVAGMSLSLQPHRADKRAIVSTAAALDVLQSPQQEAIVSSWILFSDGSVTPLDIYDPKDYSVTVSSLDEMVVSVQANLESKWPIVVAEGEGQGPLIKLEMMISEPCQKTKRKSVLAVGKGNVKVKFEPSSDEHQGGSNDIEGINREYKDHLSNSIEREGNQERAVQEWFHRGTPVGQEESTNKSTTPQSPMEGKNKLLKSGGPDAFTSFPTQGKSPDPNNPSDLTVTSRGLTDLEIGMYALLCVFCLAILVFLINCVAFAWKYRHKRFAVSEQGNIPHSHDWVWLGNEVELLENPVDITLPSEECTTMIDRGLQFEERNFLLNGSSQKTFHSQLLRPSDYVYEKEIKNEPMNSSGPKRKRVKFTSYTTILPEDGGPYTNSILFDSDDNIKWVCQDMGLGDSQDFRDYMESLQDQM

SEQ ID NO: 229620 - DNA, 3237 bp, Artificial Sequence
  derived and/or modified sequence
atgttcggcgccgccagcagaatggacaccaccgccgtgtgcaccggcggcgtgaccgagagcagaggcatcgtggacagcctgcagaagttcagcagcctgcccgcctacctgcccaccaacctgcacatcagcaacgccgaggagagcttcttcctgaaggaggccaaccaggacctgaccagaaacagcagcctgcaggccagagtggagcccttcttcatctacagagccagaaccccccccatcatcaacgccagctacggccccttcagcgtggagaagatcatcccccaggagctgctgctgaccagcaccgccttcggcaacatggacaagttccccttcaactggaagctgaagagccacatcctggacagcagcatctacagcaacagacccaaggtgcagaccctgttctacgtgaccggcatgggctgggacgacagcgacctgaccgaggacctgccctgcgtgaagatgttcgccttccccgaggccagagaggtggccgccagctgcagactgcagggcgcccccggcctgtgcgtggccgagctggagctgctgcccgagtggttcagcagcggcctggacctggagcccgaggaggagatccccgccctgctgggcggcaccaccatggagctgttcttcaccctgtaccccgccgacaaggccggccagtgccccctggaggaggagggcaagtgggagaacaacatccacagcggcctggagagcccccagcaggccttccccgccagagagagaatcggcagcgtggtggtgtaccccacccaggacgacctgaagtggagcctggtgagcctggacgagaacgtggtgatcagcgtgcccctgaacctggtgagagagggcgacaccgccaccttcctggtgagcctgaccagcagcagcgtggccgaccagttcaccctgagaatcaaggccgccgccggcgtgaagatcaccgccgtgagagtgagcagcgaggaccagtgggccgtgcaggaggagatcgacaacggcagcacccagaccagcgccaccctgacctgcatgggccacagacccgacacccagagcagagtgaacggcagcttctacgagatcctgcaggtggacttcggcatcgacaacagcagcgacctggccggcgcccagcagatcacctggcaggtggagtaccccatcgaggacagcatgagcgagctggtggtgagcgagatcttcgtgagccagaccaccttcgtgggcatcgtgcccctggccatggacaccgaggtgctgaacaccgccatcctgaccggcaagcccgtgagcgtgcccgtgaaggtggtgggcgtgcaggaggacggcagcgtggtggacgtgagcgagagcgtggagtgcaagagcgccgacgaggacgtgatcaaggtgagcaacaactgcgacagcatcttcgtgaacggcaaggagatgaagagcaaggtggacaccatcgtgaacttcacccaccagcacttcaccagccagttcgaggtgaccgtgtgggcccccagactgcccctgcagatcgagatcagcgacaccgagctgagccagatcaagggctggagaatccccgtggccgccaacagaagacccaccagagagagcgacgacgaggacgacgaggagaagaagggcagaggctgcagcctgcagtaccagcacgccaccgtgagagtgctgacccagttcgtggccgagagccccgacctgggccagctgacctacatgctgggccccgactggcagttcgacatcaccgacctggtgaccgagttcatgaaggtggaggagcccaagatcgcccagctgcaggacggcagaaccctggccggcagagagcccggcatcaccaccgtgcaggtgctgagccccctgagcgacagcatcctggccgagaagaccgtgatcgtgctggacgacagagtgaccatcgccgagctgggcgtgcagctggtggccggcatgagcctgagcctgcagccccacagagccgacaagagagccatcgtgagcaccgccgccgccctggacgtgctgcagagcccccagcaggaggccatcgtgagcagctggatcctgttcagcgacggcagcgtgacccccctggacatctacgaccccaaggactacagcgtgaccgtgagcagcctggacgagatggtggtgagcgtgcaggccaacctggagagcaagtggcccatcgtggtggccgagggcgagggccagggccccctgatcaagctggagatgatgatcagcgagccctgccagaagaccaagagaaagagcgtgctggccgtgggcaagggcaacgtgaaggtgaagttcgagcccagcagcgacgagcaccagggcggcagcaacgacatcgagggcatcaacagagagtacaaggaccacctgagcaacagcatcgagagagagggcaaccaggagagagccgtgcaggagtggttccacagaggcacccccgtgggccaggaggagagcaccaacaagagcaccaccccccagagccccatggagggcaagaacaagctgctgaagagcggcggccccgacgccttcaccagcttccccacccagggcaagagccccgaccccaacaaccccagcgacctgaccgtgaccagcagaggcctgaccgacctggagatcggcatgtacgccctgctgtgcgtgttctgcctggccatcctggtgttcctgatcaactgcgtggccttcgcctggaagtacagacacaagagattcgccgtgagcgagcagggcaacatcccccacagccacgactgggtgtggctgggcaacgaggtggagctgctggagaaccccgtggacatcaccctgcccagcgaggagtgcaccaccatgatcgacagaggcctgcagttcgaggagagaaacttcctgctgaacggcagcagccagaagaccttccacagccagctgctgagacccagcgactacgtgtacgagaaggagatcaagaacgagcccatgaacagcagcggccccaagagaaagagagtgaagttcaccagctacaccaccatcctgcccgaggacggcggcccctacaccaacagcatcctgttcgacagcgacgacaacatcaagtgggtgtgccaggacatgggcctgggcgacagccaggacttcagagactacatggagagcctgcaggaccagatgtag

SEQ ID NO: 229621 - DNA, 3237 bp, Artificial Sequence
  derived and/or modified sequence
atgttcggcgcagcgtcaagaatggatacaactgccgtgtgcacaggtggggtgaccgaatcccgcggaatcgtcgacagtctgcagaagttctccagcttgccggcgtacttgccgactaatttgcatataagcaatgccgaagaatcttttttcctgaaagaggccaaccaagacctgaccaggaattccagcttacaggctcgggtggagccgttcttcatctatcgggcccgaacacctcctattattaatgcgagctacggccctttttccgtggagaagatcatccctcaggaactgctgcttacttcgacagccttcggtaatatggataaatttcccttcaactggaagttgaaatctcatatccttgactcatctatctactccaacagacctaaagttcaaaccctgttctacgtcaccgggatgggttgggatgactcagacttgacagaggacctcccatgcgttaagatgttcgcttttcccgaagcaagagaagtggcggcttcatgcagactgcagggagcccccggactctgcgtggccgagctagaattactccctgagtggttcagtagtggactggaccttgaacccgaagaggagattccggctctgttgggcggaacgaccatggagctgttctttacactctatccagctgacaaggcgggacaatgccctttggaggaagagggtaaatgggaaaataacattcactccggcctagagtcccctcaacaggccttccccgctagagaaaggataggtagtgttgtcgtgtatcccactcaagacgacctgaaatggtcgttagtttctctagacgagaatgtggtcatttccgttcccttgaacctggtgcgggaaggcgacaccgccacctttttggtatctctgaccagctcctctgttgctgatcagtttaccttacggattaaggcggccgcaggtgtgaagatcacggcagtgagagtcagctctgaggatcagtgggccgtgcaggaggagatcgacaacgggtccacccagacatcagccacattgacatgtatgggacataggccagacacacagagtcgagtgaatggaagcttttatgaaatcctgcaggtggactttggcatagacaattcctcagatttggccggagcacagcagatcacctggcaagtagagtatccaatcgaggactccatgtccgaactggtggtaagcgagatttttgtcagtcagaccacctttgtggggattgtacctttggctatggatactgaagtgttgaacaccgccattctgacaggtaaaccggtgtcggtaccagtgaaagtggtcggggttcaggaagacggctcagtggttgacgttagcgaaagtgtcgagtgcaagtccgccgatgaggacgtcataaaggtctcaaacaactgtgacagtatatttgttaatggaaaggagatgaagtcaaaggtggatacaatcgtaaatttcactcatcagcactttacatctcagtttgaagtgacggtctgggccccgcggctgccgcttcagattgagatttctgataccgagttgagtcagataaaaggatggagaatacccgtcgcggctaacaggaggcccactagggagtccgatgacgaggacgacgaagagaagaagggacgtggttgcagtttacagtatcagcacgccacagtgcgcgtattgacccagtttgtggcagaaagcccagacctgggacagcttacgtacatgctggggccagattggcaattcgacataacagatcttgtgacagaattcatgaaggtggaagaacctaagatcgcacagcttcaggacggtaggacgctggcaggacgggaaccaggaatcactacagtgcaggtactctctcctttgtctgactccatcttggccgagaaaactgtgatcgtgcttgacgatcgcgtgacgatcgctgaattaggcgtccaactggtggccgggatgagtctctccctgcaacctcatcgggccgataagcgagccatcgtgagcaccgctgccgcactcgatgtactccagagccctcagcaagaggccatcgtatcctcttggatcttgttcagtgacggctcagtcacacctctagatatttacgacccgaaggactatagtgtgacggtgagttccttagacgaaatggtggtgtcagtacaggcaaaccttgagagtaaatggcccatcgtcgtggctgagggcgaaggtcagggccccttaattaagctggaaatgatgattagtgagccgtgtcaaaaaacaaagcggaagagtgtgttagctgttgggaaggggaatgtcaaagtgaagttcgagccaagcagtgacgagcaccaggggggttctaatgatatagaagggatcaaccgcgagtacaaagatcacttgtccaactccatcgagcgcgagggaaatcaggagcgcgcagtacaggaatggtttcatagaggaacacccgtgggccaagaagaaagcacaaataagagcacaactccccagagtcccatggaaggtaaaaacaagttactgaaatccggcggccctgacgccttcacctcgttcccaacccaggggaagagtccagacccaaataacccgagtgatttaacagtgacgtcacgcgggttaactgacctcgagattgggatgtacgctctgctttgtgttttttgtctcgccattctggtcttccttatcaattgtgtcgcattcgcatggaagtatcgccataagcgctttgcagtttcggaacagggaaacatccctcacagtcatgactgggtgtggttaggcaatgaagtggaactattagagaaccccgtggacatcacacttccatccgaagaatgcaccactatgatagacagaggactccaattcgaggagaggaacttcctgctcaacgggagctcccagaagacctttcacagccagctgctgcggccctctgattatgtgtacgagaaagaaattaagaatgaacctatgaatagtagcggccccaaacggaaacgggttaagtttacaagctacacaacaattttgcctgaggatgggggcccttacacaaacagtattctctttgacagtgatgacaacattaaatgggtgtgccaggatatgggacttggcgactcacaagatttcagggattacatggagtcgcttcaggatcagatgtag

SEQ ID NO: 229622 - DNA, 3237 bp, Artificial Sequence
  derived and/or modified sequence
atgtttggagctgccagcaggatggacaccacagctgtgtgcacaggaggagtgacagagagccggggcatcgtggacagcctgcagaagttcagcagcctgcctgcctacctgcccaccaacctgcacatcagcaatgctgaggagagcttcttcctgaaggaggccaaccaggacctgaccaggaacagcagcctgcaggcccgggtggagcccttcttcatctaccgggcccggaccccacccatcatcaatgccagctatggccccttctctgtggagaagatcatcccccaggagctgctgctgaccagcacagccttcggcaacatggacaagttccccttcaactggaagctgaagagccacatcctggacagcagcatctacagcaaccggcccaaggtgcagaccctcttctacgtgacaggcatgggctgggatgacagcgacctgacagaggacctgccctgtgtgaagatgtttgccttccctgaggcccgggaggtggccgccagctgccgcctgcagggcgcccctggcctgtgtgtggccgagctggagctgctgcctgagtggttcagcagcggcctggacctggagcctgaggaggagatcccagccctgctgggcggcaccaccatggagctgttcttcaccctgtacccagctgacaaggccggccagtgccccctggaggaggagggcaagtgggagaacaacatccacagcggcctggagagcccccagcaggccttccctgcccgggagagaattggctctgtggtggtgtaccccacccaggatgacctgaagtggagcctggtgtccctggatgaaaatgtggtgatctctgtgcccctgaacctggtgcgggagggggacacagccaccttcctggtgtccctgaccagcagctctgtggccgaccagttcaccctgcgcatcaaggctgctgctggggtgaagatcacagctgtgcgggtgtcctctgaggaccagtgggccgtgcaggaggagattgacaatggcagcacccagaccagcgccaccctgacctgcatgggccacaggccagacacccagagccgggtgaatggcagcttctatgagatcctgcaggtggactttggaattgacaacagcagtgacctggccggggcccagcagatcacctggcaggtggagtaccccatcgaggacagcatgtctgagctggtggtgtctgagatctttgtgtcccagaccacctttgtgggcatcgtgcccctggccatggacacagaggtgctgaacacagccatcctgaccgggaagcctgtgtctgtgcctgtgaaggtggtgggcgtgcaggaggatggctctgtggtggatgtgtctgagagcgtggagtgcaagtctgcagatgaagatgtgatcaaggtgagcaacaactgtgacagcatctttgtgaatggcaaggagatgaagagcaaggtggacaccatcgtgaacttcacccaccagcacttcaccagccagtttgaggtgacagtgtgggccccccggctgcccctgcagatcgagatcagtgacacagagctgagccagatcaagggctggagaattcctgtggccgccaacagaagacccacccgggagagtgatgatgaagatgatgaggagaagaagggccggggctgcagcctgcagtaccagcacgccaccgtgcgggtgctgacccagtttgtggccgagagcccagacctgggccagctgacctacatgctgggccctgactggcagtttgacatcacagacctggtgacagagttcatgaaggtggaggagcccaagatcgcccagctgcaggacggccgcaccctggccggccgggagcccggcatcaccaccgtgcaggtgctgagccccctgagtgacagcatcctggccgagaagacagtgattgtgctggatgacagagtgaccatcgccgagctgggcgtgcagctggtggccggcatgagcctgagcctgcagccccacagagctgacaagagggccatcgtgtccacagctgctgccctggatgtgctgcagagcccccagcaggaggccatcgtgtcctcctggatcctcttcagtgatggctctgtgacccccctggacatctatgaccccaaggactacagcgtgacagtgagcagcctggatgagatggtggtgtctgtgcaggccaacctggagagcaagtggcccatcgtggtggccgagggggagggccagggccccctcatcaagctggagatgatgatcagcgagccctgccagaagaccaagaggaagtctgtgctggccgtgggcaaaggaaatgtgaaggtgaagtttgagcccagcagtgatgagcaccagggcggcagcaatgacatcgagggcatcaaccgggagtacaaggaccacctgagcaacagcattgaaagagagggcaaccaggagagagctgtgcaggagtggttccaccggggcacccctgtgggccaggaggagagcaccaacaagagcaccaccccccagagccccatggagggcaagaacaagctgctgaagagcggcggcccagatgccttcaccagcttccccacccagggcaagagcccagaccccaacaaccccagcgacctgactgtgaccagccggggcctgacagacctggagatcggcatgtatgccctgctgtgtgtgttctgcctggccatcctggtgttcctgatcaactgtgtggcctttgcctggaagtaccgccacaagagatttgctgtgtctgagcagggcaacatcccccacagccatgactgggtgtggctgggcaatgaggtggagctgctggagaaccctgtggacatcaccctgcccagtgaagaatgtaccaccatgattgaccggggcctgcagtttgaggagaggaacttcctgctgaatggcagcagccagaagaccttccacagccagctgctgcggcccagcgactatgtgtatgagaaggagatcaagaatgagcccatgaacagcagcggccccaagaggaagagggtgaagttcaccagctacaccaccatcctgcctgaagatggcggcccctacaccaacagcatcctgtttgacagtgatgacaacatcaagtgggtgtgccaggacatgggcctgggggacagccaggacttccgggactacatggagagcctgcaggaccagatgtag

SEQ ID NO: 229623 - DNA, 3237 bp, Artificial Sequence
  derived and/or modified sequence
atgttcggcgccgccagccggatggacaccaccgccgtgtgcaccggcggagtcacagaaagccgcggaatcgtcgactcattacaaaaattttctagtcttccagcctatctgcctaccaatctgcacatttcgaacgccgaagagagcttctttctcaaagaagctaaccaggatttgacaaggaactctagccttcaggctcgcgtagagccattctttatatatcgtgcccgtacccctccgataattaacgcgagctatggcccattctccgtcgaaaagatcattcctcaagaattgctccttaccagcaccgcctttggaaacatggacaaatttccattcaactggaagctgaaatcccacatcctggacagcagtatctactccaatcgacctaaggtgcagacacttttttatgtcacggggatgggctgggatgactctgacctcaccgaggatctcccctgcgtgaagatgttcgcttttcctgaggctagagaggtcgctgcatcttgtaggttgcagggagctccaggcctgtgcgttgcagaactggagctattaccagagtggttttcttctgggctggacctggaacctgaggaggaaattcctgcactgttaggaggaaccaccatggagctcttcttcacattgtaccctgcagacaaggccggccagtgtcctttggaggaagagggcaaatgggaaaacaacatccactctgggctggagagcccccagcaagcattccctgcgagggaacgcatcggctctgtggtggtctatcccacacaggacgaccttaagtggtccctggtgagccttgatgaaaacgtggttatttctgtgcctttgaatctggtgcgcgagggcgacacagcgacattcctcgttagtctgacttcttctagcgtcgcggaccagttcaccttgcggatcaaagccgctgcaggagtcaagataacagctgtccgtgttagtagcgaggaccaatgggctgtgcaggaggagattgacaatggctccacccaaacgtcagcaactcttacctgcatgggtcacaggccagatacgcagtcaagagtaaacgggtcgttttatgagatactgcaagtggattttggaatcgacaatagcagcgaccttgccggggcacagcagatcacatggcaagttgagtatcccatcgaagattccatgtccgagctcgttgtatccgagattttcgtgtcccagacaaccttcgtcggaatcgtacccttagcaatggataccgaagtacttaataccgctattttgaccggcaaacctgtgtccgtccccgtgaaggtggtcggcgtccaagaagatgggtctgtcgtggatgtgtccgagagtgtcgaatgcaagtccgccgacgaggacgtgataaaagtgagtaacaactgcgactcgatattcgtgaatggaaaagaaatgaagtccaaggtggataccattgttaacttcacacaccagcacttcacttcacaatttgaggtgaccgtgtgggcaccccggcttccccttcagatcgagatatcagacacagaactgagtcagatcaagggctggcggatccccgttgccgctaaccgccggccaactcgtgaatccgatgacgaagacgacgaggagaaaaagggaaggggctgcagtctgcaataccagcacgcgacagtaagagttctaacacagtttgtggccgaaagtcctgatcttggccagttgacatacatgctggggccagactggcagtttgatattaccgacctcgtgactgaattcatgaaagtggaagagccgaaaatcgctcaacttcaggatggccgtacgctggccgggcgggaacccggcatcacgacagtgcaggtcctcagccccttaagtgactcgattctggccgagaaaacggttatcgtgttggacgatagagtgacgattgcagaattaggtgttcagctggtggccgggatgtccttgagcctgcaaccacaccgggccgataagcgtgccatagtgtccacagccgccgcactggacgttctgcaatccccacagcaagaggctattgtgtccagctggatcctgttctctgacgggagtgtcacacctctggacatctatgatcccaaggactattctgtcaccgtgagctctcttgatgaaatggtggtatccgtccaggctaatctggaatctaaatggcctattgtggtggctgagggcgaggggcagggcccgttgatcaagctggaaatgatgatatcagagccctgccaaaaaactaagagaaagtccgttctggctgttgggaagggcaacgtgaaagtaaaattcgaaccaagctccgatgaacatcagggcggcagcaatgatatcgagggcatcaaccgggagtacaaagaccatctatcgaattcaatcgagcgcgagggcaaccaggagcgggcagtccaagagtggttccatcggggcacccctgttggacaggaggaaagcaccaacaagagcaccacaccacagtctcccatggaagggaagaacaaactgcttaaatcgggcgggcctgatgctttcacaagcttccccacccagggcaaaagtccagacccgaataatccaagtgatctgaccgtgaccagccggggcctgactgatctggagattggtatgtatgctctcctgtgcgtgttctgtcttgccatacttgtgttccttatcaactgcgtggccttcgcatggaaatacaggcacaaaaggttcgctgtcagcgagcagggcaatataccccactctcacgactgggtctggttgggaaatgaggtcgagctgctcgagaacccagtcgatatcactttgccaagtgaggagtgcaccacgatgattgaccgggggctgcagttcgaggagcggaactttctgctcaacgggtcgagtcagaaaacttttcactcacagctgctgcggccctctgattacgtttatgagaaagagatcaaaaacgagccaatgaacagttctgggccaaagaggaagcgtgtgaaatttactagttataccacaattttgcctgaggacggaggcccctatactaacagcattctctttgacagcgatgataacataaaatgggtatgccaggatatgggattgggggactcgcaggattttcgggactacatggagagcctgcaggaccagatgtag

SEQ ID NO: 229624 - DNA, 3237 bp, Artificial Sequence
  derived and/or modified sequence
atgttcggggctgcgagtcggatggacaccacagctgtttgtaccgggggtgtgacagaatctcggggaatagtggactccctgcagaaattttcaagtcttcctgcctatctcccgactaatctgcatatatccaatgcggaggaatctttcttcctcaaggaggctaaccaggacctgactcggaacagtagtctgcaagctcgggtggagcccttttttatctaccgtgctagaacgcctcccattataaatgcctcctacggccctttttcagtcgaaaagatcatccctcaagagctgctcctgacatcaacagccttcggaaacatggataagttcccgtttaattggaaattgaagagccacatccttgactcatccatctatagcaataggccaaaggtccagactctcttctatgtgaccggcatgggctgggacgactccgacttgactgaagatcttccttgcgttaagatgttcgcctttccggaggcgagagaagtcgccgcaagttgtcgcctgcagggagcgccagggttatgcgtggctgagctggagctgctccctgagtggtttagttccgggctcgatctggagccagaagaggagattcctgccctgttaggtgggacaacaatggagttgttttttacgctgtaccccgctgacaaagccggacagtgcccactcgaggaagaaggtaaatgggagaataatatccacagtgggctggaatccccacagcaggcatttccagcaagagagagaatcgggtctgtcgtggtctatcccacccaggacgatcttaagtggtcccttgtgtcccttgacgagaatgtggtaataagcgttcccttgaatctcgtgcgagaaggggatactgccacgtttctggttagtctcacctcgagcagtgtagcagaccagttcacacttaggatcaaagctgctgcaggcgtgaagatcacggccgtccgggtcagttccgaagatcaatgggcggtgcaggaagagatcgataacggctcaacacagaccagtgccacccttacgtgcatgggtcaccgtccagatacccaaagtcgggtaaatggatccttttacgaaatactccaggtggattttggaatcgacaactctagcgacctcgctggtgctcaacagatcacatggcaggtagaatatcccatcgaagattccatgagcgagcttgtggtgagtgaaatcttcgtctcccagacaaccttcgtgggcattgtgcccttggccatggataccgaagtgttgaacacggctattttaactggcaaacctgtctccgtcccagtgaaagtcgtgggcgttcaggaggatggtagcgtcgtggacgttagcgaatccgtcgagtgtaagtccgcagacgaggatgtcattaaagtatcaaacaattgtgatagcatctttgttaatgggaaggaaatgaaatcaaaggtggacaccatcgttaattttacccaccaacatttcacttctcagttcgaagtaacggtctgggcacccaggttgcctctccagattgagattagcgataccgagttgtcccaaattaagggatggcggatccccgtggccgctaacagacggcctacacgggaatccgacgatgaggacgacgaggagaaaaaaggacggggttgttctcttcagtaccaacatgctacggtgagagttcttacacaattcgtggcggagagccccgacctgggccagctgacttacatgctgggccctgactggcagttcgacatcaccgatctggtcactgagttcatgaaagtggaggaaccgaaaattgcccagttacaggatggtagaacactagccggtagggaacctggcattacgacagtccaggtactgagtccactgagcgactctatcctggccgagaagactgtgattgtcctcgatgacagggtgacgatagccgagcttggagtgcagctggtggccggaatgtctcttagtctgcaaccccaccgggctgataagcgggctattgttagcacagccgctgccctagatgtcctccaatctccacaacaggaagccattgtttcaagctggatactgttctccgacggatcggtcaccccacttgacatctacgaccctaaggactactcagtcactgtgtcgagtctggacgaaatggtggtcagtgtacaggctaacctcgagtccaaatggccgatcgtagtcgctgagggagagggtcagggccctctcattaagttagagatgatgatctccgagccctgtcagaagacaaagcgtaagagtgtgctcgcggtgggcaagggcaatgtcaaggtaaagttcgagccttccagcgacgaacatcaggggggaagcaacgatatcgagggcatcaaccgagaatataaggatcatctttccaatagcattgaaagagagggcaaccaagagagggcagtacaggagtggttccatcggggtacacccgtcggccaggaggagtctactaacaagtcaactaccccacaaagccccatggaaggcaagaataagctgttgaaatcgggaggtcctgatgcctttacctcgttccctacccagggcaaaagccccgaccccaacaatcctagtgatctgaccgtgactagccggggactgactgacctggagatcggcatgtacgccctgttatgcgtgttttgtttggccatactcgtgttcctaatcaactgtgttgcattcgcatggaagtatcggcacaagcggtttgcagtgtctgaacagggaaacatcccgcactcacacgactgggtttggttaggaaacgaagtggagctgctcgagaacccagtggacattactctgcctagtgaggaatgtaccacaatgatcgatcgcggattacagtttgaggagagaaacttcttattgaacggttctagccaaaagacattccactcccagctgctcaggccctccgattatgtgtatgagaaagaaatcaagaacgaacccatgaactcctcaggtccaaaacggaagcgcgtaaagttcacgtcttacacgacaattctcccagaggacggtggaccttacacaaacagcattctgtttgacagcgatgacaacatcaagtgggtctgccaggatatggggttgggagactctcaggacttccgggactacatggagagcctacaggaccagatgtag

SEQ ID NO: 229625 - DNA, 10906 bp, Artificial Sequence
  derived and/or modified sequence
tacgggaaatgtttggtgcagcatccagaatggacaccactgctgtctgcaccgggggagtgacagagagtcgagggattgtggatagcctgcagaagttttcctcgctccctgcttacctccccacgaacttgcacatctccaatgcagaggagtcctttttccttaaagaagccaaccaagacctcacaaggaactccagtctgcaggcccgggtggagccattcttcatctaccgagccaggacaccccctattatcaatgccagctatggcccattttcagtggagaagataatcccccaggagctcctgttgacatctacagcctttggaaacatggacaaatttcccttcaactggaaattgaaatcccacatccttgacagctccatctactccaacagacccaaagtgcagaccttgttttatgtcactggcatgggctgggatgacagtgaccttacggaagatctaccctgtgtcaagatgtttgctttccctgaggccagggaagtggcagccagctgtcggctgcaaggggccccagggctgtgtgtggctgagctggagctgctgcccgagtggttcagctcaggcctggacctggaaccagaggaggagatcccagccctgctcgggggcaccacgatggagctcttcttcacgctctacccagctgacaaggctggccagtgtcctctggaggaggaaggcaagtgggagaacaatatccactcgggcctggagagcccccagcaagcgtttccagcccgagagaggattgggagtgtggtggtctacccaacccaagatgatctgaagtggtccctggtgagcttggacgagaatgtggtcatctcggtacctctgaatctagtccgggaaggggacacggccacctttttggtctctctgaccagtagctctgtggcagaccagttcactcttagaattaaggcggcagcaggtgtgaagataacggcagtgagagtcagcagtgaggaccaatgggcagtccaggaggaaattgataatggcagcactcagacgtcggccaccctcacctgcatgggccatcgcccggacacgcagagcagggtaaatggatccttctatgagatcttgcaagtggactttggaattgataatagcagtgacctggctggggcccagcagattacctggcaggtggagtacccgattgaggactccatgagtgagctggtcgtctccgagatcttcgtcagccagacaaccttcgtgggcatcgtccctcttgccatggacaccgaggttttgaacactgccattctcactggaaagcctgtttcagttcctgtcaaagtcgtgggggtccaggaggatggttctgtggtcgatgtgtctgagtctgtggaatgcaagtctgccgatgaagatgtcattaaggtttccaacaactgtgattccatttttgtgaatgggaaggaaatgaagagcaaagtggacacgattgtgaacttcacccaccagcacttcacctcccagttcgaggtcactgtctgggcacccaggctccccctgcagattgagatctcagacaccgagctgagccagatcaagggctggaggatcccggttgctgccaacagaaggcctacccgggaaagcgatgacgaggacgatgaggagaagaagggacgaggctgctccctgcagtaccagcacgccacagtgcgtgtcctcacccagtttgtggccgagtcacctgacttagggcagctgacctacatgctgggccccgactggcagtttgacatcactgaccttgtgaccgagttcatgaaggtggaggagccgaaaatcgctcagttacaggacggcaggaccctggctggtcgggagccgggaataaccacggtgcaggtcctctcgccgttgtctgactccatcctggctgagaagacggtgattgtcctggatgaccgagtcaccatcgcggagctgggagtgcagctcgtagctggcatgtctctctccctgcagccacaccgagcagacaaaagggccatcgtctccacagctgctgccctggatgttcttcagtccccacagcaggaagcaatagtaagttcttggattttgttcagtgatggttcggtgacacctttagacatttacgatcctaaggattattctgttactgtctcatcattggatgaaatggtggtgtctgtccaggcaaaccttgagtccaaatggccaattgtggttgcagagggtgaaggacaagggcctttgattaagttagaaatgatgataagtgaaccttgtcagaagaccaagaggaagagtgttcttgccgtgggtaaaggaaatgtcaaggtcaaattcgaaccaagtagtgatgagcaccaaggaggcagcaatgatattgagggcataaatcgggaatataaagaccacctcagtaattccatagagcgcgaaggaaaccaggagagagcagtccaggaatggttccaccgtggcacacctgttggccaagaggaaagtaccaacaaaagcacaaccccccagtctcccatggaagggaagaataagttactcaaaagtggtggtccagatgcctttacaagcttccccactcaagggaagtcaccggaccccaataatcctagtgacctcacagtgacctcaagggggctaacggacttggagattggcatgtatgccttgctctgcgtcttctgtctggccattctggtcttcttgatcaactgcgtggcgtttgcctggaaatacagacacaaaaggtttgctgtgagtgagcagggcaacatcccccattcccacgactgggtctggcttgggaatgaagtggaacttttggagaaccctgttgacattacactcccatcagaggagtgcacaaccatgatagacaggggcctgcagttcgaggagaggaacttccttctgaatggcagttcccagaagacttttcatagtcaactactcagaccctctgactatgtctatgagaaagaaattaaaaatgaacctatgaattcttcgggcccaaagaggaagagagtcaagttcacttcctacaccaccatcctcccagaggacggcggcccatacaccaactccatcctgtttgacagcgatgataacatcaagtgggtctgccaagatatggggctgggggattcacaggactttagagactatatggaaagtctgcaagaccagatgtaaactcctttcttatgtttgtattcacctttatgccttctgttttttgaatgctggagcagtgagtttgatcagcaataggggatgatttaacaaagtttgatttgtggaggtctggtgggattcatttctaagcaggtaaaagaggtttggagagctatagaagctgggttttaagtttggaaatgcctctaaaacagccacatgtggggactggagaaattctaagacaacagttttatggactgcctggtacgagctcagtgcaaatgtattaaacctgaccccacagacattgttagtcatctcgtgacaaatggccatgtggaattagaaaagatttgggtgttgatttttctatttctagaccttttaaagcacagtggacacttattgccccttggcctgagtttagacatacatgaaagatgactgaatgtagctatcctgatttgtcatgagcgctgctcattatttttatatacatttgcacctgcacctgttcctttgacctctggaattctttttgaaacatgaagagaagaaatttcagtcttttccttgagctctgtttgatttacacatgagttttcttccctgggatttgccatgccatgttatttcctgggtctccatgcaggatgtcaggtttttccagttttctgcacttcatcatctagggatggtatccaagaagcttattctcactttgttttttccttccttttgttgttgaactttcttgtataacactgggacaaagggttttacttaaaatgttaatatacagtgagggagggccatctctttactgttttctatgtgaagtttcaaacatttggaaaaaagttgtcaatcacaaacatttatttttattctctgcttgttgaaaactcatggggaactcctggagtgcatttctgagggtaaaaaggccccaacatagctgtatttatacaagtgctttgtggccaacacaatttactatccaaactgaagtcttaaagtagaattgacctacacagaaaggaaattgcctaggcaatagatgcagattacactttccattttaccagaacaaaagtttttttttttttaaataagtagaatgacagttcaagttagcaatatatagaaatccatccatacaatgaccaaaataaataaataaataaaactcaatcatgactttggcagagataaaacattgacaagggtgtgcatttgtggagagaagcagtgggtttccccccaaaatccatacaaataaatgactattccagaactcaagaagcagctattatagaaaaaaaaattaaaaaccacagctattgaaaaattaaaacggcaagagaaaaaaagaaacaactcctgcataatgtttaaataaaaatgttattttaatagcatcatgaatggtcttaaggcaaaaatttcagattagcaaaatgtgatgacatatttattaagattgtattattggaaatgtagacactggactagtatgcctcattatgagctttactgagccatttgcatctctaagaaatatgattttaaaggcccaaagtaggaaggatctgcagggggtcacctgaagcagtgccctgactccaaatggctgataactgagctaatccaaggagaggcgttcagttgttctcttattatagatttccttgggtgggaacatgacaaccccgcctcctctagccatgacgtggcagccaaaaagttcttcctgtatctctggcccacaggactgtagtgtgtttgggaacagtgctgaaattgcaagtgatgtaggcctgacctccagagcccagcgttcagttagttgtataaaatggggcttaggaaccgaagctgatgaagttccaaaagtagttcagtttgatgggataaggaagcaaggagagccaggcattagctgcaaaaggagcttgcagagagatggctgacactttatgggaagattcctcagtcagccaaaagcttttcaaagagtttggtgcagaggtagctcagagccaaccatccaggaccgaagaaagctcatgtgctgattgacacatagctatccaggtgagtcggctccttctatgaggcttttcaatcgtctctccctttggatctctggcattccagaaagactgggaattcatttctgaaaatgatgaacctccgctgaaacggggaggaaatctcttacacacatacagcagggtcctgcccactggtaaagtgagacgttgggtagggggtgtaactggggaggaggtgaaggaaattatccctgccatggggagtgttattcaggaacataaaaattagagcattccctctgatggcagtgcttgacggggtgcagggaacaaactggggagcgttcaaacatgccagtggtttctcagcagggctggaaactggccacagtcctgaagatgcttcttgtgacaacttagagtcactgggagtcacacagctcctgtgtagccgcctttgctcctctgtgttaaaacccagtcagttcaaaataacaatcaaatggaaggccatgggggaagggttccttccaccatataacccacacccagatgtatataaacgcatatacatacatatacccgtgtgtgtgtgtgtgtgtgtgtgtgtgtgtgtgaatactgaagagccagacaacaaactatttagtaagaatcaacagtgactgtcaattgttctcagatttggcatggatactatttctcatgaaataatgtcattaaagtatttcctcctctaaatatttcctgaagatcataaaccatgggttatagcaccttgttttccagctagtcaatatacaactattaggtgctgtgccccaaaatatctaaaatgggggtaaagatataaactattaagccatgaaatctaattttctggggaccatgcatttgcctggattttccaggattttatggctgatagacccaaattattagtcttgataaacaacctgaaccaaacatttataaagtcccttcctctcccatgggaatggaatgctcagactcctgctgagggagacaccagcaagcctcttgagaaggcaccagacagtgaactctgtggtcacatgaagggaggttcagatgctagacgaccagcgtatgacctggaaccattgaggattgcaaccgctgcctccagggtccagatgtgctgcagtagagggcagagcacaggaatcaagaagcagctgccacaccaaagaactgatgcttaaacacacaggtgtgttgcatttgagagaaggcaagaagaaaagacaatagaaggttaccctggaaaaacaacacctagcaaacctcagaatactccatgtgtcccaagagaaggaataattgtctttctagctgttatatattgcacactggccaggataaattcccagactataataatcctgactatgtagacggaagtttctatttataaagtcatgcagggggaaagttgattaatttttgtcccattgccacatctgtagactaagtaatttttaacttgctaacttttagaatgtccacctttgtgcattttggtagcattcttgtttcattattttagaaaggggtcttcccattactgggatgtcggggccctgtcagagaactattattaaggctctgtgagggaactgttcagtctcacagcaaggaccacagagcgtggtttcatctgaaccctacaagtcagggacaccagtgtgttttctactcgagttacctaaaaatggtctcaattttccatttcattctctgtaaatgacacaatagatggtttatagactcagcagccctcaccttttattaaaattatatatgtgtgatgtaatgcatatcacctgtcatgtaaagggacggtatggatggtggaaaagttatgctaaaatatggattgcagatatttttgtatgtaatataggcaatataatgaaacaccgagttttttaaagtgaaagcatgcaaaatcgtagcttttaaatgtacagacatcccactcaaaaatatctaaactgatagtgggaaaaacatttgagacctagtaacatcatgaaatgcactgaatttggaattctggcctagaaaggctgtggcttatgttgggattgatgatggaatctgccagaacattttcatcttattcttcttgacttttggatttttttcttttctttttttctggaaatatttcggaaataaagtgacttcatttttcagcataaaagtatattctaaccacagggtaacacatcgtttttaacatgaaaataaacatttaaacattcttcagttgtttcattattttatctgcatgttccataaagcagctgtatggttggctataatatagatttattttttcttttcagccagagattttaatacccttgatgcagtaataaatggacatcaaaagaaaacatttcttaaaagttgccaacgtattttaccttgaaaacatttcttatttgttatcctagtaggctggggaaagcttctctccagatgtctcagaaaaagatctcctgtttctcatggccccgtccagggtcaaaccatgttgaaagtcagtgctgaaatgcatgatgctgcgggtgtttgagagcctttgacctctgtccaccctttggtctttgctcgtcaatggcttggtcttgtatatgtatctggggcaggggctttgtactgggcccagggtgctgagctttccagaacaggcagagctctagagacctaagaaaaccacaggacaggcggggattctttttgagaggctgaagtagatgtttcagctgaaagatgggtggtacacttgccaagtgcctagaggggctagaggctctctgttggtgtgtgtgtatttcttgaaactgcagagtcatttttggcatgctggcaaatgctactccttgcttttaggatgaatagggatgcctctttggcgataatttgacgtgtcataataaatgcccaataccaaacctagtctttctccaggcccttcagacatcattcaggtaactgggtgtaaacacaggagttggctttgtgaaactgaggcaggatttcctgcctctaaactattggcagcaaaagagccaaaaatgtgctcccaggtgcaaaaccccagccccatcagaattgcttctcagcactttgggtaactgttttgcactaacagcttcctccttgtcttttccctgggaacatgggagcactgacacagaactcaactggtccagccctttgggaggcccaggtgggcagatcacctgaagtcaggagtttgagaccagcctgggcaacatggtgaaaccctgtctctactaaaaatacaaaaattatccagtcgtggtggtgcatgcctgtagtcccagctactctggaggctgaggcaggagaatcacttgaacctgagaggtgaaggttgtagtgagccaagatcgtaccactgcactctggcctgggcaacaagagcgagactttgtctcaaacagaaacaaaacaagaaaaacaaaaagaacttaaccagttctccccagatctcagcgtgcatgcatatatagagtttagtaaaatgtgtttcaaaaaaagaaggataaaagaaagtttgaagtaagatttgtaaaagaatgaacactttaggttttgtgtgtgagtgcaaaatgtaaacacggcatttgaaattttttggtattgaaatccttaatgcctgttagtttctttatggttttatacaattgagataggttctgaagtttttttgttgtttgcttttagaaatttttaaaaatacaaaaaaaaagcgcagaaacattttcatctgggttactgtgtttatagactattctatgactcaagacaactaggacaccatcattttccagataagaaataacagttcaagttcattagggaaattatcttcccagtccaagcaagcaataatgttatcaacttacaatattggacaatcttcatattctatgagatgcctttaaaatttctttggatttaatgctgctcttggtcagttgttcaaatgaaacattgtaatttcatgttaacgacaagagtctcacgggagtctctttagatgctgcaggaactgagaggatagaagacctctctatacatctacattgcccattggagtaaagcactttacagagagatggatgccgctttgggatttggggtctatgtaatgctgatttttttcaaacctgtttggaaatattacttctttgggatggctgaaataacttttgacctgacacatctttctgtacttcctgtggccaaaaaagcaagtgagactttctgtttcccattgtaaggctggagctgaaatagtctgccacgttattgttatctcctttgtaagaatttgactttctgaatgaaataacagaatgccagtgtcaacactgaccatatgatatagttatttcacttagagatgcttcctcaaagagcgtgcctttttcctccatcataaccgctttaggatctctgttttatccatgtatttcccacatagtagaagcattttccatttccatgaatattacaggctgagaaggagcacacatctggcactgataagcacactggcccaggcactcagccttctcatttcattaatctggttggtgaccgtttccatcgggcacacctggaaatgtccatcggacatattgccatctcagttgctgcagtgcagtgaattaccccagagccaccagttcacatgcccaaagatgaactggcccatggagggacttgattgccaagtgacttcctttctgtagttatcctctgctgtgacccttattttggacttctagcaagggcattcagtgtggattccaagaacaaaaccaattgtccaacctccattacaggggtcttctaggtattccccacacattatttgtgggcataagcaaacaccataactatgaaaggctgagagtggagaattaagtcataaggaaatgatcaaacctagggaaaaataagtggctataaaacactgaaagatagtcacatccacatagcgtgtatcatgcaacagacccgtgctcttagagggaggtagtgtgtgtcttcccatggcaaataatttttacaatactgctcatgtttaatgtgtgtctacagggcatgctgttgtctcaaaattgaaatgtgcatcttaggtatcagttcccagcctcagactcttctcaggcaggtggaccggatctcagctgcagaacatagtgagtggccaaacctacacagcccagccagtagtgtgctttggggtgattgcaaggcagcaaacagtggggacaagttttgtctggcatttgaaaaggtgttatcccttactttccacatttctgaattggattcttgttccctggtaaacaccagatattataaacagagcatgctgttatgacattgtgcttctatatacctttttgtataatgtatctatctcattatattacctatggtttcagtatgatctgttgtgtatgttccaccgtatatttaatgtctctgtaaaggcacttccaaacattttgaaaacgaagaaataaaacatgttggatgatt

SEQ ID NO: 229626 - protein, 840 aa, Artificial Sequence
  derived and/or modified sequence
MMSIQEKSKENSSKVTKKSDDKNSETEIQDSQKNLAKKSGPKETIKSQAKSSSESKINQPELETRMSTRSSKAASNDKATKSINKNTVTVRGYSQESTKKKLSQKKLVHENPKANEQLNRRSQRLQQLTEVSRRSLRSREIQGQVQAVKQSLPPTKKEQCSSTQSKSNKTSQKHVKRKVLEVKSDSKEDENLVINEVINSPKGKKRKVEHQTACACSSQCTQGSEKCPQKTTRRDETKPVPVTSEVKRSKMATSVVPKKNEMKKSVHTQVNTNTTLPKSPQPSVPEQSDNELEQAGKSKRGSILQLCEEIAGEIESDNVEVKKESSQMESVKEEKPTEIKLEETSVERQILHQKETNQDVQCNRFFPSRKTKPVKCILNGINSSAKKNSNWTKIKLSKFNSVQHNKLDSQVSPKLGLLRTSFSPPALEMHHPVTQSTFLGTKLHDRNITCQQEKMKEINSEEVKINDITVEINKTTERAPENCHLANEIKPSDPPLDNQMKHSFDSASNKNFSQCLESKLENSPVENVTAASTLLSQAKIDTGENKFPGSAPQQHSILSNQTSKSSDNRETPRNHSLPKCNSHLEITIPKDLKLKEAEKTDEKQLIIDAGQKRFGAVSCNVCGMLYTASNPEDETQHLLFHNQFISAVKYVGWKKERILAEYPDGRIIMVLPEDPKYALKKVDEIREMVDNDLGFQQAPLMCYSRTKTLLFISNDKKVVGCLIAEHIQWGYRVIEEKLPVIRSEEEKVRFERQKAWCCSTLPEPAICGISRIWVFSMMRRKKIASRMIECLRSNFIYGSYLSKEEIAFSDPTPDGKLFATQYCGTGQFLVYNFINGQNST

SEQ ID NO: 229627 - DNA, 2523 bp, Artificial Sequence
  derived and/or modified sequence
atgatgagcattcaggaaaagagcaaggaaaatagttctaaggtgacgaagaaaagcgatgataaaaattctgagactgagatccaagacagccagaaaaacttggccaaaaaatcaggtccaaaagaaactataaaatcccaggcgaagtcgtctagtgagagtaagataaatcagccagagctcgaaaccaggatgagtacaaggtctagtaaagccgctagtaacgataaggctacaaagtctatcaacaagaatacagttacagtccgcggatattcccaagaatcaaccaaaaagaaactgtcccaaaaaaaactagtgcacgaaaatccaaaggccaatgaacaactgaatcgcaggtcacaacgcctgcagcagctgaccgaggtgagcaggagatcactgcgcagtcgagagatccagggacaggtgcaggccgttaagcagagcctcccgcctaccaagaaggagcagtgcagctcgacgcaatccaaatccaacaaaacgtcccaaaagcacgtaaagcgaaaggtgttggaggttaaatctgacagcaaggaagatgaaaatttagtgattaatgaagttatcaactcccccaagggtaagaaaagaaaagtagagcaccagaccgcctgcgcatgtagtagccagtgtactcaagggtccgagaagtgtccacaaaaaaccacacgcagagatgagacaaagccggtgcccgtaacttctgaggtgaaaaggtcaaagatggcaacgagtgtggtaccgaagaagaacgagatgaagaagtccgttcatacccaggtcaacacaaatacaaccctccccaaaagcccccagcctagtgttcccgagcaatctgacaacgagctggaacaagcaggtaaatcaaagaggggcagcatcctgcagctctgcgaggagatcgcaggggaaattgagagcgacaatgtcgaggtcaagaaggagtcttctcagatggagtctgtgaaggaggagaagcctaccgagatcaagctcgaggaaacctcggtagagcgccagatcctccaccagaaagagactaatcaggatgtccaatgcaatcgctttttcccctcccgaaagaccaagcctgtgaaatgtatcctcaacggaatcaattcttccgcaaagaaaaactcgaattggacaaagataaagttatccaaatttaatagcgtacagcacaacaagcttgactctcaggtgagtccaaagcttggtctgctgagaacctcattctcccctcccgccttagagatgcatcaccctgtgacacagagtacttttttagggacaaagctccatgatcgtaacattacatgccaacaggaaaaaatgaaggagatcaattccgaggaggtgaaaatcaatgatattaccgttgagattaacaaaacgacagagcgcgcccccgagaattgccacttggcaaacgagattaagccatctgatccgcctttggacaaccagatgaagcactcatttgacagcgcctccaataagaatttttcccagtgcttggaatctaagctcgaaaattcccctgtcgaaaatgtgactgcagctagcactttgttgtctcaggcgaaaatcgacacgggcgagaataagttccctggatctgccccccagcaacactcaattctgagtaatcagacttcaaaatcatctgataatcgggagacaccaaggaatcactcactccccaaatgcaacagtcatctggagattacaatccccaaggatttgaaactgaaagaggcggagaaaacagacgagaaacagctcattattgatgcgggccagaaacgatttggcgctgtaagttgcaacgtttgcggtatgctgtatacagcctccaatcctgaagacgagacccaacatttgctgttccataaccagttcatctccgctgtcaagtatgtcggctggaagaaagagagaattttggcggagtaccctgacgggagaatcatcatggtcttgccggaggaccccaagtatgcccttaagaaggtggatgagatccgggaaatggtggacaatgatctgggctttcaacaggcacctctgatgtgttactctaggacaaagactttgctgtttatctcgaatgacaaaaaggtcgtagggtgcttgattgccgagcatatccagtgggggtacagagtcatcgaggagaaacttccagtgatccgatccgaagaagagaaggtgaggttcgaaaggcaaaaggcttggtgttgttctactctgccagaacctgcaatctgcggtattagtagaatctgggtattttcaatgatgagaagaaaaaagatagcctcccgcatgattgagtgtctgaggagtaacttcatctacggtagctaccttagcaaagaggaaatcgccttctcagacccaactccagacggaaagttgttcgccacacagtactgtggcacagggcagtttctggtatataattttatcaacggccagaacagtacctag

SEQ ID NO: 229628 - DNA, 2523 bp, Artificial Sequence
  derived and/or modified sequence
atgatgagcatccaggagaagagcaaggagaacagcagcaaggtgaccaagaagagtgatgacaagaacagcgagacagagatccaggacagccagaagaacctggccaagaagagcggccccaaggagaccatcaagagccaggccaagagcagcagcgagagcaagatcaaccagcctgagctggagaccaggatgagcaccaggagcagcaaggccgccagcaatgacaaggccaccaagagcatcaacaagaacacagtgacagtgcggggctacagccaggagagcaccaagaagaagctgagccagaagaagctggtgcatgagaaccccaaggccaatgagcagctgaacagaagaagccagaggctgcagcagctgacagaggtgtccagaagaagcctgcggagccgggagatccagggccaggtgcaggccgtgaagcagagcctgccccccaccaagaaggagcagtgcagcagcacccagagcaagagcaacaagaccagccagaagcacgtgaagaggaaggtgctggaggtgaagagtgacagcaaggaggatgagaacctggtgatcaatgaagtcatcaacagccccaagggcaagaagaggaaggtggagcaccagacagcctgtgcctgcagcagccagtgcacccagggcagcgagaagtgcccccagaagaccaccaggagagatgagaccaagcctgtgcctgtgaccagcgaggtgaagaggagcaagatggccacctctgtggtgcccaagaagaatgagatgaagaagtctgtgcacacccaggtgaacaccaacaccaccctgcccaagagcccccagcccagcgtgcctgagcagagcgacaatgagctggagcaggccggcaagagcaagaggggcagcatcctgcagctgtgtgaggagattgctggggagattgaaagtgacaacgtggaggtgaagaaggagagcagccagatggagagcgtgaaggaggagaagcccacagagatcaagctggaggagacctctgtggagcggcagatcctgcaccagaaggagaccaaccaggatgtgcagtgcaaccgcttcttccccagcaggaagaccaagcctgtgaagtgcatcctgaatggcatcaacagcagcgccaagaagaacagcaactggaccaagatcaagctgagcaagttcaacagcgtgcagcacaacaagctggacagccaggtgagccccaagctgggcctgctgcggaccagcttcagccccccagccctggagatgcaccaccctgtgacccagagcaccttcctgggcaccaagctgcatgacaggaacatcacctgccagcaggagaagatgaaggagatcaacagcgaggaggtgaagatcaatgacatcaccgtggagatcaacaagaccacagagcgggcccctgagaactgccacctggccaatgagatcaagcccagcgacccccccctggacaaccagatgaagcacagctttgacagcgccagcaacaagaacttcagccagtgcctggagagcaagctggagaacagccctgtggagaatgtgacagctgccagcaccctgctgagccaggccaagattgacaccggggagaacaagtttcctggcagcgccccccagcagcacagcatcctgagcaaccagaccagcaagagcagtgacaaccgggagaccccaagaaaccacagcctgcccaagtgcaacagccacctggagatcaccatccccaaggacctgaagctgaaggaggccgagaagacagatgagaagcagctgatcattgatgctggccagaagagatttggagctgtgtcctgcaatgtgtgtggcatgctgtacacagccagcaacccagaagatgagacccagcacctgctcttccacaaccagttcatctctgctgtgaagtatgtgggctggaagaaggagcgcatcctggccgagtacccagatggccgcatcatcatggtgctgcctgaggaccccaagtatgccctgaagaaggtggatgagatccgggagatggtggacaatgacctgggcttccagcaggcccccctgatgtgctacagcaggaccaagaccctgctcttcatcagcaatgacaagaaggtggtgggctgcctgattgctgagcacatccagtggggctacagagtcatcgaggagaagctgcctgtgatccgctctgaggaggagaaggtgcgctttgagcggcagaaggcctggtgctgcagcaccctgcctgagcccgccatctgtggcatcagccgcatctgggtgttctccatgatgaggaggaagaagatcgccagcaggatgattgaatgtctgcggagcaacttcatctacggcagctacctgagcaaggaggagatcgccttcagtgaccccaccccagatggcaagctgtttgccacccagtactgcggcaccggccagttcctggtgtacaacttcatcaatggccagaacagcacctag

SEQ ID NO: 229629 - DNA, 2523 bp, Artificial Sequence
  derived and/or modified sequence
atgatgagcatccaggagaagagcaaggagaacagcagcaaggtgacaaagaagagcgacgacaaaaatagcgagactgagatccaggactcacagaaaaatctcgcgaagaagtcgggccccaaagagaccatcaagtcccaggctaaatcctcgagcgaatcgaaaattaaccagcccgagcttgaaacgcggatgtccaccaggtccagcaaggctgctagcaatgataaggctacgaagtccataaacaaaaacaccgtaacagtccggggctacagtcaagagtctactaagaaaaagctctcccaaaagaaattggtgcatgagaacccgaaagctaacgaacaactcaatcgccgatcacagagactccaacaactgactgaagtctcccgccggtcactcaggtcgagagagattcagggccaggtgcaggcagttaagcagtcattacctccgaccaaaaaggagcagtgtagttcaacccagagcaagtcgaacaagacaagtcaaaagcatgtgaagcgaaaggtgctcgaagtcaagtcagactcaaaggaggacgagaaccttgtgatcaacgaggttattaacagtccaaagggcaaaaagcgcaaggttgaacatcaaacagcctgtgcatgcagtagccaatgtacccagggatcggaaaagtgccctcagaagaccaccagaagggacgagactaagccagtgccagtgacaagcgaagtgaaaaggtcaaaaatggctacaagtgtggtacccaagaaaaacgaaatgaaaaagagtgtccacacacaggtaaatacaaataccaccttacccaagtcgccccagcccagcgttccagaacagtcagacaatgaacttgaacaggcggggaaatcaaagcggggatctatcttgcagctgtgcgaggaaatcgcaggagagattgagagtgataacgttgaggtgaagaaagagtccagccagatggaatccgtcaaagaagagaaacctaccgagatcaagttagaggagacatcagtggagagacagatccttcatcagaaggaaaccaaccaggatgtgcagtgtaatcgattttttccaagccggaagaccaagcccgtgaaatgcatcctgaatggaatcaacagctctgcgaaaaaaaactctaactggacaaagatcaagctaagtaagtttaattctgttcagcacaataaactggacagtcaggtctccccgaagttaggtctgctgaggacttctttttccccacccgccctggagatgcatcatcctgttacgcagtctacttttctgggcactaaattgcacgataggaacatcacatgtcagcaggaaaaaatgaaggaaattaacagtgaggaagtcaagattaacgatattacggtggagatcaataaaacaacagagcgtgctccagagaactgtcatctggccaatgaaattaaaccgtctgacccaccattggataatcagatgaaacacagttttgactcggcgtctaacaaaaacttctcccaatgcctggaatccaagttagaaaacagccctgtcgagaacgtcacagctgccagtaccctcctctcccaagcgaaaattgatactggggagaacaaattccccggaagtgccccacaacagcactcaattctcagcaaccagacatctaagagtagtgacaaccgggagaccccacgtaaccatagcctgcctaagtgcaacagtcacttagagatcacaatacctaaggatctgaaattgaaggaggctgagaaaaccgacgaaaaacagctaataatcgatgccggtcaaaagcgatttggagccgtatcctgcaatgtatgcggtatgctttacaccgccagtaatccagaagacgaaactcagcacctcctctttcataatcagtttatttcagcagttaaatatgtaggatggaagaaggagcgtatactggctgaatatccagacggtcggatcatcatggtgctccctgaggaccccaaatacgctcttaaaaaagtcgacgagatccgtgaaatggtagacaacgacttgggtttccaacaggcacccctgatgtgttatagccgtaccaaaactttactattcatcagcaacgataagaaagttgtgggttgcctgatcgcagaacacattcagtggggctatcgtgtcatagaggaaaagcttcccgtcattcgcagcgaggaggaaaaggttcggttcgagcggcagaaggcatggtgttgttcgacacttccagaacctgctatatgcggaatctcccgcatctgggtctttagcatgatgcggagaaagaagattgcaagccggatgattgaatgcctacgctccaattttatatatggatcgtacttgtccaaagaagaaatagccttctccgacccgacccccgatggaaaactcttcgcaactcagtactgcggcaccggccagtttctggtgtataatttcattaatgggcagaattcaacttag

SEQ ID NO: 229630 - DNA, 2523 bp, Artificial Sequence
  derived and/or modified sequence
atgatgtcaatccaggagaagagtaaagagaatagctcaaaagtgacaaagaaaagtgatgataaaaactcggagaccgaaattcaggacagccaaaagaacctagccaagaaatccggacctaaggagacaattaagtctcaagctaagtcctcaagtgagagcaagattaatcaaccggagcttgaaacacggatgagtaccaggtcgtcaaaagcggcatctaacgacaaggcgacgaaaagcatcaacaaaaacacagtgacggtgagaggctactcacaagagtctaccaagaagaagctttcacagaaaaagttagttcatgagaaccctaaggccaatgaacagctgaacagaaggtcccaacgcttacaacagctgactgaagtgagccgcagatccctgcgctccagggagatccagggccaggtgcaggctgtgaagcagagtctccctcctacaaaaaaggagcaatgctccagcacgcaaagcaagagtaacaagacaagtcaaaaacatgttaaacgcaaggtcctggaagtgaagtcagactctaaggaggacgaaaacttagtgatcaacgaggtcattaatagccccaaaggcaagaaaagaaaggtggaacatcaaactgcatgcgcttgttcctcccagtgtacccaggggagcgagaagtgccctcagaagactactcgacgggatgaaacgaagccggttcccgttacaagcgaggttaagagaagtaagatggctacaagcgtagtcccgaagaagaacgagatgaagaaatccgtgcatacccaggttaataccaataccactcttcctaagagccctcagccaagtgttcctgagcagtctgataacgagctcgagcaggcgggaaaatccaagcgaggaagtattctacagctgtgtgaggaaatcgccggagaaatagaaagtgacaatgtggaggtcaaaaaggagtcaagccagatggaatcggttaaggaggagaagcctacagagatcaaacttgaagagaccagcgttgaacggcagatcctgcaccagaaggagacaaaccaggatgtccaatgtaaccgattcttcccaagccggaagacaaagccagtgaagtgcatattaaacgggatcaattcaagcgctaagaagaactccaactggaccaaaatcaagctaagtaaattcaattcagttcagcacaacaagcttgacagccaggtgagccctaagctgggcctgcttagaacgtccttctcaccacccgctctggagatgcatcaccctgtcacacagtccactttcctgggtacgaaactgcacgatcgcaatatcacgtgtcaacaggagaaaatgaaagagatcaattcagaggaggtgaagattaacgatatcactgtggagataaacaagacaaccgaaagagcgcctgaaaattgccacctggccaatgagatcaaaccgtctgatcccccactggacaaccagatgaagcacagttttgattctgcatctaacaaaaacttctctcagtgtctggagtccaaactggagaactcacccgtggaaaacgtcacagctgccagtaccctgttgtcccaggcaaaaattgacactggggaaaataaatttccaggctccgcccctcagcaacattctatcctgtctaatcagacatccaaatcttcggataaccgtgagacaccacggaaccactccctcccgaagtgcaattcccacttggaaataactatccccaaagacctaaagcttaaggaggctgagaaaacagacgagaagcagctgatcattgatgcaggtcagaaacgatttggtgccgtgagctgcaatgtctgcgggatgctgtacaccgcatcgaaccccgaggacgaaactcagcatctattgtttcacaatcaattcattagcgcggtcaaatatgtggggtggaaaaaagagcggatactcgctgaataccctgatggtcgaatcatcatggtactgcccgaggatccaaagtacgctttgaagaaggtcgacgagatacgagagatggtcgataacgacctgggcttccagcaggcccctctcatgtgttactctcgaaccaagaccctcctgtttatttccaatgataagaaggtggtgggatgcctgattgccgaacacattcagtggggatatcgcgtcatcgaggagaaactcccggttattcggtccgaagaggaaaaagtacggttcgagaggcaaaaagcgtggtgctgctcgaccttgccagagccagcaatatgcggaatatcaagaatctgggtgtttagtatgatgcgacggaaaaaaatcgccagcagaatgatcgagtgcttgcgctcaaatttcatctacggcagctatctttctaaagaagaaattgctttttccgatcccacccctgatggaaaactgtttgctacccagtactgtggcactggacagtttcttgtttataattttatcaatggccagaatagcacctag

SEQ ID NO: 229631 - DNA, 2523 bp, Artificial Sequence
  derived and/or modified sequence
atgatgagcatccaggagaagagcaaggagaacagcagcaaggtgaccaagaagagcgacgacaagaacagcgagaccgagatccaggacagccagaagaacctggccaagaagagcggccccaaggagaccatcaagagccaggccaagagcagcagcgagagcaagatcaaccagcccgagctggagaccagaatgagcaccagaagcagcaaggccgccagcaacgacaaggccaccaagagcatcaacaagaacaccgtgaccgtgagaggctacagccaggagagcaccaagaagaagctgagccagaagaagctggtgcacgagaaccccaaggccaacgagcagctgaacagaagaagccagagactgcagcagctgaccgaggtgagcagaagaagcctgagaagcagagagatccagggccaggtgcaggccgtgaagcagagcctgccccccaccaagaaggagcagtgcagcagcacccagagcaagagcaacaagaccagccagaagcacgtgaagagaaaggtgctggaggtgaagagcgacagcaaggaggacgagaacctggtgatcaacgaggtgatcaacagccccaagggcaagaagagaaaggtggagcaccagaccgcctgcgcctgcagcagccagtgcacccagggcagcgagaagtgcccccagaagaccaccagaagagacgagaccaagcccgtgcccgtgaccagcgaggtgaagagaagcaagatggccaccagcgtggtgcccaagaagaacgagatgaagaagagcgtgcacacccaggtgaacaccaacaccaccctgcccaagagcccccagcccagcgtgcccgagcagagcgacaacgagctggagcaggccggcaagagcaagagaggcagcatcctgcagctgtgcgaggagatcgccggcgagatcgagagcgacaacgtggaggtgaagaaggagagcagccagatggagagcgtgaaggaggagaagcccaccgagatcaagctggaggagaccagcgtggagagacagatcctgcaccagaaggagaccaaccaggacgtgcagtgcaacagattcttccccagcagaaagaccaagcccgtgaagtgcatcctgaacggcatcaacagcagcgccaagaagaacagcaactggaccaagatcaagctgagcaagttcaacagcgtgcagcacaacaagctggacagccaggtgagccccaagctgggcctgctgagaaccagcttcagcccccccgccctggagatgcaccaccccgtgacccagagcaccttcctgggcaccaagctgcacgacagaaacatcacctgccagcaggagaagatgaaggagatcaacagcgaggaggtgaagatcaacgacatcaccgtggagatcaacaagaccaccgagagagcccccgagaactgccacctggccaacgagatcaagcccagcgacccccccctggacaaccagatgaagcacagcttcgacagcgccagcaacaagaacttcagccagtgcctggagagcaagctggagaacagccccgtggagaacgtgaccgccgccagcaccctgctgagccaggccaagatcgacaccggcgagaacaagttccccggcagcgccccccagcagcacagcatcctgagcaaccagaccagcaagagcagcgacaacagagagacccccagaaaccacagcctgcccaagtgcaacagccacctggagatcaccatccccaaggacctgaagctgaaggaggccgagaagaccgacgagaagcagctgatcatcgacgccggccagaagagattcggcgccgtgagctgcaacgtgtgcggcatgctgtacaccgccagcaaccccgaggacgagacccagcacctgctgttccacaaccagttcatcagcgccgtgaagtacgtgggctggaagaaggagagaatcctggccgagtaccccgacggcagaatcatcatggtgctgcccgaggaccccaagtacgccctgaagaaggtggacgagatcagagagatggtggacaacgacctgggcttccagcaggcccccctgatgtgctacagcagaaccaagaccctgctgttcatcagcaacgacaagaaggtggtgggctgcctgatcgccgagcacatccagtggggctacagagtgatcgaggagaagctgcccgtgatcagaagcgaggaggagaaggtgagattcgagagacagaaggcctggtgctgcagcaccctgcccgagcccgccatctgcggcatcagcagaatctgggtgttcagcatgatgagaagaaagaagatcgccagcagaatgatcgagtgcctgagaagcaacttcatctacggcagctacctgagcaaggaggagatcgccttcagcgaccccacccccgacggcaagctgttcgccacccagtactgcggcaccggccagttcctggtgtacaacttcatcaacggccagaacagcacctag

SEQ ID NO: 229632 - DNA, 4649 bp, Artificial Sequence
  derived and/or modified sequence
agtgagcgtggcggccatcttcgtcttctgggcacgtcagctgagccggttagggctgaagaggagcgttgcgcaagcgcacccaagacggtcacaggtaactcccatctgacgagcgaggcgtcgccgtcgtcgccggaagtttggtgtttgcgccgcgggggaggcggcggccgcagcagaagcagctgagtgtctcctgatacccggatgtgaggcgatccgctggcgctagtctgaccctccgccaggcaaaaggaagattgtctttggctatagagtttttttttttaaagattactaaacatacaggaagtgataagaagtatcattcatcagaagcatcattcatcaatcaacttgaagaaaaaggtgatatattatttctttaaggtgctgtgtgatgtgttaagagcatattagaaggaatggttttgtctaattttcttcatgagttatggtggctgagacatcgagtctatattttggggcaaaaactaaacggcagcacaaaaggaaatctatattaatagaatattttgttgaacaaaggaggttagataagaactgcaaaccaacagactcagcaaacaaggaaagaaacgtgttagccataagacatgtttcaagtgaatcgaagtccaataactgtagacttcagaagaaaaaagttttcaaaaattttatcaaaacaggtcactgataaataactcctccagtaatagagctaggcctgaaaccaaaattaattaaaaaattaacaaaacagattgaacctgaattaaatttcttttgataaaaaaacttattaaaaataatcaaaattttcctcaaatttttattaccttgtccaaagtaaagcaagtgtcttttagcattcatgccagcttttctcatgttctaggaatgacagaaaccttacttgaagcaaactagtatttttgttgaaaatgtatatcagcatcagttaaagttgatttttcagacctgctcctcagtaataatactagctagtcagcattcacgcctaccaggacacaaaaatcctcttcaaaactactcagaaaagaaagtcattactcaggaatgatgtccattcaggagaaatcaaaagagaattcctccaaagttactaaaaaaagtgacgataagaattcagaaacagaaattcaggattctcaaaagaatctagcaaaaaaatcaggtccaaaggagactataaaatcacaggctaaatcttccagtgaaagtaaaataaatcagccagaattggaaacacgcatgagtacaaggtcatcaaaggcagcatctaatgataaagctactaaatccattaataaaaatacggtgactgtgaggggatattcacaagaatctacaaaaaagaaattatctcagaaaaaattagtacatgaaaaccctaaagcaaatgaacagcttaaccggagatcacaaaggctacaacaattaacagaggtttcaagaaggtcgttacgcagtagagaaattcagggtcaagttcaagcagttaaacagagtttgccaccaactaaaaaagagcagtgtagcagtactcagagtaaatctaataaaacaagtcaaaaacatgtgaagagaaaagtactggaagtaaagtctgactctaaagaagatgaaaatctagtaattaatgaagtaataaattctcccaaagggaaaaaacgcaaggtagaacatcagacagcttgtgcttgtagttctcaatgcacgcaaggatctgaaaagtgtcctcagaagactactagaagagacgaaacgaaacctgtgcctgtaacttctgaggtgaaaagatcaaaaatggctacttcagtggtcccgaaaaagaatgagatgaagaagtcggttcatacacaagtgaatactaacacaacactcccaaaaagtccacagccatcagtgcctgaacaaagtgataatgagctggagcaagcaggaaagagcaaacgaggtagtattctccagctctgtgaagaaattgctggtgaaattgagtcagataatgtagaggtaaaaaaggaatcttcacaaatggaaagtgtaaaggaagaaaagcccacagaaataaaattggaagagaccagtgttgaaagacaaatacttcatcagaaggaaacaaatcaggatgtgcaatgtaatcgttttttcccaagtagaaaaacaaagcctgtgaaatgtatactaaatggaataaacagctcagccaagaagaactccaactggactaaaattaaactctcaaaatttaactctgtgcagcacaataagttggactctcaagtttcccctaaattaggcttattacgaaccagtttttcaccaccagctttagaaatgcatcatccagtgactcaaagtacgtttttagggacaaagctacatgatagaaatataacttgccagcaggaaaaaatgaaagaaattaattctgaagaagtgaaaattaatgatattacagtagaaattaataaaaccacagaaagggctcctgaaaattgtcatttggccaatgagataaaaccttctgacccaccattggataatcagatgaaacattcttttgattcagcatcaaataagaatttcagccaatgtttggaatccaagctagaaaacagtccagtggaaaatgttactgctgcttcgactctgctcagtcaagcaaaaattgatacaggagagaataaatttccaggttcagctccccaacagcatagtattctcagtaaccagacatctaaaagcagtgataacagggagacaccacgaaatcattctttgcctaagtgtaattcccatttggagataacaattccaaaggacttgaaactaaaagaagcagagaaaactgatgaaaaacagttgattatagatgcaggacaaaaaagatttggagcagtttcttgtaatgtttgtggaatgctgtatacagcttcaaatccagaagatgaaacacagcatctgcttttccacaaccagtttataagtgctgttaaatatgtgggctggaagaaagaaagaattctggctgaataccctgatggcaggataataatggttcttcctgaagacccaaagtatgccctgaaaaaggttgacgagattagagagatggttgacaatgatttaggttttcaacaggctccactaatgtgctattccagaactaaaacacttctcttcatttccaatgacaaaaaagtagttggctgcctaattgcggaacatatccaatggggctacagagttatagaagagaaacttccagttatcaggtcagaagaagaaaaagtcagatttgaaaggcaaaaagcctggtgctgctcaacattaccagagcctgcaatctgcgggatcagtcgaatatgggtattcagcatgatgcgtcggaagaaaattgcttctcgcatgattgaatgcctaaggagtaactttatatatggctcatatttgagcaaagaagaaattgctttctcagatcccactcctgatggaaagctgtttgcaacacagtactgtggcactggtcaatttctggtatataattttattaatggacagaatagcacgtaaaacaaattcttgcctacaccactagaagacatctattgaagagaatggattggttgctgactttaaccaggaactagggccatttttattacaatgaactcaggactggcaacaaccatatggttgttccattttcataaaattggaaacaatgcagtaatagcttattgttttgttttttaaagaagatattttattatcttttacagaaatttatgattgatgtattttatctatagttatttagacatgtttacatgcagcagataattgttcatagtggactgaaaactaatgcaaggactatggtctcagtgataagtatattttgaagttcttaatatggaaatataccagtgtagcttggtactgtatttttttatattgatctgctgataccagtgataggcttaaagattgtattttcacagagtggaaaccaatttttttagttattgttcaaggagggtgcaatattaagtgttttggaatttgaagctaatttttaaaaggcctgaactatactttgaagaaacccctatagaaaaggaaagctccagctaaataggaagaattagaatattgagcttttttttcctgatttttctctttcctatctttgatggaaggaggaagtagaaagtggtaaagaattgaggctttccttcttggagagctgtaaatgacaagcattaggaaaggtaccctcctagattcattattctttcattctggtttcacttttaaaataaatggcaacttggcacacctaggctgttaacaaatctcaaagaggtttataaaaacgtatagaatacttggaagcaaagtatggatgactcggtatctgctttgttattcctcagaaatactgcactgagtatatgccctcattactggacttcattttgatacttgtctatccttcatagtgccctctacttttaaagggtttatatgttgaaaaactgctgtggccttttatgacctgtatataatgtagaataaaaataataaaatacttgatagctttttctaag

SEQ ID NO: 229633 - protein, 679 aa, Artificial Sequence
  derived and/or modified sequence
MGALTSRQHAGVEEVDIPSNSVYRYPPKSGSYFASHFIMGGEKFDSTHPEGYLFGENSDLNFLGNRPVVFPYAAPPPQEPVKTLRSLVNIRKDTLRLVKCAEEVKSPGEEASKAKVHYNVEFTFDTDARVAITIYYQATEEFQNGIASYIPKDNSLQSETVQYKRGVCQQFCLPSHTVDPSEWAEEELGFDLDREVYPLVVHAVVDEGDEYFGHCHVLLGTFEKHTDGTFCVKPLKQKQVVDGVSYLLQEIYGIENKYNTQDSKVAEDEVSDNSAECVVCLSDVRDTLILPCRHLCLCNTCADTLRYQANNCPICRLPFRALLQIRAMRKKLGPLSPTSFNPIISSQTSDSEEHPSSENIPPGYEVVSLLEALNGPLTPSPAVPPLHVLGDGHLSGMLPSYGSDGHLPPVRTISPLDRLSDSSSQGLKLKKSLSKSTSQNSSVLHEEEDEHSCSESETQLSQRPSVQHLGEECGVTPESENLTLSSSGAIDQSSCTGTPLSSTISSPEGPASSSLAQSVMSMASSQISTDTVSSMSGSYIAPGTEEEGEALSSPQPASRAPSEEGEGLPAESPDSNFAGLPAGEQDAEGNDVIEEEDGSPTQEGQRTCAFLGMECDNNNDFDIASVKALDNKLCSEVCLPGAWQADDNAVSRNAQRRRLSSSSLEDSETRPCVWGPLAV

SEQ ID NO: 229634 - protein, 657 aa, Artificial Sequence
  derived and/or modified sequence
MGALTSRQHAGVEEVDIPSNSVYRYPPKSGSYFASHFIMGGEKFDSTHPEGYLFGENSDLNFLGNRPVVFPYAAPPPQEPVKTLRSLVNIRKDTLRLVKCAEEVKSPGEEASKAKVHYNVEFTFDTDARVAITIYYQATEEFQNGIASYIPKDNSLQSETVQYKRGVCQQFCLPSHTVDPSEWAEEELGFDLDREVYPLVVHAVVDEGDEYFGHCHVLLGTFEKHTDGTFCVKPLKQKQVVDGVSYLLQEIYGIENKYNTQDSKVAEDEVSDNSAECVVCLSDVRDTLILPCRHLCLCNTCADTLRYQANNCPICRLPFRALLQIRAMRKKLGPLSPTSFNPIISSQTSDSEEHPSSENIPPGYEVVSLLEALNGPLTPSPAVPPLHVLGDGHLSGMLPSYGSDGHLPPVRTISPLDRLSDSSSQGLKLKKSLSKSTSQNSSVLHEEEDEHSCSESETQLSQRPSVQHLGEECGVTPESENLTLSSSGAIDQSSCTGTPLSSTISSPEGPASSSLAQSVMSMASSQISTDTVSSMSGSYIAPGTEEEGEALSSPQPASRAPSEEGEGNDVIEEEDGSPTQEGQRTCAFLGMECDNNNDFDIASVKALDNKLCSEVCLPGAWQADDNAVSRNAQRRRLSSSSLEDSETRPCVWGPLAV

SEQ ID NO: 229635 - DNA, 2040 bp, Artificial Sequence
  derived and/or modified sequence
atgggcgccctgaccagcagacagcacgccggcgtggaggaggtggacatccccagcaacagcgtgtacagatacccccccaagagcggcagctacttcgccagccacttcatcatgggcggcgagaagttcgacagcacccaccccgagggctacctgttcggcgagaacagcgacctgaacttcctgggcaacagacccgtggtgttcccctacgccgccccccccccccaggagcccgtgaagaccctgagaagcctggtgaacatcagaaaggacaccctgagactggtgaagtgcgccgaggaggtgaagagccccggcgaggaggccagcaaggccaaggtgcactacaacgtggagttcaccttcgacaccgacgccagagtggccatcaccatctactaccaggccaccgaggagttccagaacggcatcgccagctacatccccaaggacaacagcctgcagagcgagaccgtgcagtacaagagaggcgtgtgccagcagttctgcctgcccagccacaccgtggaccccagcgagtgggccgaggaggagctgggcttcgacctggacagagaggtgtaccccctggtggtgcacgccgtggtggacgagggcgacgagtacttcggccactgccacgtgctgctgggcaccttcgagaagcacaccgacggcaccttctgcgtgaagcccctgaagcagaagcaggtggtggacggcgtgagctacctgctgcaggagatctacggcatcgagaacaagtacaacacccaggacagcaaggtggccgaggacgaggtgagcgacaacagcgccgagtgcgtggtgtgcctgagcgacgtgagagacaccctgatcctgccctgcagacacctgtgcctgtgcaacacctgcgccgacaccctgagataccaggccaacaactgccccatctgcagactgcccttcagagccctgctgcagatcagagccatgagaaagaagctgggccccctgagccccaccagcttcaaccccatcatcagcagccagaccagcgacagcgaggagcaccccagcagcgagaacatcccccccggctacgaggtggtgagcctgctggaggccctgaacggccccctgacccccagccccgccgtgccccccctgcacgtgctgggcgacggccacctgagcggcatgctgcccagctacggcagcgacggccacctgccccccgtgagaaccatcagccccctggacagactgagcgacagcagcagccagggcctgaagctgaagaagagcctgagcaagagcaccagccagaacagcagcgtgctgcacgaggaggaggacgagcacagctgcagcgagagcgagacccagctgagccagagacccagcgtgcagcacctgggcgaggagtgcggcgtgacccccgagagcgagaacctgaccctgagcagcagcggcgccatcgaccagagcagctgcaccggcacccccctgagcagcaccatcagcagccccgagggccccgccagcagcagcctggcccagagcgtgatgagcatggccagcagccagatcagcaccgacaccgtgagcagcatgagcggcagctacatcgcccccggcaccgaggaggagggcgaggccctgagcagcccccagcccgccagcagagcccccagcgaggagggcgagggcctgcccgccgagagccccgacagcaacttcgccggcctgcccgccggcgagcaggacgccgagggcaacgacgtgatcgaggaggaggacggcagccccacccaggagggccagagaacctgcgccttcctgggcatggagtgcgacaacaacaacgacttcgacatcgccagcgtgaaggccctggacaacaagctgtgcagcgaggtgtgcctgcccggcgcctggcaggccgacgacaacgccgtgagcagaaacgcccagagaagaagactgagcagcagcagcctggaggacagcgagaccagaccctgcgtgtggggccccctggccgtgtag

SEQ ID NO: 229636 - DNA, 1974 bp, Artificial Sequence
  derived and/or modified sequence
atgggcgccctgaccagcagacagcacgccggcgtggaggaggtggacatccccagcaacagcgtgtacagatacccccccaagagcggcagctacttcgccagccacttcatcatgggcggcgagaagttcgacagcacccaccccgagggctacctgttcggcgagaacagcgacctgaacttcctgggcaacagacccgtggtgttcccctacgccgccccccccccccaggagcccgtgaagaccctgagaagcctggtgaacatcagaaaggacaccctgagactggtgaagtgcgccgaggaggtgaagagccccggcgaggaggccagcaaggccaaggtgcactacaacgtggagttcaccttcgacaccgacgccagagtggccatcaccatctactaccaggccaccgaggagttccagaacggcatcgccagctacatccccaaggacaacagcctgcagagcgagaccgtgcagtacaagagaggcgtgtgccagcagttctgcctgcccagccacaccgtggaccccagcgagtgggccgaggaggagctgggcttcgacctggacagagaggtgtaccccctggtggtgcacgccgtggtggacgagggcgacgagtacttcggccactgccacgtgctgctgggcaccttcgagaagcacaccgacggcaccttctgcgtgaagcccctgaagcagaagcaggtggtggacggcgtgagctacctgctgcaggagatctacggcatcgagaacaagtacaacacccaggacagcaaggtggccgaggacgaggtgagcgacaacagcgccgagtgcgtggtgtgcctgagcgacgtgagagacaccctgatcctgccctgcagacacctgtgcctgtgcaacacctgcgccgacaccctgagataccaggccaacaactgccccatctgcagactgcccttcagagccctgctgcagatcagagccatgagaaagaagctgggccccctgagccccaccagcttcaaccccatcatcagcagccagaccagcgacagcgaggagcaccccagcagcgagaacatcccccccggctacgaggtggtgagcctgctggaggccctgaacggccccctgacccccagccccgccgtgccccccctgcacgtgctgggcgacggccacctgagcggcatgctgcccagctacggcagcgacggccacctgccccccgtgagaaccatcagccccctggacagactgagcgacagcagcagccagggcctgaagctgaagaagagcctgagcaagagcaccagccagaacagcagcgtgctgcacgaggaggaggacgagcacagctgcagcgagagcgagacccagctgagccagagacccagcgtgcagcacctgggcgaggagtgcggcgtgacccccgagagcgagaacctgaccctgagcagcagcggcgccatcgaccagagcagctgcaccggcacccccctgagcagcaccatcagcagccccgagggccccgccagcagcagcctggcccagagcgtgatgagcatggccagcagccagatcagcaccgacaccgtgagcagcatgagcggcagctacatcgcccccggcaccgaggaggagggcgaggccctgagcagcccccagcccgccagcagagcccccagcgaggagggcgagggcaacgacgtgatcgaggaggaggacggcagccccacccaggagggccagagaacctgcgccttcctgggcatggagtgcgacaacaacaacgacttcgacatcgccagcgtgaaggccctggacaacaagctgtgcagcgaggtgtgcctgcccggcgcctggcaggccgacgacaacgccgtgagcagaaacgcccagagaagaagactgagcagcagcagcctggaggacagcgagaccagaccctgcgtgtggggccccctggccgtgtag

SEQ ID NO: 229637 - DNA, 2040 bp, Artificial Sequence
  derived and/or modified sequence
atgggggccctcactagccggcagcacgcgggggtggaggaagtggatatcccaagtaattctgtttacagatatccgccgaaaagcgggtcatattttgctagtcatttcatcatggggggggaaaagttcgacagcactcatcccgagggctacctctttggcgaaaattccgatctgaatttcctgggtaacaggccagtggtgtttccttatgccgccccgccgccgcaggaacccgtcaaaactttgcgcagtctagtgaacatcaggaaggacacactgagactggtcaagtgcgcagaggaagtcaaatcaccaggtgaagaggcatcaaaggcaaaagtacactataacgtagaatttacgtttgatactgacgcaagggttgctataacaatctattaccaggctacggaggaattccagaatggcattgccagctatattcctaaggacaactctctgcaatctgaaaccgtccagtacaagcgaggcgtttgtcagcagttctgccttccctcccataccgtagaccccagcgagtgggcagaggaggaattgggctttgaccttgacagggaggtttaccctttggtggtgcacgccgtcgtggacgagggagatgaatattttggccattgccacgttctactcgggacctttgagaaacatactgacggaaccttttgcgtgaaaccacttaagcaaaagcaggtcgtcgacggggtctcctacttgctccaggagatctacggtatcgaaaataaatataatacgcaggacagcaaagtggcagaagatgaggtgagcgataattccgcggaatgtgtggtctgtctgtccgatgtcagagacactctcatcctcccttgccgtcacctgtgcctgtgtaatacttgtgcagacaccctccggtaccaagctaacaactgtccaatttgccgcctccccttccgagccttgttgcagatccgagccatgcggaagaaactgggtccactcagtcccacttcctttaaccctataattagtagtcagacaagtgattccgaggagcacccatcgtccgagaacatccctcctggctatgaggtggtctccctgctcgaggctcttaatggccccctcacacctagtccagccgtgccccctctgcacgtgttgggagatggccacttaagtggcatgttgccctcctacggcagcgatggccatttgccaccagtgcgtacgatctcacccttagacaggctatcagattcaagtagtcaggggctgaagttgaagaagtccttgagcaagtctacaagtcagaactccagtgtgctgcatgaagaagaggacgagcactcatgcagtgagtcagaaacccaactgtctcagagaccctctgtgcagcacctaggtgaggagtgcggagtgacgccagagtctgagaatctaaccctgagttcaagtggagctatcgatcagagctcatgcacaggaacacctcttagctctacaatcagctctcccgaggggccagcaagttcgtccctcgctcagtccgtgatgtctatggcgtccagccaaatttctacagataccgtgtctagcatgtcagggtcctatatcgcccccggaaccgaggaggagggcgaggcactttcatctccccagcccgcttccagagcccccagcgaggaaggggaaggtctgccagctgaaagcccggattcaaacttcgcaggactccctgctggagagcaggatgcagaaggcaacgacgtgatcgaagaggaagatggctctcctacacaggaaggacagcggacatgcgcattcctggggatggagtgcgataacaacaatgattttgatatcgctagcgtcaaagccctggataacaagctgtgtagcgaggtgtgcttacctggggcatggcaagcagacgacaacgctgtttccaggaatgctcagcggcggcggttgtcctcatcaagtcttgaggattccgaaactcggccttgcgtgtggggtccgctggcagtttag

SEQ ID NO: 229638 - DNA, 1974 bp, Artificial Sequence
  derived and/or modified sequence
atgggggccctcacaagcagacagcacgccggagtggaagaggtggacatacccagcaacagcgtataccgctatcctcctaagtccggttcctacttcgcttctcattttatcatgggcggtgagaaatttgattccacccaccccgagggctacctgttcggcgaaaacagcgacttaaactttctcgggaatcgacctgtggtatttccatacgctgccccacctcctcaggaacccgtgaagaccctgaggagtctggtcaatattcggaaggatacactcagactcgtaaagtgtgcagaggaagtgaaatctccaggcgaggaagccagtaaagccaaggttcattacaatgtagagtttacgtttgacaccgacgcccgtgtggcaatcaccatttattaccaagcaacagaagaatttcagaacggcatcgcctcttatatacctaaagataattctttgcagagcgagactgtccagtacaaacgaggagtgtgccaacagttttgcctaccctcccatacggtggaccccagcgaatgggccgaggaggaattgggattcgaccttgacagggaagtgtatccactggtagtgcacgctgtggtggacgagggagacgaatattttggtcattgccacgtcctcctgggtacctttgaaaaacacaccgacggcacattttgcgtaaagcctctgaagcagaagcaggtggttgatggcgtgagttaccttctccaggagatctacgggattgagaataaatacaacacccaagacagtaaggtcgctgaggatgaagtaagcgataattctgccgaatgcgtggtttgtctgtccgacgttagggatacactgatcttgccctgtcggcacctgtgcttgtgcaacacatgcgcagacactctgagataccaggcaaacaattgccccatctgtcggctgccattccgggcactcctacagattcgggccatgcgcaagaaattagggccgttgtcacctacctcctttaaccccataatctcatctcagacctcagatagcgaagagcacccatcaagcgaaaacatcccacccggatacgaggtcgtcagtcttcttgaggctctgaacggcccactgacaccctctcctgccgttcctccccttcacgtcctcggcgatggacacctctctggcatgcttccatcatatggtagcgatggccaccttccccctgttcgtaccataagccctcttgaccgtttgagtgatagctcgtctcaaggactgaagctcaagaaaagcctcagcaagtccactagtcagaatagctcagtgctgcacgaagaagaggatgagcactcatgcagcgagagcgagactcagctgtctcagcgcccaagtgttcagcacctcggtgaggaatgcggagtgacgccagagtcagaaaacctgacactcagttcctcgggggctattgaccaatcctcgtgtaccgggaccccactctcaagcactattagtagtcctgagggtccggcgagctcatcgctggcccagtccgtgatgtccatggcgagtagtcaaatctccaccgatacagttagcagcatgagtggatcctacatagcccccggaacagaggaggagggcgaagccctcagctctcctcaaccagcaagccgcgcaccctctgaggagggcgagggcaatgacgtgatcgaggaggaagatgggtctcccactcaggaaggacagcggacatgcgcgtttctgggtatggagtgtgataacaacaacgattttgatatcgctagcgtcaaggccctcgacaacaagctctgctctgaagtatgtctgcccggtgcctggcaagccgatgacaatgcagtaagtcgcaatgcacagcggcggagactgtcgtccagctcactcgaggactctgagacacgaccttgcgtttggggtcctttggcagtgtag

SEQ ID NO: 229639 - DNA, 2040 bp, Artificial Sequence
  derived and/or modified sequence
atgggcgccctgaccagccggcagcacgccggcgtggaggaggtggacatccccagcaacagcgtgtaccgctacccacccaagagcggcagctactttgccagccacttcatcatgggcggggagaagtttgacagcacccaccctgagggctacctgtttggagagaacagcgacctgaacttcctgggcaacagacctgtggtgttcccctatgctgcccccccaccccaggagcctgtgaagaccctgcggagcctggtgaacatcaggaaggacaccctgcggctggtgaagtgtgccgaggaggtgaagagccctggagaggaggccagcaaggccaaggtgcactacaacgtggagttcacctttgacacagatgcccgggtggccatcaccatctactaccaggccacagaggagttccagaatggcatcgccagctacatccccaaggacaacagcctgcagagcgagaccgtgcagtacaagaggggcgtgtgccagcagttctgcctgcccagccacacagtggaccccagcgagtgggccgaggaggagctgggctttgacctggaccgggaggtgtaccccctggtggtgcatgctgtggtggatgaaggagatgagtacttcggccactgccacgtgctgctgggcacctttgagaagcacacagatggcaccttctgtgtgaagcccctgaagcagaagcaggtggtggatggagtgtcctacctgctgcaggagatctacggcatcgagaacaagtacaacacccaggacagcaaggtggctgaagatgaggtgtctgacaacagcgcagaatgtgtggtgtgcctgagtgatgtgcgggacaccctcatcctgccctgccgccacctgtgcctgtgcaacacctgtgccgacaccctgcgctaccaggccaacaactgccccatctgccgcctgcccttccgggccctgctgcagatccgggccatgaggaagaagctgggccccctgagccccaccagcttcaaccccatcatcagcagccagaccagtgacagcgaggagcaccccagcagcgagaacatccccccaggctatgaggtggtgtccctgctggaggccctgaatggccccctgacccccagccctgctgtgccccccctgcacgtgctgggagatggccacctgagcggcatgctgcccagctatggcagtgatggccacctgccccctgtgaggaccatcagccccctggaccggctgagtgacagcagcagccagggcctgaagctgaagaagagcctgagcaagagcaccagccagaacagctctgtgctgcacgaggaggaggatgagcacagctgcagcgagagcgagacccagctgagccagaggccttctgtgcagcacctgggggaggagtgtggggtgaccccagagagcgagaacctgaccctgagcagcagcggggccatcgaccagagcagctgcaccggcacccccctgagcagcaccatcagcagccctgagggccctgccagcagcagcctggcccagagcgtgatgtccatggccagcagccagatcagcacagacacagtgtcctccatgagcggcagctacatcgcccctggaacagaggaggagggggaggccctgagcagcccccagcctgccagccgggcccccagcgaggagggggagggcctgcctgctgagagcccagacagcaactttgctggcctgcctgctggggagcaggatgctgagggcaatgatgtgattgaggaggaggatggcagccccacccaggagggccagaggacctgtgccttcctgggcatggagtgtgacaacaacaatgactttgatattgcctctgtgaaggccctggacaacaagctgtgcagcgaggtgtgcctgcccggggcctggcaggctgatgacaatgctgtgtccagaaatgcccagaggcggcggctgagcagcagcagcctggaggacagcgagacccggccctgtgtgtggggccccctggccgtgtag

SEQ ID NO: 229640 - DNA, 1974 bp, Artificial Sequence
  derived and/or modified sequence
atgggcgccctgaccagccggcagcacgccggcgtggaggaggtggacatccccagcaacagcgtgtaccgctacccacccaagagcggcagctactttgccagccacttcatcatgggcggggagaagtttgacagcacccaccctgagggctacctgtttggagagaacagcgacctgaacttcctgggcaacagacctgtggtgttcccctatgctgcccccccaccccaggagcctgtgaagaccctgcggagcctggtgaacatcaggaaggacaccctgcggctggtgaagtgtgccgaggaggtgaagagccctggagaggaggccagcaaggccaaggtgcactacaacgtggagttcacctttgacacagatgcccgggtggccatcaccatctactaccaggccacagaggagttccagaatggcatcgccagctacatccccaaggacaacagcctgcagagcgagaccgtgcagtacaagaggggcgtgtgccagcagttctgcctgcccagccacacagtggaccccagcgagtgggccgaggaggagctgggctttgacctggaccgggaggtgtaccccctggtggtgcatgctgtggtggatgaaggagatgagtacttcggccactgccacgtgctgctgggcacctttgagaagcacacagatggcaccttctgtgtgaagcccctgaagcagaagcaggtggtggatggagtgtcctacctgctgcaggagatctacggcatcgagaacaagtacaacacccaggacagcaaggtggctgaagatgaggtgtctgacaacagcgcagaatgtgtggtgtgcctgagtgatgtgcgggacaccctcatcctgccctgccgccacctgtgcctgtgcaacacctgtgccgacaccctgcgctaccaggccaacaactgccccatctgccgcctgcccttccgggccctgctgcagatccgggccatgaggaagaagctgggccccctgagccccaccagcttcaaccccatcatcagcagccagaccagtgacagcgaggagcaccccagcagcgagaacatccccccaggctatgaggtggtgtccctgctggaggccctgaatggccccctgacccccagccctgctgtgccccccctgcacgtgctgggagatggccacctgagcggcatgctgcccagctatggcagtgatggccacctgccccctgtgaggaccatcagccccctggaccggctgagtgacagcagcagccagggcctgaagctgaagaagagcctgagcaagagcaccagccagaacagctctgtgctgcacgaggaggaggatgagcacagctgcagcgagagcgagacccagctgagccagaggccttctgtgcagcacctgggggaggagtgtggggtgaccccagagagcgagaacctgaccctgagcagcagcggggccatcgaccagagcagctgcaccggcacccccctgagcagcaccatcagcagccctgagggccctgccagcagcagcctggcccagagcgtgatgtccatggccagcagccagatcagcacagacacagtgtcctccatgagcggcagctacatcgcccctggaacagaggaggagggggaggccctgagcagcccccagcctgccagccgggcccccagcgaggagggggagggcaatgatgtgattgaggaggaggatggcagccccacccaggagggccagaggacctgtgccttcctgggcatggagtgtgacaacaacaatgactttgatattgcctctgtgaaggccctggacaacaagctgtgcagcgaggtgtgcctgcccggggcctggcaggctgatgacaatgctgtgtccagaaatgcccagaggcggcggctgagcagcagcagcctggaggacagcgagacccggccctgtgtgtggggccccctggccgtgtag

SEQ ID NO: 229641 - DNA, 2040 bp, Artificial Sequence
  derived and/or modified sequence
atgggcgccctgaccagccggcagcacgccggcgtggaggaggtggacattccaagtaattctgtatatagataccctcctaagtctggctcctactttgcctcacactttattatgggaggcgagaagtttgactctacacaccccgagggatacctgtttggggagaattccgatctgaattttctgggcaatcgaccagttgtttttccctatgctgccccacccccacaggagcctgtcaagaccctccgcagcctggtgaatatccggaaggacacacttcgcctggtaaagtgtgcagaagaggtcaagtctcccggggaggaggcctccaaagctaaagttcactataacgtggaatttacttttgacactgacgctagggtagcgattacgatttactaccaggctacagaggagttccagaacggtatcgcaagttatattccgaaagacaatagcttacagtcggaaaccgttcagtacaagcgcggcgtatgccagcagttctgtctgccttcacacacggtggaccccagcgagtgggccgaggaggagctcggatttgacctagatcgcgaagtctaccctctggtcgtacacgctgtcgtagatgaaggagatgagtattttggacattgtcacgtactccttgggacctttgagaaacacactgatggcactttttgcgttaaaccgcttaaacaaaaacaagtggtagacggcgtctcttacttactccaggagatctatggcattgagaataaatataacacacaggacagcaaggtggctgaggacgaggtgagtgacaacagcgccgaatgcgtagtgtgtctgagcgacgtacgggacactctgatattgccgtgtcggcatctttgcctttgtaacacgtgtgccgataccctccgctaccaggctaacaattgtcctatatgcaggctgccattcagagcactgctacagattagggccatgagaaaaaaactgggacccctaagtcctacctcctttaaccccataatctcttcacagactagcgatagtgaagaacatccatcctccgagaatataccccctggttatgaggttgtgagcctgctagaggccctgaacggtccactgactccctcccccgcggtgcctcctctccacgtcctgggtgatggtcacttgtcaggaatgctccccagttacggatccgacgggcatctgcccccagtaagaacgatctctcccctggatcggctctccgactcgtcttcgcagggcttaaagctgaaaaagagcctgagcaagtctacatctcagaacagctctgtgttacatgaggaagaggacgaacactcttgcagcgagagtgagacgcaacttagtcagcggccgagcgtgcaacacttgggcgaggagtgcggagttactccagaatccgaaaacttgaccctttctagctcgggagccatcgatcaaagttcctgcactggaacgccgctcagttcgactatctctagcccggaaggccctgcatcctcttcactggcacagtcagtgatgtccatggccagcagccagataagcaccgatactgtctcctcaatgtctggcagctatattgccccaggcacagaggaggagggagaggccttatcttctccacagcctgccagtcgggctccgtctgaagagggagagggtctccctgcagagtctccagactcaaatttcgcaggtctgcctgctggcgaacaggacgcagaaggaaacgacgtgattgaagaagaagacggctcgccaactcaggaagggcaaagaacttgtgcctttctagggatggagtgcgacaacaataacgattttgatattgcgagtgtgaaggctttagacaataaactgtgctcagaagtgtgccttccaggcgcgtggcaagcagatgacaatgcagtttctagaaacgcacagaggcggcgtctgtcatctagcagcctggaagactctgaaacaaggccctgcgtgtgggggcctctcgctgtctag

SEQ ID NO: 229642 - DNA, 1974 bp, Artificial Sequence
  derived and/or modified sequence
atgggcgccctgaccagccggcagcacgccggcgtggaggaggtggatatcccgagcaatagcgtgtatcggtacccacccaagtctggctcatacttcgctagccattttattatgggcggcgaaaagttcgactcaacccaccctgaaggatatctgttcggtgagaacagtgacctcaactttttgggcaatagacctgtagtttttccttacgcggccccaccaccccaggaaccagtaaagacactccgttcgcttgtgaacatccggaaggatacactgcgtctcgttaagtgcgctgaggaagtgaagagccctggagaggaggcctccaaagccaaggttcactataacgtggaattcaccttcgacaccgacgcccgagttgccatcactatttactaccaggccactgaggagtttcagaacggcattgcctcgtacataccaaaagataattccctccagtccgagacagtccaatataaaagaggggtgtgccaacagttttgcctgccatctcacacagttgatccctccgaatgggctgaggaggagctaggctttgacttagacagggaggtctacccactagtggtccacgcggtggtggacgagggcgatgagtattttggacattgtcatgtgctgcttgggacctttgagaaacacacggacggaaccttctgcgtgaagccactgaagcagaaacaggtggtggatggagtttcttacttgttacaggagatttacggtattgaaaataagtataacacccaggacagcaaagtggcagaagacgaagtttctgataatagcgccgaatgtgtagtgtgtctgagcgatgtacgtgacacccttatcttgccgtgccggcacctgtgtctctgcaacacctgcgccgacaccctgcgttaccaggccaacaactgtcccatctgtagattgccttttcgcgcattgctgcaaatcagagccatgcgaaaaaaattggggcctttatcaccaacatctttcaaccccatcatctcctcacagacaagcgacagcgaggaacatccatcttcagaaaatatccctcctgggtatgaagtggtttcccttctggaagctctaaacgggcctctaactccttccccggccgtgcctcctcttcatgtgcttggcgacggacatttgtccgggatgttgccaagctacgggtccgacggacacctcccacccgttcgcacgatcagcccgctggaccgtctctctgactcctctagtcagggtttgaagctaaagaagtccttgtccaagagtaccagccagaactcgtcagtcttgcacgaagaagaggatgagcattcctgttctgaatcggagacccaactcagtcagcgtccctcagtccaacacctgggagaggagtgtggcgtcacgcctgagagcgagaatctgaccctgtctagctcaggcgcaatagaccagagctcatgcactgggacgccactgtcaagcacaatttcgagccctgaaggccctgctagtagctctctcgcgcaaagcgtaatgtcaatggcgtccagtcagatctctaccgatacagtctcgtccatgagtggcagttacattgcccccggtacggaagaggagggagaagcattgagtagcccgcaacccgcttctagagctcctagcgaggagggggaggggaacgacgtgattgaagaagaggatggcagccccactcaggaaggtcagcggacctgcgctttcctggggatggaatgcgacaataacaacgatttcgatattgccagtgtaaaagcactggacaacaagttgtgttctgaagtctgcctgccgggcgcatggcaggccgatgataatgcagtcagccgtaacgcccagagacgtagactttcgtcttccagtttggaagattcagagactagaccatgcgtttggggaccgcttgctgtgtag

SEQ ID NO: 229643 - DNA, 2040 bp, Artificial Sequence
  derived and/or modified sequence
atgggagctctcacctctaggcaacatgctggcgtagaggaagttgacattccttccaattccgtataccggtaccctcctaagtccgggagttacttcgctagccattttatcatgggtggcgagaagttcgactctacgcacccagaggggtacctatttggggagaactcagatctcaacttccttggaaacaggccagtggtctttccttacgctgccccacccccacaggagccagttaaaaccttgcgttcacttgtcaatatcagaaaggacaccctgcggctggtcaagtgcgcagaggaggttaaatctccaggcgaagaagcatctaaagccaaggtacattacaacgtggagttcacattcgatacagatgccagagtggcaatcactatctactatcaggccactgaggaattccagaatggtatcgcgtcttacatacctaaggataatagcctacagagcgagacagttcaatacaaaaggggagtgtgtcagcaattttgcctgccaagccacaccgtcgacccatccgagtgggctgaggaggagctcggcttcgatctggacagggaggtgtacccgttagtggtacacgcagtggtggacgagggcgacgaatacttcggtcattgccacgtgttgctgggcacattcgaaaagcacacagacggcaccttttgcgtaaaacccctgaaacagaaacaggtcgtggatggtgtgagctacttgctccaggaaatttatggcatagaaaataagtataatacacaggatagcaaggttgccgaggatgaggtgtctgataatagtgccgagtgcgtggtatgcctttctgacgtgagggacacactgatcttgccttgtcgccatttgtgcctttgtaacacctgtgcagacacactgagataccaagcaaacaactgccccatctgtaggttgcccttccgggcattgcttcagatccgcgctatgaggaaaaaattggggccactgtcccccacgtcgttcaaccccataatctcatctcagaccagtgactccgaggaacacccctcttctgaaaatatccctcccggatacgaagtggtgtcgctgctggaagcactcaacggacccctgacgcctagtcccgcagtcccccctctgcacgtgttaggagacggacacctaagtggaatgctgccaagttacggcagcgatggccacctacccccagtgagaaccatcagcccacttgataggctgagtgactccagcagccaagggttgaagctcaagaaatcgctctccaaatcaacctcccagaattcctcggtgcttcacgaagaggaggacgagcactcctgttccgaatccgagacacagttatcacaacggccttctgttcagcacctgggcgaagagtgcggggtgacccccgaatctgagaacctgacactaagcagctctggcgctattgaccagtcatcctgtaccgggactccacttagctcgacaatatctagcccagagggccctgcaagctctagtctggcgcagagtgtgatgtctatggcgtccagtcagatttcaaccgatacggtgtcgtcgatgtctgggagttatatcgctccaggaacagaggaagagggcgaggctctctcatccccccagccagccagccgggctcccagtgaggagggcgagggtctgcctgctgagtccccggactcaaatttcgctggacttccagccggagaacaggacgccgaagggaacgacgtgatcgaggaggaggacggcagcccaacccaagagggccaacggacatgtgctttccttggaatggaatgcgataataataatgacttcgacattgcttcagttaaggccctcgataacaaactgtgctccgaggtgtgcctccccggtgcctggcaagccgatgataatgccgtgtctcgaaatgctcaacgcagacgactttcttccagctcgctcgaggacagcgagacacgaccctgtgtctggggacccctcgcggtatag

SEQ ID NO: 229644 - DNA, 1974 bp, Artificial Sequence
  derived and/or modified sequence
atgggcgcacttactagtcggcagcacgctggcgtcgaggaggttgatattccttccaatagcgtgtatagatacccgcctaaatcggggtcttacttcgccagtcacttcattatggggggtgagaaattcgactctacccatcccgagggctatctattcggtgagaatagcgacctgaattttctaggcaaccgcccagtcgtatttccctacgctgccccacctccacaggaacctgtcaagacattgaggtctctggtgaacatcagaaaggacaccttgcgcctggtgaagtgtgccgaagaagttaaatctcccggagaggaggcctctaaagccaaggtccactacaatgtggagtttacctttgataccgatgcccgagtggcgatcacaatatattaccaagccaccgaagagttccagaacggcatagcttcctacattccaaaagataatagtctacagtccgagacagtgcaatataaacgcggtgtgtgccagcaattctgtttgccatcgcacaccgttgacccatcggaatgggcggaggaagagctgggctttgacctagatcgtgaggtctaccctctggtggttcacgctgtagtggacgaaggggacgaatacttcggccattgtcatgtgctgctaggaacatttgaaaaacacacagacggtaccttttgtgtgaaacctcttaagcagaaacaggtcgtagatggcgtctcctatctcctccaggagatatatggaattgagaacaagtacaacacacaggatagcaaggtggctgaggacgaggtgtcagataacagtgctgaatgtgtcgtctgtctcagcgatgtgcgggacactctgatcctgccctgccggcacctatgtctctgcaatacttgcgcggacaccctgagatatcaggcaaataactgtcccatctgccggttaccctttcgtgctctcctgcaaatcagggcaatgcgtaagaaactaggacccctatctccaaccagctttaacccgatcatctcctctcagactagtgattccgaggaacaccccagctccgaaaacatacctccaggctacgaggtggtaagcctactggaagcgctgaacggtcccctgacccccagccctgctgtgcccccactccacgtccttggggatgggcacctatccggcatgctaccgagctacgggtctgacggacacttacccccagtccgcacgatcagccctctggaccgtctgtctgatagtagttcacagggtcttaagctgaagaagtcactgagtaagagcaccagccagaatagctcggtgctgcacgaggaggaagatgaacactcctgcagtgagagcgagacccagttaagccaaaggccatccgttcagcatctgggcgaggagtgcggcgtcactcctgaaagcgaaaatctcacactgtctagttctggggctattgaccagtcctcctgcaccggaactcctttatcctcaacgattagtagtccggagggaccagcatcctctagcctcgcccagtcggtgatgagtatggcttcatcccagatcagcaccgataccgtaagttccatgtctggatcctacatagcgccaggcactgaggaagagggcgaagcactgagtagcccacagccggcttccagagctcccagcgaggagggggagggcaacgacgtgatcgaggaggaggacgggagcccaacccaagaggggcagcggacttgcgccttccttggcatggagtgtgataataataacgattttgatattgcctccgtcaaggccttagataacaaactctgctcagaggtgtgtttgcctggggcatggcaggcggatgacaatgctgtctcacggaacgctcagagaaggcgactgtcatcatcatccctcgaagactcagagacaagaccgtgcgtgtgggggccactggctgtgtag

SEQ ID NO: 229645 - DNA, 4891 bp, Artificial Sequence
  derived and/or modified sequence
gcggccgcggtgaagcgcggagggcggcgcgggcaccggggccgggccggggctgcagccgcagcggccatgggggccctgacgagccggcagcacgcgggcgtggaggaggtggacatcccgtctaattccgtgtaccgctacccgcccaagtccggaagctattttgccagccacttcattatgggaggagagaagtttgactcaactcatcctgaaggttacctgtttggagagaacagcgatctgaactttctggggaacagaccagttgtgtttccttacgccgccccacctccccaagaacccgtgaagactctgagaagcctggtcaatatccgaaaggacacactgaggctcgtcaaatgtgctgaggaagtgaagagccctggagaagaggccagtaaagctaaagtccactacaatgttgagttcacctttgacacagatgctcgggtagccatcaccatctattaccaggccacggaagagttccagaatggtattgccagctacattcccaaagacaacagcctccagtcggagactgtgcagtacaagcgaggagtgtgtcagcagttctgcctgccctcccacaccgtggatccctccgagtgggccgaagaggagcttggctttgatttagaccgagaagtttaccctctagtggtacatgccgtggtggatgaaggagacgagtattttggccattgccatgtactgctgggtacttttgagaagcacacagatggaactttctgtgtcaagcccctcaaacagaaacaagtagtagacggggtcagctacctccttcaggagatctatggaattgaaaacaagtacaacacacaagattctaaggtggctgaagacgaagtgagtgataacagtgccgagtgtgtggtgtgtctctcggatgtccgggacaccttgattctgccctgtcgccacctctgcctctgtaacacctgtgcagacacgctgcgctaccaggccaacaactgccccatctgccgactgcccttccgggcactgcttcagatccgagccatgaggaaaaaattgggccccttgtccccaaccagctttaaccccatcatctcatcccagacatctgactctgaagagcatccatcctcagagaatattccaccaggctatgaagtagtatctcttctggaggccctcaacgggcccctcaccccgtccccagcagttcctccacttcacgtgcttggagatggccacctctcaggaatgctcccttcatatggcagtgatggccacctgccccccgtcaggacgatctcgcctcttgaccgcctgtctgacagcagcagtcagggactcaaactcaaaaagagtctctccaaatccacttcccaaaactcttccgtgctgcatgaagaggaagatgagcattcctgcagcgagtcggagacacagctctctcagagaccgtcggttcagcatctcggagaggaatgtggtgtgactccagaaagtgagaatctcaccttgtcgtcatctggagctattgaccagtcgtcttgcacagggacgcctctgtcatccactatttcctccccagaaggccctgccagcagcagcttggcccagtctgtcatgtccatggcatcctcccagatcagcactgacaccgtctcctccatgtctggctcctacatcgcccctggcactgaagaggagggagaggctctctcttccccccagcctgccagcagggccccctcagaagaaggagaggggctgccagcggagtctccagacagcaactttgctggcctcccagctggagagcaggatgcagagggaaatgatgttatagaggaagaggatggatcacccacgcaggaaggccagaggacgtgcgcatttctaggtatggagtgtgacaataacaatgactttgacatcgcaagcgtgaaagcactggacaataagctgtgctctgaggtctgcttacctggtgcctggcaggctgatgacaatgccgtcagtcggaatgcccagcgccggcgcttgtcatccagcagcctggaggactctgagacgaggccctgtgtgtggggccctttggctgtctgagccccagcctctgcacttgggctcccctcctgccctgcattccatccatcctcactcagctgctgcctactgggcatcctcagcaagatgctggagactttttaccctcctgtgacagctgttacaacctgtaaccacaatccctcacctctcagagggaactggaaccctcctttctccgtgtgacctaaagccactcaatgaactgcagctcacgagaccttttgcagggactctggaatgtcctcacggtatattgatgttcaggtggagctggggtccatgggctaatttcttacacatcttttttctccttagggggtagaacaagaaggcttagagtttggcagctttgttacaaacatccctctggcatttcctggtctctggcacatcataaccaattggaaacctgcagtttggggtagggctggaggatcgctcctgtggaaagggagagccatactgcacggacgtagcgtttccctctacaagcactaggagcacctttctcaaggacaagaaatggtagcaaccaaaaggttggttgaaggaaacaatccttccttctggtggcagagccagtcttctgggcctcacatgcctgtgcggttaagaaggagctcttggccgggcgcggtggctcacgcctgtaatcccagcactttgggaggccgaggcgggtggatcatgagatcaggagatcgagaccatcctggctaacacggcgaaaccccgtctctactaaaaatacaaaaaattagctgggcatggttgcaggcgcctgtagtcccagctacttgggaggctgaggcaggagaatggcctgaacccgggaggcggagcttgcagtgagccgagatcgcgccaatgcactccagcctgggcgacagagaaaaaaaaaaaaaaagaaggagcccttgaatctgagaatcccccagttaagatgatttcccttaaggagcatttctcctgatcaggtgcattcagggaggcctgcaactccatcctaaggtgacatttcaagaaacacatgtgttgaccacctctgtgtgccaagcactgggtgaggagtggtcgtatattaccataattcatcctcactcaattgggaggtggcattcttgtccctgttgcccccatctctacccccttttgttaatggttgagagaaatgtggaccagtgattctcagtttggtgcccaggtccccaaaggaagtgatggagagccttgagctaagttcaggcagcagcatgtggccagcagcagtgtgctgggagcagaggttggaatcagggctcagggccttcacttcaagggccctccccagctactcgggaggctgaggcaggagaatcgcttgaactcaggaggtggaggttgcggtgagccaagatcgtgccactgcactccagcctgggctacaagattgaaaagatcgaaactctgtctcaaacaaaaaaaaaaaaattcaaggctgtttccaaggcagcctcaaaaagagcctggtgcccagggggtccttcgtttctgtgtggctgcagaggccaggagtgcagtgactgtctcactgcctagtggttgtggctcacatcctgccctgatggagaggggggcctgtcgtccaaccctctctgaaaaactgcagtagactttaccatttcaggccccacctaatgttctttccttccttccccctacattcttcccgcccctttcatagttaagatgcataagctgagcaataaccccacttcctgatttccctgaaatatgagcccagaagcagcaggtgacagggagcttcccttaccctggggtggtggcacacagaccacctcctgtcctgtcccctgcaggtagtattcacagtgtggtgttacctgggaggagggaggaaggagctgagatgaaggagattcaggtaaacagtagccacagtggccaggacccccttcctgaggatccctgtccttcctcgcagcaggtgcttagtcctctcctagggagaagcacggaaagattcctcaaggcctcagtcccatgtccaaggcatacctaggttagaaatgtcctttacttgtttctcagttactatttctcctcttcctccctccccctgccttctcttggctgtcatttagctctctggcccacagaaatactccatccaaggagctggtcctcagtcagcctgatgaggacaggtcagtggccaacccttttgccccagtccttcatctggagacagtcacatagtcacgtcaacagttcacccaaagagaagaggtggggcctggcttctcccacagggcacagcctaactatggagacccagggctccttcctgctgcactaggcctgtgctctccctattgccttcaggtggtgtgatcccggcttcctcacagagcccttttttccttctgcccagctccatcccaccagagtttctacccccgctgaggcatctcctgggcacagaccaccacactctaagccggctggcctgggagttagggtcctgcccacctcacctgggagttggggtcctgcccacctggagtttagcacgctggtcgctcactttgctttggtctgcacacctggtgtgtgcatgtgtatactgcttgtgccatctgtgtacccctctccctggagtacacttgtggtcacactacagtggggacatcaagaatgcaatatttatggattgctgcatgattcttaaaaatgaataaaactgtttacaagggaaggagagctaactgcaaagtga

SEQ ID NO: 229646 - DNA, 4824 bp, Artificial Sequence
  derived and/or modified sequence
gcggccgcggtgaagcgcggagggcggcgcgggcaccggggccgggccggggctgcagccgcagcggccatgggggccctgacgagccggcagcacgcgggcgtggaggaggtggacatcccgtctaattccgtgtaccgctacccgcccaagtccggaagctattttgccagccacttcattatgggaggagagaagtttgactcaactcatcctgaaggttacctgtttggagagaacagcgatctgaactttctggggaacagaccagttgtgtttccttacgccgccccacctccccaagaacccgtgaagactctgagaagcctggtcaatatccgaaaggacacactgaggctcgtcaaatgtgctgaggaagtgaagagccctggagaagaggccagtaaagctaaagtccactacaatgttgagttcacctttgacacagatgctcgggtagccatcaccatctattaccaggccacggaagagttccagaatggtattgccagctacattcccaaagacaacagcctccagtcggagactgtgcagtacaagcgaggagtgtgtcagcagttctgcctgccctcccacaccgtggatccctccgagtgggccgaagaggagcttggctttgatttagaccgagaagtttaccctctagtggtacatgccgtggtggatgaaggagacgagtattttggccattgccatgtactgctgggtacttttgagaagcacacagatggaactttctgtgtcaagcccctcaaacagaaacaagtagtagacggggtcagctacctccttcaggagatctatggaattgaaaacaagtacaacacacaagattctaaggtggctgaagacgaagtgagtgataacagtgccgagtgtgtggtgtgtctctcggatgtccgggacaccttgattctgccctgtcgccacctctgcctctgtaacacctgtgcagacacgctgcgctaccaggccaacaactgccccatctgccgactgcccttccgggcactgcttcagatccgagccatgaggaaaaaattgggccccttgtccccaaccagctttaaccccatcatctcatcccagacatctgactctgaagagcatccatcctcagagaatattccaccaggctatgaagtagtatctcttctggaggccctcaacgggcccctcaccccgtccccagcagttcctccacttcacgtgcttggagatggccacctctcaggaatgctcccttcatatggcagtgatggccacctgccccccgtcaggacgatctcgcctcttgaccgcctgtctgacagcagcagtcagggactcaaactcaaaaagagtctctccaaatccacttcccaaaactcttccgtgctgcatgaagaggaagatgagcattcctgcagcgagtcggagacacagctctctcagagaccgtcggttcagcatctcggagaggaatgtggtgtgactccagaaagtgagaatctcaccttgtcgtcatctggagctattgaccagtcgtcttgcacagggacgcctctgtcatccactatttcctccccagaaggccctgccagcagcagcttggcccagtctgtcatgtccatggcatcctcccagatcagcactgacaccgtctcctccatgtctggctcctacatcgcccctggcactgaagaggagggagaggctctctcttccccccagcctgccagcagggccccctcagaagaaggagagggaaatgatgttatagaggaagaggatggatcacccacgcaggaaggccagaggacgtgcgcatttctaggtatggagtgtgacaataacaatgactttgacatcgcaagcgtgaaagcactggacaataagctgtgctctgaggtctgcttacctggtgcctggcaggctgatgacaatgccgtcagtcggaatgcccagcgccggcgcttgtcatccagcagcctggaggactctgagacgaggccctgtgtgtggggccctttggctgtctgagccccagcctctgcacttgggctcccctcctgccctgcattccatccatcctcactcagctgctgcctactgggcatcctcagcaagatgctggagactttttaccctcctgtgacagctgttacaacctgtaaccacaatccctcacctctcagagggaactggaaccctcctttctccgtgtgacctaaagccactcaatgaactgcagctcacgagaccttttgcagggactctggaatgtcctcacggtatattgatgttcaggtggagctggggtccatgggctaatttcttacacatcttttttctccttagggggtagaacaagaaggcttagagtttggcagctttgttacaaacatccctctggcatttcctggtctctggcacatcataaccaattggaaacctgcagtttggggtagggctggaggatcgctcctgtggaaagggagagccatactgcacggacgtagcgtttccctctacaagcactaggagcacctttctcaaggacaagaaatggtagcaaccaaaaggttggttgaaggaaacaatccttccttctggtggcagagccagtcttctgggcctcacatgcctgtgcggttaagaaggagctcttggccgggcgcggtggctcacgcctgtaatcccagcactttgggaggccgaggcgggtggatcatgagatcaggagatcgagaccatcctggctaacacggcgaaaccccgtctctactaaaaatacaaaaaattagctgggcatggttgcaggcgcctgtagtcccagctacttgggaggctgaggcaggagaatggcctgaacccgggaggcggagcttgcagtgagccgagatcgcgccaatgcactccagcctgggcgacagagaaaaaaaaaaaaaaagaaggagcccttgaatctgagaatcccccagttaagatgatttcccttaaggagcatttctcctgatcaggtgcattcagggaggcctgcaactccatcctaaggtgacatttcaagaaacacatgtgttgaccacctctgtgtgccaagcactgggtgaggagtggtcgtatattaccataattcatcctcactcaattgggaggtggcattcttgtccctgttgcccccatctctacccccttttgttaatggttgagagaaatgtggaccagtgattctcagtttggtgcccaggtccccaaaggaagtgatggagagccttgagctaagttcaggcagcagcatgtggccagcagcagtgtgctgggagcagaggttggaatcagggctcagggccttcacttcaagggccctccccagctactcgggaggctgaggcaggagaatcgcttgaactcaggaggtggaggttgcggtgagccaagatcgtgccactgcactccagcctgggctacaagattgaaaagatcgaaactctgtctcaaacaaaaaaaaaaaaattcaaggctgtttccaaggcagcctcaaaaagagcctggtgcccagggggtccttcgtttctgtgtggctgcagaggccaggagtgcagtgactgtctcactgcctagtggttgtggctcacatcctgccctgatggagaggggggcctgtcgtccaaccctctctgaaaaactgcagtagactttaccatttcaggccccacctaatgttctttccttccttccccctacattcttcccgcccctttcatagttaagatgcataagctgagcaataaccccacttcctgatttccctgaaatatgagcccagaagcagcaggtgacagggagcttcccttaccctggggtggtggcacacagaccacctcctgtcctgtcccctgcaggtagtattcacagtgtggtgttacctgggaggagggaggaaggagctgagatgaaggagattcaggtaaacagtagccacagtggccaggacccccttcctgaggatccctgtccttcctcgcagcaggtgcttagtcctctcctagggagaagcacggaaagattcctcaaggcctcagtcccatgtccaaggcatacctaggttagaaatgtcctttacttgtttctcagttactatttctcctcttcctccctccccctgccttctcttggctgtcatttagctctctggcccacagaaatactccatccaaggagctggtcctcagtcagcctgatgaggacaggtcagtggccaacccttttgccccagtccttcatctggagacagtcacatagtcacgtcaacagttcacccaaagagaagaggtggggcctggcttctcccacagggcacagcctaactatggagacccagggctccttcctgctgcactaggcctgtgctctccctattgccttcaggtggtgtgatcccggcttcctcacagagcccttttttccttctgcccagctccatcccaccagagtttctacccccgctgaggcatctcctgggcacagaccaccacactctaagccggctggcctgggagttagggtcctgcccacctcacctgggagttggggtcctgcccacctggagtttagcacgctggtcgctcactttgctttggtctgcacacctggtgtgtgcatgtgtatactgcttgtgccatctgtgtacccctctccctggagtacacttgtggtcacactacagtggggacatcaagaatgcaatatttatggattgctgcatgattcttaaaaatgaataaaactgtttacaagggaaggagagctaactgcaaagtg

SEQ ID NO: 229647 - protein, 556 aa, Artificial Sequence
  derived and/or modified sequence
MRRFVYCKVVLATSLMWVLVDVFLLLYFSECNKCDDKKERSLLPALRAVISRNQEGPGEMGKAVLIPKDDQEKMKELFKINQFNLMASDLIALNRSLPDVRLEGCKTKVYPDELPNTSVVIVFHNEAWSTLLRTVYSVINRSPHYLLSEVILVDDASERDFLKLTLENYVKNLEVPVKIIRMEERSGLIRARLRGAAASKGQVITFLDAHCECTLGWLEPLLARIKEDRKTVVCPIIDVISDDTFEYMAGSDMTYGGFNWKLNFRWYPVPQREMDRRKGDRTLPVRTPTMAGGLFSIDRNYFEEIGTYDAGMDIWGGENLEMSFRIWQCGGSLEIVTCSHVGHVFRKATPYTFPGGTGHVINKNNRRLAEVWMDEFKDFFYIISPGVVKVDYGDVSVRKTLRENLKCKPFSWYLENIYPDSQIPRRYYSLGEIRNVETNQCLDNMGRKENEKVGIFNCHGMGGNQVFSYTADKEIRTDDLCLDVSRLNGPVIMLKCHHMRGNQLWEYDAERLTLRHVNSNQCLDEPSEEDKMVPTMQDCSGSRSQQWLLRNMTLGT

SEQ ID NO: 229648 - protein, 19 aa, Artificial Sequence
  derived and/or modified sequence
MRRFVYCKVVLATSLMWVL

SEQ ID NO: 229649 - DNA, 1671 bp, Artificial Sequence
  derived and/or modified sequence
atgagaagattcgtgtactgcaaggtggtgctggccaccagcctgatgtgggtgctggtggacgtgttcctgctgctgtacttcagcgagtgcaacaagtgcgacgacaagaaggagagaagcctgctgcccgccctgagagccgtgatcagcagaaaccaggagggccccggcgagatgggcaaggccgtgctgatccccaaggacgaccaggagaagatgaaggagctgttcaagatcaaccagttcaacctgatggccagcgacctgatcgccctgaacagaagcctgcccgacgtgagactggagggctgcaagaccaaggtgtaccccgacgagctgcccaacaccagcgtggtgatcgtgttccacaacgaggcctggagcaccctgctgagaaccgtgtacagcgtgatcaacagaagcccccactacctgctgagcgaggtgatcctggtggacgacgccagcgagagagacttcctgaagctgaccctggagaactacgtgaagaacctggaggtgcccgtgaagatcatcagaatggaggagagaagcggcctgatcagagccagactgagaggcgccgccgccagcaagggccaggtgatcaccttcctggacgcccactgcgagtgcaccctgggctggctggagcccctgctggccagaatcaaggaggacagaaagaccgtggtgtgccccatcatcgacgtgatcagcgacgacaccttcgagtacatggccggcagcgacatgacctacggcggcttcaactggaagctgaacttcagatggtaccccgtgccccagagagagatggacagaagaaagggcgacagaaccctgcccgtgagaacccccaccatggccggcggcctgttcagcatcgacagaaactacttcgaggagatcggcacctacgacgccggcatggacatctggggcggcgagaacctggagatgagcttcagaatctggcagtgcggcggcagcctggagatcgtgacctgcagccacgtgggccacgtgttcagaaaggccaccccctacaccttccccggcggcaccggccacgtgatcaacaagaacaacagaagactggccgaggtgtggatggacgagttcaaggacttcttctacatcatcagccccggcgtggtgaaggtggactacggcgacgtgagcgtgagaaagaccctgagagagaacctgaagtgcaagcccttcagctggtacctggagaacatctaccccgacagccagatccccagaagatactacagcctgggcgagatcagaaacgtggagaccaaccagtgcctggacaacatgggcagaaaggagaacgagaaggtgggcatcttcaactgccacggcatgggcggcaaccaggtgttcagctacaccgccgacaaggagatcagaaccgacgacctgtgcctggacgtgagcagactgaacggccccgtgatcatgctgaagtgccaccacatgagaggcaaccagctgtgggagtacgacgccgagagactgaccctgagacacgtgaacagcaaccagtgcctggacgagcccagcgaggaggacaagatggtgcccaccatgcaggactgcagcggcagcagaagccagcagtggctgctgagaaacatgaccctgggcacctag

SEQ ID NO: 229650 - DNA, 1671 bp, Artificial Sequence
  derived and/or modified sequence
atgagacgctttgtgtattgcaaggtggtgctcgccacatcattgatgtgggtgctggttgatgtgtttttactgctctacttctctgaatgtaacaaatgcgacgataaaaaggagagatctctgcttcccgcattgcgtgcggttatttctagaaatcaagaagggcccggagagatgggtaaggccgtgctcattcctaaagacgaccaggagaaaatgaaagagctcttcaaaatcaaccagttcaacctgatggcctctgatcttatagctttgaataggtccctgccagacgtccgattggagggatgcaagaccaaggtttatcctgatgagttaccgaacacttccgtcgtgatcgtgtttcataacgaggcatggagcaccctcctgcgaactgtttactcagttatcaaccgcagtcctcactatctgctgtctgaagtgatactggtcgatgatgccagcgaacgcgacttcctgaaactgaccctggagaactatgtgaaaaacctggaggtgcctgtaaagattatccggatggaagagagaagtggtcttattagagcaaggctgagaggtgccgccgcctcgaaaggccaggttatcactttcctcgatgcccactgtgagtgcacactcggttggctggaaccacttttagccaggatcaaagaagatcggaagactgtggtctgcccaataattgacgtcatctctgacgacaccttcgagtatatggctggctcagacatgacctatggggggttcaattggaagctcaattttaggtggtatcccgtcccacagagggaaatggaccgtcggaagggcgataggacattgccagtccgcactcccaccatggcaggcggcttattctccatcgatcggaactactttgaagaaattgggacctatgatgcaggtatggacatctggggcggcgagaacctagaaatgtcttttcgtatctggcagtgcggagggtctttggaaatcgtcacctgttctcacgtgggacacgtgtttaggaaggccacaccgtatacattccctggaggaactggccatgttattaataagaacaacagacgactggccgaagtttggatggacgagtttaaagactttttttatatcatttcgcccggagtggtgaaagtagactacggtgacgttagcgtcaggaagaccctgcgggagaacctcaagtgcaagccgttcagttggtatctggaaaatatttaccctgatagccagatacccaggagatactattccctgggcgaaattcggaacgtcgagaccaaccagtgcctggataacatgggccgcaaggagaatgagaaggtaggaattttcaattgtcacggcatgggggggaaccaggtgtttagttacaccgctgacaaggagattagaaccgatgatctgtgcctagatgtgagccgacttaacgggcctgtgatcatgcttaagtgtcaccacatgcgtggaaaccagctctgggagtacgatgctgagcggttgaccctcaggcacgtcaattctaatcagtgtttagatgagccttccgaggaagataagatggtgccgaccatgcaggactgcagcggtagtaggtcgcagcagtggctcctgaggaacatgacgctgggcacctag

SEQ ID NO: 229651 - DNA, 1671 bp, Artificial Sequence
  derived and/or modified sequence
atgagaagatttgtgtactgcaaggtggtgctggccaccagcctgatgtgggtgctggtggatgtgttcctgctgctgtacttcagcgagtgcaacaagtgtgatgacaagaaggagaggagcctgctgcctgccctgcgggccgtcatcagcaggaaccaggagggccctggagagatgggcaaggctgtgctgatccccaaggatgaccaggagaagatgaaggagctgttcaagatcaaccagttcaacctgatggccagtgacctgattgccctgaacagaagcctgcctgatgtgcggctggagggctgcaagaccaaggtgtacccagatgagctgcccaacacctctgtggtgattgtgttccacaatgaggcctggagcaccctgctgaggacagtgtacagcgtcatcaacagaagcccccactacctgctgtctgaggtgatcctggtggatgatgccagcgagcgggacttcctgaagctgaccctggagaactacgtgaagaacctggaggtgcctgtgaagatcatccgcatggaggagaggagcggcctcatccgggcccggctgcggggagctgctgccagcaagggccaggtgatcaccttcctggatgcccactgtgagtgcaccctgggctggctggagcccctgctggcccgcatcaaggaggacaggaagacagtggtgtgccccatcattgatgtgatcagtgatgacacctttgagtacatggccggcagtgacatgacctatggaggcttcaactggaagctgaacttccgctggtaccctgtgccccagcgggagatggacaggaggaagggggacaggaccctgcctgtgaggacccccaccatggccggcggcctcttcagcattgacaggaactactttgaggagatcggcacctatgatgctggcatggacatctggggcggggagaacctggagatgtccttccgcatctggcagtgtggcggcagcctggagatcgtgacctgcagccacgtgggccacgtgttcaggaaggccaccccctacaccttccctgggggcactggacatgtgatcaacaagaacaacagaaggctggccgaggtgtggatggatgagttcaaggacttcttctacatcatcagccctggggtggtgaaggtggactatggagatgtgtctgtgaggaagaccctgcgggagaacctgaagtgcaagcccttctcctggtacctggagaacatctacccagacagccagatcccccggcgctactacagcctgggggagatcagaaatgtggagaccaaccagtgcctggacaacatgggcaggaaagaaaatgagaaggtgggcatcttcaactgccacggcatgggcggcaaccaggtgttctcctacacagctgacaaggagatcagaacagatgacctgtgcctggatgtgtcccggctgaatggacctgtgatcatgctgaagtgccaccacatgaggggcaaccagctgtgggagtatgatgctgagcggctgaccctgcggcacgtgaacagcaaccagtgcctggatgagcccagcgaggaggacaagatggtgcccaccatgcaggactgcagcggcagccgcagccagcagtggctgctgaggaacatgaccctgggcacctag

SEQ ID NO: 229652 - DNA, 1671 bp, Artificial Sequence
  derived and/or modified sequence
atgcggcggttcgtgtactgcaaggtggtgctggccaccagcctgatgtgggtactggtagacgttttccttctgctgtacttctccgagtgcaacaaatgcgacgacaaaaaggaacgctccctgctaccggctcttcgtgccgtcattagccggaaccaagaagggcccggagagatgggcaaggctgtgctcattcccaaagatgaccaagaaaagatgaaggaacttttcaaaatcaatcaatttaacctcatggcctcagacctcatcgccctgaatagatccctgcctgacgtccgattagagggctgcaaaacgaaggtctaccccgatgagttacctaatactagcgtcgtgatcgtattccacaatgaagcctggtctactctactgaggacggtgtactctgtgataaaccggagtccccactatctgctgagcgaggttatcctcgttgacgatgcctcggagcgcgatttcctgaaactgacactcgagaattatgtgaagaacctggaggttcctgtaaaaataatccgcatggaagaacggtcaggcttgatccgcgctcggctccgaggcgcggcagcgtccaagggacaagtaatcacatttttagatgctcactgcgaatgtacgctgggctggctcgaaccactgcttgcacggattaaagaggatagaaagactgtcgtatgtcctatcatcgatgttatttcggacgatactttcgagtatatggccggtagtgatatgacttatggcgggttcaactggaaattaaattttaggtggtacccagtcccgcagagggagatggataggcggaagggagataggacacttccagtccggaccccaactatggctggaggcctgttcagcattgaccggaactactttgaggaaattggcacgtatgacgcaggtatggacatttggggaggggagaacctggagatgagtttcaggatctggcagtgcggaggaagtcttgaaattgtaacttgctcccacgttggacatgtcttccggaaagccaccccgtacaccttccccggcggtacgggtcacgtaattaataaaaataatcggcgcctggccgaggtctggatggacgagtttaaggactttttttacatcattagccctggtgtagtgaaagtggattatggcgatgtatcagtccgcaaaaccttgcgcgaaaacctaaaatgcaagcctttcagctggtaccttgagaatatttatcctgactcccagatcccacgtagatactacagcctgggtgaaattcgcaatgtcgagactaatcagtgtcttgacaacatgggccgtaaagaaaatgagaaggtcgggatctttaactgtcacggcatggggggaaaccaagtcttcagttatactgcagacaaagaaataagaaccgatgatctctgtctcgacgttagccggctgaacgggccagttattatgctgaaatgtcatcacatgagaggtaaccaactgtgggagtacgacgccgaaaggttgaccctgcggcacgtgaacagcaaccagtgcctggatgagcctagtgaggaggataagatggtcccgaccatgcaggattgttccggatcaaggtcgcaacagtggctgctccgtaacatgacccttggcacctag

SEQ ID NO: 229653 - DNA, 1671 bp, Artificial Sequence
  derived and/or modified sequence
atgaggcggtttgtttattgtaaggttgtgctcgcaacctctctgatgtgggtcctggtggacgtgttcctgctgctttacttttctgaatgtaacaaatgtgacgacaaaaaagagagaagcctgttacctgcacttcgcgcagttatctcccggaaccaggagggacccggagaaatggggaaggctgttttgatccccaaagacgatcaggagaaaatgaaagagttgtttaaaattaaccaattcaacctgatggcaagtgatctcatagctctgaataggagccttccagatgttcgcctcgaggggtgtaaaaccaaagtgtatcctgacgaactccccaacacctctgttgtaatagtgttccacaatgaggcctggagcacactcctgcgaacagtctactctgtcataaatagatctcctcactatttgctgagcgaggtgatccttgtcgatgatgcaagtgagcgagactttctgaagctgaccctagagaattatgtcaagaatctagaggttcctgtgaagataatccgtatggaagaaagatcaggcctgatccgagcaagacttagaggcgctgctgcttccaagggacaagttattacttttctcgacgcccattgtgagtgtactctggggtggctggaaccattactagctcgtattaaggaggataggaaaaccgtcgtgtgccccatcatagatgtgatttcggacgatacatttgagtacatggccggatccgatatgacatacggagggtttaactggaaactgaattttcggtggtaccccgtcccacagagggagatggacagaaggaaaggagatcggacattgccggtgagaaccccaactatggccggagggctgttcagtattgatagaaactactttgaggagattggcacatatgacgctggcatggatatctggggaggcgaaaacctagaaatgagcttccgcatttggcagtgtggaggctccctggaaattgttacatgtagccacgtcgggcacgtcttccgcaaagcaactccatatacatttccgggaggaactggccatgttattaacaagaataacagacgactggccgaggtgtggatggatgagtttaaggactttttttatattatcagccccggtgttgttaaagttgactatggcgacgtcagcgttcgaaagacattgagggaaaatcttaagtgtaaacccttctcttggtacttggaaaacatataccccgacagccagattcctaggaggtattatagtctgggggagataaggaatgtggagactaatcagtgcctggacaatatggggagaaaggagaatgagaaagtgggaatatttaattgccacgggatgggtggaaatcaggtcttctcctatacggccgataaagagattcggacagatgacttgtgtctggacgtgtcaagactcaacggacccgtgataatgctgaagtgccaccacatgcgaggcaatcagctgtgggagtacgacgctgagcgccttacattaagacatgtgaatagcaaccagtgtctggatgaaccaagcgaagaggataagatggttcccaccatgcaggattgtagcggaagccgctcccagcagtggcttctgcggaacatgacccttggtacatag

SEQ ID NO: 229654 - DNA, 5536 bp, Artificial Sequence
  derived and/or modified sequence
gggagaagtgaccaggcggcggcggctctgctgaggtgacaacgtgctagcagccctcgctcgctctgggcgcctcctcggcctcagcgtccgctctggccgcgctcgaggagcccttcagcccgccgctgcgctatgaaggcccctctctggggctggccgaggctggagccggctccctctgctcgcgggcaagtgtgaagagagaggcgcgggcgggagccggggctgcgcgcggcgctcgcgggccggcgcgggttccaggtgagcgcggactcggcgagccccgcactcggcgcggccggccggcgcctgctgggcttgatctgaggctgaatcccgtgtgtggaccgccgttccctcttcgcgggatcgttggccaggatagcagatgcatttttgtagaagcattttgaggatgaatgtttgcaaatcattttgaaattgccaagtgccacatacatggaatgtatcctgctttcatcttggagttcacctgtgtggcttggatttatcacagtagcatttgtcttcaatctgtgtgttaactagaaatcaaggaaagacatgaggagatttgtctactgcaaggtggttctagccacttcgctgatgtgggttcttgttgatgtcttcttactgctgtacttcagtgaatgtaacaaatgtgatgacaagaaggagagatctctgctgcctgcattgagggctgttatttcaagaaaccaagaagggccaggagaaatgggaaaagctgtgttgattcctaaagatgaccaggagaaaatgaaagagctgtttaaaatcaatcagtttaaccttatggccagtgatttgattgcccttaatagaagtctgccagatgtaagattagaaggatgtaagacaaaagtctaccctgatgaacttccaaacacaagtgtagtcattgtgtttcataatgaagcttggagcactctccttagaactgtttacagtgtgataaatcgttccccacactatctactctcagaggtcatcttggtagatgatgccagtgaaagagattttctcaagttgacattagagaattacgtgaaaaatttagaagtgccagtaaaaattattaggatggaagaacgctctgggttaatacgtgcccgtcttcgaggagcagctgcttcaaaagggcaggtcataacttttcttgatgcacactgtgaatgcacgttaggatggctggagcctttgctggcaagaataaaggaagacaggaaaacggttgtctgccctatcattgatgtgattagtgatgatacttttgaatatatggctgggtcagacatgacttatgggggttttaactggaaactgaatttccgctggtatcctgttccccaaagagaaatggacaggaggaaaggagacagaacattacctgtcaggacccctactatggctggtggcctattttctattgacagaaactactttgaagagataggaacttacgatgcaggaatggatatctggggtggagagaatcttgaaatgtcttttaggatttggcaatgtggaggctccttggagattgttacttgctcccatgttggtcatgtttttcggaaggcaactccatacacttttcctggtggcactggtcatgtcatcaacaagaacaacaggagactggcagaagtttggatggatgaatttaaagatttcttctacatcatatccccaggtgttgtcaaagtggattatggagatgtgtcagtcagaaaaacactaagagaaaatctgaagtgtaagcccttttcttggtacctagaaaacatctatccggactcccagatcccaagacgttattactcacttggtgagataagaaatgttgaaaccaatcagtgtttagacaacatgggccgcaaggaaaatgaaaaagtgggtatattcaactgtcatggtatgggaggaaatcaggtattttcttacactgctgacaaagaaatccgaaccgatgacttgtgcttggatgtttctagactcaatggacctgtaatcatgttaaaatgccaccatatgagaggaaatcagttatgggaatatgatgctgagagactcacgttgcgacatgttaacagtaaccaatgtctcgatgaaccttctgaagaagacaaaatggtgcctacaatgcaggactgtagtggaagcagatcccaacagtggctgctaaggaacatgaccttgggcacatgaagatcatgtcctccaagccatgaaagtgtctacgcttttgtttttccattatttcaattgggggaaaatattaactttgctgaattgaaagttttaaaaatccttttagtattctaaaacacaattgtttctaattcgtttctagaaatgtttgcttatttccctactaaaatttgtatctgatcaaagcacataagaatataaataatagcaaactactattaaacaacagaacaacttgtaaaacaaattgtgtttgctttaagaaaaatgtttattgcactcatgtcatagggttaattggaggttattttatttttggttgtcatggtgattgaaagagataatgtaaatgccttataaaatcttcattatgaaatattatcagttgctttataaactcactctttttatggatccttcatggaaacatgtttgatttctgtgtctacaacagggccacatattaaattacttctgaatggtgaattcatcttacaaaatgttccaagttttggacaaggaaaaacattacattggatattgaattcatggagcctttacagaagcatcacatttaaaccaatgtgaattcaaaaaagagaaggaaactttttaaattcaatttagagtacataaaaaaagaaatccgcgaagcattgaggggaacaagatgagtctaatccgcagcacttcgatcactgtgagagaactcaaagtgggttgcaatcattcctaacacaggctgaaactaaacaatcttgctcctagagtttatgttggatactcaattcttaaccaaaatcttggtctccacaaactctaccatcccttttctcttcactctatagacagtggcatgccattgatgctgtacagaattgcaggtgaaagggagaattttagacttaatttttaactctattgcacttaaagattttagttaggttaccactgtcattttcattttctatgttaaagaatacctttcagtgctgtgctccagtatctaaaaattttatcaccaggggaataaactcaatacacattcattaaacttttgttgtaattaaactgctatatattgtttgccatatattatggcccaaggaatatagttataatcaggctacattcacattttcttttctcatcttaaaaccctttatgttcaaaatacattagcagaggccatgaaagtgaaaaaaaatcagatttttgctagtaagtttttatatttgacatcattttaaatgctcaaagagttgccctatatatgcatgttatccattataaatgcactcagcagctaagagaaatttgagaggaaaagtggaagaagtgttttctggagcagaagattccacttctttggtcctcatctttacttaaaaagctcttatagaaaggattaatcattttgactgcatacaaactatgtctctgacatgcacatacactgctttataatgaaaatgaggacactttctgatggtcagtaaaatcttaaatgatttttgccactggtattccttcctcttttgactttttattggtacaactgtagggaagaatctacaacctggagcatttcaggtttgctctttaaatatagacacccctcaccatgagctctctgtgaatccgtgaatttcctaaaattgtaagcaaaatgttgaatatcagggcatttttttttctgaggtgggagtatgtcactcacagcaaacttggaaagaaggctatgactcccaagaggcagtgaaccattgccttaaattaatagcagcctctcaagtccattgaggcctcatgtaaaattcccatttttcatctttacactccttttctcccctcatttcctcttctccttactaaggtaaaaagaccctgcacagcattattacttaagttgaaaaagcttcaactctcaaggactcatgtataccatatgttccacttattgctttgttagtcaaaatgcatgttatgtagaaaatggtcaatggcaaatttttataaatacagctaccccatcaaagctgaacttgaaacgttttagcagaattttaaatatgtgaaagttcattgtggtcatggtgagaaaactaaaactacatgagtttcatgttagaaaagaatttttaaacaatcttcagatggcttgaacacgtgccattatagtatctaacaaaaagtggcataaaatattacaaaacatccaacactagaaagcaatgactaacatttaatttgtttacaaaaatgtttattgtcttcagtacaaaaagttaaaaccatgattggattcataatgcacttgtcttatcccttatttatggagctagactgacatatttcaaaccaatctcttctgtggtcttctccatctcagttaatgcaacttcaaccttccagatgctcaggtcaaaaactgaaagttgcttttgactcctctatttctgtttcaactctcgtctaatccaacagcaaatccccttgatgctacctttgaaatataactagaaaagaatgacttgccaccatatccactaggtgtcactacctctaacctttttaatcgcaatatgcttattatttagttccctaatttcccagtccttgtcttgaacaatcttttctcagtacaacagccatagtgattctgttaaccatgaatttgattgtgtcacttccctgctcacaatcttccaatgacttctccctccggtggccttcaaggtcctttatgagtgttacccctctacacgtccacaccactcaccacacatacatacacatgcacacacacacacatgcaattctacctttttctaacaccatctcttatctctcattattctgcctcttacttaccctattatggctcccaagaaagttcctgctttagtgttttgttccctctgccccagagagctccccttagtgatctcagttcaaatattatcttatcagtaagacaaacccttctcccatctgccttccctatcccctgtacctgacaatctatgagtttgcttctttatttctgtctatacttccccctccccagccccaaacatgcccatcacatgccctagaaggtaagtcccatgaaggcaggggctttgtcagttttgttcatttggtatttctggcatatatattctctaaatatttcttgaattaatgaactgaaaaatgtgtgttaaagttgctaagtgtaactgtatcatactttttttgtattttaaattttaaaataaaggctaatatatttagacaggatttccaaaaa

SEQ ID NO: 229655 - DNA, 510 bp, Artificial Sequence
  derived and/or modified sequence
aacgtgctagcagccctcgctcgctctgggcgcctcctcggcctcagcgtccgctctggccgcgctcgaggagcccttcagcccgccgctgcgctatgaaggcccctctctggggctggccgaggctggagccggctccctctgctcgcgggcaagtgtgaagagagaggcgcgggcgggagccggggctgcgcgcggcgctcgcgggccggcgcgggttccagatgcatttttgtagaagcattttgaggatgaatgtttgcaaatcattttgaaattgccaagtgccacatacaatttaattggatttgagggaaatacaggctgcaatggtgggaatagttaaaatggaatgtatcctgctttcatcttggagttcacctgtgtggcttggatttatcacagtagcatttgtcttcaatctgtgtgttaactagaaatcaaggaaagacatgaggagatttgtctactgcaaggtggttctagccacttcgctgatgtgggttcttg

SEQ ID NO: 229656 - protein, 1168 aa, Artificial Sequence
  derived and/or modified sequence
MGKVGAGGGSQARLSALLAGAGLLILCAPGVCGGGSCCPSPHPSSAPRSASTPRGFSHQGRPGRAPATPLPLVVRPLFSVAPGDRALSLERARGTGASMAVAARSGRRRRSGADQEKAERGEGASRSPRGVLRDGGQQEPGTRERDPDKATRFRMEELRLTSTTFALTGDSAHNQAMVHWSGHNSSVILILTKLYDYNLGSITESSLWRSTDYGTTYEKLNDKVGLKTILSYLYVCPTNKRKIMLLTDPEIESSLLISSDEGATYQKYRLNFYIQSLLFHPKQEDWILAYSQDQKLYSSAEFGRRWQLIQEGVVPNRFYWSVMGSNKEPDLVHLEARTVDGHSHYLTCRMQNCTEANRNQPFPGYIDPDSLIVQDHYVFVQLTSGGRPHYYVSYRRNAFAQMKLPKYALPKDMHVISTDENQVFAAVQEWNQNDTYNLYISDTRGVYFTLALENVQSSRGPEGNIMIDLYEVAGIKGMFLANKKIDNQVKTFITYNKGRDWRLLQAPDTDLRGDPVHCLLPYCSLHLHLKVSENPYTSGIIASKDTAPSIIVASGNIGSELSDTDISMFVSSDAGNTWRQIFEEEHSVLYLDQGGVLVAMKHTSLPIRHLWLSFDEGRSWSKYSFTSIPLFVDGVLGEPGEETLIMTVFGHFSHRSEWQLVKVDYKSIFDRRCAEEDYRPWQLHSQGEACIMGAKRIYKKRKSERKCMQGKYAGAMESEPCVCTEADFDCDYGYERHSNGQCLPAFWFNPSSLSKDCSLGQSYLNSTGYRKVVSNNCTDGVREQYTAKPQKCPGKAPRGLRIVTADGKLTAEQGHNVTLMVQLEEGDVQRTLIQVDFGDGIAVSYVNLSSMEDGIKHVYQNVGIFRVTVQVDNSLGSDSAVLYLHVTCPLEHVHLSLPFVTTKNKEVNATAVLWPSQVGTLTYVWWYGNNTEPLITLEGSISFRFTSEGMNTITVQVSAGNAILQDTKTIAVYEEFRSLRLSFSPNLDDYNPDIPEWRRDIGRVIKKSLVEATGVPGQHILVAVLPGLPTTAELFVLPYQDPAGENKRSTDDLEQISELLIHTLNQNSVHFELKPGVRVLVHAAHLTAAPLVDLTPTHSGSAMLMLLSVVFVGLAVFVIYKFKRRVALPSPPSPSTQPGDSSLRLQRARHATPPSTPKRGSAGAQYAI

SEQ ID NO: 229657 - DNA, 3507 bp, Artificial Sequence
  derived and/or modified sequence
atgggcaaggtgggcgccggcggcggcagccaggccagactgagcgccctgctggccggcgccggcctgctgatcctgtgcgcccccggcgtgtgcggcggcggcagctgctgccccagcccccaccccagcagcgcccccagaagcgccagcacccccagaggcttcagccaccagggcagacccggcagagcccccgccacccccctgcccctggtggtgagacccctgttcagcgtggcccccggcgacagagccctgagcctggagagagccagaggcaccggcgccagcatggccgtggccgccagaagcggcagaagaagaagaagcggcgccgaccaggagaaggccgagagaggcgagggcgccagcagaagccccagaggcgtgctgagagacggcggccagcaggagcccggcaccagagagagagaccccgacaaggccaccagattcagaatggaggagctgagactgaccagcaccaccttcgccctgaccggcgacagcgcccacaaccaggccatggtgcactggagcggccacaacagcagcgtgatcctgatcctgaccaagctgtacgactacaacctgggcagcatcaccgagagcagcctgtggagaagcaccgactacggcaccacctacgagaagctgaacgacaaggtgggcctgaagaccatcctgagctacctgtacgtgtgccccaccaacaagagaaagatcatgctgctgaccgaccccgagatcgagagcagcctgctgatcagcagcgacgagggcgccacctaccagaagtacagactgaacttctacatccagagcctgctgttccaccccaagcaggaggactggatcctggcctacagccaggaccagaagctgtacagcagcgccgagttcggcagaagatggcagctgatccaggagggcgtggtgcccaacagattctactggagcgtgatgggcagcaacaaggagcccgacctggtgcacctggaggccagaaccgtggacggccacagccactacctgacctgcagaatgcagaactgcaccgaggccaacagaaaccagcccttccccggctacatcgaccccgacagcctgatcgtgcaggaccactacgtgttcgtgcagctgaccagcggcggcagaccccactactacgtgagctacagaagaaacgccttcgcccagatgaagctgcccaagtacgccctgcccaaggacatgcacgtgatcagcaccgacgagaaccaggtgttcgccgccgtgcaggagtggaaccagaacgacacctacaacctgtacatcagcgacaccagaggcgtgtacttcaccctggccctggagaacgtgcagagcagcagaggccccgagggcaacatcatgatcgacctgtacgaggtggccggcatcaagggcatgttcctggccaacaagaagatcgacaaccaggtgaagaccttcatcacctacaacaagggcagagactggagactgctgcaggcccccgacaccgacctgagaggcgaccccgtgcactgcctgctgccctactgcagcctgcacctgcacctgaaggtgagcgagaacccctacaccagcggcatcatcgccagcaaggacaccgcccccagcatcatcgtggccagcggcaacatcggcagcgagctgagcgacaccgacatcagcatgttcgtgagcagcgacgccggcaacacctggagacagatcttcgaggaggagcacagcgtgctgtacctggaccagggcggcgtgctggtggccatgaagcacaccagcctgcccatcagacacctgtggctgagcttcgacgagggcagaagctggagcaagtacagcttcaccagcatccccctgttcgtggacggcgtgctgggcgagcccggcgaggagaccctgatcatgaccgtgttcggccacttcagccacagaagcgagtggcagctggtgaaggtggactacaagagcatcttcgacagaagatgcgccgaggaggactacagaccctggcagctgcacagccagggcgaggcctgcatcatgggcgccaagagaatctacaagaagagaaagagcgagagaaagtgcatgcagggcaagtacgccggcgccatggagagcgagccctgcgtgtgcaccgaggccgacttcgactgcgactacggctacgagagacacagcaacggccagtgcctgcccgccttctggttcaaccccagcagcctgagcaaggactgcagcctgggccagagctacctgaacagcaccggctacagaaaggtggtgagcaacaactgcaccgacggcgtgagagagcagtacaccgccaagccccagaagtgccccggcaaggcccccagaggcctgagaatcgtgaccgccgacggcaagctgaccgccgagcagggccacaacgtgaccctgatggtgcagctggaggagggcgacgtgcagagaaccctgatccaggtggacttcggcgacggcatcgccgtgagctacgtgaacctgagcagcatggaggacggcatcaagcacgtgtaccagaacgtgggcatcttcagagtgaccgtgcaggtggacaacagcctgggcagcgacagcgccgtgctgtacctgcacgtgacctgccccctggagcacgtgcacctgagcctgcccttcgtgaccaccaagaacaaggaggtgaacgccaccgccgtgctgtggcccagccaggtgggcaccctgacctacgtgtggtggtacggcaacaacaccgagcccctgatcaccctggagggcagcatcagcttcagattcaccagcgagggcatgaacaccatcaccgtgcaggtgagcgccggcaacgccatcctgcaggacaccaagaccatcgccgtgtacgaggagttcagaagcctgagactgagcttcagccccaacctggacgactacaaccccgacatccccgagtggagaagagacatcggcagagtgatcaagaagagcctggtggaggccaccggcgtgcccggccagcacatcctggtggccgtgctgcccggcctgcccaccaccgccgagctgttcgtgctgccctaccaggaccccgccggcgagaacaagagaagcaccgacgacctggagcagatcagcgagctgctgatccacaccctgaaccagaacagcgtgcacttcgagctgaagcccggcgtgagagtgctggtgcacgccgcccacctgaccgccgcccccctggtggacctgacccccacccacagcggcagcgccatgctgatgctgctgagcgtggtgttcgtgggcctggccgtgttcgtgatctacaagttcaagagaagagtggccctgcccagcccccccagccccagcacccagcccggcgacagcagcctgagactgcagagagccagacacgccaccccccccagcacccccaagagaggcagcgccggcgcccagtacgccatctag

SEQ ID NO: 229658 - DNA, 3507 bp, Artificial Sequence
  derived and/or modified sequence
atgggcaaggtgggagctggtggcggctctcaggcccgattgagcgcccttttagctggagccggtttgttaatactgtgtgcacccggcgtgtgcggaggcggatcttgctgcccctcaccccatcctagttctgccccacgctccgcctccacccccagggggtttagccatcagggccggcccggtcgagctcctgccactccactccctcttgtggtgcgcccgctcttctctgtggctccgggtgacagagctctcagcctagagcgggctagaggaaccggcgcttccatggcagtggcagccagatccggccgccgacgccgcagtggagcagaccaagagaaggcggagcgaggggaaggggcctctaggagccctcgtggcgtgttaagggacggaggccaacaggaacctggaaccagggaaagagatcccgacaaggcaacacgctttcgaatggaagagttgcgcctgacatcaacaacattcgctctcacgggcgactctgctcacaatcaggccatggtgcactggagtggccacaactctagcgtaatccttatccttacaaagctgtacgattacaacctggggtccatcaccgaatccagcctctggcgctctactgattacggtacgacttacgaaaagctgaacgacaaggtgggtctgaaaaccatccttagttatctgtatgtctgccccaccaacaaaagaaaaatcatgttactgacagatcctgagatagaaagctccctgctgatttcgtccgacgaaggcgctacttatcagaaatatagactgaatttctatatccagagcttactcttccaccctaagcaggaggactggatcttagcctattcccaggatcaaaaactatactcctccgccgagtttggcaggaggtggcaactcattcaggagggagtcgtcccaaaccggttttactggtccgtgatgggatccaacaaggagcctgacttggtccacctcgaagctaggacagtcgatggtcactctcattatctgacttgcagaatgcaaaattgtacggaggctaaccgcaaccagcctttccctggatacatagacccggattcacttattgtgcaagaccactacgtatttgtccagctcacttccggcggcaggccacattactatgtgagttacagacgcaacgcttttgcccagatgaagctgccaaaatacgccctccccaaggacatgcacgtcatctcaaccgacgagaaccaagtctttgccgccgtgcaggagtggaatcagaacgatacttataacctgtatataagtgatacaagaggcgtttactttactctagccctggaaaacgtgcaaagcagccgcggacccgaagggaacatcatgattgatctgtatgaggttgccggcataaaagggatgttcctagctaacaaaaaaatagataaccaggtgaaaaccttcataacatataacaaggggagggactggagactgcttcaggccccagataccgatctgcgaggcgatcccgttcattgtttattgccttattgtagtctccacctccatcttaaagtgtcagaaaatccttacacgtccggcatcattgcgagtaaagataccgcaccctccatcatcgtggcctctggaaacatcggatctgagctgtcagacactgacatctcaatgtttgtgtcttccgacgccggcaacacctggcgccagatctttgaggaggagcactccgtgctgtatctggaccaaggaggggtgttggtggccatgaaacacactagtctgcctattcggcacctgtggctcagtttcgatgagggtcggtcctggagcaagtacagttttacatccattcctctgttcgtggacggcgtgctgggggagcccggtgaagaaacactgattatgaccgtgttcggtcacttctcccaccgtagtgaatggcagctggttaaggtcgattacaagtcaattttcgataggagatgtgctgaagaggactaccgcccctggcaattgcattctcagggtgaagcctgtatcatgggggcaaaacgaatttacaagaagcggaaatctgagagaaaatgtatgcagggaaagtatgccggcgccatggagagcgaaccctgcgtgtgcacggaggctgactttgattgcgactacggatatgaacgacacagtaatggacagtgcttgcccgcgttctggttcaatccctccagcctctcaaaggactgtagcctgggtcagtcctatctgaactctaccggctacagaaaagtggtgagcaacaattgtacagatggagtccgagaacagtacaccgccaaaccacagaaatgccccggcaaggcccctaggggtctgcggattgtgaccgcagatggcaaactgaccgcagagcagggacacaacgtcactttaatggttcagctggaggagggcgatgtgcagagaaccctgatacaggtggactttggagacggcattgctgtctcgtatgtcaacctctcatctatggaagatggtatcaaacacgtttatcagaatgtgggaatctttagagtgacagtgcaggtagacaattctctgggctcagactctgccgtgctgtacttgcacgtgacttgtcccctggagcacgtacacttaagtttgccattcgtgactacaaaaaacaaggaggtgaacgctaccgcagtgctttggcctagccaagtggggaccttaacttatgtgtggtggtacggcaacaatactgaacccctcattacacttgaagggtctatttcttttcggttcaccagcgagggaatgaacaccattactgtacaggtaagcgcagggaacgccattctgcaggacacaaaaaccattgctgtgtacgaagaattccgctcactgaggttgagcttctcgcctaacttggacgactacaaccccgatatccctgagtggagaagggatatcggtcgcgttattaagaagagcttggtggaggcaactggagtgcctggccagcatattctcgtggctgttctccccggtctaccaacgacagcggaactttttgtccttccttatcaggacccagctggagaaaacaagcgcagcaccgacgatctcgagcaaatcagcgagctgctgatccatacccttaaccaaaattctgtccattttgagctaaagccaggagtgagagtgttggtgcatgctgcccacctgactgctgctccgctcgttgacttgacccccacacactctggatctgctatgctgatgctgctgtccgtcgtgttcgtggggctggcagtgtttgttatctataagtttaaacgacgagttgcgctcccgagtccgccctctccatccactcagccaggcgacagcagcctgcggctccagagggctagacacgctacaccacccagtactcccaaacgggggtctgcaggtgcacagtacgccatctag

SEQ ID NO: 229659 - DNA, 3507 bp, Artificial Sequence
  derived and/or modified sequence
atgggcaaggtgggcgctgggggcggcagccaggcccggctgagcgccctgctggccggggccggcctgctgatcctgtgtgcccctggggtgtgtggcggcggcagctgctgccccagcccccaccccagcagcgcccccaggtctgccagcaccccccggggcttcagccaccagggccggcccggccgggccccagccacccccctgcccctggtggtgcggcccctcttctctgtggcccctggggaccgggccctgagcctggagcgggcccggggcactggagcctccatggctgtggccgcccggtctggaagaagaagaagaagtggagctgaccaggagaaggccgagcggggggagggcgccagccgcagcccccggggcgtgctgagagatggcggccagcaggagcccggcacccgggagcgggaccctgacaaggccacccgcttcaggatggaggagctgcggctgaccagcaccacctttgccctgaccggggacagcgcccacaaccaggccatggtgcactggagcggccacaacagcagcgtcatcctgatcctgaccaagctgtatgactacaacctgggcagcatcacagagagcagcctgtggaggagcacagattatggcaccacctatgagaagctgaatgacaaggtgggcctgaagaccatcctgagctacctgtatgtgtgccccaccaacaagaggaagatcatgctgctgacagatcctgagattgagagcagcctgctgatcagcagtgatgagggcgccacctaccagaagtaccgcctgaacttctacatccagagcctgctcttccaccccaagcaggaggactggatcctggcctacagccaggaccagaagctgtacagcagcgctgagtttggccgccgctggcagctgatccaggagggcgtggtgcccaaccgcttctactggagcgtgatgggcagcaacaaggagccagacctggtgcacctggaggccaggacagtggatggccacagccactacctgacctgcaggatgcagaactgcacagaggccaacagaaaccagcccttccctggctacatcgaccctgacagcctcatcgtgcaggaccactacgtgtttgtgcagctgaccagcggcggccggccccactactacgtgtcctacagaagaaatgcctttgcccagatgaagctgcccaagtatgccctgcccaaggacatgcacgtgatcagcacagatgagaaccaggtgtttgctgctgtgcaggagtggaaccagaatgacacctacaacctgtacatcagtgacacccggggcgtgtacttcaccctggccctggagaatgtgcagagcagccggggccctgagggcaacatcatgattgacctgtatgaggtggccggcatcaagggcatgttcctggccaacaagaagattgacaaccaggtgaagaccttcatcacctacaacaagggccgggactggaggctgctgcaggccccagacacagacctgcggggggaccctgtgcactgcctgctgccctactgcagcctgcacctgcacctgaaggtgtctgagaacccctacaccagcggcatcatcgccagcaaggacacagcccccagcatcatcgtggccagcggcaacatcggcagcgagctgagtgacacagacatctccatgtttgtgtccagtgatgctggcaacacctggaggcagatctttgaggaggagcacagcgtgctgtacctggaccagggcggcgtgctggtggccatgaagcacaccagcctgcccatccgccacctgtggctgagctttgatgagggccgctcctggagcaagtacagcttcaccagcatccccctgtttgtggatggagtgctgggggagcctggagaggagaccctcatcatgacagtgtttggccacttcagccacaggtctgagtggcagctggtgaaggtggactacaagagcatctttgacagaagatgtgccgaggaggactaccggccctggcagctgcacagccagggcgaggcctgcatcatgggcgccaagaggatctacaagaagaggaagtctgagaggaagtgcatgcagggcaagtatgctggggccatggagagcgagccctgtgtgtgcacagaggccgactttgactgtgactatggctatgaaagacacagcaatggccagtgcctgcctgccttctggttcaaccccagcagcctgagcaaggactgcagcctgggccagagctacctgaacagcacaggctacaggaaggtggtgagcaacaactgcacagatggagtgcgggagcagtacacagccaagccccagaagtgccctgggaaggccccccggggcctgcgcatcgtgacagcagatggcaagctgacagctgagcagggccacaacgtgaccctgatggtgcagctggaggagggagatgtgcagaggaccctcatccaggtggactttggagatggcattgctgtgtcctatgtgaacctgagctccatggaggatggcatcaagcacgtgtaccagaatgtgggcatcttccgggtgacagtgcaggtggacaacagcctgggcagtgacagcgctgtgctgtacctgcacgtgacctgccccctggagcacgtgcacctgagcctgccctttgtgaccaccaagaacaaggaggtgaatgccacagctgtgctgtggcccagccaggtgggcaccctgacctacgtgtggtggtacggcaacaacacagagcccctcatcaccctggagggcagcatctccttccgcttcaccagcgagggcatgaacaccatcaccgtgcaggtgtctgctggaaatgccatcctgcaggacaccaagaccatcgctgtgtatgaggagttccgcagcctgcggctgtccttcagccccaacctggatgactacaacccagacatccctgagtggaggcgggacatcggccgggtcatcaagaagagcctggtggaggccactggagtgcccggccagcacatcctggtggccgtgctgcccggcctgcccaccacagctgagctgtttgtgctgccctaccaggaccctgctggggagaacaagaggagcacagatgacctggagcagatcagcgagctgctgatccacaccctgaaccagaacagcgtgcactttgagctgaagccaggagtgcgggtgctggtgcatgctgcccacctgacagctgcccccctggtggacctgacccccacccacagcggcagcgccatgctgatgctgctgtctgtggtgtttgtgggcctggccgtgtttgtgatctacaagttcaagagaagagtggccctgcccagcccccccagccccagcacccagcccggggacagcagcctgcggctgcagagggcccggcatgccaccccacccagcacccccaagaggggcagcgctggggcccagtatgccatctag

SEQ ID NO: 229660 - DNA, 3507 bp, Artificial Sequence
  derived and/or modified sequence
atgggcaaggtgggcgccggcggcggcagccaggcccggctgagcgcgctgttggcaggggctgggctgctgatcctgtgtgctccgggcgtgtgcggaggcggatcatgctgtccctctcctcacccttcttcagctcctaggtccgcctcaactccccgcggattcagtcatcagggcagacccggccgtgcacccgccacccctcttcctctggtggtgaggcctctgttttcagtcgctccaggtgaccgggccctgtccctggagagagcgcgggggacaggagcctcaatggctgtggccgcgagaagtggcagaaggcgtcgtagcggagctgatcaggagaaggctgaacggggggagggtgcttcacggagccccaggggcgtgctcagagatggtgggcagcaggagccaggaacgcgcgagcgggatcctgacaaagctacacggtttcgtatggaggagttacgactaacctctacgacgtttgctctgaccggagacagtgctcacaatcaagccatggttcattggtcgggacataactcttctgtgattctgatactcacaaagctgtatgactataacctggggagcatcaccgaaagcagtctctggcgaagtaccgattacggtaccacttatgaaaaactgaatgataaggtcggcttaaaaactattctgtcttacctttacgtgtgccctaccaacaagcgcaagatcatgctgctcaccgatcccgaaattgagagctcactattaatttcgagtgatgagggtgccacataccagaagtatcggctcaatttttatatacagtcactgctcttccatcctaaacaggaggattggattctggcctacagccaggatcagaagctgtattcttccgcagagtttggtcggcggtggcaactcatacaagagggggttgtgcctaatcgtttctattggagcgtgatggggagcaacaaggagccggatctggtccatctcgaagcaaggaccgtagatggccatagccattacttgacatgtaggatgcaaaattgtaccgaggcaaatcggaaccagccattcccgggctatattgatcctgatagtctcatcgtgcaggaccattacgtgtttgttcaacttacatccggagggagaccccactactatgtttcctacagacgaaacgcttttgcccagatgaagcttccaaagtacgccttgcctaaggatatgcacgtcataagtaccgatgagaatcaagtgtttgccgcagttcaagaatggaatcagaatgatacctacaacctctatatatcagacacacgaggcgtttactttacgctcgcactcgaaaacgttcagtcttctcgcggaccagaaggaaatattatgattgatctttatgaggttgctgggattaagggcatgtttctcgcaaacaagaaaattgataatcaggtcaaaacattcatcacttacaacaagggccgggactggcggttactgcaggccccggacacagacctgcgcggagatccagtgcactgtctgctcccttactgcagtttgcacttgcatcttaaagtctcggaaaatccctacacgtcaggtattattgcaagcaaggatactgccccttccatcatcgtagcctccgggaatatcggaagtgagctctccgataccgacatctcaatgtttgtcagtagtgacgctggaaatacctggaggcaaatatttgaggaggagcactccgtactgtatttggaccagggcggagtgcttgtggccatgaagcatacctcccttccgatcaggcatctctggctctctttcgatgagggcaggtcatggtcgaagtactcgttcacttccattccgctgtttgtggatggtgttttgggcgagccaggcgaggaaacactgataatgactgtgtttgggcacttttctcatcggagtgagtggcagttggtgaaagtggattataagtccatatttgaccgcagatgcgcagaggaggactaccgaccttggcagttgcactctcaaggtgaagcatgcattatgggcgcaaagcggatttataagaagagaaagtctgaaagaaagtgtatgcaaggaaaatatgccggtgctatggagtccgaaccgtgtgtgtgtacagaagccgacttcgattgtgactacggatatgagcgacacagtaacggccaatgtctgccggcgttctggttcaacccatcttccctatcgaaggactgctccctgggtcagtcatatctgaacagcactgggtatagaaaggttgtgtctaacaactgcaccgacggggtgagagagcagtacactgccaagccgcaaaaatgtcccggtaaagcgccccgagggttgcggatcgttacagccgacggcaaactgacagcggagcaaggccacaacgtcactctgatggtgcagttggaggaaggcgacgtccagagaacattaatccaggtggacttcggagatggcatcgccgtgtcttatgtcaacctgagtagtatggaggacggaattaaacatgtgtatcagaacgttggcattttccgagtgaccgtgcaagtagacaattccctgggaagcgacagcgccgtcctatatttgcacgtcacttgccccctagagcatgtacacctgagtctgccattcgtaaccactaagaataaagaagtgaatgcgactgccgtgctgtggccctctcaagtcggaactttgacttacgtctggtggtacggtaacaacaccgaacccttgatcaccctcgagggatccatcagcttcaggttcacatccgaaggtatgaacacaatcaccgtgcaggtgtcagccggtaacgctattttgcaggacacaaaaaccatcgccgtctatgaagagtttcgatcacttcgcctgagcttctcccccaatcttgatgactacaacccggatataccggaatggcgcagggacattgggcgtgttatcaagaaatctctcgtcgaggccaccggtgttcccggccagcacattctggtggccgtgctacccggactcccaaccacagcggaacttttcgtcctgccttaccaggaccccgctggagagaacaagcgaagcaccgatgacctggagcagatctccgaactccttattcatacgctgaaccagaattcagtccactttgagctcaaacctggggtacgggtccttgtgcacgctgctcacctcacagccgcccccttggtagacctgaccccaacacactccgggagcgctatgctaatgctcctgtctgttgtctttgtcgggctcgcagtgtttgtcatatataaatttaaacggagagtcgctctcccatcgccaccttccccctcaacacagccgggagatagtagtctgcggctccagcgggccaggcatgcaacccccccatccaccccaaagcgcggatcagctggggcacaatacgcaatctag

SEQ ID NO: 229661 - DNA, 3507 bp, Artificial Sequence
  derived and/or modified sequence
atgggtaaagtcggcgctggcggtggatcgcaagcccgtctatcagcactcctggctggtgcaggcctcctcattctgtgcgcgcctggcgtttgtggaggagggagttgctgtcctagccctcatccttcttccgcccctaggtctgcttcaactccaaggggcttctcacatcagggacggccagggcgtgccccagcaacaccactgcccctggtggtgcggcctctttttagcgtcgcacctggggatcgggctctgtcgttggaacgagccaggggcactggtgcatctatggcagtggcggcacgatcaggacgtaggcggaggtcaggtgccgaccaggagaaggccgaacgaggggaaggtgcctctcgcagccccaggggcgtgctccgagatggagggcagcaggagcctggcacacgggaacgtgaccctgacaaagcgacacggtttagaatggaggagctgaggctaactagtactaccttcgccttgacgggagattcagcacacaaccaagcaatggtgcactggtccgggcacaatagctctgtcattctcattctgaccaagctctacgactataatctaggtagcattacagagtcaagcttatggcggagtaccgattatggaaccacgtacgagaagctgaacgacaaagtgggtcttaagactattctgagctatctctatgtgtgtccaaccaataaaagaaaaattatgctgctcacagatccagagatcgagtcgagcctcctcatttcatccgatgaaggagctacctatcagaaatacaggttaaacttttacattcagtccttgctgttccaccctaaacaggaggactggatcctggcatattcccaggatcagaaactgtactccagcgctgagttcggcaggcggtggcagctgattcaagaaggagtggtgccaaaccgcttctactggtctgttatgggctctaacaaagaaccggatctcgtgcatctcgaagctcgcaccgtagatggccattctcactacctgacatgtcgcatgcagaattgcactgaagcgaatcgtaaccagcctttccccggatatatagaccccgattcacttatcgttcaggatcattatgtattcgtccagttgactagcgggggaaggcctcactactatgtatcatacaggcgcaatgcctttgctcagatgaaactaccaaaatatgcccttccgaaagatatgcacgtgatcagcaccgatgaaaatcaggtattcgcagccgttcaggagtggaatcaaaatgatacctacaacctgtacatctctgacacccggggagtgtatttcaccttggcattagaaaacgtgcagtcaagtagaggaccagagggcaatatcatgattgacctttacgaggtggctggaattaagggaatgttcctggccaataagaaaatcgacaatcaagtcaagacctttataacatataataagggcagagactggagactgctgcaggcacctgataccgatctccgcggagacccagtgcactgcctccttccctattgtagcctgcacctccatttgaaggtgtctgagaatccctacacatctggaattatcgcttccaaggacacggctcctagtattatcgtggcctctgggaatatcggctccgaactgtctgacactgatatttcaatgtttgttagctccgacgccggtaacacctggaggcaaatctttgaggaggaacactccgtgctatacctagaccagggcggagtcctcgttgctatgaagcacacttcgcttcccatccgtcatctgtggcttagtttcgatgagggtaggagctggtcgaagtatagtttcacatccattccgttatttgtggacggagttctgggggagcccggtgaagagaccctcataatgaccgtcttcggccacttcagccatcgctcagaatggcaactggtgaaggtggattacaagagcattttcgaccgccgatgtgcggaggaagactatcggccttggcagttacactcacagggtgaggcgtgcatcatgggagccaaacgtatttacaagaagagaaaaagcgagcgcaaatgcatgcagggcaagtatgctggggcaatggagagtgagccttgtgtgtgcaccgaggccgactttgactgcgattatgggtacgagaggcactccaatggccagtgcctccccgcattctggtttaaccccagctctctctctaaagattgcagccttgggcagagctatttaaacagcacaggatacagaaaggtagtgtctaataactgcaccgacggcgtccgtgagcaatatacagccaaaccccaaaagtgcccaggcaaggcacccaggggtttgaggatagttactgccgatggtaagctcacagccgaacagggacacaatgtgacacttatggttcagctagaagaaggagatgtgcagaggaccctgattcaggtggactttggggatggtatcgcagtgagctatgtgaatctgtcttctatggaagacggcattaagcatgtctaccagaatgtcggaatttttagggtcaccgtccaggtcgataactccctgggatccgactccgccgtcctttatctgcacgtgacctgccccctagagcacgtgcacctctcattgccattcgtgaccactaaaaataaagaagtcaatgcaacagcagttctgtggccaagtcaagtcggtaccctcacatacgtgtggtggtatggtaataacactgagcctctgatcacactggagggaagtatctcttttaggtttacctcggaaggcatgaacaccatcactgtccaggtgagcgcgggtaatgccatcctccaggacacaaagacgatagcagtgtatgaagaattccggtccttgaggctgtccttctcccccaatctcgatgattacaacccggatatcccagaatggagacgtgatatcggaagggtgattaagaaatctctggtggaggcaactggggtgcctggccagcacatcctggtcgctgtcctgcctggcctgcccacaacggcagaattgttcgtgctcccttaccaggatcccgcaggggagaataaacggagcacagatgatctggagcaaataagtgaactgttaatccacactctgaaccagaacagcgtccacttcgagctcaagccaggggtacgggtactcgttcatgccgctcatctcacggccgctcctctggtagaccttacaccaacccatagtggaagcgctatgctgatgttgctgtctgtggtgttcgtcggcctggcagttttcgtgatttataagttcaaaagaagagttgcactgccatccccaccttctccttctacccagccaggtgacagctctttgaggctccaacgtgccagacatgctactcccccttccacccctaaaagaggttccgctggggctcagtatgctatctag

SEQ ID NO: 229662 - DNA, 3751 bp, Artificial Sequence
  derived and/or modified sequence
ctcccgcgatgggaaaagttggcgccggcggcggctcccaagcccggctgagcgcgctcctcgccggcgcggggctcttgatcctctgcgccccgggcgtctgcggcggcggctcctgctgcccctcgccgcaccccagctccgctccacgctcggcctcgacccctaggggcttttcccaccaggggcggccaggcagggctcctgccacgcccctgcccctcgtagtgcgtcccctgttctcagtggcccccggggaccgagcgctatccctggagcgggctcggggcactggggcatccatggcggttgctgcacgctccggccggaggagacggagcggagcggatcaggagaaggcagaacggggagagggcgcgagtcggagcccccggggagtgctaagagatggagggcagcaggagcctgggactcgggagcgggacccggacaaagccacccgcttccggatggaggagctgagactgaccagcaccacgtttgcgctgacgggagactcagcacacaaccaagccatggtccactggtctggccacaacagcagcgtgattctcattttgacaaagctctatgactataacctggggagcatcacagagagctcgctttggaggtcaaccgattatggaacaacctatgagaagctgaatgataaagttggtttgaaaaccattttgagctatctctatgtgtgtcctaccaacaagcgtaagataatgttactcacagacccggagattgagagcagtttattgatcagctcagatgaaggggcaacttatcaaaagtaccggctgaacttctacattcaaagcttgctttttcaccccaaacaagaagactggattctggcatacagtcaagaccaaaagttatacagctctgctgaatttgggagaagatggcagcttatccaagaaggggttgtaccaaacaggttctactggtctgtgatggggtcaaataaagaaccagaccttgtgcatcttgaggccagaactgtggatggtcattcacattatctaacttgccgaatgcagaactgtacagaggccaacaggaatcagccttttccaggctacattgacccagactctttgattgttcaggatcattatgtgtttgttcagctgacatcaggagggcggccacattactacgtgtcctaccgaaggaatgcatttgcccaaatgaagcttccgaaatatgctttgcccaaggacatgcatgttatcagcaccgatgagaatcaggtgttcgcagcggtccaagaatggaaccagaatgacacgtacaacctctacatctcagacacacgtggtgtctacttcaccctggccttggagaatgtccagagcagcagaggccctgagggcaacatcatgatcgacctctatgaggtagcagggataaagggaatgttcttggctaacaagaagattgacaaccaagtgaagactttcatcacatataacaaaggcagagactggcgtttgctgcaggcgccggacacggatctaaggggggaccccgtgcactgcttgctgccctattgctcactacaccttcacctgaaggtctctgagaatccctacacatcagggatcattgccagcaaagacacagctccaagcatcatagtggcatcaggtaatataggttctgaattgtcagacactgacatcagcatgtttgtctcttcagatgcagggaacacctggagacagatctttgaagaagagcacagtgttttgtacctggatcaaggtggagtcctggttgctatgaaacacacatctctcccaattcgacatctttggttgagttttgatgaagggagatcttggagcaaatacagtttcacatctattccactttttgtggatggggttctgggtgagcctggagaagagactctcatcatgacagtgtttggacacttcagccaccgctctgaatggcagctggtcaaagtagattacaagtccatttttgatagacggtgtgccgaagaggactacagaccttggcagctgcacagccagggggaagcatgtatcatgggagcaaaaaggatatataagaagcgaaaatcagagcggaagtgtatgcaaggaaaatatgcaggagctatggaatctgaaccctgtgtctgcactgaggctgattttgattgcgactatggttatgagcgacacagcaatggccagtgcctgccggcattttggttcaatccatcctctctgtcaaaggattgcagcttgggacagagttacctcaatagtactgggtacaggaaggtggtttccaataattgcactgatggcgtaagggaacagtacactgccaaaccgcagaagtgcccagggaaagccccgcgggggctgcggatagtcacggctgatggaaagctgacagcggaacaaggacacaacgtcactctcatggtgcaattagaagagggtgatgttcagcggacactcatccaagtggactttggcgatggtatcgcggtgtcttacgtcaatctcagctccatggaagatgggatcaaacacgtctatcagaacgtgggcattttccgtgtgaccgtgcaggtggacaacagtctgggttctgacagcgccgtcctgtacttacatgtaacttgtcccttggagcacgtgcacctgtctcttccctttgtcaccacaaagaacaaagaggtcaatgcgacggcagtgctgtggcccagccaagtgggcaccctcacttacgtgtggtggtacggaaacaacacggagcctttgatcaccttggagggaagcatatccttcagatttacttcagaaggaatgaataccatcacagtgcaggtctcagctgggaatgccatcctacaagacacaaagaccatcgcagtatatgaggaattccggtctcttcgcttgtccttttctccaaacctggatgactacaacccggacatccctgagtggaggagggacatcggtcgagtcatcaaaaaatccctggtggaagccacaggggttccaggccagcacatcctggtggcggtgctccctggcttacccaccactgctgaactctttgtcctaccctatcaggatccagctggagaaaacaaaaggtcaactgatgacctggagcagatatcagaattgctgatccacacgctcaaccaaaactcagtacacttcgagctgaagccaggagtccgagtccttgtccatgctgctcacttaacagcggcccccctggtggacctcactccaacccacagtggatctgccatgctgatgctgctctcagtggtgtttgtggggctggcagtgttcgtcatctacaagtttaaaaggagagtagctttaccctcccctccctccccttctactcaacctggtgactcatctctccgattgcaaagagcaagacacgccactccgccttcaacgccaaagcggggatctgctggggcacagtatgcaatttaaggaaaacccccaaaggctacaggcgacctgctgatcaggaaagaatttcgctcttgtcaagtacatcatccttcatgaccactaactttgtgttttttttctttcctttgttgttctgtttcctattttgccaggaagtatttccatagttgctgagaatcaaagcacaaaagaaatccctacctatgtaaatgtttgaatggaggacgccagtaaaaaaacaaaaacaaaaacaa

SEQ ID NO: 229663 - protein, 875 aa, Artificial Sequence
  derived and/or modified sequence
MSRHHSRFERDYRVGWDRREWSVNGTHGTTSICSVTSGAGGGTASSLSVRPGLLPLPVVPSRLPTPATAPAPCTTGSSEAITSLVASSASAVTTKAPGISKGDSQSQGLATSIRWGQTPINQSTPWDTDEPPSKQMRESDNPGTGPWVTTVAAGNQPTLIAHSYGVAQPPTFSPAVNVQAPVIGVTPSLPPHVGPQLPLMPGHYSLPQPPSQPLSSVVVNMPAQALYASPQPLAVSTLPGVGQVARPGPTAVGNGHMAGPLLPPPPPAQPSATLPSGAPATNGPPTTDSAHGLQMLRTIGVGKYEFTDPGHPREMLKELNQQRRAKAFTDLKIVVEGREFEVHQNVLASCSLYFKDLIQRSVQDSGQGGREKLELVLSNLQADVLELLLEFVYTGSLVIDSANAKTLLEAASKFQFHTFCKVCVSFLEKQLTASNCLGVLAMAEAMQCSELYHMAKAFALQIFPEVAAQEEILSISKDDFIAYVSNDSLNTKAEELVYETVIKWIKKDPATRTQYAAELLAVVRLPFIHPSYLLNVVDNEELIKSSEACRDLVNEAKRYHMLPHARQEMQTPRTRPRLSAGVAEVIVLVGGRQMVGMTQRSLVAVTCWNPQNNKWYPLASLPFYDREFFSVVSAGDNIYLSGGMESGVTLADVWCYMSLLDNWNLVSRMTVPRCRHNSLVYDGKIYTLGGLGVAGNVDHVERYDTITNQWEAVAPLPKAVHSAAATVCGGKIYVFGGVNEAGRAAGVLQSYVPQTNTWSFIESPMIDNKYAPAVTLNGFVFILGGAYARATTIYDPEKGNIKAGPNMNHSRQFCSAVVLDGKIYATGGIVSSEGPALGNMEAYEPTTNTWTLLPHMPCPVFRHGCVVIKKYIQSG

SEQ ID NO: 229664 - DNA, 2628 bp, Artificial Sequence
  derived and/or modified sequence
atgagcagacaccacagcagattcgagagagactacagagtgggctgggacagaagagagtggagcgtgaacggcacccacggcaccaccagcatctgcagcgtgaccagcggcgccggcggcggcaccgccagcagcctgagcgtgagacccggcctgctgcccctgcccgtggtgcccagcagactgcccacccccgccaccgcccccgccccctgcaccaccggcagcagcgaggccatcaccagcctggtggccagcagcgccagcgccgtgaccaccaaggcccccggcatcagcaagggcgacagccagagccagggcctggccaccagcatcagatggggccagacccccatcaaccagagcaccccctgggacaccgacgagccccccagcaagcagatgagagagagcgacaaccccggcaccggcccctgggtgaccaccgtggccgccggcaaccagcccaccctgatcgcccacagctacggcgtggcccagccccccaccttcagccccgccgtgaacgtgcaggcccccgtgatcggcgtgacccccagcctgcccccccacgtgggcccccagctgcccctgatgcccggccactacagcctgccccagccccccagccagcccctgagcagcgtggtggtgaacatgcccgcccaggccctgtacgccagcccccagcccctggccgtgagcaccctgcccggcgtgggccaggtggccagacccggccccaccgccgtgggcaacggccacatggccggccccctgctgcccccccccccccccgcccagcccagcgccaccctgcccagcggcgcccccgccaccaacggcccccccaccaccgacagcgcccacggcctgcagatgctgagaaccatcggcgtgggcaagtacgagttcaccgaccccggccaccccagagagatgctgaaggagctgaaccagcagagaagagccaaggccttcaccgacctgaagatcgtggtggagggcagagagttcgaggtgcaccagaacgtgctggccagctgcagcctgtacttcaaggacctgatccagagaagcgtgcaggacagcggccagggcggcagagagaagctggagctggtgctgagcaacctgcaggccgacgtgctggagctgctgctggagttcgtgtacaccggcagcctggtgatcgacagcgccaacgccaagaccctgctggaggccgccagcaagttccagttccacaccttctgcaaggtgtgcgtgagcttcctggagaagcagctgaccgccagcaactgcctgggcgtgctggccatggccgaggccatgcagtgcagcgagctgtaccacatggccaaggccttcgccctgcagatcttccccgaggtggccgcccaggaggagatcctgagcatcagcaaggacgacttcatcgcctacgtgagcaacgacagcctgaacaccaaggccgaggagctggtgtacgagaccgtgatcaagtggatcaagaaggaccccgccaccagaacccagtacgccgccgagctgctggccgtggtgagactgcccttcatccaccccagctacctgctgaacgtggtggacaacgaggagctgatcaagagcagcgaggcctgcagagacctggtgaacgaggccaagagataccacatgctgccccacgccagacaggagatgcagacccccagaaccagacccagactgagcgccggcgtggccgaggtgatcgtgctggtgggcggcagacagatggtgggcatgacccagagaagcctggtggccgtgacctgctggaacccccagaacaacaagtggtaccccctggccagcctgcccttctacgacagagagttcttcagcgtggtgagcgccggcgacaacatctacctgagcggcggcatggagagcggcgtgaccctggccgacgtgtggtgctacatgagcctgctggacaactggaacctggtgagcagaatgaccgtgcccagatgcagacacaacagcctggtgtacgacggcaagatctacaccctgggcggcctgggcgtggccggcaacgtggaccacgtggagagatacgacaccatcaccaaccagtgggaggccgtggcccccctgcccaaggccgtgcacagcgccgccgccaccgtgtgcggcggcaagatctacgtgttcggcggcgtgaacgaggccggcagagccgccggcgtgctgcagagctacgtgccccagaccaacacctggagcttcatcgagagccccatgatcgacaacaagtacgcccccgccgtgaccctgaacggcttcgtgttcatcctgggcggcgcctacgccagagccaccaccatctacgaccccgagaagggcaacatcaaggccggccccaacatgaaccacagcagacagttctgcagcgccgtggtgctggacggcaagatctacgccaccggcggcatcgtgagcagcgagggccccgccctgggcaacatggaggcctacgagcccaccaccaacacctggaccctgctgccccacatgccctgccccgtgttcagacacggctgcgtggtgatcaagaagtacatccagagcggctag

SEQ ID NO: 229665 - DNA, 2628 bp, Artificial Sequence
  derived and/or modified sequence
atgtccagacatcacagccgctttgaacgagactatcgggtagggtgggaccggcgtgaatggtctgtgaatggaacgcatggcaccacatcgatctgttcggtgacctccggggccggaggcggcacagccagttcgctctcagttaggccagggctgctgccactacctgtggtcccatctcgtctgcccacaccggctacagctcctgccccgtgtaccacgggaagcagcgaagccataacgtccctagtggcatccagtgcttcagccgtcaccacaaaagcaccaggtatctcaaaaggggacagtcagtcccagggactggctacaagcattagatggggccagactccaattaaccaaagcactccgtgggatacggacgaaccaccaagcaagcaaatgagagaatcagataaccctggcacaggaccctgggtgacaacggttgccgctggcaatcagccaacgctcattgcccattcatatggggtggcacaaccacccaccttcagcccagcggtcaacgtccaagctccggtgattggcgttacaccctcactgcctccacacgttggaccacagctccctctgatgccgggacactatagccttcctcagccaccatctcagccacttagctctgtggttgtcaatatgccagcccaggcgctctatgcgtcaccgcagccactggccgtcagcaccctgccaggggtgggccaggtggcacggccaggccccacagctgtggggaatggtcatatggcagggccattgttacccccaccgcccccagcccagccttccgcaaccttaccctctggagccccagccaccaacgggccgcctaccacagactctgcacatggattacaaatgctacgaacaatcggcgtgggaaagtacgaatttaccgatccgggccacccccgagaaatgcttaaagaacttaaccagcaacgacgcgcaaaggcttttacagatctgaagatcgtggtggaagggcgggaattcgaggtgcaccaaaatgtgcttgcttcctgtagtctgtacttcaaagatcttatccagcgatccgtgcaggatagtggtcaggggggccgggaaaaactggagcttgtgctttcaaatctgcaggcagatgtcctggagctgctccttgagtttgtttacaccggctctttagtgatcgattcggccaacgctaaaaccctactcgaagctgcaagtaaattccagtttcacacattttgtaaggtctgcgtctccttcctggaaaagcagctcactgccagcaattgtctcggggtcctcgctatggcagaagccatgcagtgtagtgagttataccatatggccaaggcgttcgccctacagatcttccctgaggtggccgcccaggaggagatcctctccatctctaaggatgacttcatcgcgtacgtgtctaatgatagtctgaacaccaaagcagaagaactggtttacgaaactgtcatcaagtggattaagaaggatccagcaacacgcacgcaatacgcggccgaattgttagcagtcgtcaggttgcccttcattcatccttcttatctacttaatgtggtggataatgaagaactgataaaaagttcggaggcttgtagggatttggttaacgaagcaaagcgctatcacatgttgccccatgcacggcaggaaatgcagactccgcgcactcgtccacggctgagcgccggggtggcggaagttattgtgctcgttgggggtcgtcagatggtaggaatgactcagagaagcttggtagcagttacctgctggaaccctcagaacaataagtggtaccctctggcctcccttccattctatgacagagaattcttttcagtagtcagtgccggtgacaatatttacctgagtggaggcatggagagtggagtcactttggcggacgtctggtgctacatgtcccttctggataactggaatctcgtctcccgcatgacagtgccccggtgcaggcacaattctttagtgtatgacggtaagatctacaccctaggcggcctcggtgtggccggaaacgtggaccacgtcgaacgttacgatacaatcactaaccagtgggaggcagtcgctcctctgcccaaggcggtgcattctgcagctgccacagtctgtggaggtaagatttacgtgtttggcggtgtcaatgaggctggcagagctgctggcgtcttacagagttacgtgcctcaaactaacacatggtcatttatcgaaagcccaatgatcgacaacaagtacgcccctgcagtgacattgaatgggttcgtgttcatcttgggtggtgcatatgctcgggctaccaccatttacgatccagaaaaagggaatatcaaggctggtcccaacatgaatcactcaaggcagttctgtagcgcagtggtgcttgacggaaaaatctatgccacaggtggcattgtgagctcagaaggccctgctttaggcaatatggaggcctatgagcccacgacgaacacgtggactctgctcccacacatgccctgccctgtgtttagacatggctgcgtggttatcaaaaagtacattcaatcaggctag

SEQ ID NO: 229666 - DNA, 2628 bp, Artificial Sequence
  derived and/or modified sequence
atgagccgccaccacagcagatttgagcgggactacagagtgggctgggaccggcgggagtggagcgtgaatggcacccacggcaccaccagcatctgcagcgtgaccagcggggccggcggcggcacagccagcagcctgtctgtgcggcccggcctgctgcccctgcctgtggtgcccagccggctgcccaccccagccacagccccagccccctgcaccaccggcagcagcgaggccatcaccagcctggtggccagcagcgccagcgctgtgaccaccaaggcccctggcatcagcaaaggagacagccagagccagggcctggccaccagcatccgctggggccagacccccatcaaccagagcaccccctgggacacagatgagccccccagcaagcagatgagggagagtgacaaccctggcaccggcccctgggtgaccaccgtggccgccggcaaccagcccaccctcatcgcccacagctatggagtggcccagccccccaccttcagccctgctgtgaatgtgcaggcccctgtgattggagtgacccccagcctgcccccccacgtgggcccccagctgcccctgatgcctggccactacagcctgccccagccccccagccagcccctgagctctgtggtggtgaacatgcctgcccaggccctgtatgccagcccccagcccctggccgtgtccaccctgcccggggtgggccaggtggcccggcccggccccacagctgtgggcaatggccacatggccggccccctgctgcccccacctcctccagcccagcccagcgccaccctgcccagcggggccccagccaccaacggcccccccaccacagattctgcccacggcctgcagatgctgcggaccatcggcgtgggcaagtatgagttcacagatcctggccacccccgggagatgctgaaggagctgaaccagcagaggcgggccaaggccttcacagacctgaagatcgtggtggagggccgggagtttgaggtgcaccagaatgtgctggccagctgcagcctgtacttcaaggacctgatccagaggtctgtgcaggacagcggccagggcggccgggagaagctggagctggtgctgagcaacctgcaggctgatgtgctggagctgctgctggagtttgtgtacacaggcagcctggtgattgattctgccaatgccaagaccctgctggaggccgccagcaagttccagttccacaccttctgcaaggtgtgtgtgtccttcctggagaagcagctgacagccagcaactgcctgggcgtgctggccatggccgaggccatgcagtgcagcgagctgtaccacatggccaaggcctttgccctgcagatcttccctgaggtggccgcccaggaggagatcctgagcatcagcaaggatgacttcatcgcctacgtgtccaatgacagcctgaacaccaaggccgaggagctggtgtatgagaccgtcatcaagtggatcaagaaggaccctgccaccaggacccagtatgctgctgagctgctggccgtggtgcggctgcccttcatccaccccagctacctgctgaatgtggtggacaatgaggagctgatcaagagcagcgaggcctgccgggacctggtgaatgaggccaagcgctaccacatgctgccccacgcccggcaggagatgcagacccccaggacccggccccggctgtctgctggggtggccgaggtgattgtgctggtgggcggccggcagatggtgggcatgacccagaggagcctggtggccgtgacctgctggaacccccagaacaacaagtggtaccccctggccagcctgcccttctatgaccgggagttcttctctgtggtgtctgctggggacaacatctacctgagcggcggcatggagagcggcgtgaccctggctgatgtgtggtgctacatgagcctgctggacaactggaacctggtgtccaggatgacagtgccccgctgccgccacaacagcctggtgtatgatggcaagatctacaccctgggcggcctgggcgtggccggaaatgtggaccacgtggagagatatgacaccatcaccaaccagtgggaggccgtggcccccctgcccaaggctgtgcacagcgctgctgccaccgtgtgtggcggcaagatctacgtgtttggaggagtgaatgaagctggccgggctgctggggtgctgcagagctatgtgccccagaccaacacctggagcttcatcgagagccccatgattgacaacaagtatgccccagctgtgaccctgaatggatttgtgttcatcctgggcggggcctatgcccgggccaccaccatctatgaccctgagaagggcaacatcaaggccggccccaacatgaaccacagccggcagttctgcagcgctgtggtgctggatggcaagatctatgccaccggcggcatcgtgagcagcgagggccctgccctgggcaacatggaggcctatgagcccaccaccaacacctggaccctgctgccccacatgccctgccctgtgttcagacatggctgtgtggtgatcaagaagtacatccagagcggctag

SEQ ID NO: 229667 - DNA, 5287 bp, Artificial Sequence
  derived and/or modified sequence
ggtccccgcgccgcggccgcgccagcccccgcgccgccgccgccgtccccgccaccgcggatctcgccgcagctccagccccggccccggctccgcagcgcccgtccgcagccccggcggtcgccgcgcttgagcgcagcccccgcccggagcccgagccgcgagcccggagccagccccagccccgcggccgccgcggctgcggggagagggcgggggcgatgctgccggagccgccgccgccgccgccgcctcgatgagagccgcgccgcaccgctcatagccgcacaggctgacaggcaggaggaccgacttccctctcccgggcatcctccctgggctgccgggaggcggcggcggcggaggaggaggaggaacgaggggagaaggcggagagcaggaacgcgaggaggaggacctggatccgtttcctccggccaggacccgagcggccccagccaccgctacccgccggcgctgtccgctctccatcagccctcctgcgcccacccgcgaccccgggctctctgcgcgtcgggccggggccggagccgcgcgccggagactatctggcttcctggtgatgctcacgctttgctaagtgttggcggccatcgtggttttcgcatcctggggacgaatcctgagcttgccagagacgggcggcgcaaggtccgggctctgtttccctgtgagaagccgcctcggcccaccgagatgtcccggcaccatagccgcttcgaaagagattaccgggtgggctgggaccgccgcgaatggagcgtcaacgggacgcatgggaccaccagcatctgcagtgtcacctcgggggccggtggcggcacagccagcagcctcagcgtccggcccggcctcctgccgctgcccgtggtgccctcccggctgcccaccccggctacagctcctgctccctgcaccaccggcagcagcgaggccatcaccagcctcgtggccagctctgcgtctgcggtcaccaccaaggctcccggcatctccaaaggggacagtcagtcccagggactggcgaccagcatccggtgggggcagacgcctatcaatcagtccacaccctgggacactgatgagccaccctccaaacagatgagagagagtgacaatccaggcacagggccatgggtgaccacggtggccgccgggaaccagcccaccctgattgcacactcctatggagtggcccagcctcccaccttcagcccggctgtgaacgtccaggccccggtcattggggtgaccccctcactgcctccccacgtggggccccagctcccgctgatgccaggccactactcgctccctcagccgccctctcagccactgagcagcgtggtggtcaacatgcctgcccaggccctgtatgccagccctcagcccctggccgtgtccacactgcccggtgtggggcaggtggcccgcccaggacccaccgctgtgggcaacggccacatggcagggcccctgctgcctccaccgccgccagcccagccgtccgccactctccccagtggtgcccctgccaccaatgggccccccacaaccgactcggcccacgggctgcagatgctgcggaccattggcgtggggaagtatgagttcaccgacccggggcaccccagagaaatgttgaaggaattgaaccagcaacgcagagcgaaagcgtttacagacctgaaaattgttgttgaaggcagagagtttgaagtccaccaaaatgttctagcttcctgcagcttgtatttcaaggacctgattcaaaggtccgtgcaagacagcggccagggcggccgggagaagctggagctcgtcctgtcgaacctgcaggcagacgtcctggagttgctgctggagtttgtctacacgggctccctggtcatcgactcggccaacgccaagacactgctggaggcggccagcaagttccagttccacaccttctgcaaagtctgcgtgtcctttctcgagaagcagctgacggccagcaactgcctgggcgtgctggccatggccgaggccatgcagtgcagcgagctctaccacatggccaaggccttcgcgctgcagatcttccccgaggtggccgcccaggaggagatcctcagcatctccaaggacgacttcatcgcctacgtctccaacgacagcctcaacaccaaggctgaggagctggtgtacgagacagtcatcaagtggatcaagaaggaccccgcgacacgcacacagtacgcggctgagctcctggccgtggtccgcctccccttcatccaccccagctacctgctcaatgtggttgacaatgaagagctgatcaagtcatcagaagcctgccgggacctggtgaacgaggccaaacgctaccatatgctgccccacgcccgccaggagatgcagacgccccgaacccggccgcgcctctctgcaggtgtggctgaggtcatcgtcttggttgggggccgtcagatggtggggatgacccagcgctcgctggtggccgtcacctgctggaacccgcagaacaacaagtggtaccccttggcctcgctgcccttctatgaccgcgagttcttcagtgtagtgagtgcaggggacaacatctacctctcaggtgggatggaatcaggggtgacgctggctgatgtctggtgctacatgtccctgcttgataactggaacctcgtctccagaatgacagtcccccgctgtcggcacaatagcctcgtctacgatgggaagatttacaccctcgggggacttggcgtggcaggcaacgtggaccacgtggagaggtacgacaccatcaccaaccaatgggaggcggtggcccctctgcccaaggcagtacactctgctgcagccacagtgtgtggcggcaagatctacgtgtttggtggggtgaacgaggcaggccgagctgccggcgtcctccagtcttacgttcctcagaccaacacgtggagcttcatcgagtccccaatgattgacaacaagtatgcccccgctgtcacgctcaatggcttcgttttcatcctgggcggggcttatgccagagctaccaccatctacgaccctgagaaaggaaacattaaggcgggcccaaacatgaaccactctcgccagttctgcagtgctgtggtgcttgatggcaagatttatgcaactggaggtattgtcagcagtgaagggcccgcgctgggcaacatggaggcctacgagcccacaaccaacacatggaccctcctcccccacatgccctgccctgtgttcagacacggctgcgtcgtgataaagaaatatattcaaagcggctgacatcagcagaaagcccacgataagactgtggacaagtctggtgaggcaagtgccacgcaatgataattttccagcgacaccaacaagaggccaacaaaacacaatcaaggaactcactgcgctcaacatgttgaatattctctacattgaatgtagaaaatcatcctcgcctttggatgaaacggaggcaccgcgcttggagccgcaggaaccacgatcccgccatggggctggctgcctcctgaacaggggcgctcgctctgccaggtgcaatagagtttcacgtatttttcaactgggagagagaagctgttttttccttcctgcagagcaagcttgatccctaaacaaccatagatcagttatcttatgacaacattaggcatcaggctctcttggaataagatcaaagtgtccttatcactttgattcctacttttgttttttaaccgatctacactttcagtggccgacagaaaacgagggacaatactgtgcatcacaaggcctaggaggctgctggtccccactggggctgaagagaagcccagctgcccacgcggagccaggggtggcagctgtgggacagccggggagcagggacagcggtctgtccttcacaggtttttctactgtgtttttgctggagaaggacagtgattgcgctagctttctcttacccggtatgaattatttagatttctgaggcattttcttgataaacaaaaggctatttttaagtactgagaggaggagcaggccacaagagggataatgttgtgggaattcccaaagctctttgtaggtagtgccagaggggggcttttgctctcatttttctatgtgcagaatagaggatctctcctggggtgggcgatgcccccattttatttttagaaaaagtaactcccagacagccccataaaagctgtgcccaaggaagaagagtctgctctagaaggagcccggttctggctcaggacaccggcccagctccctccatgaggtcaagctgaggaccaggccagtgggaagggaaggagggagaattagcgtctataaagcacaggagactatttttgatattcatagctatatattaaggcacctgccacaagagctctcaggatggggacagccttcttagtggagccatggcagcaaggcctgagggcatgaacagaaccactcttcttgtcacatacgaacctgagaaaagggaagccaggagggaggtcacaccatggctcaaaagggaaaggccttcccacttgtccttagcccctcaaacctcacacggtcaacagtttccattccagggcaggagaatgctgccgccactgcgctgttgagttgaagttggtaccaaatacacatttaccacttttatatctgggaagtcaacttgccatcgtttcatgataacaaccatttataagagaaaaagacaggacacgctttccatcgttcagtatttgatgacacaaaattccagttctaacgttgggcatcaacttctagcactacgagtgtggctcccacttggacaagataccgagcttcgttatgcagtttttaatattatttattattttaaaaagtaataagcacaaaactacatacattgtatgtcatttaaagtatttatgtcaaacagggtgcaagtgtgaacccaaggactggagcacaaattcctaactgcctggggcagggctaatgttagcattggtgtgcgtctgcctccaaaggaggttctagttgtcagcgagactcaacacagatgacattgaaattcgtttctctcctcatctatcacactggagcaaaactggctatttctgtgaatgatataaaacagggttctctgtaatggtattgtacatagtatatgtttactgttaagttcttgttatattataataaatatatttatagatctaga

SEQ ID NO: 229668 - DNA, 2628 bp, Artificial Sequence
  derived and/or modified sequence
atgagccggcaccacagccggttcgagcgggactaccgggtgggctgggatagacgggagtggtcagtgaacggaactcacggaacaacttccatttgctccgtgacatctggagcaggcggtggcacagccagttcactgagcgtgcggccgggcctccttcccctgcctgtggtgccgtcgcgcctacctacgcccgccacagccccagccccctgtaccactggatcctcagaagcaatcacctcgctcgtcgcttcttccgcctccgctgtgactacaaaggccccggggatttcaaagggggattcacagtcccaggggctggccacaagcatccgctggggccagactcccatcaaccaatctactccttgggacaccgatgaacccccctctaaacagatgcgggagtctgacaatccgggaacaggaccctgggtcacaacagtagcggccggcaaccagcccacgcttatcgcccactcctatggcgtggcacagccgccaaccttctctcccgccgttaatgtgcaagcacccgtaatcggcgtgaccccaagtctcccgcctcacgtgggtcctcaactacctttgatgccagggcactactccctaccgcagccaccatcccagccactatcatcggtcgtagtgaacatgccagctcaggctctgtatgcttcacctcagcctctcgcagtgtcgaccctgccaggggtaggacaggtcgcccgccccggcccaaccgccgtcgggaatggtcatatggcaggacccttactgccgccccccccgcctgctcagccaagcgccactctgcctagtggagccccagcaaccaatggaccccctactacagatagcgcgcacgggctacagatgctgaggacaatcggtgtgggaaaatacgaatttaccgacccagggcaccccagggagatgttgaaagagcttaatcagcagcggcgagccaaagcatttactgatcttaaaattgttgtcgaaggccgcgaatttgaagtgcatcaaaatgttctcgctagttgcagcctgtacttcaaggaccttattcagagaagcgtgcaggactctggccagggcgggcgcgaaaagctcgaactcgtcctgagcaaccttcaggccgacgttcttgaacttctgctcgagttcgtctacaccggctccctggtaatagattctgcaaatgccaagaccctgctggaggcagcttcaaagttccagttccataccttctgcaaagtatgtgtgagctttcttgaaaagcagctgaccgcatccaattgtctgggtgtgttggcaatggctgaggccatgcagtgtagtgagctctaccacatggcaaaggcatttgcactacaaatattccctgaggtggcagcccaggaggaaatcttgagcatcagcaaagacgactttatcgcgtatgtttctaatgacagtctcaacaccaaggccgaagagctcgtttatgaaacagtgatcaaatggattaagaaggatcccgccacacggacacagtatgcagctgagctcctcgccgtcgttagactgcccttcattcaccccagctatctccttaatgtggtggacaacgaggagctgattaaaagtagcgaggcatgtcgagaccttgtgaacgaagccaagcggtatcacatgctgccacacgcgaggcaggaaatgcagactccacgaactagacccaggctgtctgctggtgtcgctgaggtgatagtactggtcggtggaagacaaatggtggggatgactcagcgctccttggtggctgtcacatgttggaacccacaaaacaacaagtggtacccgctggcttcccttccattctacgatcgtgagtttttctccgtagtatccgctggcgacaacatctatcttagcgggggaatggagtctggggtgaccttggccgacgtgtggtgttacatgagcctgctggacaattggaacctcgtgtctcgcatgaccgtcccgcgctgccgccataattccctcgtttatgatggtaagatctatacgctggggggactgggagtggccggcaatgtcgatcatgtcgaacggtatgacacgattactaatcaatgggaagccgtagctcccctcccgaaggccgtgcactcggcggctgctaccgtctgtggaggcaaaatatacgttttcgggggggttaacgaagcaggccgtgctgccggggtgttgcaaagttacgtgccacagaccaatacatggtccttcatcgagtctcccatgatagacaataagtacgctccagcagtgaccctcaacgggttcgtctttatcttagggggagcctacgcacgtgcaacaacaatttacgaccctgagaaaggaaatatcaaggcagggcctaatatgaaccattctcgacagttctgcagtgctgtggttcttgatggaaagatctatgctaccgggggtatagtaagttccgaagggcccgccctgggcaacatggaggcctacgagcccacaaccaacacatggactctgctgcctcacatgccttgccctgtattccgacatggttgcgtcgttattaagaaatatatccagtccgggtag

SEQ ID NO: 229669 - DNA, 2628 bp, Artificial Sequence
  derived and/or modified sequence
atgtctcgacaccactcccgctttgaacgcgactacagggttggttgggacaggcgcgagtggtcagtgaatggcacccatggcactacatccatctgcagcgtgacatcaggtgctggcggtgggaccgcctcatccctatctgtacgcccaggtctgctgcccctcccggttgtaccgtccaggctgcctactcccgctaccgcaccagcaccttgcactaccggtagttcagaagcgattacatctctggtagcgtctagtgcttcggccgtcacaactaaggcgccagggataagtaagggagattcccaaagccagggcctggcaacttccatacgttggggtcaaacacccatcaaccagtctactccttgggataccgatgaacctcctagcaaacagatgcgagaatctgataaccccggaaccggaccctgggttacgacagtcgctgcgggtaaccagccaacattaatcgcccattcatatggcgtcgctcagcccccaacctttagccctgctgtgaatgtccaggcaccggtcatcggggtgacacctagtctgccaccccacgtgggaccccaactgccacttatgcctggccactatagtctcccacagccaccatcacaacccctgtccagcgtagtagtgaacatgcccgcacaagctctttacgcatccccccagccgctagccgtgagcaccctacctggcgttggacaggtggctaggcccggtccgaccgccgtgggcaatggccatatggctggaccacttctcccgcctccaccgcctgctcagccctctgccaccctgccatccggcgcacctgcaaccaacggccctcctactacagattccgcccacgggctgcagatgctcaggaccattggggtcggcaagtatgagtttaccgaccccggtcatccacgcgaaatgctcaaagaactgaaccaacagaggcgcgcaaaagcatttaccgacttgaaaatcgtggttgagggccgagaattcgaggtgcaccagaacgtgttagcctcttgtagtctttattttaaggatttgattcagagatccgtgcaggacagcggccagggcggacgagagaagctggagcttgtgctttcgaacttacaggcggacgtattggaacttctgctcgagttcgtatacaccggaagtctggtcattgacagcgctaacgctaagacactgctcgaggccgcatccaagttccaattccacaccttttgcaaggtctgtgtcagctttcttgaaaagcagctcactgccagtaattgcctaggtgtgctcgctatggcagaggcaatgcagtgcagcgaactgtatcacatggctaaagccttcgccctgcaaattttcccggaagtagctgcacaagaggagatcctctctatcagtaaggatgacttcattgcatacgtctccaatgatagcctgaacacaaaggctgaggaactcgtttacgagactgttattaagtggatcaaaaaagacccagctacgaggacacaatatgcagcagagctcctggctgttgtgcgcctgcccttcatccatccctcttacctgctgaatgtcgttgataatgaagaactgatcaaatctagtgaggcatgtagggatcttgtcaacgaagccaaacgctatcacatgcttcctcatgcccgacaggagatgcagactcctagaaccagacccagattgagcgctggagtagcagaagtgatcgtgctcgtggggggacgccaaatggttggtatgacccagcgaagcctcgttgccgtcacctgctggaacccccaaaataacaagtggtatccactcgcttccctccccttctatgatagagagtttttctctgtcgtgagtgctggagacaacatctacctctccggcggtatggagtccggggttactctcgctgatgtctggtgctacatgtctctcctcgacaattggaatttggtttcaagaatgaccgtgcctagatgcaggcacaacagcctagtgtacgacggcaaaatctatactctgggcggactaggggtggccggaaacgttgaccatgtggaaaggtacgacaccattacaaaccagtgggaagcagtagccccactaccaaaagcagtgcatagtgctgctgctactgtgtgtggcggtaaaatctacgtgttcgggggagtgaatgaggccggaagggcagccggagtgttgcaaagttacgttcctcagactaacacatggagcttcattgagtcaccaatgatcgataataagtacgcacctgctgtgactctgaacggatttgtttttatcttggggggtgcctatgctagggcaactaccatttatgacccagagaaaggtaatattaaggctggcccaaacatgaatcactctcggcagttttgctcagctgttgtcctcgacgggaagatatacgcaacaggagggatagtatcttccgaggggcctgcactgggcaacatggaagcttatgaacctacgacaaacacatggaccctcctgccccatatgccatgccccgtattccggcacggctgcgttgtgataaaaaaatatatacagagcggttag

SEQ ID NO: 229670 - protein, 670 aa, Artificial Sequence
  derived and/or modified sequence
MILEERPDGAGAGEESPRLQGCDSLTQIQCGQLQSRRAQIHQQIDKELQMRTGAENLYRATSNNRVRETVALELSYVNSNLQLLKEELEELSGGVDPGRHGSEAVTVPMIPLGLKETKELDWSTPLKELISVHFGEDGASYEAEIRELEALRQAMRTPSRNESGLELLTAYYNQLCFLDARFLTPARSLGLFFHWYDSLTGVPAQQRALAFEKGSVLFNIGALHTQIGARQDRSCTEGARRAMEAFQRAAGAFSLLRENFSHAPSPDMSAASLCALEQLMMAQAQECVFEGLSPPASMAPQDCLAQLRLAQEAAQVAAEYRLVHRTMAQPPVHDYVPVSWTALVHVKAEYFRSLAHYHVAMALCDGSPATEGELPTHEQVFLQPPTSSKPRGPVLPQELEERRQLGKAHLKRAILGQEEALRLHALCRVLREVDLLRAVISQTLQRSLAKYAELDREDDFCEAAEAPDIQPKTHQKPEARMPRLSQGKGPDIFHRLGPLSVFSAKNRWRLVGPVHLTRGEGGFGLTLRGDSPVLIAAVIPGSQAAAAGLKEGDYIVSVNGQPCRWWRHAEVVTELKAAGEAGASLQVVSLLPSSRLPSLGDRRPVLLGPRGLLRSQREHGCKTPASTWASPRPLLNWSRKAQQGKTGGCPQPCAPVKPAPPSSLKHPGWP

SEQ ID NO: 229671 - DNA, 2013 bp, Artificial Sequence
  derived and/or modified sequence
atgatcctggaggagagacccgacggcgccggcgccggcgaggagagccccagactgcagggctgcgacagcctgacccagatccagtgcggccagctgcagagcagaagagcccagatccaccagcagatcgacaaggagctgcagatgagaaccggcgccgagaacctgtacagagccaccagcaacaacagagtgagagagaccgtggccctggagctgagctacgtgaacagcaacctgcagctgctgaaggaggagctggaggagctgagcggcggcgtggaccccggcagacacggcagcgaggccgtgaccgtgcccatgatccccctgggcctgaaggagaccaaggagctggactggagcacccccctgaaggagctgatcagcgtgcacttcggcgaggacggcgccagctacgaggccgagatcagagagctggaggccctgagacaggccatgagaacccccagcagaaacgagagcggcctggagctgctgaccgcctactacaaccagctgtgcttcctggacgccagattcctgacccccgccagaagcctgggcctgttcttccactggtacgacagcctgaccggcgtgcccgcccagcagagagccctggccttcgagaagggcagcgtgctgttcaacatcggcgccctgcacacccagatcggcgccagacaggacagaagctgcaccgagggcgccagaagagccatggaggccttccagagagccgccggcgccttcagcctgctgagagagaacttcagccacgcccccagccccgacatgagcgccgccagcctgtgcgccctggagcagctgatgatggcccaggcccaggagtgcgtgttcgagggcctgagcccccccgccagcatggccccccaggactgcctggcccagctgagactggcccaggaggccgcccaggtggccgccgagtacagactggtgcacagaaccatggcccagccccccgtgcacgactacgtgcccgtgagctggaccgccctggtgcacgtgaaggccgagtacttcagaagcctggcccactaccacgtggccatggccctgtgcgacggcagccccgccaccgagggcgagctgcccacccacgagcaggtgttcctgcagccccccaccagcagcaagcccagaggccccgtgctgccccaggagctggaggagagaagacagctgggcaaggcccacctgaagagagccatcctgggccaggaggaggccctgagactgcacgccctgtgcagagtgctgagagaggtggacctgctgagagccgtgatcagccagaccctgcagagaagcctggccaagtacgccgagctggacagagaggacgacttctgcgaggccgccgaggcccccgacatccagcccaagacccaccagaagcccgaggccagaatgcccagactgagccagggcaagggccccgacatcttccacagactgggccccctgagcgtgttcagcgccaagaacagatggagactggtgggccccgtgcacctgaccagaggcgagggcggcttcggcctgaccctgagaggcgacagccccgtgctgatcgccgccgtgatccccggcagccaggccgccgccgccggcctgaaggagggcgactacatcgtgagcgtgaacggccagccctgcagatggtggagacacgccgaggtggtgaccgagctgaaggccgccggcgaggccggcgccagcctgcaggtggtgagcctgctgcccagcagcagactgcccagcctgggcgacagaagacccgtgctgctgggccccagaggcctgctgagaagccagagagagcacggctgcaagacccccgccagcacctgggccagccccagacccctgctgaactggagcagaaaggcccagcagggcaagaccggcggctgcccccagccctgcgcccccgtgaagcccgccccccccagcagcctgaagcaccccggctggccctag

SEQ ID NO: 229672 - DNA, 2013 bp, Artificial Sequence
  derived and/or modified sequence
atgatattggaagagagacctgatggtgctggcgccggtgaagagtctccgcgtctccaaggatgcgactccctgacacaaatccagtgtggccaattgcaatctcgcagggcacaaatccaccagcagattgacaaggagctgcagatgagaacaggagccgaaaatctgtaccgcgcgacgtcaaataatagggtcagggaaacagtcgccttggagctctcctacgtgaactctaacctacagctcttaaaggaagaactggaggaactcagtggaggggtcgaccctggtcgccacggtagcgaggccgtgaccgttcctatgattcctttgggattaaaagagacaaaggaactcgattggagcacacctttgaaggagctgattagtgtgcatttcggtgaagacggagcttcatatgaagcagagatcagggagttggaggccctgcgacaggccatgcggaccccttctcggaacgaatctggcttggaactgctgactgcctattacaatcagctgtgttttctcgacgccagatttctcacccccgcaaggagtctgggcctcttttttcactggtacgactctctcaccggagttcccgcccagcagcgagccttagcatttgagaagggcagtgtcttgttcaacatcggcgcgttacacacacagattggtgccagacaggataggagctgtacagagggtgctcgacgggcaatggaggcctttcagagagccgccggagcattttcactcctgcgcgagaattttagccatgcccctagtccagacatgtccgcagccagcctctgtgcccttgagcagctgatgatggcacaggcccaagagtgcgtgttcgagggacttagtccgccagcatcaatggccccccaggactgtcttgcccagttgcgtctcgctcaagaggccgcccaggttgcagccgagtaccggttggtgcaccgcacgatggcgcagccccctgtgcacgactacgtgccggtatcttggacagctctcgtacacgtaaaagccgagtactttcgctccctcgctcactatcacgtggcaatggctctgtgcgacggcagccccgccactgagggggagctccctacacacgaacaggtattcctgcagccgccaacttccagcaagccaaggggccccgtcttgccacaggaactagaggagaggaggcagctgggaaaagcccatctgaaacgggccatcctcggtcaggaagaggcactgcgcctgcatgcgctctgccgcgtcctccgggaagtggacctgttaagggcagtcatttcccaaaccctgcagcgttccctggctaagtatgctgagctagaccgcgaggacgatttctgtgaagccgctgaggccccagacattcagccaaagactcaccagaaaccagaagcccgcatgccgcgcttatctcagggaaaaggtccggacatctttcataggctgggacccctcagtgtattctccgctaagaataggtggcggttagtgggacccgttcacctgacccgcggggagggtgggttcggtctcacactgaggggtgacagccctgttctgatagccgctgtcatccctgggtcgcaggccgcggcggctggactgaaggaaggagattacatcgtgtccgttaacgggcagccatgccgctggtggcgccatgcggaggtagtcactgaactcaaagccgcaggcgaagctggggcttccctgcaggtggtgtcgttgttgcctagctcacgtctcccctctctgggtgaccgacgaccagttttactgggaccaagaggactcctgcggagtcaacgcgagcatgggtgcaagactcctgcatccacctgggcctccccccggcccctgctgaattggtcccgcaaggctcagcaaggcaaaacaggcggatgcccgcagccctgcgctcccgtgaagccagcgcccccatcaagccttaagcacccaggttggccctag

SEQ ID NO: 229673 - DNA, 2013 bp, Artificial Sequence
  derived and/or modified sequence
atgatcctggaggagaggccagatggagctggggccggggaggagagcccccggctgcagggctgtgacagcctgacccagatccagtgtggccagctgcagagccggcgggcccagatccaccagcagattgacaaggagctgcagatgaggactggagcagaaaatctctaccgggccaccagcaacaacagagtgcgggagaccgtggccctggagctgtcctatgtgaacagcaacctgcagctgctgaaggaggagctggaggagctgagcggcggcgtggaccccggccgccacggcagcgaggccgtgacagtgcccatgatccccctgggcctgaaggagaccaaggagctggactggagcacccccctgaaggagctgatctctgtgcactttggagaagatggagccagctatgaagctgagatccgggagctggaggccctgcggcaggccatgaggacccccagcagaaatgaaagtggcctggagctgctgacagcctactacaaccagctgtgcttcctggatgcccgcttcctgaccccagcccggagcctgggcctcttcttccactggtatgacagcctgactggagtgcctgcccagcagagggccctggcctttgagaagggctctgtgctcttcaacatcggggccctgcacacccagattggagcccggcaggacaggagctgcacagagggcgcccggcgggccatggaggccttccagagagctgctggggccttcagcctgctgcgggagaacttcagccacgcccccagcccagacatgtctgctgccagcctgtgtgccctggagcagctgatgatggcccaggcccaggagtgtgtgtttgagggcctgagccccccagcctccatggccccccaggactgcctggcccagctgcggctggcccaggaggccgcccaggtggccgctgagtaccgcctggtgcacaggaccatggcccagccccctgtgcatgactatgtgcctgtgtcctggacagccctggtgcacgtgaaggccgagtacttccgcagcctggcccactaccacgtggccatggccctgtgtgatggcagccctgccacagaaggagagctgcccacccatgagcaggtgttcctgcagccccccaccagcagcaagccccggggccctgtgctgccccaggagctggaggagcggcggcagctgggcaaggcccacctgaagagggccatcctgggccaggaggaggccctgcggctgcacgccctgtgccgggtgctgcgggaggtggacctgctgcgggccgtcatcagccagaccctgcagaggagcctggccaagtatgcagagctggacagagaagatgacttctgtgaggccgctgaggccccagacatccagcccaagacccaccagaagccagaggccaggatgccccggctgagccagggcaagggccctgacatcttccaccggctgggccccctgagcgtcttcagcgccaagaaccgctggaggctggtgggccctgtgcacctgaccagaggagagggcggcttcggcctgaccctgcggggggacagccctgtgctgattgctgctgtgattcctggcagccaggccgctgctgctggcctgaaggagggggactacatcgtgtctgtgaatggccagccctgccgctggtggaggcatgctgaggtggtgacagagctgaaggccgccggggaggccggggccagcctgcaggtggtgtccctgctgcccagcagccggctgcccagcctgggggaccggcggcctgtgctgctgggcccccggggcctgctgcggagccagcgggagcacggctgcaagaccccagccagcacctgggccagcccccggcccctgctgaactggagcaggaaggcccagcagggcaagacaggaggctgcccccagccctgtgcccctgtgaagccagccccacccagcagcctgaagcaccctggctggccctag

SEQ ID NO: 229674 - DNA, 2013 bp, Artificial Sequence
  derived and/or modified sequence
atgatcctggaggagcggcccgacggcgccggcgccggcgaggagtctcctagactccagggctgtgactccctgacacagatccagtgcggtcaactacaatctcgccgcgcccagattcatcagcagattgataaggagcttcagatgagaacaggcgccgaaaacctatatcgcgcgacaagcaacaacagagttcgtgagaccgtcgccctggaactctcgtatgtcaactccaacttgcagctattgaaggaagagctggaggagcttagcgggggcgtggaccccgggcgccatggatcagaagccgtgacggtgcccatgattcccctgggtctgaaagagactaaggaactggattggagcacccccctcaaagagttgataagcgtgcatttcggggaagacggcgcttcttatgaggccgagatccgcgagctggaggctttaagacaggctatgcggacaccaagccgaaatgaatcgggcttggagctgctaaccgcatactacaaccagctgtgcttcttggacgctcggtttctcactccagcacgaagtctgggactcttcttccactggtacgattctcttactggggttcctgctcagcagcgggcactggcattcgagaaaggtagtgtgctgtttaacataggcgcactgcatacgcagattggcgccaggcaagatcggagttgcactgaaggtgctcggcgcgcaatggaggcgtttcaacgtgccgctggggccttcagcctgctcagggagaatttttcccacgcacctagtcccgatatgagcgccgcgagcctttgcgcgttagagcagctcatgatggcccaagcgcaggaatgcgtattcgaggggttgagccctcctgcctcgatggcgcctcaggactgtcttgcccagctgagactcgcacaggaggctgcccaggtagctgctgaatataggctggtgcaccgcacaatggcccagccccctgtgcacgattacgtgccagtgtcatggacggcattagtgcacgtgaaagccgagtatttccgttctctagcacattaccatgtcgccatggcgttatgcgatggctctcctgcgacagaaggcgaactgcctacacacgaacaggtgttcctgcagcccccgaccagtagcaagcccaggggaccggtactgccccaagagttggaggagaggcgtcagcttggcaaagcgcacctcaaaagggccatactcggacaggaggaggcactccgactgcatgcattatgccgagtgctccgggaagtcgacctactgagggcagtgatcagtcagaccctgcagcgctccctggcaaagtatgccgaactggaccgcgaagacgacttttgtgaggccgccgaagcccccgacattcagcctaagacacatcagaaaccagaggcccggatgcctaggctcagccaaggcaaaggcccagacatcttccaccggctcgggcctttatcagtcttcagcgccaagaaccggtggagactggtgggtcctgtgcatcttacccgcggcgagggcggctttggtctgacgctacgcggtgatagtcctgtgctcatcgccgctgtgatccccggctcccaggccgctgccgctggcctcaaggagggcgactacatagtctctgtgaacggtcagccctgtaggtggtggcgccacgccgaagttgtcaccgaactgaaagctgccggagaagcaggtgcctcacttcaggtcgtgtcattgctcccaagcagtcgcctgccatcactcggcgaccgacggccggtccttctgggtcccagaggtttattgcgatcccagcgggagcacggatgcaaaactccagcctcaacttgggcatcaccgagacctctgctcaactggtccaggaaggcgcagcaggggaagacagggggatgcccccagccatgtgctcccgtgaaaccagcccccccgtctagcctaaaacatccaggctggccgtag

SEQ ID NO: 229675 - DNA, 2013 bp, Artificial Sequence
  derived and/or modified sequence
atgattctggaggagcgcccagacggagcgggagcaggggaggagtcaccgcgactccaagggtgcgactcactcacacagattcagtgcgggcagctgcagagccgtcgggctcagattcaccagcaaatcgataaggaactgcagatgaggacaggcgcagagaatttgtatcgcgctacttccaacaacagggtgagagagactgtggctttagaactcagctatgtcaattccaatttacaactcctaaaagaggagttggaggaactttccggaggtgttgaccctgggagacacggttcagaggcagttactgttcctatgattcccctgggattgaaggagactaaagagctggattggtctaccccccttaaggaattaataagcgtccacttcggcgaggatggtgcctcttacgaggccgaaataagggagcttgaggccctacgccaggcaatgcggacacccagccgaaacgaaagcggcctggaacttcttaccgcttattacaatcagctctgctttcttgacgcacgatttctaactcctgcccgttctctgggcctgtttttccattggtatgacagcttaaccggggtacccgctcagcagcgagcgctcgcgtttgagaagggatctgttctgtttaatattggggcattacatacacagatcggcgctcgccaagacagaagctgtacagagggtgcacgcagggcaatggaggccttccagagagccgcaggggctttttcattactgcgtgagaacttcagccatgctcctagccccgatatgtcagcggcttctttgtgtgctctggagcaattgatgatggctcaagcccaggaatgcgtgttcgaaggtctttccccccctgcaagcatggcgccacaagattgcctagctcagctgaggctggctcaggaagcagcacaggtggctgccgagtaccgtttggttcaccgaactatggctcagccccctgtccacgactacgtgcccgtgtcttggacagcactcgtacacgttaaggccgagtactttcggtccctcgctcactatcacgtggctatggccctgtgcgatggcagtcctgctactgagggtgagttgcccacccacgaacaggtgtttctgcagccccctacgtcttcaaagcctcgtggcccagtcctcccccaggaactagaggagcgacggcaactcggcaaagcccacttaaagagggcaattctaggtcaggaagaggcgctgcggctccatgctctgtgtagggtactcagagaggtcgacttgctccgtgctgtgatttctcagactttgcagcgcagcctagccaaatatgccgaactggaccgggaagacgacttctgcgaagcagctgaagctcctgacatccagcctaaaacacatcagaaacctgaggccagaatgccccgtctttctcagggtaagggaccggatatttttcacaggctcgggcctctgtcggtatttagcgccaaaaacaggtggcgactggtcggtcctgttcacctgactagaggagaaggtgggtttggcctgacactccggggagattcaccggtattgatagccgctgtaatacctggctcacaggccgcagccgctgggcttaaggagggggactatatcgtgtcagtgaacggccagccctgtcgatggtggagacacgccgaggtcgtgactgagctgaaggcagccggagaggcgggagcctccttgcaggtggtgagcctcctgccgtcatccagactgccgtccctgggtgaccggagacccgtgttattaggcccacgcggactactgcggtcccaacgagagcatggctgtaagacacccgctagcacctgggcatccccacggccactactgaattggtctcgcaaggcacagcagggaaagactggagggtgcccccagccatgtgcccctgtgaaacccgcacctccttccagccttaaacaccccggatggccttag

SEQ ID NO: 229676 - DNA, 3683 bp, Artificial Sequence
  derived and/or modified sequence
cgcggcccaggtggtgcgggcggccctagcccggctgcggagcgctgcgcgagcggcgggctggctgaccccgagggacccccagcgcagcgggtgcggcgatgatcctggaggagaggccggacggcgcgggcgccggcgaggagagcccgcggctgcagggctgtgactccctgacgcagatccagtgcggccagctgcagagccgcagggcccagattcaccagcagattgacaaggagctgcagatgcggacgggcgctgagaacctctacagagccaccagcaacaaccgggtgagagagacggtcgccctggagctgagctacgtcaactccaacctgcagctgctgaaggaggagctggaggagctcagcggtggcgtggaccctggccggcatgggagcgaagctgtcactgtccccatgatccccctgggcctgaaggagaccaaggagctggactggtctacaccgctgaaggagctgatctcagtgcactttggagaggacggcgcctcctacgaggcagaaatcagggagctggaggccctgcggcaggccatgcggacccccagccggaatgagtcgggcctggagctgctcacagcctattacaaccagctgtgcttcctggatgcgcgcttcctcacccctgccaggagcctcgggctcttcttccactggtacgactcgcttactggggtcccggcccagcagcgtgccctggccttcgagaagggcagcgttctcttcaacatcggtgccctccacacgcagattggggcgcgccaggaccgctcctgcaccgagggtgcccgccgcgctatggaggccttccagagggccgctggggccttcagcctcctgagggagaacttctcccatgcgccgagcccagacatgagcgctgcgtccctctgcgcactggagcagctcatgatggcccaggcccaggaatgtgtgtttgagggcctctcaccacctgcctccatggccccccaagactgcctggcccagctgcgcctggcgcaggaggccgcccaggtggcagccgagtacaggctagtgcaccggaccatggcccagccacccgtccacgactacgtgcctgtctcctggactgccctggtgcatgtcaaggccgagtacttccgctccctggcccactaccacgtagccatggccctctgcgacggctccccagcgaccgagggagagctccccacgcacgagcaggtcttcctgcagccccccacctcctctaagccccgaggccctgtgctgccgcaggagctggaggagcgcaggcagcttggcaaggcacacctgaagcgtgccatcctggggcaggaggaggcgctgcggctgcacgccctgtgccgcgtcctgcgcgaggtggacctgcttcgggctgtgatctcccagacgctgcagcgctcactggccaagtatgcggagctcgaccgtgaggatgacttctgtgaggctgccgaggccccggacatccagcctaagacccaccagaagccagaggccaggatgccacgcctgtcccaggggaaggggcctgacatcttccatcggctggggcccctgtctgtgttctcagccaagaaccggtggcggctggtggggcccgtccacctgacccgaggagagggcggctttggcctcacgcttcggggagactcgcctgtcctcatcgctgccgtcattccagggagccaggccgcggcggctggcctgaaggagggcgactacattgtgtcagtgaatgggcagccatgcaggtggtggagacacgcggaggtggtgacggagctgaaggctgcgggagaggcgggcgccagcctgcaggtggtgtcgctgctgcccagctctagactgcccagcttgggggaccgccggcccgtcctgctgggccccagggggcttctaaggagccagagggagcatggttgcaagaccccggcatccacgtgggccagtccccggcccctcctcaactggagccgaaaggcccagcagggcaagactggaggctgcccccagccctgtgccccagtgaagccagctccgccctcatccttgaagcacccagggtggccgtgagggccaggatccctgcacgcctcagccctggctccagctggcagcaagcaccgagcatgccctccccacccagaggacctccgggcaatgcctgtcccgcctcatgctggaggctgcctcgggcacctgcctgcccattaaagactggtcagacctgtctgagcccagtgatgggagctgtggcctcttcacccacacacagaaggatgccagtccctctgtcggtctgaggtcagcttcctggggctgccccaccctgagggctccttacagggtgctcctcacagccatcccatctgtacccccgggctctgtccaccctgctgctgccctgggcacagaccctgaggtctcagtcctgcctccagccaagtttctgcctggtgcccagtgattcctgctgggcaccccttcgctcactgcccctccaccatgcagcagccagacacacccacagcacccgcagacctctaggccgggtcccagacatggccttcccccaaaatacttcctgctgtcctgtctgtgcacagagcaagggactccccacctctgcgccctgtgctggtcatcatgggctctgtgctggtcaacccagcaagtgtcccgtttgcccaggagtccctggtgtcgtggcccaggtctcatggtggccctaagcctgccagccctgctgcccgccttgctgtcctgctctgagcatgggtgccaccctccagctcctgggcgtgtcacttctctctgagcctggggcctgcatgggcccccagccctccccagcctgcttgggccgctcctgctggcctccacaggccgtgagctgtcagtgtctcaagcaggggaagtgagggctgcctccaggcctccgtgtactgggtggacaatggcccccaaaggccgtcggcaagaacaccacctccaggacccctacagcagtgggctcaggacttgggcaccaagaggagagggtgggaagggctgcagagtcagggctgcacccaagaggagccacggagccggagccggagcggaggcccccaccgagggccccagggcctggcaggttccggaagagacagggccagcgggagtcattccctgcagccactagggggcagccgccacccgctcagcagccctgggaggcggcacgggcaggtgcgccttgggagggctgaggcaaagaccccgggtagaaaggcggcccccagctctgcgagacccctgccctcttgtccagtcccttccgagggtccgcaggtgagagcagcctgccctgcatcccaggctctggttccagggtccagggccctgcgctgccacctccctcgtgcttcagccaagaaaatgggggtgcaagtagggtgtttggggtcccagagacgcaggcgccgcggcgcgatcttcctgggcaggagggcagggctccccaacctgcctgagccggggtgggggtccaggtcccccacttgcccttgtgggaaaatccctgtctcagcagaatgggccaaggtcacgcaggtctccccagcacgtgttaatttggttaataaaactgtggatcaagga

SEQ ID NO: 229677 - protein, 804 aa, Artificial Sequence
  derived and/or modified sequence
MDLPVDEWKSYLLQKWASLPTSVQVTISTAETLRDIFLHSSSLLQPEDELFLKRLSKGYLVGKDSDAPLFYREEGNKKFQEKDYTGAAVLYSKGVSHSRPNTEDMSLCHANRSAALFHLGQYETCLKDINRAQTHGYPERLQPKIMLRKAECLVALGRLQEASQTISDLERNFTATPALADVLPQTLQRNLHRLKMKMQEKDSLTESFPAALAKTLEDAALREENEQLSNASSSIGLCVDPLKGRCLVATKDILPGELLVQEDAFVSVLNPGELPPPHHGLDSKWDTRVTNGDLYCHRCLKHTLATVPCDGCSYAKYCSQECLQQAWELYHRTECPLGGLLLTLGVFCHIALRLTLLVGFEDVRKIITKLCDKISNKDICLPESNNQVKTLNYGLGESEKNGNIVETPIPGCDINGKYENNYNAVFNLLPHTENHSPEHKFLCALCVSALCRQLEAASLQAIPTERIVNSSQLKAAVTPELCPDVTIWGVAMLRHMLQLQCNAQAMTTIQHTGPKGSIVTDSRQVRLATGIFPVISLLNHSCSPNTSVSFISTVATIRASQRIRKGQEILHCYGPHKSRMGVAERQQKLRSQYFFDCACPACQTEAHRMAAGPRWEAFCCNSCGAPMQGDDVLRCGSRSCAESAVSRDHLVSRLQDLQQQVRVAQKLLRDGELERAVQRLSGCQRDAESFLWAEHAVVGEIADGLARACAALGDWQKSATHLQRSLYVVEVRHGPSSVEMGHELFKLAQIFFNGFAVPEALSTIQKAEEVLSLHCGPWDDEIQELQKMKSCLLDLPPTPVGPAL

SEQ ID NO: 229678 - DNA, 2415 bp, Artificial Sequence
  derived and/or modified sequence
atggacctgcccgtggacgagtggaagagctacctgctgcagaagtgggccagcctgcccaccagcgtgcaggtgaccatcagcaccgccgagaccctgagagacatcttcctgcacagcagcagcctgctgcagcccgaggacgagctgttcctgaagagactgagcaagggctacctggtgggcaaggacagcgacgcccccctgttctacagagaggagggcaacaagaagttccaggagaaggactacaccggcgccgccgtgctgtacagcaagggcgtgagccacagcagacccaacaccgaggacatgagcctgtgccacgccaacagaagcgccgccctgttccacctgggccagtacgagacctgcctgaaggacatcaacagagcccagacccacggctaccccgagagactgcagcccaagatcatgctgagaaaggccgagtgcctggtggccctgggcagactgcaggaggccagccagaccatcagcgacctggagagaaacttcaccgccacccccgccctggccgacgtgctgccccagaccctgcagagaaacctgcacagactgaagatgaagatgcaggagaaggacagcctgaccgagagcttccccgccgccctggccaagaccctggaggacgccgccctgagagaggagaacgagcagctgagcaacgccagcagcagcatcggcctgtgcgtggaccccctgaagggcagatgcctggtggccaccaaggacatcctgcccggcgagctgctggtgcaggaggacgccttcgtgagcgtgctgaaccccggcgagctgccccccccccaccacggcctggacagcaagtgggacaccagagtgaccaacggcgacctgtactgccacagatgcctgaagcacaccctggccaccgtgccctgcgacggctgcagctacgccaagtactgcagccaggagtgcctgcagcaggcctgggagctgtaccacagaaccgagtgccccctgggcggcctgctgctgaccctgggcgtgttctgccacatcgccctgagactgaccctgctggtgggcttcgaggacgtgagaaagatcatcaccaagctgtgcgacaagatcagcaacaaggacatctgcctgcccgagagcaacaaccaggtgaagaccctgaactacggcctgggcgagagcgagaagaacggcaacatcgtggagacccccatccccggctgcgacatcaacggcaagtacgagaacaactacaacgccgtgttcaacctgctgccccacaccgagaaccacagccccgagcacaagttcctgtgcgccctgtgcgtgagcgccctgtgcagacagctggaggccgccagcctgcaggccatccccaccgagagaatcgtgaacagcagccagctgaaggccgccgtgacccccgagctgtgccccgacgtgaccatctggggcgtggccatgctgagacacatgctgcagctgcagtgcaacgcccaggccatgaccaccatccagcacaccggccccaagggcagcatcgtgaccgacagcagacaggtgagactggccaccggcatcttccccgtgatcagcctgctgaaccacagctgcagccccaacaccagcgtgagcttcatcagcaccgtggccaccatcagagccagccagagaatcagaaagggccaggagatcctgcactgctacggcccccacaagagcagaatgggcgtggccgagagacagcagaagctgagaagccagtacttcttcgactgcgcctgccccgcctgccagaccgaggcccacagaatggccgccggccccagatgggaggccttctgctgcaacagctgcggcgcccccatgcagggcgacgacgtgctgagatgcggcagcagaagctgcgccgagagcgccgtgagcagagaccacctggtgagcagactgcaggacctgcagcagcaggtgagagtggcccagaagctgctgagagacggcgagctggagagagccgtgcagagactgagcggctgccagagagacgccgagagcttcctgtgggccgagcacgccgtggtgggcgagatcgccgacggcctggccagagcctgcgccgccctgggcgactggcagaagagcgccacccacctgcagagaagcctgtacgtggtggaggtgagacacggccccagcagcgtggagatgggccacgagctgttcaagctggcccagatcttcttcaacggcttcgccgtgcccgaggccctgagcaccatccagaaggccgaggaggtgctgagcctgcactgcggcccctgggacgacgagatccaggagctgcagaagatgaagagctgcctgctggacctgccccccacccccgtgggccccgccctgtag

SEQ ID NO: 229679 - DNA, 2415 bp, Artificial Sequence
  derived and/or modified sequence
atggacctccctgtggacgaatggaaatcatacctgctgcagaagtgggccagcctgccaacgtctgttcaggtgacaatcagtaccgccgaaaccctgcgcgacatttttcttcacagctcttcactcctgcagcctgaggatgaattgtttctgaagcgactgagcaaaggttatcttgtcgggaaagactccgatgcccctcttttttaccgcgaggagggaaacaagaaatttcaggaaaaggactacaccggcgcagctgttctctactccaaaggagtgagccattccaggccaaacaccgaggatatgagcttgtgtcatgccaatcggtctgcggcattgtttcacttgggccagtacgagacatgtctgaaggatattaaccgagcacagacgcacggatacccagagagactccaaccaaaaatcatgctgaggaaagcagaatgtctcgtggctttgggcaggctgcaagaagcatctcaaacaatctcagatctggagcggaactttaccgctacaccggcgctcgccgacgttctgccacaaacactgcagaggaacctgcatagactcaagatgaagatgcaggaaaaagactctcttacggaaagctttccggctgcgctggctaagaccctggaagatgctgccctgagggaggaaaatgagcagttgtctaacgcatcctcctctatcggcctgtgcgtggatcctctgaagggccgttgtctcgtggccactaaggatattctaccaggagagttattggtgcaggaggacgctttcgtgagtgtgcttaaccccggggaactacccccaccacatcatggactggacagtaagtgggacacgagggtgaccaatggcgacctgtactgccatagatgcctcaaacacaccctcgctaccgtgccgtgcgacggttgtagttatgctaaatattgcagtcaggaatgtctgcagcaggcatgggagctataccaccgtaccgagtgccccctggggggcttattactgacactgggagtcttttgccacatcgctcttcgccttaccctactggttgggtttgaggatgtaaggaaaattatcaccaaattatgtgataaaatttccaataaggacatatgcttgccggaaagcaacaatcaagttaaaacattaaactacggactaggagaatccgagaagaatggaaacatagtggaaactcccataccaggttgtgatatcaacggcaagtacgagaacaattacaatgccgtcttcaacctcctcccacataccgaaaatcactcccctgaacataaattcctgtgcgctctctgtgtgagtgctctgtgccgccaacttgaagccgcaagcctgcaggcgataccaacggaaagaatagtgaatagctctcagctgaaggctgctgtgacccccgagctgtgcccggacgtgactatctggggggtcgcgatgctgagacacatgctgcagctccagtgcaatgcacaggcaatgactactatccagcatactggacccaagggctccattgtgactgactcaagacaggttcgactggctactggaatctttcccgtgatatcactgttgaatcatagctgtagtcccaacacatcagtttctttcatttctacagtggcaacaatccgcgccagccagaggattagaaagggacaagagattctccactgttatgggccgcacaagtcaaggatgggggtcgctgagcggcagcagaagctgagatcgcagtacttctttgattgtgcttgccccgcttgtcagaccgaggcccacaggatggcggccggacctcgttgggaagctttctgttgcaacagctgcggagcacccatgcaaggcgatgacgtgctccggtgcggaagccgttcctgcgcagagagcgctgtgtcacgagatcacctcgtttccagactgcaagatctccagcaacaagtgagagtagctcagaaacttctgagggatggggagttagagcgtgcagtacagagattatctggctgccagcgggatgccgagagttttctgtgggctgaacatgcagtggttggggaaatcgccgatggactcgctcgcgcctgcgctgccctgggggactggcaaaagagtgccacccaccttcagagatccctctatgtggtcgaggtaaggcatggacccagctcagtggagatggggcacgaactgttcaagcttgcgcaaattttcttcaatggcttcgctgtaccagaagccctgagtactattcaaaaagcagaggaggtactgtctttacactgtggcccttgggacgatgagattcaggaactgcaaaaaatgaagagctgtctcctggacttgccaccaaccccagtagggccggccctgtag

SEQ ID NO: 229680 - DNA, 2415 bp, Artificial Sequence
  derived and/or modified sequence
atggacctgcctgtggatgagtggaagagctacctgctgcagaagtgggccagcctgcccacctctgtgcaggtgaccatcagcacagctgagaccctgcgggacatcttcctgcacagcagcagcctgctgcagccagaagatgagctgttcctgaagaggctgagcaagggctacctggtgggcaaggacagtgatgcccccctcttctaccgggaggagggcaacaagaagttccaggagaaggactacacaggagctgctgtgctgtacagcaaaggagtgagccacagccggcccaacacagaggacatgagcctgtgccacgccaacagatctgctgccctcttccacctgggccagtatgagacctgcctgaaggacatcaacagagcccagacccacggctacccagagcggctgcagcccaagatcatgctgaggaaggcagaatgtctggtggccctgggccgcctgcaggaggccagccagaccatcagtgacctggagaggaacttcaccgccaccccagccctggctgatgtgctgccccagaccctgcagaggaacctgcaccggctgaagatgaagatgcaggagaaggacagcctgacagagagcttccctgctgccctggccaagaccctggaggatgctgccctgcgggaggagaatgagcagctgagcaatgccagcagcagcatcggcctgtgtgtggaccccctgaagggccgctgcctggtggccaccaaggacatcctgcctggagagctgctggtgcaggaggatgcctttgtgtctgtgctgaaccctggagagctgcccccaccccaccacggcctggacagcaagtgggacaccagggtgaccaatggagacctgtactgccaccgctgcctgaagcacaccctggccaccgtgccctgtgatggctgcagctatgccaagtactgcagccaggagtgcctgcagcaggcctgggagctgtaccacaggacagagtgccccctgggcggcctgctgctgaccctgggcgtcttctgccacatcgccctgcggctgaccctgctggtgggctttgaagatgtgaggaagatcatcaccaagctgtgtgacaagatcagcaacaaggacatctgcctgcctgagagcaacaaccaggtgaagaccctgaactacggcctgggggagagcgagaagaatggaaacatcgtggagacccccatccctggctgtgacatcaatggcaagtatgagaacaactacaatgctgtgttcaacctgctgccccacacagagaaccacagccctgagcacaagttcctgtgtgccctgtgtgtgtctgccctgtgccggcagctggaggccgccagcctgcaggccatccccacagaaagaattgtgaacagcagccagctgaaggctgctgtgaccccagagctgtgcccagatgtgaccatctggggcgtggccatgctgcggcacatgctgcagctgcagtgcaatgcccaggccatgaccaccatccagcacacaggccccaagggcagcatcgtgacagacagccggcaggtgcggctggccaccggcatcttccctgtgatcagcctgctgaaccacagctgcagccccaacacctctgtgtccttcatcagcacagtggccaccatccgggccagccagaggatcaggaagggccaggagatcctgcactgctacggcccccacaagagcaggatgggcgtggccgagcggcagcagaagctgcggagccagtacttctttgactgtgcctgcccagcctgccagacagaggcccacaggatggctgctggcccccgctgggaggccttctgctgcaacagctgtggggcccccatgcagggagatgatgtgctgcgctgtggcagccgcagctgtgccgagagcgctgtgtcccgggaccacctggtgtcccggctgcaggacctgcagcagcaggtgcgggtggcccagaagctgctgagagatggagagctggagagagctgtgcagaggctgagcggctgccagagagatgctgagagcttcctgtgggccgagcacgctgtggtgggggagattgctgatggcctggcccgggcctgtgccgccctgggggactggcagaagagcgccacccacctgcagaggagcctgtatgtggtggaggtgagacatggccccagctctgtggagatgggccacgagctgttcaagctggcccagatcttcttcaatggatttgctgtgcctgaggccctgagcaccatccagaaggccgaggaggtgctgagcctgcactgcggcccctgggatgatgagatccaggagctgcagaagatgaagagctgcctgctggacctgccccccacccctgtgggccctgccctgtag

SEQ ID NO: 229681 - DNA, 2415 bp, Artificial Sequence
  derived and/or modified sequence
atggacctgcccgtggacgagtggaagagctacctgctgcagaagtgggctagcctccccaccagtgtgcaagtaaccatcagcaccgccgaaaccctcagagatattttcctccattcaagttctttgttgcagcctgaggatgagctgtttctcaaaagactctcaaaaggctaccttgttggcaaagacagtgacgcgcctctcttttacagagaggagggcaacaagaaattccaggaaaaggattataccggtgcagcagtgctttattcaaagggcgtgtctcacagtcgacccaataccgaggacatgagtttatgccacgccaaccggtcggcagccttattccacctgggtcaatacgagacctgcctgaaggacatcaatagagctcaaacacacggctatccggagagactccagcctaagatcatgctacgcaaggctgagtgtctggttgctttgggacggctccaagaggccagtcagacaatatccgacctcgaacgaaacttcacggcgacccctgctctcgcggatgtacttcctcagacgctccagagaaatctgcaccgacttaagatgaagatgcaggagaaggactccctgactgaaagttttcccgctgcactggcaaagacccttgaggatgccgcgctgcgtgaagagaatgagcagttatccaacgcctctagctcaatcggcctctgcgtagacccgctgaagggacggtgcctagttgccaccaaggatatcctcccaggcgagctgctcgttcaagaggacgcctttgtttccgtgcttaaccctggcgagttgcccccacctcatcacggactggactcaaaatgggacactcgcgtgaccaacggcgatctatactgccaccggtgcctaaaacataccctggccacggttccatgtgatgggtgtagctacgcgaaatattgttcccaggagtgcctccagcaggcatgggagctgtatcatcgaacagaatgtccactcggggggcttttgctgacactgggagtattctgtcacatcgctctgcgcctgaccctgctagttgggttcgaggacgtgcgcaagatcattacaaaactctgcgacaagatcagtaataaggatatctgcctgcctgagtctaacaatcaggtcaagactctgaactatggccttggcgaatccgaaaaaaatgggaacattgttgaaacacctatccctggatgcgacatcaatggcaaatacgagaataattacaacgctgtatttaacctgctaccacacaccgagaaccactcccctgagcacaagttcctgtgcgccctgtgcgtcagcgcactgtgccggcagctggaagcggcttctctccaggctattcctacagagcgaatcgtcaattcctctcaattaaaggccgctgtcacaccagagctctgtcccgatgtgaccatttggggagtggccatgctgcgacacatgttacagcttcagtgtaacgcgcaggctatgaccacaatccagcatactggtccaaagggatcaattgtgacagatagtcgacaggtgagacttgcaacaggcatatttccagtaatttccctgctgaatcacagctgtagccccaacacctcagtctcttttatatcgaccgtggctactatacgcgcaagccaaagaattagaaagggccaggagatcctgcactgttatgggccgcacaaatcgaggatgggtgtggcagaacggcagcaaaaactgagatctcagtacttttttgattgcgcctgtcctgcctgtcagaccgaggctcacaggatggcggcaggcccacggtgggaggccttttgttgtaacagttgcggtgctcccatgcaaggggatgacgtgctgcgctgcggaagccgcagctgtgccgagtcagccgtgagtcgggaccatctggttagcagactgcaggacctccaacagcaagttagggtggctcagaagcttttgagggacggtgagttggagcgcgccgtacagcgcctcagtgggtgtcagcgggacgccgagagcttcctgtgggccgagcatgccgtagttggcgagatcgcagatggactcgctagagcctgtgccgcactaggagactggcagaagtcggctactcacctccagcgaagcctgtacgtggtagaggtacgccacgggccttcaagtgtggaaatggggcacgaactgttcaagctggcacaaatcttcttcaacggtttcgcagtgcccgaggccctctcaaccattcaaaaagccgaagaagtgttgtcactacactgtggcccttgggacgatgagattcaggagctgcagaagatgaagagctgccttttggacctgcctccaaccccggtgggaccagcactgtag

SEQ ID NO: 229682 - DNA, 2415 bp, Artificial Sequence
  derived and/or modified sequence
atggacctgcctgtggatgaatggaaaagctatctgctgcaaaagtgggcctcgttgccgacctccgtccaggtgacaattagtacagcagagactcttagagacatttttttgcactcttcctctctgctgcagccagaggatgaacttttcctgaagcgcctgtccaaaggctacttggtgggcaaagatagcgatgcaccgctattctacagggaagagggtaacaagaagtttcaggagaaggattacacaggtgccgcagtgctttattcaaaaggcgtgtctcatagcaggcccaatacggaagacatgtcactttgtcacgcaaaccgctcggctgctctcttccacctgggacagtatgaaacttgcctgaaagacatcaaccgcgctcagacccatggatatccagagaggctccaaccaaaaatcatgctgagaaaggccgagtgcctggtagccctaggccgtctgcaggaggcctcacagaccatcagcgatttggagcggaacttcaccgccactcccgcactcgccgacgtgctcccacaaacattacaaagaaaccttcatcggttgaagatgaagatgcaggagaaagatagcctcacagagagtttcccagcagcactcgcaaagactctggaggacgccgctcttcgagaagagaatgagcaactttccaacgcgtcctctagcatcgggttgtgtgtggatccgttgaagggtcgctgtctggtcgccactaaggatattctcccaggcgagttgctggtgcaagaggatgcttttgtaagtgtcctgaatcctggcgaattgccacccccacatcacgggttagactccaagtgggatacccgcgtcacaaatggcgatttgtattgtcatcgctgcctgaagcacacacttgccacggtgccatgcgatgggtgttcctatgccaagtactgctcccaggaatgtttgcaacaggcttgggaactatatcaccggactgagtgccccctgggaggacttttgttgacgctgggagtcttttgtcatattgcactaagactcacattgctggtgggattcgaggatgtgagaaagatcataacgaaactgtgcgacaagatttctaacaaggatatttgcctgccagaaagcaataaccaggtgaagacattgaactacggccttggagaatcagaaaaaaatggtaacatcgtagagacacctattccgggatgcgacataaatggtaagtacgagaataactataatgccgtcttcaacctactcccacatacagaaaaccatagtccggaacataaattcctgtgcgccttatgcgtcagtgctctctgcaggcagttagaagctgcatctctccaagccatcccaaccgagagaatcgtgaacagctctcagctgaaagccgcagtgacccccgaactttgccccgacgtgaccatttggggcgtggccatgctacggcacatgctgcagttgcagtgtaacgcccaggccatgacaacaattcagcatacgggtcctaaggggtccattgtgacggactcacgccaagttagattggctactggaattttccctgtgatttccctcctcaatcatagttgtagccctaacactagtgtttctttcatctctaccgttgccaccatcagggcatcccagcgtatcaggaaagggcaggaaatcttacactgctatggcccacacaaatcacggatgggagtcgctgagcgccagcagaagctgcgctcacagtattttttcgactgtgcttgtcccgcttgccaaaccgaagcacacagaatggccgctggaccgagatgggaggccttttgctgtaattcttgcggcgctccgatgcagggtgatgatgttttgcggtgtggatcccgctcatgtgcggagagcgctgtctctcgcgatcatctcgtgagccgcctgcaggacctccagcagcaggtcagggttgcacagaagctgttacgcgatggcgagctggaaagggccgtacagcgtctatcaggttgtcaacgtgacgctgagtcttttttgtgggccgagcacgccgtggtgggcgagatcgcggacggactggcgagagcctgtgcagcactcggagattggcagaagtccgctactcacctgcaaaggtcactgtatgtcgtagaggtgaggcatggaccatctagcgtggaaatggggcacgaactattcaaactggcgcagatcttttttaatgggttcgctgtgcctgaagctctctcaaccatccagaaggcagaagaggttctctcactgcactgcggaccttgggatgatgagatccaggaactccaaaagatgaaatcttgtcttctggacctaccccctacaccagttggacccgctctctag

SEQ ID NO: 229683 - DNA, 4303 bp, Artificial Sequence
  derived and/or modified sequence
ggagcggggcgccaaggggcgcgccaggagctgcgcgggcgctgggagggagaccagggcgcagttccgggcgcgtctgagcggttctcgaggcgttctcgcctcggtctctggcgagtgcacggatcaaaagcagcatggatctgcctgtggatgaatggaaatcatatctgcttcaaaagtgggcttcactcccgacgtctgttcaggtcacaatttctacagcagagaccttgagggatatctttcttcactcctcttcacttcttcaacctgaggatgagctgtttctaaaaagactttctaaaggttacttggtgggaaaggactcggacgctcctcttttctacagagaagaaggaaacaaaaaatttcaggagaaagattacacaggagctgcagtgctgtactctaagggagtgtcacattcaaggcctaacactgaggacatgtcactgtgtcatgctaaccgctcggcagccctcttccacctgggtcagtatgagacgtgtcttaaagacattaacagagcacagacacatgggtatccagaaaggttgcaacccaagattatgttacgtaaagcagaatgtctggtggccctggggagactgcaggaggcaagccagaccatcagtgatcttgaaaggaacttcacagccacaccagccctagcagatgtcctccctcagactctgcagagaaacctccatcgtctgaaaatgaagatgcaagaaaaggacagtctcacagaaagcttcccagcagctctggccaaaacccttgaggatgcagcgctgagggaggagaatgaacaactttccaatgcctcatcatccatcggcttatgcgtagatcctttaaaaggtcgctgtctcgttgccacaaaagatattctcccaggagagctcctggtgcaggaggatgcttttgtgagtgttctcaacccaggagaactgccaccaccgcatcacggcctagacagcaaatgggacaccagagtcaccaatggggacctctattgtcaccgatgtttgaagcacactttggccacagttccgtgtgacggatgcagttatgccaagtattgcagccaggagtgtttgcagcaggcctgggagctctaccacaggacagaatgtcctctgggagggctgcttctcacactgggtgtcttttgccacattgccctgaggttgactcttttggtgggatttgaggatgttcgcaaaatcataacgaagctttgtgataagattagtaacaaggacatctgtttacctgaaagcaacaatcaggtcaagacacttaattatggcctaggggagagtgagaaaaatggcaacatcgttgagaccccaattcctggatgcgatattaatgggaagtatgaaaataattataatgctgtcttcaaccttttgccccacactgaaaaccatagcccagagcacaaattcctctgtgctctctgtgtttctgcactgtgcagacagctagaagcagccagtttacaggccatcccaactgagaggattgtgaactcctctcagcttaaagcagcagtgacacctgaattgtgtcctgacgtgactatttggggagtggcgatgctgagacacatgttacagcttcagtgtaacgctcaggcgatgaccaccatacaacacacaggacctaaagggagcatcgttaccgacagcaggcaggtgcgccttgccacaggcatcttccctgttatcagcctcctgaaccactcctgtagccccaacaccagcgtgtccttcattagcactgtcgccaccatccgggcgtcacagcggattagaaaggggcaagagattctccactgctatgggcctcacaagagccggatgggggttgccgaaaggcagcagaagctgaggtctcagtatttctttgactgcgcctgtccagcttgtcaaactgaggcacacaggatggctgcagggcccaggtgggaagcattctgttgcaacagttgcggagcgcccatgcagggagatgacgtgctgcgctgtggcagcagatcttgtgcagaatccgccgtcagcagggaccacctggtctctcggttacaggacctacagcagcaggtcagagtggcccagaagcttctcagagatggtgaactagagcgagctgttcagcggctgtcggggtgccagcgtgacgccgagagcttcctgtgggcagagcacgccgtggtgggagagatcgcggatggcctggcccgggcctgtgctgccttaggagactggcaaaagtcagccacccatctacagaggagtctctacgtggtggaggttcgccacgggccgtccagtgttgaaatgggccatgagctcttcaaattggcccagatctttttcaacgggtttgcagtacccgaagccctgagcacaatacagaaagctgaggaggttctgtcgctgcactgtggcccatgggacgatgaaatccaggagctccagaagatgaaatcctgtttgttggacttaccacccacccctgtagggcctgcattgtagggttccaggaggattttgacccacagaaaaggagcccatggaacacaagttaaagaggttttgctggccaggtatggtggctcacgcctgtaatcccagcactttgggaggctaaggtgggcggatcacctgatgtcaggagttcaagaccagcctggccaacatggtgaaaccccatctttactaaaaatacaaaaaactagccaggcgtggtggtgggcacctgtaatcccagctacttgggaggctgaggcaggagaatctcttgaacccaggaggcggaggttgcagtgagccgagatcgctccactgcactccagcccaggtgacagtgtgagactccatctcaaaaaaaaaaataagaggccgggtgcggtggctcaagcctgtaatcccagcactttgggaggccgaggcaggcagatcacgaggtcaggagatccagaccatcctggctaacacggtgaaaccccgtctctactaaaaatacaaaaaaattagtcgggcgtggtggcggacgcctgtattcacagctactcgggaggttgaggcaggagaatggggtgaacccgggaggaagagcttgcagtgagccgagatcgcgccactgcactccagcctgggtgacagagccagactccatctcaaagaaaaaaaaaaaatattaagaggttctgctgccagatgtgggttctgtgggtcgggtgtgggttctgtgggtcgggtgtgggttctgcagaccaggtgcggattctgtgtaggttctgcaggcccagtgtagaggctcacacctgtaatcccagtactttgagacgctgaggtgggaggatcacttgagcccaggagttcaaaaccagcctgggcaatatagtgagaccgtatcactacaaaaaagtttttttagttcaccgagcatggtggcacatgcctgtagtcccacctactcgagaagctgagatagggtcacctgagcctggtaggctgaggctgcagtgagccaagatcgcactactgcactccagcctgggtgacagagtaagaccctgtctcaacaaaaaaataacaggttctgttgctgctgagctttcgtcaggaagataagactttcccaacagtccgaagcctaggatatgagggctgaggaggactcaaaccgttgcagtcagagagacacctattttggtgaatattttttgaaatagttaagtggcctccagtacaaactcccagttcccagaaaagacttaaaactagtatctggagattccaagtcctttaaaaggattttagctgatctgcaggcatctggatgttagcctggggttttggctggattccacctcgctcagtgatgatagtctgtttccctggaacattcctgtggttttagtagtaatgagatgtgtgcaccactccagtgggaactgaagctcttagtagttacattgtaattaaaaaagaattataaaacaagaaatcagcaagcctgcttacctccagagacacaccgttccacttacagtatctagcttcctcgactcctttgttaaaatcgtggagtatgaaccgtgaccagagaagtaaatatggagccgttttattgagcagtttcctccagggatgacggctgtcagtgtgtttcctgccagttttccagtccttactctctgcccttcattctgtactcttggcagagtcagtaaccaaccactaataaaatcaaagttgtagtaaagactttataacacata

SEQ ID NO: 229684 - protein, 331 aa, Artificial Sequence
  derived and/or modified sequence
MLWLFQSLLFVFCFGPGNVVSQSSLTPLMVNGILGESVTLPLEFPAGEKVNFITWLFNETSLAFIVPHETKSPEIHVTNPKQGKRLNFTQSYSLQLSNLKMEDTGSYRAQISTKTSAKLSSYTLRILRQLRNIQVTNHSQLFQNMTCELHLTCSVEDADDNVSFRWEALGNTLSSQPNLTVSWDPRISSEQDYTCIAENAVSNLSFSVSAQKLCEDVKIQYTDTKMILFMVSGICIVFGFIILLLLVLRKRRDSLSLSTQRTQGPESARNLEYVSVSPTNNTVYASVTHSNRETEIWTPRENDTITIYSTINHSKESKPTFSRATALDNVV

SEQ ID NO: 229685 - DNA, 996 bp, Artificial Sequence
  derived and/or modified sequence
atgctctggctatttcagtctttgctttttgtcttttgcttcgggcctgggaatgttgtgtcccaatcgtcccttacccccttgatggtgaacgggatcctcggtgagtccgttaccctgcctctggaattccctgctggagaaaaggtaaatttcattacttggttgtttaatgagaccagcctcgcttttatcgtgccacacgagactaaatctccagaaatacatgtgactaatcccaaacaggggaagagattaaactttacacagagctactctctacagctatccaacttaaagatggaggacaccggcagctatagggcccagatctccacaaagacctctgccaagctgtcatcctacactttgaggattctgagacagttgagaaacatccaggtgacaaaccattcccagctgtttcaaaacatgacctgtgagctgcatctcacttgctccgtggaagacgcagatgataatgtcagtttcagatgggaagccctggggaacacattgtccagccaacccaatctcactgtgagctgggacccacggatctcctccgagcaggactatacatgtatcgcagagaacgctgtgtcgaaccttagcttctcagtaagtgcgcagaaactttgtgaggacgtcaagattcagtataccgacaccaaaatgatcctctttatggtatcaggtatctgtattgtgttcggcttcattatcctgctgctcctggtgctgagaaaacgaagagattcgttatcgctgtccacccagagaacccagggaccggaaagtgcacggaacctggaatatgtgagcgtgtccccaaccaataacaccgtctacgccagtgtcacacatagcaatcgagaaacagagatttggacaccccgcgagaacgatacgatcactatttactctacaatcaaccatagtaaagagagcaagcctacgttctctcgcgccacagcgctcgataacgtagtttag

SEQ ID NO: 229686 - DNA, 996 bp, Artificial Sequence
  derived and/or modified sequence
atgctgtggctgttccagagcctgctgtttgtgttctgcttcggccctggaaatgtggtgtcccagagcagcctgacccccctgatggtgaatggcatcctgggggagagcgtgaccctgcccctggagttccctgctggggagaaggtgaacttcatcacctggctgttcaatgagaccagcctggccttcatcgtgccccatgagaccaagagccctgagatccacgtgaccaaccccaagcagggcaagaggctgaacttcacccagagctacagcctgcagctgagcaacctgaagatggaggacaccggcagctaccgggcccagatcagcaccaagaccagcgccaagctgagcagctacaccctgcgcatcctgcggcagctgaggaacatccaggtgaccaaccacagccagctgttccagaacatgacctgtgagctgcacctgacctgcagcgtggaggatgctgatgacaacgtgtccttccgctgggaggccctgggcaacaccctgagcagccagcccaacctgactgtgtcctgggacccccgcatcagcagcgagcaggactacacctgcatcgccgagaatgctgtgagcaacctgtccttctctgtgtctgcccagaagctgtgtgaagatgtgaagatccagtacacagacaccaagatgatcctcttcatggtgtctggcatctgcatcgtgtttggcttcatcatcctgctgctgctggtgctgaggaagagaagagacagcctgagcctgagcacccagaggacccagggccctgagagcgccaggaacctggagtatgtgtctgtgagccccaccaacaacacagtgtatgcctctgtgacccacagcaaccgggagacagagatctggaccccaagagaaaatgacaccatcaccatctacagcaccatcaaccacagcaaggagagcaagcccaccttcagccgggccacagccctggacaacgtggtgtag

SEQ ID NO: 229687 - DNA, 996 bp, Artificial Sequence
  derived and/or modified sequence
atgctgtggctgttccagagcctgctgttcgtgttctgcttcggcccgggcaatgtcgtctctcagtctagccttactcctctgatggttaacggcatcttgggggaaagcgtgacactgcctttggagttccccgcaggcgaaaaagtcaacttcatcacatggcttttcaatgagacaagtctggccttcatcgtccctcacgaaactaagtcaccagaaattcacgttacgaaccctaagcaagggaaaaggcttaactttacacagagctacagtctccagctatccaacctgaaaatggaggacaccggctcatatagggcccagatcagcaccaagacttccgcgaagttatccagctacacacttagaattctgagacagctgcgcaatatacaggttaccaatcattcgcagctatttcagaacatgacctgcgagcttcacttgacatgtagtgttgaagacgcagatgataatgtaagtttccggtgggaggctctgggcaatacattgtcctcccaaccgaacttaactgtgtcctgggatccgagaatatccagcgaacaggattacacgtgcatcgcagaaaatgctgtgtccaaccttagtttctccgttagcgcgcagaaactgtgcgaggatgttaagatacaatacacagacactaagatgattctgttcatggtgtccgggatctgcatagtgtttggcttcataatcctccttctgctggtcctgaggaaacgcagggactccttgagcctttcgactcagcggactcaaggccccgagtctgcacgcaatctcgagtacgtaagcgtgagccctaccaataacacagtgtacgctagcgtgacccatagtaatcgggaaaccgagatctggacccccagagaaaacgatacaatcaccatctactcaaccattaaccattctaaagagtctaagccaaccttctcgcgcgccactgcactcgataacgtggtgtag

SEQ ID NO: 229688 - DNA, 996 bp, Artificial Sequence
  derived and/or modified sequence
atgctgtggttgtttcagagccttttgtttgtcttctgttttggacctggcaatgtggtgtcccaatcaagccttaccccattgatggtgaacggtatactcggtgagtccgtcacattgcctctagagttccctgccggagagaaggtgaatttcattacctggctctttaacgagacaagcctagccttcatcgtgccacacgagaccaaaagccctgaaatacatgttacaaacccaaaacagggaaaaaggcttaacttcacacagagttactcgctccaactttctaacttaaaaatggaagacaccggatcctaccgagcccaaatcagcacaaagacaagcgccaagctgtcctcgtatacactgcggatcttacggcagctgcgcaatattcaagtgactaaccattcccaacttttccagaacatgacatgcgagttgcacctcacctgtagcgtagaagatgccgacgataatgtctctttccgctgggaagctctcggcaacaccctctcctctcagcccaaccttactgtttcatgggaccccaggatatccagcgaacaagactatacgtgcattgccgagaacgcagtctctaacctttccttttccgtctctgcacagaaactgtgtgaggatgtcaaaatccaatataccgacaccaaaatgattctcttcatggtatcaggaatatgcatcgtgttcggcttcattatcttgctcttgctggtgcttcgaaagaggagagatagtctgtctctgagcacacagcgaacacagggccctgaaagtgcgaggaacctcgaatatgtgagtgtgagccccaccaacaacaccgtgtacgctagtgtcacacacagtaaccgggaaacagaaatatggaccccaagggagaacgataccattactatttactcgactatcaaccactcaaaggagtccaagcccaccttctctcgcgctacggctctggacaatgttgtgtag

SEQ ID NO: 229689 - DNA, 2743 bp, Artificial Sequence
  derived and/or modified sequence
agtttatgacagaagggcaaaaacattgactgcctcaaggtctcaagcaccagtcttcaccgcggaaagcatgttgtggctgttccaatcgctcctgtttgtcttctgctttggcccagggaatgtagtttcacaaagcagcttaaccccattgatggtgaacgggattctgggggagtcagtaactcttcccctggagtttcctgcaggagagaaggtcaacttcatcacttggcttttcaatgaaacatctcttgccttcatagtaccccatgaaaccaaaagtccagaaatccacgtgactaatccgaaacagggaaagcgactgaacttcacccagtcctactccctgcaactcagcaacctgaagatggaagacacaggctcttacagagcccagatatccacaaagacctctgcaaagctgtccagttacactctgaggatattaagacaactgaggaacatacaagttaccaatcacagtcagctatttcagaatatgacctgtgagctccatctgacttgctctgtggaggatgcagatgacaatgtctcattcagatgggaggccttgggaaacacactttcaagtcagccaaacctcactgtctcctgggaccccaggatttccagtgaacaggactacacctgcatagcagagaatgctgtcagtaatttatccttctctgtctctgcccagaagctttgcgaagatgttaaaattcaatatacagataccaaaatgattctgtttatggtttctgggatatgcatagtcttcggtttcatcatactgctgttacttgttttgaggaaaagaagagattccctatctttgtctactcagcgaacacagggccccgagtccgcaaggaacctagagtatgtttcagtgtctccaacgaacaacactgtgtatgcttcagtcactcattcaaacagggaaacagaaatctggacacctagagaaaatgatactatcacaatttactccacaattaatcattccaaagagagtaaacccactttttccagggcaactgcccttgacaatgtcgtgtaagttgctgaaaggcctcagaggaattcgggaatgacacgtcttctgatcccatgagacagaacaaagaacaggaagcttggttcctgttgttcctggcaacagaatttgaatatctaggataggatgatcacctccagtccttcggacttaaacctgcctacctgagtcaaacacctaaggataacatcatttccagcatgtggttcaaataatattttccaatccacttcaggccaaaacatgctaaagataacacaccagcacattgactctctctttgataactaagcaaatggaattatggttgacagagagtttatgatccagaagacaaccacttctctccttttagaaagcagcaggattgacttattgagaaataatgcagtgtgttggttacatgtgtagtctctggagttggatgggcccatcctgatacaagttgagcatcccttgtctgaaatgcttgggattagaaatgtttcagatttcaattttttttcagattttggaatatttgcattatatttagcggttgagtatccaaatccaaaaatccaaaattcaaaatgctccaataagcatttcccttgagtttcattgatgtcgatgcagtgctcaaaatctcagattttggagcattttggatattggatttttggatttgggatgctcaacttgtacaatgtttattagacacatctcctgggacatactgcctaaccttttggagccttagtctcccagactgaaaaaggaagaggatggtattacatcagctccattgtttgagccaagaatctaagtcatccctgactccagtgtctttgtcaccaggccctttggactctacctcagaaatatttcttggaccttccacttctcctccaactccttgaccaccatcctgtatccaaccatcaccacctctaacctgaatcctaccttaagatcagaacagttgtcctcacttttgttcttgtccctctccaacccactctccacaagatggccagagtaatgtttttaatataaattggatccttcagtttcctgcttaaaaccctgcaggtttcccaatgcactcagaaagaaatccagtttccatggccctggatggtctggcccacctccagcctcagctagcattacccttctgacactctctatgtagcctccctgatcttctttcagctcctctattaaaggaaaagttctttatgttaattatttacatcttcctgcaggcccttcctctgcctgctggggtcctcctattctttaggtttaattttaaatatgtcacctcctaagagaaaccttcccagaccactctttctaaaatgaatcttctaggctgggcatggtggctcacacctgtaatccctgtactttgggaggccaaggggggagatcacttgaggtcaggagttcaagaccagcctggccaacttggtgaaaccccgtctttactaaaaatacaaaaaaattagccaggcgtggtggtgcacccctaaaatcccagctacttgagagactgaggcaggagaatcgcttgaacccaggaggtggaggttccagtgagccaaaatcatgccaatgtattccagtctgggtgacagagtgagactctgtctcaaaaaataaataaataaaataaaatgaaatagatcttat

SEQ ID NO: 229690 - DNA, 996 bp, Artificial Sequence
  derived and/or modified sequence
atgctgtggctgttccagagcctgctgttcgtgttctgcttcggccccggcaacgtggtgagccagagcagcctgacccccctgatggtgaacggcatcctgggcgagagcgtgaccctgcccctggagttccccgccggcgagaaggtgaacttcatcacctggctgttcaacgagaccagcctggccttcatcgtgccccacgagaccaagagccccgagatccacgtgaccaaccccaagcagggcaagagactgaacttcacccagagctacagcctgcagctgagcaacctgaagatggaggacaccggcagctacagagcccagatcagcaccaagaccagcgccaagctgagcagctacaccctgagaatcctgagacagctgagaaacatccaggtgaccaaccacagccagctgttccagaacatgacctgcgagctgcacctgacctgcagcgtggaggacgccgacgacaacgtgagcttcagatgggaggccctgggcaacaccctgagcagccagcccaacctgaccgtgagctgggaccccagaatcagcagcgagcaggactacacctgcatcgccgagaacgccgtgagcaacctgagcttcagcgtgagcgcccagaagctgtgcgaggacgtgaagatccagtacaccgacaccaagatgatcctgttcatggtgagcggcatctgcatcgtgttcggcttcatcatcctgctgctgctggtgctgagaaagagaagagacagcctgagcctgagcacccagagaacccagggccccgagagcgccagaaacctggagtacgtgagcgtgagccccaccaacaacaccgtgtacgccagcgtgacccacagcaacagagagaccgagatctggacccccagagagaacgacaccatcaccatctacagcaccatcaaccacagcaaggagagcaagcccaccttcagcagagccaccgccctggacaacgtggtgtag

SEQ ID NO: 229691 - protein, 398 aa, Artificial Sequence
  derived and/or modified sequence
MESVLSKYEDQITIFTDYLEEYPDTDELVWILGKQHLLKTEKSKLLSDISARLWFTYRRKFSPIGGTGPSSDAGWGCMLRCGQMMLAQALICRHLGRDWSWEKQKEQPKEYQRILQCFLDRKDCCYSIHQMAQMGVGEGKSIGEWFGPNTVAQVLKKLALFDEWNSLAVYVSMDNTVVIEDIKKMCRVLPLSADTAGDRPPDSLTASNQSKGTSAYCSAWKPLLLIVPLRLGINQINPVYVDAFKECFKMPQSLGALGGKPNNAYYFIGFLGDELIFLDPHTTQTFVDTEENGTVNDQTFHCLQSPQRMNILNLDPSVALGFFCKEEKDFDNWCSLVQKEILKENLRMFELVQKHPSHWPPFVPPAKPEVTTTGAEFIDSTEQLEEFDLEEDFEILSV

SEQ ID NO: 229692 - protein, 374 aa, Artificial Sequence
  derived and/or modified sequence
MESVLSKYEDQITIFTDYLEEYPDTDELVWILGKQHLLKTGGTGPSSDAGWGCMLRCGQMMLAQALICRHLGRDWSWEKQKEQPKEYQRILQCFLDRKDCCYSIHQMAQMGVGEGKSIGEWFGPNTVAQVLKKLALFDEWNSLAVYVSMDNTVVIEDIKKMCRVLPLSADTAGDRPPDSLTASNQSKGTSAYCSAWKPLLLIVPLRLGINQINPVYVDAFKECFKMPQSLGALGGKPNNAYYFIGFLGDELIFLDPHTTQTFVDTEENGTVNDQTFHCLQSPQRMNILNLDPSVALGFFCKEEKDFDNWCSLVQKEILKENLRMFELVQKHPSHWPPFVPPAKPEVTTTGAEFIDSTEQLEEFDLEEDFEILSV

SEQ ID NO: 229693 - DNA, 1197 bp, Artificial Sequence
  derived and/or modified sequence
atggagagcgtgctgagcaagtacgaggaccagatcaccatcttcaccgactacctggaggagtaccccgacaccgacgagctggtgtggatcctgggcaagcagcacctgctgaagaccgagaagagcaagctgctgagcgacatcagcgccagactgtggttcacctacagaagaaagttcagccccatcggcggcaccggccccagcagcgacgccggctggggctgcatgctgagatgcggccagatgatgctggcccaggccctgatctgcagacacctgggcagagactggagctgggagaagcagaaggagcagcccaaggagtaccagagaatcctgcagtgcttcctggacagaaaggactgctgctacagcatccaccagatggcccagatgggcgtgggcgagggcaagagcatcggcgagtggttcggccccaacaccgtggcccaggtgctgaagaagctggccctgttcgacgagtggaacagcctggccgtgtacgtgagcatggacaacaccgtggtgatcgaggacatcaagaagatgtgcagagtgctgcccctgagcgccgacaccgccggcgacagaccccccgacagcctgaccgccagcaaccagagcaagggcaccagcgcctactgcagcgcctggaagcccctgctgctgatcgtgcccctgagactgggcatcaaccagatcaaccccgtgtacgtggacgccttcaaggagtgcttcaagatgccccagagcctgggcgccctgggcggcaagcccaacaacgcctactacttcatcggcttcctgggcgacgagctgatcttcctggacccccacaccacccagaccttcgtggacaccgaggagaacggcaccgtgaacgaccagaccttccactgcctgcagagcccccagagaatgaacatcctgaacctggaccccagcgtggccctgggcttcttctgcaaggaggagaaggacttcgacaactggtgcagcctggtgcagaaggagatcctgaaggagaacctgagaatgttcgagctggtgcagaagcaccccagccactggccccccttcgtgccccccgccaagcccgaggtgaccaccaccggcgccgagttcatcgacagcaccgagcagctggaggagttcgacctggaggaggacttcgagatcctgagcgtgtag

SEQ ID NO: 229694 - DNA, 1125 bp, Artificial Sequence
  derived and/or modified sequence
atggagagcgtgctgagcaagtacgaggaccagatcaccatcttcaccgactacctggaggagtaccccgacaccgacgagctggtgtggatcctgggcaagcagcacctgctgaagaccggcggcaccggccccagcagcgacgccggctggggctgcatgctgagatgcggccagatgatgctggcccaggccctgatctgcagacacctgggcagagactggagctgggagaagcagaaggagcagcccaaggagtaccagagaatcctgcagtgcttcctggacagaaaggactgctgctacagcatccaccagatggcccagatgggcgtgggcgagggcaagagcatcggcgagtggttcggccccaacaccgtggcccaggtgctgaagaagctggccctgttcgacgagtggaacagcctggccgtgtacgtgagcatggacaacaccgtggtgatcgaggacatcaagaagatgtgcagagtgctgcccctgagcgccgacaccgccggcgacagaccccccgacagcctgaccgccagcaaccagagcaagggcaccagcgcctactgcagcgcctggaagcccctgctgctgatcgtgcccctgagactgggcatcaaccagatcaaccccgtgtacgtggacgccttcaaggagtgcttcaagatgccccagagcctgggcgccctgggcggcaagcccaacaacgcctactacttcatcggcttcctgggcgacgagctgatcttcctggacccccacaccacccagaccttcgtggacaccgaggagaacggcaccgtgaacgaccagaccttccactgcctgcagagcccccagagaatgaacatcctgaacctggaccccagcgtggccctgggcttcttctgcaaggaggagaaggacttcgacaactggtgcagcctggtgcagaaggagatcctgaaggagaacctgagaatgttcgagctggtgcagaagcaccccagccactggccccccttcgtgccccccgccaagcccgaggtgaccaccaccggcgccgagttcatcgacagcaccgagcagctggaggagttcgacctggaggaggacttcgagatcctgagcgtgtag

SEQ ID NO: 229695 - DNA, 1197 bp, Artificial Sequence
  derived and/or modified sequence
atggagagtgttctgtccaagtacgaggatcagattaccatctttacagattaccttgaggaatatccagacaccgatgaattagtgtggatcctcggcaagcagcacctcctcaagacggagaagtctaaactcctcagcgacatatccgcccggctctggttcacctaccgccgaaaattcagccctataggaggtaccggcccaagttctgatgcaggctggggttgtatgcttagatgcggtcaaatgatgcttgcccaagctctgatatgtcggcatctggggagggactggtcttgggaaaaacagaaggagcagcctaaagagtaccaacgcatactgcagtgttttctggacaggaaggattgttgttacagcatccaccagatggcccaaatgggggtgggcgagggaaagagcatcggggaatggtttggtccgaacacagtggctcaggtactcaaaaagctggccctgtttgacgagtggaactcactcgcagtgtatgtgtctatggacaacacagtggtgatcgaagacattaaaaaaatgtgcagggtgctccctctaagcgccgatacggccggagaccggccacccgactcgctgactgcctccaaccagagtaaaggcactagcgcttactgctccgcttggaagccactgctcctaatagttccactaaggctcggcattaaccagataaatccagtttacgtggatgctttcaaagaatgctttaaaatgcctcagtccctgggggctctgggcggcaaacctaacaatgcctactattttataggatttttaggggacgagctcatctttctagaccctcacaccactcagacctttgtagataccgaggagaatggcacagtgaatgaccagacctttcattgtctgcagagcccacaacgcatgaacatattaaacctggacccatccgtcgccctcggctttttctgtaaggaggaaaaggatttcgataattggtgctcactagtgcagaaagaaatccttaaggagaacctgagaatgtttgaattagttcagaagcacccatcccattggccaccatttgtgccaccggccaagcctgaagtgacaactacaggggctgaattcatagatagcaccgagcagctggaagagttcgacttagaagaagactttgagattctctctgtgtag

SEQ ID NO: 229696 - DNA, 1125 bp, Artificial Sequence
  derived and/or modified sequence
atggaatccgtgcttagcaagtatgaagaccaaattaccatcttcaccgactatttggaagagtacccagatactgacgagctcgtctggatcctgggcaagcaacacctgttaaagactggagggaccggaccaagcagcgatgcgggttggggttgtatgcttcggtgtggccaaatgatgcttgcccaagcactgatttgccgccatctgggccgggattggagctgggagaagcagaaggaacaacctaaagaataccagcggatcctgcaatgcttcctggaccggaaggactgctgctacagcattcatcagatggcccagatgggcgtgggagaagggaaaagtattggagaatggttcggcccgaacaccgtggcccaggtcctgaagaagctggctctgttcgatgagtggaactctctggccgtttatgttagtatggacaatacagtcgtgattgaagatatcaaaaagatgtgtcgggtgctgcccttgagtgcggacacagcgggtgataggcctccagattctctcacagcctccaatcagtctaaagggacatccgcctactgcagtgcatggaaaccacttctcctcatagttcctctccggctggggattaatcagattaaccctgtctatgtcgatgccttcaaagaatgttttaaaatgcctcaaagtttaggtgcactcggtgggaagcccaataatgcttactattttatcgggtttctgggagatgagctgatcttcttagatccacatactactcagacattcgtggacaccgaagagaacggcaccgtgaatgatcagacctttcattgccttcaaagccctcaacgaatgaatatcctgaatcttgatccatctgtggccctggggttcttttgtaaagaagagaaagattttgacaattggtgttccctggtgcagaaagaaatattaaaggaaaatctccgcatgttcgaactggtccagaaacaccctagtcactggccaccatttgtgcctccagccaaacctgaggtgaccacaaccggagctgaatttatcgacagcaccgaacagctcgaggaattcgatctggaagaagactttgagatactttccgtatag

SEQ ID NO: 229697 - DNA, 2315 bp, Artificial Sequence
  derived and/or modified sequence
ggagttgcagtttgagagcagttccgggcagggaggcgcctttgctgccctcacagacttggcccctagcagtgcagaactacaagtcccagggatcctagcgaccgtccgtccgtagtcaagttgccggtggaattggcccaggatgacagctggagaatggagtcagttttatccaagtatgaagatcagattactattttcactgactacctagaagaatatccagatacagatgagctggtatggatcttagggaagcagcatctccttaaaacagaaaaatctaagctgttgtctgatataagtgctcgtctatggtttacatacagaaggaaattttcaccaattggtggaacgggcccttcatcagatgctggttggggatgtatgctacgctgtggacagatgatgctggctcaagcccttatctgtagacacttgggaagggactggagctgggagaaacaaaaagaacaacccaaagaataccaacgcatcctacagtgcttcttagatagaaaagattgttgctactctatccatcaaatggcacaaatgggtgtaggagaagggaaatcaattggagaatggtttggaccaaatacagttgcacaggtgttaaaaaaacttgctttatttgacgaatggaattccttggctgtttatgtttcaatggataacacagtggtcattgaagatatcaaaaaaatgtgccgtgtccttcccttgagtgctgacacagctggtgacaggcctcccgattctttaactgcttcaaaccagagtaagggcacctctgcctactgctcagcctggaaacccctgctgctcattgtgccccttcgcctgggcataaaccaaatcaatcctgtctatgttgatgcattcaaagagtgttttaagatgccacagtctttaggggcattaggaggaaaaccaaataacgcgtattatttcataggattcttaggtgacgagctcatcttcttggaccctcatacaacccagacctttgttgacactgaagagaatggaacggttaatgaccagactttccattgcctgcagtccccacagcgaatgaacatcctaaacctggatccttcagttgcattgggatttttctgcaaagaagaaaaagactttgataactggtgtagccttgttcagaaggaaattctaaaggagaatttaaggatgtttgaattagttcagaaacatccatcacactggcctccctttgtacctccagccaagccagaagtgacaaccactggggcagaattcattgactctactgagcaactggaggagtttgatctggaggaagattttgagattctgagtgtgtagaatcctgggaactcaacttgaaggtctgtcttccatctggcaccataaaaacatgaacttattgcataaaacttttctagtcagcaagtgcctgatatgccaatagcatacaaactcaatagcaatcatgactgagccaatcactgtttctcagaaaaacaaaacaaaacaaaacaaatgacagtaacccttccccggaaagaaatagaacaatcatggagcctaggagcagagagatgaggaggagttcattgcttcccagcttgtgttatatggctacagcaagtcttcagctgctgcaatgaggaaatgggcatctggaagacaaacagcaactctcagcttgcttcaagaaccagcagataagagatggttaagctgttcttcaccctttcagatgtgacctcttttggactaagcagcaatctgttctcttgctcaaataataaagtgactgaatcagggaggaaaaggttcttgttaaattatttgattgtgtagttgaagtaattataatttatatcaaaacgtttgtcaaagaaacgatgtcaaatatacacttcttgatctcccttctgtttgcggggatcttactatttgatgggtcactgtccccattcttactgatacttttgtcagatatcaccctgtccttaaatcatgatcacttaaatcaggggtcagcaaactttttctgtaaagggccagacgggaaatattttgggctttgcaggccatgcggcctctgtcacatctactcaactctgctgttgacatgcaaaagcagcaatagacaatatgcgtgtaaatgagtgtggctgtaatccaagaaaactttatttacaaaagcaggtggagggctgggtttggcctgcaggctgtagcttgccaatcagtgacttaaattgttgatttttgtttgataaattaaaaataaattgtgtttgaagtatacccta

SEQ ID NO: 229698 - DNA, 2199 bp, Artificial Sequence
  derived and/or modified sequence
cgcctttgctgccctcacagacttggcccctagcagtgcagaactacaagtcccagggatcctagcgaccgtccgtccgtagtcaagttgccggtggaattggcccaggatgacagctggagaatggagtcagttttatccaagtatgaagatcagattactattttcactgactacctagaagaatatccagatacagatgagctggtatggatcttagggaagcagcatctccttaaaacaggtggaacgggcccttcatcagatgctggttggggatgtatgctacgctgtggacagatgatgctggctcaagcccttatctgtagacacttgggaagggactggagctgggagaaacaaaaagaacaacccaaagaataccaacgcatcctacagtgcttcttagatagaaaagattgttgctactctatccatcaaatggcacaaatgggtgtaggagaagggaaatcaattggagaatggtttggaccaaatacagttgcacaggtgttaaaaaaacttgctttatttgacgaatggaattccttggctgtttatgtttcaatggataacacagtggtcattgaagatatcaaaaaaatgtgccgtgtccttcccttgagtgctgacacagctggtgacaggcctcccgattctttaactgcttcaaaccagagtaagggcacctctgcctactgctcagcctggaaacccctgctgctcattgtgccccttcgcctgggcataaaccaaatcaatcctgtctatgttgatgcattcaaagagtgttttaagatgccacagtctttaggggcattaggaggaaaaccaaataacgcgtattatttcataggattcttaggtgacgagctcatcttcttggaccctcatacaacccagacctttgttgacactgaagagaatggaacggttaatgaccagactttccattgcctgcagtccccacagcgaatgaacatcctaaacctggatccttcagttgcattgggatttttctgcaaagaagaaaaagactttgataactggtgtagccttgttcagaaggaaattctaaaggagaatttaaggatgtttgaattagttcagaaacatccatcacactggcctccctttgtacctccagccaagccagaagtgacaaccactggggcagaattcattgactctactgagcaactggaggagtttgatctggaggaagattttgagattctgagtgtgtagaatcctgggaactcaacttgaaggtctgtcttccatctggcaccataaaaacatgaacttattgcataaaacttttctagtcagcaagtgcctgatatgccaatagcatacaaactcaatagcaatcatgactgagccaatcactgtttctcagaaaaacaaaacaaaacaaaacaaatgacagtaacccttccccggaaagaaatagaacaatcatggagcctaggagcagagagatgaggaggagttcattgcttcccagcttgtgttatatggctacagcaagtcttcagctgctgcaatgaggaaatgggcatctggaagacaaacagcaactctcagcttgcttcaagaaccagcagataagagatggttaagctgttcttcaccctttcagatgtgacctcttttggactaagcagcaatctgttctcttgctcaaataataaagtgactgaatcagggaggaaaaggttcttgttaaattatttgattgtgtagttgaagtaattataatttatatcaaaacgtttgtcaaagaaacgatgtcaaatatacacttcttgatctcccttctgtttgcggggatcttactatttgatgggtcactgtccccattcttactgatacttttgtcagatatcaccctgtccttaaatcatgatcacttaaatcaggggtcagcaaactttttctgtaaagggccagacgggaaatattttgggctttgcaggccatgcggcctctgtcacatctactcaactctgctgttgacatgcaaaagcagcaatagacaatatgcgtgtaaatgagtgtggctgtaatccaagaaaactttatttacaaaagcaggtggagggctgggtttggcctgcaggctgtagcttgccaatcagtgacttaaattgttgatttttgtttgataaattaaaaataaattgtgtttgaagt

SEQ ID NO: 229699 - DNA, 1197 bp, Artificial Sequence
  derived and/or modified sequence
atggagagcgtgctgagcaaatatgaggaccagatcaccatcttcacagactacctggaggagtacccagacacagatgagctggtgtggatcctgggcaagcagcacctgctgaagacagagaagagcaagctgctgagtgacatcagcgcccggctgtggttcacctacagaaggaagttcagccccatcggcggcaccggccccagcagtgatgctggctggggctgcatgctgcgctgtggccagatgatgctggcccaggccctgatctgccgccacctgggccgggactggagctgggagaagcagaaggagcagcccaaggagtaccagaggatcctgcagtgcttcctggacaggaaggactgctgctacagcatccaccagatggcccagatgggcgtgggggagggcaagagcatcggggagtggtttggccccaacacagtggcccaggtgctgaagaagctggccctgtttgatgagtggaacagcctggccgtgtatgtgtccatggacaacacagtggtgattgaggacatcaagaagatgtgccgggtgctgcccctgtctgctgacacagctggggaccggcccccagacagcctgacagccagcaaccagagcaagggcaccagcgcctactgcagcgcctggaagcccctgctgctgattgtgcccctgcggctgggcatcaaccagatcaaccctgtgtatgtggatgccttcaaggagtgcttcaagatgccccagagcctgggcgccctgggcggcaagcccaacaatgcctactacttcatcggcttcctgggagatgagctgatcttcctggacccccacaccacccagacctttgtggacacagaagaaaatggcaccgtgaatgaccagaccttccactgcctgcagagcccccagaggatgaacatcctgaacctggaccccagcgtggccctgggcttcttctgcaaggaggagaaggactttgacaactggtgcagcctggtgcagaaggagatcctgaaggagaacctgaggatgtttgagctggtgcagaagcaccccagccactggcccccatttgtgcccccagccaagccagaggtgaccaccactggagctgagttcatcgacagcacagagcagctggaggagtttgacctggaggaggactttgagatcctgtctgtgtag

SEQ ID NO: 229700 - DNA, 1125 bp, Artificial Sequence
  derived and/or modified sequence
atggagagcgtgctgagcaaatatgaggaccagatcaccatcttcacagactacctggaggagtacccagacacagatgagctggtgtggatcctgggcaagcagcacctgctgaagacaggaggcaccggccccagcagtgatgctggctggggctgcatgctgcgctgtggccagatgatgctggcccaggccctgatctgccgccacctgggccgggactggagctgggagaagcagaaggagcagcccaaggagtaccagaggatcctgcagtgcttcctggacaggaaggactgctgctacagcatccaccagatggcccagatgggcgtgggggagggcaagagcatcggggagtggtttggccccaacacagtggcccaggtgctgaagaagctggccctgtttgatgagtggaacagcctggccgtgtatgtgtccatggacaacacagtggtgattgaggacatcaagaagatgtgccgggtgctgcccctgtctgctgacacagctggggaccggcccccagacagcctgacagccagcaaccagagcaagggcaccagcgcctactgcagcgcctggaagcccctgctgctgattgtgcccctgcggctgggcatcaaccagatcaaccctgtgtatgtggatgccttcaaggagtgcttcaagatgccccagagcctgggcgccctgggcggcaagcccaacaatgcctactacttcatcggcttcctgggagatgagctgatcttcctggacccccacaccacccagacctttgtggacacagaagaaaatggcaccgtgaatgaccagaccttccactgcctgcagagcccccagaggatgaacatcctgaacctggaccccagcgtggccctgggcttcttctgcaaggaggagaaggactttgacaactggtgcagcctggtgcagaaggagatcctgaaggagaacctgaggatgtttgagctggtgcagaagcaccccagccactggcccccatttgtgcccccagccaagccagaggtgaccaccactggagctgagttcatcgacagcacagagcagctggaggagtttgacctggaggaggactttgagatcctgtctgtgtag

SEQ ID NO: 229701 - DNA, 1197 bp, Artificial Sequence
  derived and/or modified sequence
atggagagcgtgctgagcaagtacgaggaccagatcaccatcttcactgattatcttgaagagtatccggatacagatgagcttgtgtggatcctgggcaagcagcacctgctgaaaaccgagaaaagcaagctgctctccgacataagtgcccgcctgtggttcacataccgcaggaaattctccccaatcggagggacaggccccagcagcgacgccggttggggatgtatgttgcgctgtggtcaaatgatgctggcccaagccttgatatgtcgacatctgggacgagattggtcctgggaaaaacagaaagagcaacccaaggagtatcagcgtattctgcaatgtttcctggatcgcaaggactgctgctatagtatccatcaaatggctcagatgggagtgggcgaaggaaagtcgatcggtgaatggttcggtcctaacaccgtcgcgcaggtcctgaagaagctggccctcttcgacgagtggaactcattggccgtgtatgtgtccatggacaacacggtggtgattgaggacatcaagaagatgtgccgagtgctccccctctctgcggatactgcgggcgatagacctccggatagcctaaccgcctccaatcagagcaagggaacatcagcctactgtagtgcatggaagccccttttgctgatcgtccccctgaggctcgggatcaatcagatcaacccagtctatgtagacgcctttaaggaatgctttaaaatgcctcagtccctgggagctttgggcgggaagccgaacaatgcctactatttcattggattcctgggtgatgaactgatcttcttggacccccacacaacacagaccttcgtcgacaccgaggagaacggcactgtgaatgaccaaacttttcactgtctccagtctccacagagaatgaatatccttaacctcgatccttctgtcgcgttgggcttcttctgtaaggaggagaaagacttcgataactggtgttctcttgtgcagaaagaaattctaaaagagaacctgagaatgtttgaactcgtccagaagcatcccagccattggcctccatttgttccaccggctaagcctgaagtgaccaccacaggcgcggagttcatcgacagcactgaacagttggaagagttcgatcttgaagaagacttcgaaatattgtctgtgtag

SEQ ID NO: 229702 - DNA, 1125 bp, Artificial Sequence
  derived and/or modified sequence
atggagagcgtgctgagcaagtacgaggaccagatcaccatcttcactgattacttagaggaataccccgacacggacgagctcgtatggatcctcggcaagcagcacctcctgaagacaggggggaccggcccctctagcgacgcggggtggggctgtatgctgcgatgtggacagatgatgctggctcaagcattaatctgtcggcacctgggtagagattggagctgggaaaagcagaaggaacaacccaaggaataccagcgtatccttcaatgtttcctggacagaaaagactgctgctattccatccatcagatggcacaaatgggagtgggtgaaggcaaatctataggcgagtggtttgggcctaacacagtggcacaggtgctgaagaagctggccctattcgacgagtggaacagtctggccgtctatgtgtctatggataatacagtcgtgatcgaggatattaagaaaatgtgcagggtcctcccactctctgctgatacagcgggcgatcgccccccagacagccttaccgctagcaatcagtctaaaggtaccagcgcttattgttctgcatggaaaccactgcttcttatcgttccgctccgtctgggaattaatcagattaatccagtctacgtcgacgcatttaaagagtgcttcaaaatgcctcagtccctgggagcactcggcggcaaaccaaataacgcatattactttattgggtttttgggggatgaattaattttcttggaccctcatacaacccagacttttgtcgacactgaggaaaacgggactgtaaacgaccagacgtttcattgtcttcagtcaccacagcggatgaacatccttaatctggatccatcagtggcattgggatttttctgtaaggaagagaaggactttgataactggtgctctctagtgcagaaggaaatcctgaaggagaatttacgcatgtttgaactggttcaaaagcacccctcacattggcccccctttgtaccgcccgctaaacctgaggtcaccactaccggggcggaattcatcgacagcaccgaacagttggaagagtttgacctggaggaagactttgagatcctttctgtttag

SEQ ID NO: 229703 - DNA, 1197 bp, Artificial Sequence
  derived and/or modified sequence
atggaaagcgtcctcagcaagtacgaggatcaaatcaccatttttactgactatctggaagagtacccggacaccgacgagctggtgtggattctaggaaagcaacacctgctgaagacagagaagtctaaattactctctgatatttctgcaaggctctggtttacctaccggaggaagttttcacctatcggcggtactggcccttcctctgacgccggatgggggtgtatgctaaggtgcggacagatgatgctcgcacaggctctgatctgtcggcatctcggcagagattggagctgggagaaacagaaggagcagccaaaagagtaccagagaatcctacagtgctttcttgacagaaaggactgttgctacagcattcaccaaatggcccagatgggtgtcggagagggcaagtccatcggggagtggttcggaccaaacaccgtcgcccaggtgctcaaaaaattggctctttttgacgagtggaattcccttgcagtgtatgtgtctatggacaacactgtagtgatcgaagacatcaaaaaaatgtgcagggtgctgccactgtccgctgataccgccggagacaggccaccagactcccttactgcatcaaaccaaagtaaaggcaccagcgcctattgttccgcttggaaacctctactgctgattgtgcctctcagactaggtattaaccagataaacccagtgtacgtggacgcctttaaggagtgtttcaagatgcctcagagtctcggggcattaggagggaagcctaataatgcctactattttatcgggtttcttggagatgagctgatctttttggatccccatactacccagacctttgtcgacactgaagagaatggaacagtgaatgatcagactttccactgcctccagtcaccacagcgcatgaatatcttgaatctggacccctcagtcgccctggggttcttttgcaaggaggagaaagattttgataactggtgctccttggtgcagaaagagatcttaaaggagaatttgaggatgttcgaattagttcagaagcatccaagtcattggcctccttttgtgcctcctgcaaagccagaggtcactactacaggagcagagtttatcgattcgaccgaacaacttgaggagtttgacttagaagaggatttcgaaatcctctccgtgtag

SEQ ID NO: 229704 - DNA, 1125 bp, Artificial Sequence
  derived and/or modified sequence
atggagtccgttttgagcaagtacgaggaccagatcaccattttcacggactacctggaagaataccctgacaccgacgagctggtctggatccttgggaagcagcacttgctgaagacgggcggtacgggcccaagtagcgacgccggttggggctgcatgttgcgatgcggccagatgatgttggcacaggcgcttatctgcagacacctgggtagggactggtcttgggaaaaacagaaggagcagccaaaagagtatcaaagaatcctgcaatgttttttggataggaaagactgctgctactctatccatcagatggcacagatgggcgtgggggaaggaaagtcaataggcgagtggtttggaccgaatactgtggcgcaagtgctgaaaaagttggccctgtttgacgaatggaatagtttggctgtgtatgtatccatggacaacaccgtcgtcatcgaagatatcaagaagatgtgtcgcgtgctccccctcagcgcggacacggccggtgatcgtccgcctgattcgctgaccgcctccaaccagagtaaaggcacatcagcctactgtagtgcatggaaaccactgttattgatcgtgccccttagacttgggatcaatcagattaatccggtgtatgtagatgcctttaaggagtgtttcaaaatgccccagtctcttggtgccctgggtggtaagcctaacaacgcatattacttcattgggttcctgggtgatgagttaattttccttgacccacatacaactcagacctttgtcgatactgaggagaacggcaccgtcaacgatcagactttccactgtttacagtcgcctcagcggatgaatatcctgaacctggacccttctgtggccctgggcttcttctgtaaggaagagaaagacttcgacaattggtgtagcctcgtccagaaagagatcctgaaggagaatcttcgaatgttcgagctggtccagaaacatccgtctcactggcctcccttcgtgccgcctgcgaagcccgaagtgactaccaccggggctgagttcatagactctactgaacaactggaggagttcgacctcgaagaggatttcgagatcctctcagtttag

SEQ ID NO: 229705 - protein, 357 aa, Artificial Sequence
  derived and/or modified sequence
MGGAVSAGEDNDDLIDNLKEAQYIRTERVEQAFRAIDRGDYYLEGYRDNAYKDLAWKHGNIHLSAPCIYSEVMEALKLQPGLSFLNLGSGTGYLSTMVGLILGPFGINHGIELHSDVVEYAKEKLESFIKNSDSFDKFEFCEPAFVVGNCLQIASDSHQYDRIYCGAGVQKDHENYMKILLKVGGILVMPIEDQLTQIMRTGQNTWESKNILAVSFAPLVQPSKNDNGKPDSVGLPPCAVRNLQDLARIYIRRTLRNFINDEMQAKGIPQRAPPKRKRKRVKQRINTYVFVGNQLIPQPLDSEEDEKMEEDNKEEEEKDHNEAMKPEEPPQNLLREKIMKLPLPESLKAYLTYFRDK

SEQ ID NO: 229706 - DNA, 1074 bp, Artificial Sequence
  derived and/or modified sequence
atgggcggcgccgtgagcgccggcgaggacaacgacgacctgatcgacaacctgaaggaggcccagtacatcagaaccgagagagtggagcaggccttcagagccatcgacagaggcgactactacctggagggctacagagacaacgcctacaaggacctggcctggaagcacggcaacatccacctgagcgccccctgcatctacagcgaggtgatggaggccctgaagctgcagcccggcctgagcttcctgaacctgggcagcggcaccggctacctgagcaccatggtgggcctgatcctgggccccttcggcatcaaccacggcatcgagctgcacagcgacgtggtggagtacgccaaggagaagctggagagcttcatcaagaacagcgacagcttcgacaagttcgagttctgcgagcccgccttcgtggtgggcaactgcctgcagatcgccagcgacagccaccagtacgacagaatctactgcggcgccggcgtgcagaaggaccacgagaactacatgaagatcctgctgaaggtgggcggcatcctggtgatgcccatcgaggaccagctgacccagatcatgagaaccggccagaacacctgggagagcaagaacatcctggccgtgagcttcgcccccctggtgcagcccagcaagaacgacaacggcaagcccgacagcgtgggcctgcccccctgcgccgtgagaaacctgcaggacctggccagaatctacatcagaagaaccctgagaaacttcatcaacgacgagatgcaggccaagggcatcccccagagagccccccccaagagaaagagaaagagagtgaagcagagaatcaacacctacgtgttcgtgggcaaccagctgatcccccagcccctggacagcgaggaggacgagaagatggaggaggacaacaaggaggaggaggagaaggaccacaacgaggccatgaagcccgaggagcccccccagaacctgctgagagagaagatcatgaagctgcccctgcccgagagcctgaaggcctacctgacctacttcagagacaagtag

SEQ ID NO: 229707 - DNA, 4252 bp, Artificial Sequence
  derived and/or modified sequence
ggcggctccggagtccgggaggctctggctgctccagtcgcgggtccgggccccgcctctccactcggcggtggcgtccgtgttgttattgtggtggtagcggcgtctggctgctgcggaccccgccgagtcctagcgcctggcctgcgcgccgctgcccgcgccacagccccatcactgagaagaattttttcactgtatagttgcctctgcacttaaagcaggcttggtccatgaatcccatgacaagagctttgaggacatgaggagcattctttgttcaaacatactgtgttttcctttggatcactggattaatttatttttggaaatcaagtgcaatattggaagccatttctactaattttatttcacttttaaatttatgatttgatttgaatactatcatgggaggagctgtgagtgctggggaagataatgatgacttaattgataatttaaaagaagctcagtatattcgtactgaaagagtggagcaagccttcagagcgattgatcgtggagattactatttggaaggctacagagacaatgcttacaaagacttagcctggaagcatggaaacatccacttgtcagcaccttgcatttattctgaagttatggaagcattgaaacttcaaccaggattgtcttttcttaacctgggaagtggaaccggatatttaagtacaatggtgggcttaattttaggtccttttggaataaatcatgggattgagcttcattcagatgtggtggaatatgccaaggaaaaactggagagcttcatcaaaaatagtgatagctttgataaatttgagttctgtgaacctgcatttgttgttggtaattgcctccagatagcttctgacagtcatcagtatgatcgaatttattgtggagctggagtgcagaaagaccatgaaaactacatgaaaatattactaaaagttggaggcatattagtcatgcctatagaggatcagttaacacagattatgcgaactggacagaacacttgggaaagtaaaaatatccttgctgtttcatttgctccacttgtgcaaccaagtaagaatgataatggcaaaccagattctgtgggactccctccctgtgctgtcaggaatctacaggacttggctcgtatttacattcgacgcacacttagaaatttcataaatgatgagatgcaggccaaggggattcctcaaagggctccacccaaaaggaaaagaaagagagttaaacagagaattaacacttacgtatttgtgggtaatcagcttattcctcagcctctagacagtgaagaggatgaaaaaatggaagaggataacaaagaagaggaggaaaaagatcacaatgaagcaatgaagccagaggagccacctcaaaatttactgagagaaaaaatcatgaagctgcccctccctgaatctttaaaagcttacttgacatattttagagacaaataacttagatcaagaagaaaaatgcctactgataattcctttagtcttgaaaatgtagcatttgttaggagttaaaagagagaattatttctttcatcagagcaaattatagtggaaaaaaaatcacttgtttctgtcagtaacacaaatgatgtattcagtgaataaaagaatcccttttataaaatctatttttctttaaatcttggaaaaatgttgttttagctcagagtgatttcaaagtggaatgcaacagtagtcaagacttgtgtactataaatccttttctgattccttacagatttgtagtgatgaggtttagatttaattttatatatggtttaaataattgttaagcttatataacctgatctgaattgcagttgtttgcatttcctctatgaaaacttcatttatctaataaggaagtcaaatgctttgtagactatttaccttacttttgttgcaatcactgttgttgggttgctgtatatatattccgggcaatatatgagtgcaataacaatacaagatattgaataatttagctttaaaaaatcccacaaattttatgaaattttacagccctgctacttttgcttttgaatctcttgccaaaagacatgggtaaaatatctgcctctctcatagagattttaagagcacagcaagtgaattattaaaacaaagtctatacttaatacaactctttatatggaccctttacattttcagtatttaaaaaaatgaggttatcttaactctatagaattttaaaagtatatttagaattgttttttctgtagttcactgtataaagtatttggttttttaaaaaaagcaaaaccattgttatgtgtgactcttgataggacacagaacgagtgaatgagcatgagtgaggccactttcttggatggctgtaagtagcagggccagggtagacctggtcagcggatgcactttagcagatggaacttctagtttatctgaatatttatctttgacaaggtagggctgagcctacatttgcttttgatctatctagtataagaaatattcacagaaattgtatgtagataccctttgttttgaaaatgctgttcagaatcatagtgtaatctttgggacctatgccatgttcatttcactccttcccatattttttgtgtttcttttggtaaaactataatggttttcattttttacttaatatcacacagttaaactgtccatatttgagctttattttagcttatcagtgataaaaaacaggtagtaactgccattgtttgtttgttttcctaataaggcctgaaaacagccattccttgttaagaaagtgtacaatgtaacatatttgctagagttacatggattatatatttcttaaagggaaaaatttgagagtatcatggactaccaccagcattattattacagtagttactcagatttggttaaggaagcccaagcaatgtatagtgaaaggattattatctctctgctaagattcagatattgtttcagaaatctcagctccagtaattccacaacatctaaaaacaaatgtttgtgatcatgtgtaagcatgaaattgttccaagtaagtgaggatattttagttatgtgaaagacagtttcatggaaggtatttgttttataccagtggctgggatggtggaattggggttatttctacaattattcttagacgattactaaactgttaagaaatgccccatatcatttttgtatctaggaaagaaaaaaatcagtttcatactgttgtcatctgtcagaaatgctcattttattttgaattaaatgtggcttttgaagtacctagttaccttgaattcctggtgaccacatgtttttatctggaaaacctggagaaagttatctgtcccatctcccctgcttgtttttttttttttttttggttggagctgctgtttagatgatgcttttactatgcaggagagagtttttgttaaggatatatttgaagattggcttttccatattgtccttcattctttgaccatggcaaagtgtacagtagattttcatgatcattgcatatttcttgtcattgaaatgtatcttttatgtttttaaatgcattcattttacacttgtgagtttatcattgactttaagaggtagaaatgaaaaatgaaaattaaagctaaagcctttttatctattaatgcagatatattagaataagaatattttgggtttgtgtttattttttaatgaatttatgtttacttgatatggaaaattacgctttataggtggaaaagtagcaaataaagattaagtaaaagtaagtgaaaatgatggggaatatagtattggaattttatagctagttaaaacagtaagtatcatctaatttgggtgtttattttgcagatgagaaaacagacctagaaccgtggcatgttttgcctgaaacatacagtgagttagagacagggcctaagatagcttctagcatcagatcaatcccaagaatccatcagcaacctcagaccaacccaagaagataatttaaatctatactgcttattggtcaatatatttggttctagtattaataaagaaaaatgttattaaaatagcatacatagtagtaaaataaaatacaaaaagtgtgttgatttatagctgtttgagatgataaaagtgaagcaaagcctgttaaatcattggaagacttggaaaattattttaaataaacaattacatgtaattaagca

SEQ ID NO: 229708 - DNA, 1074 bp, Artificial Sequence
  derived and/or modified sequence
atgggtggagccgtgtcagccggcgaagataatgatgatttaatcgataacctcaaggaagcccagtacattcgtaccgaaagggtcgaacaggcgttccgcgcgatcgaccgtggagactactacttagaagggtacagagataacgcttataaagatctggcttggaagcacggcaacatccatctctctgccccctgcatctactcagaggtcatggaagcactcaagctgcagcccggcctgagctttctgaatttgggatctggaaccggctacctatcaacaatggtgggactgattctggggccctttggcatcaaccacggcattgagctccattctgacgtggtggagtacgcaaaagagaaactggagtcctttatcaagaacagcgacagtttcgataaatttgagttctgcgagcccgccttcgtcgtcggtaactgcctgcaaattgcatcagattcccaccagtacgacagaatttactgcggagctggagtgcagaaggaccatgagaactacatgaagatcctcttgaaggtgggaggaatcctagtcatgccaatcgaggaccagttgactcagattatgaggacaggacagaacacctgggaaagtaaaaatattttggcagtctcttttgcccccctcgtgcagcccagcaagaatgacaatggcaaacccgattccgttggcctgcctccctgtgctgtcagaaatttacaggatttagccaggatctatatccgaagaactctcaggaactttatcaacgatgagatgcaggccaagggcatccctcagcgggccccgccgaagagaaagcgtaagcgggttaaacagagaataaacacatatgtctttgtaggcaatcaattaatcccgcagccgctagatagcgaggaggatgagaaaatggaggaagacaacaaagaagaggaggagaaggaccataatgaggccatgaagcccgaagaaccgccccaaaatctgctgcgagagaaaattatgaaattgcctctccccgagagcctgaaagcgtatctgacctatttcagggacaaatag

SEQ ID NO: 229709 - DNA, 1074 bp, Artificial Sequence
  derived and/or modified sequence
atgggaggagccgtgtcggctggggaagacaatgatgacctgattgacaatctgaaagaagctcagtacataaggaccgagagggtggaacaggcctttagagctatcgacagaggtgattattacttggaggggtatcgtgacaatgcgtacaaagacctggcatggaagcatggaaacatccatctttcagcaccttgcatttactctgaagttatggaagcgctgaaactgcaacctggactttcctttttaaacttaggctccgggacgggatacctttctacgatggtcggtctgatactgggacccttcgggattaaccacgggattgaactccactccgacgtggtggaatatgctaaagaaaagctggaaagcttcattaagaatagcgactcctttgataaatttgagttttgtgagcctgcattcgtggtcgggaactgcctccaaatagcctccgacagccatcagtatgacaggatctactgtggcgccggagtgcagaaggaccacgaaaactacatgaagatcctactgaaggtgggaggcatcctggtgatgccgatagaggatcagctcacccaaataatgagaacggggcagaatacttgggagagcaagaacatattagccgtgtccttcgccccgctcgttcaaccttccaagaatgacaacgggaaaccagattccgttgggctgcccccctgcgccgtccgtaatcttcaggatcttgcccgcatttacattcgacggaccctccggaatttcatcaatgacgaaatgcaggctaagggaataccgcaaagagccccaccaaaacggaaacggaagcgtgtgaagcagaggataaacacgtatgtgttcgtggggaatcaattaataccacaaccattggactctgaggaggacgaaaaaatggaggaggataataaggaggaggaggaaaaggatcacaacgaggcgatgaaaccggaagagcccccccagaatcttttacgagagaagatcatgaaacttcccttgcccgagtcccttaaggcctacctcacctacttcagggataaatag

SEQ ID NO: 229710 - DNA, 1074 bp, Artificial Sequence
  derived and/or modified sequence
atgggcggcgctgtgtctgctggagaagataatgatgacctgattgacaacctgaaggaggcccagtacatcagaacagagcgggtggagcaggccttccgggccatcgacagaggagactactacctggagggctacagagacaatgcctacaaggacctggcctggaagcacggcaacatccacctgagcgccccctgcatctacagcgaggtgatggaggccctgaagctgcagcccggcctgtccttcctgaacctgggcagcggcaccggctacctgagcaccatggtgggcctcatcctgggccccttcggcatcaaccacggcatcgagctgcacagtgatgtggtggagtatgccaaggagaagctggagagcttcatcaagaacagcgacagctttgacaagtttgagttctgtgagcccgcctttgtggtgggcaactgcctgcagatcgccagtgacagccaccagtatgaccgcatctactgtggggccggcgtgcagaaggaccacgagaactacatgaagatcctgctgaaggtgggcggcatcctggtgatgcccatcgaggaccagctgacccagatcatgaggacaggccagaacacctgggagagcaagaacatcctggccgtgtcctttgcccccctggtgcagcccagcaagaatgacaatggcaagccagacagcgtgggcctgcccccctgtgctgtgaggaacctgcaggacctggcccgcatctacatccggaggaccctgaggaacttcatcaatgatgagatgcaggccaagggcatcccccagagggccccacccaagaggaagaggaagagggtgaagcagaggatcaacacctacgtgtttgtgggcaaccagctgatcccccagcccctggacagcgaggaggatgagaagatggaggaggacaacaaggaggaggaggagaaggaccacaatgaggccatgaagccagaggagcccccccagaacctgctgcgggagaagatcatgaagctgcccctgcctgagagcctgaaggcctacctgacctacttccgggacaagtag

SEQ ID NO: 229711 - DNA, 1074 bp, Artificial Sequence
  derived and/or modified sequence
atgggcggcgccgtgagcgccggcgaggacaacgacgacctgatcgacaatctcaaagaggctcaatacatccgaaccgaacgagtggaacaggcattccgagccatcgaccgcggtgattactatcttgagggatatagagataacgcctataaagatctcgcttggaaacacggcaacatccacctttcagccccgtgcatctatagtgaagttatggaagcactgaagttgcagcccggcctgtcctttttgaacttaggcagcgggactggctatttgtcaacaatggtcggcctgatcctgggtcccttcgggataaatcacggcattgagctccatagcgatgtggttgagtacgctaaagaaaaactcgagagctttatcaagaacagtgatagtttcgacaaatttgaattctgtgaaccagcattcgtggtgggcaactgtctgcaaatcgcctcggactctcatcagtacgacaggatttattgcggtgcaggggtccaaaaagatcatgagaattacatgaagatccttctgaaggtgggggggattctggtgatgcctatcgaagatcagctcacgcagataatgcgcacaggacagaatacttgggaaagcaaaaacatcctggccgtcagctttgcgccactcgtccaaccctctaagaacgacaacggcaagcccgattcggtcgggctgcccccctgcgccgtcagaaaccttcaggatcttgcaaggatctatatccggaggaccctccgcaacttcataaacgatgagatgcaggccaaggggattccccagcgggcgccccccaagaggaagcggaagagagtgaaacagcggattaatacctatgtgtttgtgggcaatcagctgatacctcagccactcgattccgaagaggatgagaagatggaggaggataataaggaggaagaggagaaggaccacaacgaagctatgaagccagaagagccgccccagaatctgttgcgggaaaaaattatgaagctgcccctgccagagtctttgaaagcctatttaacgtattttcgggataagtag

SEQ ID NO: 229712 - DNA, 1074 bp, Artificial Sequence
  derived and/or modified sequence
atgggcggcgccgtgagcgccggcgaggacaacgacgacctgatcgataatctgaaggaggcccagtacattcggaccgagcgagttgaacaggcgtttagagccatagacagaggtgactactaccttgaaggctatcgcgataacgcttataaggacctagcatggaagcatggaaacattcacctgtccgccccatgtatctactcagaggtgatggaagcactgaagctgcagccagggctaagttttctgaacctgggctcagggaccggctacctgtcaaccatggtaggcctgattctgggtccgttcggcatcaaccatggaatagagctgcattccgatgtggtggagtacgctaaagaaaaactagaaagttttataaagaactccgacagcttcgacaagtttgagttctgcgagcctgcattcgttgtggggaattgcctgcagattgcttcggattcacatcagtacgaccggatttactgcggcgcgggggtccagaaagatcatgaaaattacatgaagatattgcttaaagtcgggggaatactggtgatgcctatagaggaccaacttacgcagataatgagaacaggccaaaacacttgggaaagcaaaaatatactcgcggtgtcctttgcacctttagtccagcctagtaagaacgataacggtaagccagactctgtgggacttccaccatgcgctgtccgcaacctgcaggatctagccagaatttatatccgtaggacactgaggaacttcatcaacgacgagatgcaggccaaagggataccacagcgcgctcctcccaagaggaaacgcaagagagtcaaacagaggatcaatacatacgtattcgtgggaaaccaactgattccccagcctctagacagtgaggaggatgaaaagatggaagaggataataaggaagaggaagaaaaggaccataatgaggccatgaaaccagaggaacccccacaaaaccttttgcgcgagaaaatcatgaagctgccactacccgagtcactgaaagcgtatctgacatattttcgagacaagtag

SEQ ID NO: 229713 - DNA, 1074 bp, Artificial Sequence
  derived and/or modified sequence
atggggggagctgtgagcgcgggtgaggacaatgatgacctgattgacaaccttaaggaggctcaatacatacgtaccgagagagtcgaacaggcatttcgggctattgatcgcggagattattacctggaaggctaccgggacaacgcttacaaagatttggcttggaagcatggcaacatacatctgtccgccccatgcatctactcagaggtgatggaggccctgaagctgcagccgggtctgtcatttcttaatctggggtccggcactggctatctgtccacaatggtgggcctgatactgggtcccttcggaataaatcacggtatcgaactgcattccgacgtcgttgagtacgcaaaagaaaagctggagagcttcattaaaaactcagatagttttgacaagttcgagttctgcgagccagcatttgttgttggcaattgtttgcagattgcaagcgacagccaccagtacgacagaatttattgtggtgccggtgtccaaaaggatcacgagaactacatgaaaatcctcttaaaggttgggggaatcctggtgatgcctattgaggatcagctcacacagatcatgcggacaggacagaacacatgggaaagcaagaatatcttggcggtctcctttgcaccattggtgcagccaagcaaaaatgataatggcaagccagattccgtcgggctaccaccttgtgcagtgagaaatctccaagacctcgccagaatctacatccgaaggaccctgcggaacttcatcaacgatgaaatgcaggctaaagggatcccccaacgcgcaccccctaagcggaaacggaaaagggtgaagcagcgaattaacacttatgtgtttgtcgggaaccagctgatcccacagcctctggattctgaggaagatgagaagatggaggaggacaataaagaagaggaggaaaaggatcacaacgaagccatgaagcctgaagagccacctcagaacctcctgagagaaaagattatgaagctcccactgcccgagtctcttaaggcctatctgacctattttagagataaatag

SEQ ID NO: 229714 - DNA, 1074 bp, Artificial Sequence
  derived and/or modified sequence
atgggcggagccgtgtcagcaggtgaagacaacgatgacctgatagacaatctgaaggaggctcagtatattagaacagaacgtgtagagcaggcattccgcgcaatcgacaggggcgattattatctggaagggtacagggacaacgcgtacaaggacctggcgtggaaacacggtaacattcatctcagtgcaccttgtatatattccgaggtgatggaggccctcaaactgcaacccggtctgagttttctgaacctgggcagcggtactggatacctgagcacaatggtcgggttgatccttggtccctttgggatcaatcacggcatcgagctgcatagcgacgtggtggaatacgccaaagagaagttggagtccttcattaagaattccgatagcttcgataaatttgagttttgtgagcccgcatttgtggtgggtaattgcctacagatcgcgagtgactctcaccagtacgaccggatctactgtggagccggagtgcagaaggatcatgaaaactatatgaagatcctgctgaaggtagggggaattttagttatgccgatcgaagaccaactgacccagattatgcggacagggcaaaacacctgggaatcgaagaatattctcgctgtgtcctttgcccctctggtgcagccctctaaaaacgataacggcaaaccggattctgtagggttacccccttgcgccgtacgaaacttgcaggacctcgcaagaatctatattcggagaacccttaggaacttcataaacgacgagatgcaggccaagggtatcccacagcgtgcccctcctaaacgcaagcggaagcgggtcaagcagcggataaatacttacgtgttcgtaggcaatcagctgatcccgcagccactagattccgaggaagatgagaaaatggaagaggacaacaaagaggaggaggagaaggatcacaacgaggctatgaagcctgaagaaccacctcagaacctgttgagggaaaagataatgaagcttccactccccgagtcactaaaggcgtatctgacctacttcagggataaatag

SEQ ID NO: 229715 - DNA, 1287 bp, Artificial Sequence
  derived and/or modified sequence
actcggcggtggcgtccgtgttgttattgtggtggtagcggcgtctggctgctgcggaccccgccgagtcctagcgcctggcctgcgcgccgctgcccgcgccacaggattaatttatttttggaaatcaagtgcaatattggaagccatttctactaattttatttcacttttaaatttatgatttgatttgaatactatcatgggaggagctgtgagtgctggggaagataatgatgacttaattgataatttaaaagaagctcagtatattcgtactgaaagagtggagcaagccttcagagcgattgatcgtggagattactatttggaaggctacagagacaatgcttacaaagacttagcctggaagcatggaaacatccacttgtcagcaccttgcatttattctgaagttatggaagcattgaaacttcaaccaggattgtcttttcttaacctgggaagtggaaccggatatttaagtacaatggtgggcttaattttaggtccttttggaataaatcatgggattgagcttcattcagatgtggtggaatatgccaaggaaaaactggagagcttcatcaaaaatagtgatagctttgataaatttgagttctgtgaacctgcatttgttgttggtaattgcctccagatagcttctgacagtcatcagtatgatcgaatttattgtggagctggagtgcagaaagaccatgaaaactacatgaaaatattactaaaagttggaggcatattagtcatgcctatagaggatcagttaacacagattatgcgaactggacagaacacttgggaaagtaaaaatatccttgctgtttcatttgctccacttgtgcaaccaagtaagaatgataatggcaaaccagattctgtgggactccctccctgtgctgtcaggaatctacaggacttggctcgtatttacattcgacgcacacttagaaatttcataaatgatgagatgcaggccaaggggattcctcaaagggctccacccaaaaggaaaagaaagagagttaaacagagaattaacacttacgtatttgtgggtaatcagcttattcctcagcctctagacagtgaagaggatgaaaaaatggaagaggataacaaagaagaggaggaaaaagatcacaatgaagcaatgaagccagaggagccacctcaaaatttactgagagaaaaaatcatgaagctgcccctccctgaatctttaaaagcttacttgacatattttagagacaaataacttagatcaag

SEQ ID NO: 229716 - protein, 429 aa, Artificial Sequence
  derived and/or modified sequence
MLPRLLLLICAPLCEPAELFLIASPSHPTEGSPVTLTCKMPFLQSSDAQFQFCFFRDTRALGPGWSSSPKLQIAAMWKEDTGSYWCEAQTMASKVLRSRRSQINVHRVPVADVSLETQPPGGQVMEGDRLVLICSVAMGTGDITFLWYKGAVGLNLQSKTQRSLTAEYEIPSVRESDAEQYYCVAENGYGPSPSGLVSITVRIPVSRPILMLRAPRAQAAVEDVLELHCEALRGSPPILYWFYHEDITLGSRSAPSGGGASFNLSLTEEHSGNYSCEANNGLGAQRSEAVTLNFTVPTGARSNHLTSGVIEGLLSTLGPATVALLFCYGLKRKIGRRSARDPLRSLPSPLPQEFTYLNSPTPGQLQPIYENVNVVSGDEVYSLAYYNQPEQESVAAETLGTHMEDKVSLDIYSRLRKANITDVDYEDAM

SEQ ID NO: 229717 - DNA, 2596 bp, Artificial Sequence
  derived and/or modified sequence
ctcgactctgaggtgcattctttttttgatgagaggcatctctaggtaccatccctgacctggtcctcatgctgccgaggctgttgctgttgatctgtgctccactctgtgaacctgccgagctgtttttgatagccagcccctcccatcccacagaggggagcccagtgaccctgacgtgtaagatgccctttctacagagttcagatgcccagttccagttctgctttttcagagacacccgggccttgggcccaggctggagcagctcccccaagctccagatcgctgccatgtggaaagaagacacagggtcatactggtgcgaggcacagacaatggcgtccaaagtcttgaggagcaggagatcccagataaatgtgcacagggtccctgtcgctgatgtgagcttggagactcagcccccaggaggacaggtgatggagggagacaggctggtcctcatctgctcagttgctatgggcacaggagacatcaccttcctttggtacaaaggggctgtaggtttaaaccttcagtcaaagacccagcgttcactgacagcagagtatgagattccttcagtgagggagagtgatgctgagcaatattactgtgtagctgaaaatggctatggtcccagccccagtgggctggtgagcatcactgtcagaatcccggtgtctcgcccaatcctcatgctcagggctcccagggcccaggctgcagtggaggatgtgctggagcttcactgtgaggccctgagaggctctcctccgatcctgtactggttttatcacgaggatatcaccctggggagcaggtcggccccctctggaggaggagcctccttcaacctttccctgactgaagaacattctggaaactactcctgtgaggccaacaatggcctgggggcccagcgcagtgaggcggtgacactcaacttcacagtgcctactggggccagaagcaatcatcttacctcaggagtcattgaggggctgctcagcacccttggtccagccaccgtggccttattattttgctacggcctcaaaagaaaaataggaagacgttcagccagggatccactcaggagccttcccagccctctaccccaagagttcacctacctcaactcacctaccccagggcagctacagcctatatatgaaaatgtgaatgttgtaagtggggatgaggtttattcactggcgtactataaccagccggagcaggaatcagtagcagcagaaaccctggggacacatatggaggacaaggtttccttagacatctattccaggctgaggaaagcaaacattacagatgtggactatgaagatgctatgtaaggttatggaagattctgctctttgaaaaccatccatgaccccaagcctcaggcctgatatgttcttcagagatcctggggcattagctttccagtatacctcttctggatgccattctccatggcactattccttcatctactgtgaagtgaagttggcgcagccctgaagaaactacctaggagaactaatagacacaggagtgacagggactttgttatcagaaccagattcctgccggctcctttgaaaacaggtcatattgtgctcttctgtttacaagaggaaacaagatggaataaaagaaattgggatcttgggttggagggacagtgaagcttagagcacatgaactcaaggttagtgactctgcaggacttcacagagagagctgtgcccatcattcagtccaagtgctttctctgcccagacagcacagaactccagccccgctacttacatggatcatcgagtttccacctaaaatatgattctatttattttgagtcactgttaccaaattagaactaaaacaaagttacataaaaagttattgtgactccacttaattttagtgacgtatttttgtatatataggccaacctataccacatccaaaattatgtatctattacagcccctagaagctttataaatacagtgtgtcttcttttattcacaaaatttttgaaatcgtggtaatatggtttgaaacctgtatcttaattattttttttttaaattgagacagggtctcactctgtcactcaatctggaatgcagtggcacaatcttgcctcactgcaacgcctgcctctcaggctcaagcaaacctctcacctcagcctgctgagtagctgggactacaggcacatgccaccaaacttggccattttttgtcttacgtagagacaagatttcaccgttttgcccaggctggtctcaaactcctgggctcaagcaatgtattgaattttaaaataaccaggcactcactcttatgaattaataaacatttggaggtatataaagtaaaaagttaaagtctttcctgtaagttaacacaaatgttaactattgttaaaaactttacaggtagctctctagatatttttctatttttgtatgtatacttatgcatacatgtaagtatataaacatttagaagtgtacctatctaacaaactattatgaaatactttcaaatctgtaaatagatctattatactattttaaaa

SEQ ID NO: 229718 - protein, 675 aa, Artificial Sequence
  derived and/or modified sequence
MESGTSSPQPPQLDPLDAFPQKGLEPGDIAVLVLYFLFVLAVGLWSTVKTKRDTVKGYFLAGGDMVWWPVGASLFASNVGSGHFIGLAGSGAATGISVSAYELNGLFSVLMLAWIFLPIYIAGQVTTMPEYLRKRFGGIRIPIILAVLYLFIYIFTKISVDMYAGAIFIQQSLHLDLYLAIVGLLAITAVYTVAGGLAAVIYTDALQTLIMLIGALTLMGYSFAAVGGMEGLKEKYFLALASNRSENSSCGLPREDAFHIFRDPLTSDLPWPGVLFGMSIPSLWYWCTDQVIVQRTLAAKNLSHAKGGALMAAYLKVLPLFIMVFPGMVSRILFPDQVACADPEICQKICSNPSGCSDIAYPKLVLELLPTGLRGLMMAVMVAALMSSLTSIFNSASTIFTMDLWNHLRPRASEKELMIVGRVFVLLLVLVSILWIPVVQASQGGQLFIYIQSISSYLQPPVAVVFIMGCFWKRTNEKGAFWGLISGLLLGLVRLVLDFIYVQPRCDQPDERPVLVKSIHYLYFSMILSTVTLITVSTVSWFTEPPSKEMVSHLTWFTRHDPVVQKEQAPPAAPLSLTLSQNGMPEASSSSSVQFEMVQENTSKTHSCDMTPKQSKVVKAILWLCGIQEKGKEELPARAEAIIVSLEENPLVKTLLDVNLIFCVSCAIFIWGYFA

SEQ ID NO: 229719 - DNA, 2028 bp, Artificial Sequence
  derived and/or modified sequence
atggagagcggcaccagcagcccccagcccccccagctggaccccctggacgccttcccccagaagggcctggagcccggcgacatcgccgtgctggtgctgtacttcctgttcgtgctggccgtgggcctgtggagcaccgtgaagaccaagagagacaccgtgaagggctacttcctggccggcggcgacatggtgtggtggcccgtgggcgccagcctgttcgccagcaacgtgggcagcggccacttcatcggcctggccggcagcggcgccgccaccggcatcagcgtgagcgcctacgagctgaacggcctgttcagcgtgctgatgctggcctggatcttcctgcccatctacatcgccggccaggtgaccaccatgcccgagtacctgagaaagagattcggcggcatcagaatccccatcatcctggccgtgctgtacctgttcatctacatcttcaccaagatcagcgtggacatgtacgccggcgccatcttcatccagcagagcctgcacctggacctgtacctggccatcgtgggcctgctggccatcaccgccgtgtacaccgtggccggcggcctggccgccgtgatctacaccgacgccctgcagaccctgatcatgctgatcggcgccctgaccctgatgggctacagcttcgccgccgtgggcggcatggagggcctgaaggagaagtacttcctggccctggccagcaacagaagcgagaacagcagctgcggcctgcccagagaggacgccttccacatcttcagagaccccctgaccagcgacctgccctggcccggcgtgctgttcggcatgagcatccccagcctgtggtactggtgcaccgaccaggtgatcgtgcagagaaccctggccgccaagaacctgagccacgccaagggcggcgccctgatggccgcctacctgaaggtgctgcccctgttcatcatggtgttccccggcatggtgagcagaatcctgttccccgaccaggtggcctgcgccgaccccgagatctgccagaagatctgcagcaaccccagcggctgcagcgacatcgcctaccccaagctggtgctggagctgctgcccaccggcctgagaggcctgatgatggccgtgatggtggccgccctgatgagcagcctgaccagcatcttcaacagcgccagcaccatcttcaccatggacctgtggaaccacctgagacccagagccagcgagaaggagctgatgatcgtgggcagagtgttcgtgctgctgctggtgctggtgagcatcctgtggatccccgtggtgcaggccagccagggcggccagctgttcatctacatccagagcatcagcagctacctgcagccccccgtggccgtggtgttcatcatgggctgcttctggaagagaaccaacgagaagggcgccttctggggcctgatcagcggcctgctgctgggcctggtgagactggtgctggacttcatctacgtgcagcccagatgcgaccagcccgacgagagacccgtgctggtgaagagcatccactacctgtacttcagcatgatcctgagcaccgtgaccctgatcaccgtgagcaccgtgagctggttcaccgagccccccagcaaggagatggtgagccacctgacctggttcaccagacacgaccccgtggtgcagaaggagcaggccccccccgccgcccccctgagcctgaccctgagccagaacggcatgcccgaggccagcagcagcagcagcgtgcagttcgagatggtgcaggagaacaccagcaagacccacagctgcgacatgacccccaagcagagcaaggtggtgaaggccatcctgtggctgtgcggcatccaggagaagggcaaggaggagctgcccgccagagccgaggccatcatcgtgagcctggaggagaaccccctggtgaagaccctgctggacgtgaacctgatcttctgcgtgagctgcgccatcttcatctggggctacttcgcctag

SEQ ID NO: 229720 - DNA, 2028 bp, Artificial Sequence
  derived and/or modified sequence
atggagtccggaacttcatctcctcagcccccacagcttgatccactggatgcgttccctcagaagggcctcgagcccggcgatattgcggtactggtgttgtacttcctgttcgtattagccgtagggctgtggtccaccgtcaagacaaagcgagataccgtgaaaggctacttcttagcaggaggcgatatggtgtggtggcctgtcggagccagcttgtttgcctctaacgtgggtagtggccattttattggcctagcgggatccggggctgcaacaggtatttcagtcagcgcctatgagctgaacggcctgttttccgtgctcatgctggcatggattttcttgccgatctacatagcagggcaagtgacaacaatgccagaatacctccggaagaggtttggtggaattcgcattccgataattctggccgtgctctatctgttcatttacatcttcaccaaaatctccgtagatatgtatgccggagctattttcatccagcagagtctccatttggatttatacctcgccatcgtgggcctcttagcaattacagcggtatacaccgtggccggcggcttggctgcggtgatttacaccgacgccctgcagaccctcatcatgttgattggggccctgaccttgatgggctactcctttgcggcagtaggcgggatggaaggcctgaaggaaaagtactttttagctctcgctagtaatcgctcggaaaacagctcttgcggcttgccgagagaggacgcttttcatattttccgagatcctctgacctctgatctgccatggccaggagtgttattcggaatgtccatcccctctctctggtactggtgcactgaccaggttatcgtgcagcgaacactggctgccaagaatctttcacatgcaaagggcggcgctctgatggccgcctacctgaaagtattgccactgtttatcatggtgttccctggtatggtatcccgcatcctgtttcctgaccaggtcgcctgtgccgacccggagatttgtcagaaaatatgctccaacccatccggctgttccgacattgcctaccctaagttggtgctggagctgctgcccaccggactcaggggcctaatgatggcggtgatggtggcagccctaatgagtagtctgacttccattttcaactccgccagtactatttttactatggatctgtggaatcacctcagacctcgtgcatccgagaaggagctgatgatcgtcggacgggtttttgttctgttgctcgtattggttagcattctttggatccccgttgtgcaagctagtcaaggtggccagctattcatatacattcagtccatttcaagttacctccagcctcctgtagcggtggtgttcattatgggatgcttttggaagagaactaacgaaaaaggtgccttttgggggttaatatctgggctgctcctgggcctggtgagactagttcttgatttcatatatgttcagcccagatgtgatcaaccagatgaacgccccgttctggtcaagagcatccactatctgtactttagtatgattctttcaaccgtgaccctgatcacagtgtcaacagtgtcctggtttaccgaacctccctcaaaggagatggtgtcccacttgacctggttcacccggcatgatccggttgtccagaaggagcaggctcccccagcagccccgctgtctttgacattatctcagaatggtatgccagaagcatcctcttcaagttctgtccagttcgagatggtgcaggaaaacacaagcaaaacgcactcctgtgacatgacacctaagcaatccaaagttgtaaaggcgattttatggctttgcgggatccaagagaagggcaaggaagagctccctgcccgtgccgaggctatcatcgtgtctctggaggaaaatccactcgtgaagacactgctggatgttaatctgattttttgcgtctcatgcgctatatttatctggggttattttgcatag

SEQ ID NO: 229721 - DNA, 2028 bp, Artificial Sequence
  derived and/or modified sequence
atggagagcggcaccagcagcccccagcccccccagctggaccccctggatgccttcccccagaagggcctggagcccggggacattgctgtgctggtgctgtacttcctgtttgtgctggccgtgggcctgtggagcacagtgaagaccaagagggacacagtgaagggctacttcctggccggcggggacatggtgtggtggcctgtgggcgccagcctgtttgccagcaatgtgggcagcggccacttcatcggcctggccggcagcggggccgccaccggcatctctgtgtctgcctatgagctgaatggcctcttctctgtgctgatgctggcctggatcttcctgcccatctacatcgccggccaggtgaccaccatgcctgagtacctgaggaagagatttggaggcatccgcatccccatcatcctggccgtgctgtacctgttcatctacatcttcaccaagatctctgtggacatgtatgctggggccatcttcatccagcagagcctgcacctggacctgtacctggccatcgtgggcctgctggccatcacagctgtgtacacagtggccggcggcctggccgctgtgatctacacagatgccctgcagaccctcatcatgctgattggagccctgaccctgatgggctacagctttgctgctgtgggcggcatggagggcctgaaggagaagtacttcctggccctggccagcaacagaagtgagaacagcagctgtggcctgcccagagaagatgccttccacatcttccgggaccccctgaccagtgacctgccctggccaggagtgctgtttggcatgagcatccccagcctgtggtactggtgcacagaccaggtgattgtgcagaggaccctggccgccaagaacctgagccacgccaagggcggggccctgatggccgcctacctgaaggtgctgcccctcttcatcatggtgtttcctggcatggtgagccgcatcctcttcccagaccaggtggcctgtgccgaccctgagatctgccagaagatctgcagcaaccccagcggctgcagcgacatcgcctaccccaagctggtgctggagctgctgcccaccggcctgcggggcctgatgatggctgtgatggtggccgccctgatgagcagcctgaccagcatcttcaacagcgccagcaccatcttcaccatggacctgtggaaccacctgcggccccgggccagcgagaaggagctgatgattgtgggccgggtgtttgtgctgctgctggtgctggtgtccatcctgtggatccctgtggtgcaggccagccagggcggccagctgttcatctacatccagagcatcagcagctacctgcagccccctgtggccgtggtgttcatcatgggctgcttctggaagaggaccaatgagaagggggccttctggggcctcatcagcggcctgctgctgggcctggtgcggctggtgctggacttcatctacgtgcagccccgctgtgaccagccagatgagaggcctgtgctggtgaagagcatccactacctgtacttctccatgatcctgagcacagtgaccctcatcaccgtgtccacagtgtcctggttcacagagccccccagcaaggagatggtgagccacctgacctggttcaccaggcatgaccctgtggtgcagaaggagcaggcccccccagctgcccccctgagcctgaccctgagccagaatggcatgcctgaggccagcagcagcagctctgtgcagtttgagatggtgcaggagaacaccagcaagacccacagctgtgacatgacccccaagcagagcaaggtggtgaaggccatcctgtggctgtgtggcatccaggagaagggcaaggaggagctgcctgcccgggcagaggccatcatcgtgtccctggaggagaaccccctggtgaagaccctgctggatgtgaacctgatcttctgtgtgtcctgtgccatcttcatctggggctactttgcctag

SEQ ID NO: 229722 - DNA, 2028 bp, Artificial Sequence
  derived and/or modified sequence
atggagagcggcaccagcagcccccagcccccccagctggaccccctggacgctttcccccaaaagggtctcgagcctggtgatatcgccgtactggtgttgtactttctcttcgtgctagccgtcggactctggtcaaccgtgaaaactaaacgggacactgtgaagggctactttctagccggcggggacatggtgtggtggcccgtcggagcctcactgttcgcgtccaatgtcggatctggtcactttatcggtctggccgggtccggtgctgccaccggtatctccgtaagcgcttatgagctgaatggattgttctccgtgctgatgctggcctggatctttctgccgatctacatcgcaggtcaggtgaccactatgcctgagtatctccgcaaacgatttggtggtatcaggatccctatcatactcgccgtcctttatctgttcatttacatttttacaaaaatctcagtcgatatgtatgccggagctatttttatccaacagtcactccatctcgatctgtacttggctattgtcggattgttagcaatcacagcagtatacactgtggctggcggtctggctgcggtcatctacactgacgcgcttcagaccctgataatgcttataggggccctgacattgatgggctactcttttgctgcggtgggaggtatggagggcctcaaggagaagtactttcttgctttagccagcaataggagcgaaaattcctcttgtgggctgcctcgtgaggacgcctttcacatatttagagatccccttacctccgacctcccgtggcccggagtgctcttcgggatgtccatcccatcgttgtggtactggtgcactgaccaagtcatcgtgcaaaggactctcgccgctaagaacctctctcacgccaaggggggggccctgatggcagcttaccttaaggttctgccgctattcataatggtgttccctggtatggtaagtcggattttgtttcccgatcaggtcgcatgcgcagacccagaaatttgccagaagatctgctcaaacccaagcggatgctctgacatagcttacccgaaactggtgctggagctgttgccaacaggactcaggggtcttatgatggccgtgatggtcgccgcactcatgtcttcactgacatcaattttcaactctgccagcaccatattcacaatggacttgtggaaccaccttaggccgagagccagtgaaaaagaactgatgatagtcggtcgagtgttcgttctcctgttggtcctggtatctattttgtggatacctgtggtacaggcatctcagggtgggcagctgttcatttacatccagtctatctcaagttatctgcagccaccagtggcagtggtgttcatcatgggctgcttttggaaacgcacaaacgaaaagggagccttttggggcctgatttcgggactgctattggggctggtgcgtctggtgctcgactttatctatgtgcagcccaggtgtgaccagcccgacgagaggccagtgctggtgaagtctatccactacctgtatttttcaatgattctctctaccgtgaccttaatcactgtgtctaccgtctcctggttcactgagccaccctctaaggagatggtcagtcacctgacatggtttactcggcacgacccggtggtccagaaggaacaggcccctcccgctgcaccattgtctctgactcttagccagaacgggatgcccgaagccagtagtagcagcagcgtccagtttgaaatggttcaggagaacacatcaaagacgcacagttgtgacatgacccctaagcagagcaaggtggtcaaagctatcttgtggttgtgcggcatccaagagaaaggaaaagaagagcttcctgctcgggcagaagccataattgtgagtttggaggagaaccctcttgtgaagacactgctcgacgtcaacctgattttctgcgtgagctgcgccatcttcatctggggctacttcgcgtag

SEQ ID NO: 229723 - DNA, 2028 bp, Artificial Sequence
  derived and/or modified sequence
atggagagtgggacgtcatcgcctcagcccccacagctagatcctttagacgcctttccacagaagggcttggagcccggagacatagccgtgctagtgctgtattttcttttcgttctggctgtagggttatggagcacggtcaagactaagcgagacaccgttaaaggctacttcctcgctgggggagatatggtttggtggcctgtaggagccagtctgttcgcatctaacgtgggctctggccacttcatcggactcgccggaagcggagctgcaaccggcataagtgtgagtgcatacgagctgaatggcctgttctcggttttaatgcttgcttggatctttctcccaatctatatcgctggacaggttactactatgccagagtatctgcgcaagcggttcggagggatcaggattcccatcatcctggcggtgctgtatctgttcatttacatctttaccaaaatcagcgtcgacatgtatgccggtgctatattcatccagcagagcctacacttggatttatacctggcaatagtcggactactggccattactgcagtttacaccgtagcagggggattagcggctgttatttatacagacgccctgcaaacattaattatgttaatcggtgccctcactctcatggggtactcttttgcagctgtaggcggaatggaaggcctcaaggaaaagtactttttggcattggcttccaatcggtccgagaatagttcttgcggcctgcccagagaagatgctttccatatttttcgggacccccttacatccgatttgccttggccaggcgttttgtttgggatgagcatcccatccttgtggtactggtgtactgaccaggttatcgtgcagcggacactcgctgcaaaaaatctgagtcatgccaagggcggagctctcatggccgcttatctgaaagtgctccccctcttcattatggtgttcccagggatggtctcccgcattctgtttccagatcaggtagcatgtgcagaccctgagatctgtcaaaagatctgtagtaatccgtcaggctgcagcgatattgcatacccgaagctcgtgctagaactgctgccaacgggactgcggggactaatgatggcagtgatggttgctgccctcatgtccagcctgacgtcaattttcaattcagcttcaaccattttcacaatggacttgtggaaccatttgaggcccagggcctcagagaaagaattgatgattgtcggccgagttttcgttctactcttggttttagtcagcatcctgtggattcctgtcgtgcaggcctcacagggtgggcagttgtttatctatatccagagtatctcctcctatctccagccccctgtcgcagtagttttcattatgggctgcttttggaaaagaaccaacgagaagggagctttttggggcctgatctcgggtttactgctgggattggtgcgcttggttctggacttcatttatgtgcagccacggtgcgaccagcctgacgagcgcccagtccttgtcaagtccatccactacttatacttctctatgatattgtccaccgtgacgttgatcacagtgagcacagtatcttggtttacagagcctccgtctaaggagatggtctcccacctgacatggtttacaagacatgacccagtcgtgcagaaggagcaggccccaccagcagcacccctgtcgctgacactgtctcagaacggtatgccggaagcaagttccagcagctctgtgcagttcgaaatggtccaggaaaacaccagtaaaacacactcctgcgacatgacccccaagcaaagcaaggtggttaaggctatcctatggctgtgtggcatccaggaaaagggaaaggaggagcttcctgcacgcgctgaggcaatcatcgtcagcctggaggagaaccctctggttaagacactgctggacgttaacctcatcttctgcgtgtcctgtgccatttttatctggggatattttgcctag

SEQ ID NO: 229724 - DNA, 2214 bp, Artificial Sequence
  derived and/or modified sequence
ggaggcgggacagtggaagactggctgaggctggagtttggagtttgacccgcttggaggctctctcagcagcgggcatataggaggaagggtcactgctgtctccggaagctcttggctgcaaagagagaggatcccgggtatctccctccttacaaccaccgccacctcctagtgccttagaagccactgacagcccccagggcaggtgagccctgcatctggaataagtccacagtgaagaccaaaagagacacagtgaaaggctacttcctggctggaggggacatggtgtggtggccagtgggtgcatccttgtttgccagcaatgttggaagtggacatttcattggcctggcagggtcaggtgctgctacgggcatttctgtatcagcttatgaacttaatggcttgttttctgtgctgatgttggcctggatcttcctacccatctacattgctggtcaggtcaccacgatgccagaatacctacggaagcgcttcggtggcatcagaatccccatcatcctggctgtactctacctatttatctacatcttcaccaagatctcggtagacatgtatgcaggtgccatcttcatccagcagtctttgcacctggatctgtacctggccatagttgggctactggccatcactgctgtatacacggttgctggtggcctggctgctgtgatctacacggatgccctgcagacgctgatcatgcttataggagcgctcaccttgatgggctacagttttgccgcggttggtgggatggaaggactgaaggagaagtacttcttggccctggctagcaaccggagtgagaacagcagctgcgggctgccccgggaagatgccttccatattttccgagatccgctgacatctgatctcccgtggccgggggtcctatttggaatgtccatcccatccctctggtactggtgcacggatcaggtgattgtccagcggactctggctgccaagaacctgtcccatgccaaaggaggtgctctgatggctgcatacctgaaggtgctgcccctcttcataatggtgttccctgggatggtcagccgcatcctcttcccagatcaagtggcctgtgcagatccagagatctgccagaagatctgcagcaacccctcaggctgttcggacatcgcgtatcccaaactcgtgctggaactcctgcccacagggctccgtgggctgatgatggctgtgatggtggcggctctcatgtcctccctcacctccatctttaacagtgccagcaccatcttcaccatggacctctggaatcacctccggcctcgggcatctgagaaggagctcatgattgtgggcagggtgtttgtgctgctgctggtcctggtctccatcctctggatccctgtggtccaggccagccagggcggccagctcttcatctatatccagtccatcagctcctacctgcagccgcctgtggcggtggtcttcatcatgggatgtttctggaagaggaccaatgaaaagggtgccttctggggcctgatctcgggcctgctcctgggcttggttaggctggtcctggactttatttacgtgcagcctcgatgcgaccagccagatgagcgcccggtcctggtgaagagcattcactacctctacttctccatgatcctgtccacggtcaccctcatcactgtctccaccgtgagctggttcacagagccaccctccaaggagatggtcagccacctgacctggtttactcgtcacgaccccgtggtccagaaggaacaagcaccaccagcagctcccttgtctcttaccctctctcagaacgggatgccagaggccagcagcagcagcagcgtccagttcgagatggttcaagaaaacacgtctaaaacccacagctgtgacatgaccccaaagcagtccaaagtggtgaaggccatcctgtggctctgtggaatacaggagaagggcaaggaagagctcccggccagagcagaagccatcatagtttccctggaagaaaaccccttggtgaagaccctcctggacgtcaacctcattttctgcgtgagctgcgccatctttatctggggctattttgcttagtgtggggtgaacccaggggtccaaactctgtttctcttcagtgctccatttttttaatgaaagaaaaaataataaagcttttgtttacca

SEQ ID NO: 229725 - DNA, 2743 bp, Artificial Sequence
  derived and/or modified sequence
ggttgctgttcctgttgctgccactgcggtgagggctgtggctggacgtccctcctggcactttgcctctgtcccctccatccgccgccagcatttttcctcccctccccttcctccagctcgtcccaagcctgcctgtccccagcgtggaggcgggacagtggaagactgggtgagtgaagcaggatggtgccttgggctccagcgtctccccaacccctccatgccatgggtccccacgcaggtgaggaccctggtggaggacggtgtgggcagagcgtgggacatgtcaccttccccacctgctcagagttcaagggtcctgggctgggccccgttctctcttctgccctggggagatcattcacgcttcctttaatccccgctgcagctgaggctggagtttggagtttgacccgcttggaggctctctcagcagcgggcatataggaggaagggtcactgctgtctccggaagctcttggctgcaaagagagaggatcccgggtatctccctccttacaaccaccgccacctcctagtgccttagaagccactgacagcccccagggcaggtgagccctgcatctggaataaggatccagaggtctcgttcaggaccatggagagcggcaccagcagccctcagcctccacagttagatcccctggatgcgtttccccagaagggcttggagcctggggacatcgcggtgctagttctgtacttcctctttgtcctggctgttggactatggtccacagtgaagaccaaaagagacacagtgaaaggctacttcctggctggaggggacatggtgtggtggccagtgggtgcatccttgtttgccagcaatgttggaagtggacatttcattggcctggcagggtcaggtgctgctacgggcatttctgtatcagcttatgaacttaatggcttgttttctgtgctgatgttggcctggatcttcctacccatctacattgctggtcaggtcaccacgatgccagaatacctacggaagcgcttcggtggcatcagaatccccatcatcctggctgtactctacctatttatctacatcttcaccaagatctcggtagacatgtatgcaggtgccatcttcatccagcagtctttgcacctggatctgtacctggccatagttgggctactggccatcactgctgtatacacggttgctggtggcctggctgctgtgatctacacggatgccctgcagacgctgatcatgcttataggagcgctcaccttgatgggctacagttttgccgcggttggtgggatggaaggactgaaggagaagtacttcttggccctggctagcaaccggagtgagaacagcagctgcgggctgccccgggaagatgccttccatattttccgagatccgctgacatctgatctcccgtggccgggggtcctatttggaatgtccatcccatccctctggtactggtgcacggatcaggtgattgtccagcggactctggctgccaagaacctgtcccatgccaaaggaggtgctctgatggctgcatacctgaaggtgctgcccctcttcataatggtgttccctgggatggtcagccgcatcctcttcccagatcaagtggcctgtgcagatccagagatctgccagaagatctgcagcaacccctcaggctgttcggacatcgcgtatcccaaactcgtgctggaactcctgcccacagggctccgtgggctgatgatggctgtgatggtggcggctctcatgtcctccctcacctccatctttaacagtgccagcaccatcttcaccatggacctctggaatcacctccggcctcgggcatctgagaaggagctcatgattgtgggcagggtgtttgtgctgctgctggtcctggtctccatcctctggatccctgtggtccaggccagccagggcggccagctcttcatctatatccagtccatcagctcctacctgcagccgcctgtggcggtggtcttcatcatgggatgtttctggaagaggaccaatgaaaagggtgccttctggggcctgatctcgggcctgctcctgggcttggttaggctggtcctggactttatttacgtgcagcctcgatgcgaccagccagatgagcgcccggtcctggtgaagagcattcactacctctacttctccatgatcctgtccacggtcaccctcatcactgtctccaccgtgagctggttcacagagccaccctccaaggagatggtcagccacctgacctggtttactcgtcacgaccccgtggtccagaaggaacaagcaccaccagcagctcccttgtctcttaccctctctcagaacgggatgccagaggccagcagcagcagcagcgtccagttcgagatggttcaagaaaacacgtctaaaacccacagctgtgacatgaccccaaagcagtccaaagtggtgaaggccatcctgtggctctgtggaatacaggagaagggcaaggaagagctcccggccagagcagaagccatcatagtttccctggaagaaaaccccttggtgaagaccctcctggacgtcaacctcattttctgcgtgagctgcgccatctttatctggggctattttgcttagtgtggggtgaacccaggggtccaaactctgtttctcttcagtgctccatttttttaatgaaagaaaaaataataaagcttttgtttaccacaa

SEQ ID NO: 229726 - DNA, 2090 bp, Artificial Sequence
  derived and/or modified sequence
ataggaggaagggtcactgctgtctccggaagctcttggctgcaaagagagaggatcccgggtatctccctccttacaaccaccgccacctcctagtgccttagaagccactgacagcccccagggcaggtgagccctgcatctggaataagtccacagtgaagaccaaaagagacacagtgaaaggctacttcctggctggaggggacatggtgtggtggccagtgggtgcatccttgtttgccagcaatgttggaagtggacatttcattggcctggcagggtcaggtgctgctacgggcatttctgtatcagcttatgaacttaatggcttgttttctgtgctgatgttggcctggatcttcctacccatctacattgctggtcaggtcaccacgatgccagaatacctacggaagcgcttcggtggcatcagaatccccatcatcctggctgtactctacctatttatctacatcttcaccaagatctcggtagacatgtatgcaggtgccatcttcatccagcagtctttgcacctggatctgtacctggccatagttgggctactggccatcactgctgtatacacggttgctggtggcctggctgctgtgatctacacggatgccctgcagacgctgatcatgcttataggagcgctcaccttgatgggctacagttttgccgcggttggtgggatggaaggactgaaggagaagtacttcttggccctggctagcaaccggagtgagaacagcagctgcgggctgccccgggaagatgccttccatattttccgagatccgctgacatctgatctcccgtggccgggggtcctatttggaatgtccatcccatccctctggtactggtgcacggatcaggtgattgtccagcggactctggctgccaagaacctgtcccatgccaaaggaggtgctctgatggctgcatacctgaaggtgctgcccctcttcataatggtgttccctgggatggtcagccgcatcctcttcccagatcaagtggcctgtgcagatccagagatctgccagaagatctgcagcaacccctcaggctgttcggacatcgcgtatcccaaactcgtgctggaactcctgcccacagggctccgtgggctgatgatggctgtgatggtggcggctctcatgtcctccctcacctccatctttaacagtgccagcaccatcttcaccatggacctctggaatcacctccggcctcgggcatctgagaaggagctcatgattgtgggcagggtgtttgtgctgctgctggtcctggtctccatcctctggatccctgtggtccaggccagccagggcggccagctcttcatctatatccagtccatcagctcctacctgcagccgcctgtggcggtggtcttcatcatgggatgtttctggaagaggaccaatgaaaagggtgccttctggggcctgatctcgggcctgctcctgggcttggttaggctggtcctggactttatttacgtgcagcctcgatgcgaccagccagatgagcgcccggtcctggtgaagagcattcactacctctacttctccatgatcctgtccacggtcaccctcatcactgtctccaccgtgagctggttcacagagccaccctccaaggagatggtcagccacctgacctggtttactcgtcacgaccccgtggtccagaaggaacaagcaccaccagcagctcccttgtctcttaccctctctcagaacgggatgccagaggccagcagcagcagcagcgtccagttcgagatggttcaagaaaacacgtctaaaacccacagctgtgacatgaccccaaagcagtccaaagtggtgaaggccatcctgtggctctgtggaatacaggagaagggcaaggaagagctcccggccagagcagaagccatcatagtttccctggaagaaaaccccttggtgaagaccctcctggacgtcaacctcattttctgcgtgagctgcgccatctttatctggggctattttgcttagtgtggggtgaacccaggggtccaaactctgtttctcttcagtgct

SEQ ID NO: 229727 - protein, 184 aa, Artificial Sequence
  derived and/or modified sequence
MRRGPRSLRGRDAPAPTPCVPAECFDLLVRHCVACGLLRTPRPKPAGASSPAPRTALQPQESVGAGAGEAALPLPGLLFGAPALLGLALVLALVLVGLVSWRRRQRRLRGASSAEAPDGDKDAPEPLDKVIILSPGISDATAPAWPPPGEDPGTTPPGHSVPVPATELGSTELVTTKTAGPEQQ

SEQ ID NO: 229728 - DNA, 555 bp, Artificial Sequence
  derived and/or modified sequence
atgagaagaggccccagaagcctgagaggcagagacgcccccgcccccaccccctgcgtgcccgccgagtgcttcgacctgctggtgagacactgcgtggcctgcggcctgctgagaacccccagacccaagcccgccggcgccagcagccccgcccccagaaccgccctgcagccccaggagagcgtgggcgccggcgccggcgaggccgccctgcccctgcccggcctgctgttcggcgcccccgccctgctgggcctggccctggtgctggccctggtgctggtgggcctggtgagctggagaagaagacagagaagactgagaggcgccagcagcgccgaggcccccgacggcgacaaggacgcccccgagcccctggacaaggtgatcatcctgagccccggcatcagcgacgccaccgcccccgcctggcccccccccggcgaggaccccggcaccaccccccccggccacagcgtgcccgtgcccgccaccgagctgggcagcaccgagctggtgaccaccaagaccgccggccccgagcagcagtag

SEQ ID NO: 229729 - DNA, 555 bp, Artificial Sequence
  derived and/or modified sequence
atgcgaaggggcccgaggtctctcagagggcgcgatgccccagcacctaccccgtgtgtccctgctgagtgtttcgatctgctcgttagacactgtgttgcatgcggtctgctacgtacccccagaccaaagcccgcaggggcttcgtcgccagcccctcggactgcacttcaacctcaggagtctgtcggtgccggcgcaggcgaagctgctctgcccctgccaggcctcctattcggcgcaccagctctgctgggcctcgccctggttctggctttggttcttgtaggcctcgtctcctggcgcagacgtcagagaagacttagaggcgcgtcctcggccgaggctcctgacggtgataaagacgcaccggagccgctggataaggtcatcatcctgagtccgggaatcagcgacgctacagctcccgcctggccaccaccaggggaggatccaggcaccacacccccgggccactctgtgcctgtcccagccaccgaactaggtagtaccgaacttgtgactaccaaaaccgccggccccgagcaacagtag

SEQ ID NO: 229730 - DNA, 555 bp, Artificial Sequence
  derived and/or modified sequence
atgaggcggggccccaggagcctgcggggcagagatgccccagcccccaccccctgtgtgcctgcagaatgttttgacctgctggtgcgccactgtgtggcctgtggcctgctgcggaccccccggcccaagccagctggggccagcagccctgcccccaggacagccctgcagccccaggagagcgtgggcgctggggccggggaggccgccctgcccctgcccggcctgctgtttggagccccagccctgctgggcctggccctggtgctggccctggtgctggtgggcctggtgtcctggaggcggcggcagaggcggctgcggggggccagcagcgctgaggccccagatggagacaaggatgcccctgagcccctggacaaggtgatcatcctgagccctggcatcagtgatgccacagccccagcctggcccccacctggagaggaccccggcaccaccccacctggccacagcgtgcctgtgcctgccacagagctgggcagcacagagctggtgaccaccaagacagctggccctgagcagcagtag

SEQ ID NO: 229731 - DNA, 555 bp, Artificial Sequence
  derived and/or modified sequence
atgcggcggggcccccggagcctgcggggccgggacgcccccgcccctacaccctgcgtgccggcagagtgcttcgatcttctggtgcgccattgcgttgcctgcggtttgctgcgtactccgcgcccaaagccagccggcgccagcagccctgcaccaagaacggcactccagccacaggagtcagtgggagctggagcaggggaggctgcactgcctctacctggtctcctctttggtgcacctgcactcttaggcctggcgttggtgttggctctggttctcgtgggcctggtttcatggaggcggagacaaaggaggcttaggggtgcttcctctgcagaggcacctgatggcgataaggacgctccggagccactggacaaggtgattattcttagcccgggtattagcgatgccactgcgccagcctggccgcccccaggggaggatcccggcactactccaccgggtcatagtgtgcctgttcctgccactgagttgggaagcacagaactcgttaccacaaaaacagcaggtccggagcagcaatag

SEQ ID NO: 229732 - DNA, 555 bp, Artificial Sequence
  derived and/or modified sequence
atgcggcgaggcccacgatcattgaggggaagggatgctccggcaccaaccccctgcgtccccgcagagtgtttcgacctattggtgcgacactgtgtcgcctgcggccttttgaggacccctcgcccaaaaccagcaggggcttccagtcccgcacctaggactgccctgcagccacaggagagtgtgggagcgggagccggtgaagccgcactgcccctgcccggtttgctgtttggcgcacccgctttgctcggattggcattggtgctggccctcgtgctggtgggcttagtatcatggcgtaggcggcagcggaggctccgaggggcttcttcagcggaggccccagacggcgataaagatgcaccagaaccattggataaggtgattattcttagcccgggtattagcgatgccactgcacccgcatggccaccacccggagaagacccaggtacgacacctcccggacactctgtccctgtgcccgcaacggagctggggagcacagagctagtgaccaccaagaccgcaggcccagaacagcagtag

SEQ ID NO: 229733 - DNA, 926 bp, Artificial Sequence
  derived and/or modified sequence
cagctcagcctcagtccccgcagcttgtgcggcggcgtcggcaccatgaggcgagggccccggagcctgcggggcagggacgcgccagcccccacgccctgcgtcccggccgagtgcttcgacctgctggtccgccactgcgtggcctgcgggctcctgcgcacgccgcggccgaaaccggccggggccagcagccctgcgcccaggacggcgctgcagccgcaggagtcggtgggcgcgggggccggcgaggcggcgctgcccctgcccgggctgctctttggcgcccccgcgctgctgggcctggcactggtcctggcgctggtcctggtgggtctggtgagctggaggcggcgacagcggcggcttcgcggcgcgtcctccgcagaggcccccgacggagacaaggacgccccagagcccctggacaaggtcatcattctgtctccgggaatctctgatgccacagctcctgcctggcctcctcctggggaagacccaggaaccaccccacctggccacagtgtccctgtgccagccacagagctgggctccactgaactggtgaccaccaagacggccggccctgagcaacaatagcagggagccggcaggaggtggcccctgccctccctctggacccccagccaggggcttggaaatcaaattcagctcttcactccagcatgcacatgccctctttctgggaccaggctaactctgcagaagcacagacactacagaccacagcattcagcccccatggagtttggtgtgcttgcctttggcttcagacctcaccatctttgacagcccttgaaggtggtagcccagctcctgttcctgtgccttcaaaaggctggggcactatgagtaaaagaccgcttttaaaatggggaaggcaccattaagccaaaatgaatctg

SEQ ID NO: 229734 - protein, 428 aa, Artificial Sequence
  derived and/or modified sequence
MKSTADLHQKLGKAIELEAIKPTYQVLNVQEKKRKSLDNEVEKTANLVISNWNQQIKAKKKLMVSTKKHEALFQLVESSKQSMTEKEKRKLLNKLTKSTEKLEKEDENYYQKNMAGYSTRLKWENTLENCYQSILELEKERIQLLCNNLNQYSQHISLFGQTLTTCHTQIHCAISKIDIEKDIQAVMEETAILSTENKSEFLLTDYFEEDPNSAMDKERRKSLLKPKLLRLQRDIEKASKDKEGLERMLKTYSSTSSFSDAKSQKDTAALMDENNLKLDLLEANSYKLSSMLAELEQRPQPSHPCSNSIFRWREKEHTHSYVKISRPFLMKRLENIVSKASSGGQSNPGSSTPAPGAAQLSSRLCKALYSFQARQDDELNLEKGDIVIIHEKKEGGWWFGSLNGKKGHFPAAYVEELPSNAGNTATKA

SEQ ID NO: 229735 - DNA, 1287 bp, Artificial Sequence
  derived and/or modified sequence
atgaagtctacagcagatctccatcaaaaacttgggaaggctattgagctcgaagccatcaaacctacttatcaggttctgaacgtgcaggagaaaaagaggaaatcactggataatgaagtggagaagaccgccaatctggtgatatcgaattggaatcaacaaattaaggccaaaaagaagctcatggtgagcactaaaaaacatgaagcattgtttcagttagtggagtcctccaagcagtccatgacagaaaaggagaaacggaagctcttgaacaaactgactaagtctaccgaaaagctagagaaagaggatgaaaactactatcagaagaacatggcagggtacagcactaggttgaagtgggagaataccctggagaattgttatcagtcaattctggagctggaaaaggaacggatccagctactgtgtaacaatctgaaccagtattctcagcacatcagcctgtttggccagactctgacgacatgccatacccagattcattgtgcaatctctaagattgacatcgaaaaagacatccaggctgttatggaagaaaccgcaatactgagcactgagaataaaagtgagttcttgctcaccgattactttgaagaagaccccaattcggctatggacaaggagcgccgaaaatcgctgttaaagcccaagctgttaaggttgcagcgtgatatcgaaaaggcttctaaagataaggagggccttgaacgaatgctgaaaacttattcatcaacaagttcattctcagatgcaaaatcgcagaaggacactgccgctcttatggatgaaaacaacctgaaactggatttgctggaagctaactcatataagctgagtagcatgctcgccgaactcgaacagcgccctcagccatcacatccttgctccaattcaatctttcgctggagggagaaggaacacacccacagctacgtgaagatatcgcgcccatttctgatgaagaggctagaaaatatcgtgtctaaggcttcttccgggggacagtccaaccctggctcctcaacaccagcacccggcgccgcacagctgtcaagtcggctctgtaaagcgctgtactcattccaagcacgccaagacgacgaactgaatctggagaaaggtgatatagtgatcatccacgaaaagaaagagggtggttggtggtttggaagccttaacgggaagaagggtcacttccctgctgcctatgttgaagaactgccaagtaatgcagggaacactgctactaaggcttag

SEQ ID NO: 229736 - DNA, 1287 bp, Artificial Sequence
  derived and/or modified sequence
atgaagagcacagctgacctgcaccagaagctgggcaaggccatcgagctggaggccatcaagcccacctaccaggtgctgaatgtgcaggagaagaagaggaagagcctggacaatgaggtggagaagacagccaacctggtgatcagcaactggaaccagcagatcaaggccaagaagaagctgatggtgtccaccaagaagcatgaggccctcttccagctggtggagagcagcaagcagagcatgacagagaaggagaagaggaagctgctgaacaagctgaccaagagcacagagaagctggagaaggaggatgagaactactaccagaagaacatggccggctacagcacccggctgaagtgggagaacaccctggagaactgctaccagagcatcctggagctggagaaggagcgcatccagctgctgtgcaacaacctgaaccagtacagccagcacatcagcctgtttggccagaccctgaccacctgccacacccagatccactgtgccatcagcaagattgatattgagaaggacatccaggccgtgatggaggagacagccatcctgagcacagagaacaagtctgagttcctgctgacagactactttgaggaggaccccaacagcgccatggacaaggagaggaggaagagcctgctgaagcccaagctgctgcggctgcagagggacatcgagaaggccagcaaggacaaggagggcctggagaggatgctgaagacctacagcagcaccagcagcttcagtgatgccaagagccagaaggacacagctgccctgatggatgagaacaacctgaagctggacctgctggaggccaacagctacaagctgagctccatgctggccgagctggagcagaggccccagcccagccacccctgcagcaacagcatcttccgctggagggagaaggagcacacccacagctatgtgaagatcagccggcccttcctgatgaagaggctggagaacatcgtgtccaaggccagcagcggcggccagagcaaccctggcagcagcaccccagcccctggagctgcccagctgagcagccggctgtgcaaggccctgtacagcttccaggcccggcaggatgatgagctgaacctggagaagggggacatcgtcatcatccacgagaagaaggagggcggctggtggtttggcagcctgaatggcaagaagggccacttccctgctgcctacgtggaggagctgcccagcaatgccggcaacacagccaccaaggcctag

SEQ ID NO: 229737 - DNA, 1287 bp, Artificial Sequence
  derived and/or modified sequence
atgaagagcaccgccgacctgcaccagaagctgggcaaggccatcgaactggaggccataaagcccacctaccaagtccttaacgtacaggaaaagaagcggaagtctctggataatgaagtcgagaagactgcaaacctagtcatcagcaactggaaccagcagattaaggcgaagaagaaactgatggtgtctacaaaaaagcatgaagcactgtttcagctggtggagtccagcaagcagtccatgacggagaaggagaaacggaaactcctcaataaattaaccaaaagcacagaaaagctcgagaaagaggatgagaattactaccaaaagaatatggccgggtacagcacacggcttaaatgggagaacaccctggaaaactgctatcagtcaatcctcgagctcgagaaagagagaatccagttactttgcaacaatttaaaccagtacagccagcacatcagcctgttcgggcagacactgaccacctgccatacacaaattcactgtgctatctctaagattgacatcgaaaaggacatacaggccgtcatggaggagacggccattctcagtacagagaataaatcggaattcctgctgactgattacttcgaagaggatccaaactctgcgatggacaaggaacggagaaagagcctgctcaagcctaagttacttcgactccagagagacatcgaaaaggcttctaaggacaaggaggggcttgagagaatgttaaagacctacagctcaacatcttcattttcagatgccaagtcccaaaaggacaccgcggccctcatggacgagaacaatctaaagctggatctgctcgaggctaattcttacaagctttcatcaatgctggccgagttggagcaaaggccccagccctcgcacccctgtagtaattcaatttttagatggagggagaaagaacatacccactcatatgtgaagattagccgccccttccttatgaagagactggaaaatatcgtcagcaaggcctcaagtggcggtcagagcaaccccgggtcatctacgccagcaccgggcgcggctcagcttagctcacgcctttgcaaggctctgtacagcttccaggcacgccaggatgatgaactgaacctagagaaaggggacattgtgataattcacgagaaaaaggaggggggatggtggtttggcagcctcaacggaaaaaagggtcattttcctgcggcctatgtggaagagttgccgtccaacgccggaaatactgccactaaggcatag

SEQ ID NO: 229738 - DNA, 1287 bp, Artificial Sequence
  derived and/or modified sequence
atgaaaagtactgcagatctgcatcagaaactgggaaaggccatcgaactggaggccatcaaaccaacctatcaggtgttaaacgtccaggagaagaaacgcaagtctctcgataacgaggtggaaaagaccgcaaacctggttatttcgaattggaatcagcaaatcaaggctaagaaaaaactcatggtttcaaccaagaagcacgaagcactgtttcagcttgttgagagctctaaacaatccatgaccgagaaggagaagcggaagctgctgaacaaactgacaaaaagcaccgaaaaactcgagaaggaagacgagaactactatcaaaagaatatggctggttattctacgcgcttaaagtgggagaacaccttggagaactgctaccagtcaatacttgagctggagaaggaaaggattcagctgctttgtaataacctgaatcagtattcccagcatatctctctctttggacagacactgactacatgtcatactcagatccattgcgccattagcaagattgatattgagaaggacatccaggcggtcatggaagagaccgccatccttagcacagaaaataaaagcgagtttctgcttacggactacttcgaggaggatcccaacagcgccatggacaaggagcggaggaaatccctattgaagccaaaacttctccgactccagagggatattgaaaaagcttcgaaagacaaggagggccttgaaaggatgcttaaaacctatagctccacctcgtcgtttagcgatgccaagtcccaaaaggacactgccgcactcatggacgagaataaccttaaactggacctgctggaggccaatagttacaagctctcctcgatgctggccgaactcgaacaacgtccacaacctagccacccctgtagtaacagtatattccgctggcgtgagaaagagcacacccactcatacgtcaagatctcacgtccttttctcatgaagaggcttgagaacatcgtgtcaaaggctagctccggcggacagtctaaccctggatcatctacacccgcacctggagcagcgcagctgtccagtcgactctgtaaagccctgtacagtttccaggcaaggcaagatgacgagctgaacctcgagaagggtgacattgtaattatccatgaaaaaaaagagggtggctggtggtttggctccctcaatgggaagaaaggccactttccagcagcttacgtggaggaactcccaagcaatgccggtaacactgccactaaagcctag

SEQ ID NO: 229739 - DNA, 1287 bp, Artificial Sequence
  derived and/or modified sequence
atgaagagcaccgccgacctgcaccagaagctgggcaaggccatcgagctggaggccatcaagcccacctaccaggtgctgaacgtgcaggagaagaagagaaagagcctggacaacgaggtggagaagaccgccaacctggtgatcagcaactggaaccagcagatcaaggccaagaagaagctgatggtgagcaccaagaagcacgaggccctgttccagctggtggagagcagcaagcagagcatgaccgagaaggagaagagaaagctgctgaacaagctgaccaagagcaccgagaagctggagaaggaggacgagaactactaccagaagaacatggccggctacagcaccagactgaagtgggagaacaccctggagaactgctaccagagcatcctggagctggagaaggagagaatccagctgctgtgcaacaacctgaaccagtacagccagcacatcagcctgttcggccagaccctgaccacctgccacacccagatccactgcgccatcagcaagatcgacatcgagaaggacatccaggccgtgatggaggagaccgccatcctgagcaccgagaacaagagcgagttcctgctgaccgactacttcgaggaggaccccaacagcgccatggacaaggagagaagaaagagcctgctgaagcccaagctgctgagactgcagagagacatcgagaaggccagcaaggacaaggagggcctggagagaatgctgaagacctacagcagcaccagcagcttcagcgacgccaagagccagaaggacaccgccgccctgatggacgagaacaacctgaagctggacctgctggaggccaacagctacaagctgagcagcatgctggccgagctggagcagagaccccagcccagccacccctgcagcaacagcatcttcagatggagagagaaggagcacacccacagctacgtgaagatcagcagacccttcctgatgaagagactggagaacatcgtgagcaaggccagcagcggcggccagagcaaccccggcagcagcacccccgcccccggcgccgcccagctgagcagcagactgtgcaaggccctgtacagcttccaggccagacaggacgacgagctgaacctggagaagggcgacatcgtgatcatccacgagaagaaggagggcggctggtggttcggcagcctgaacggcaagaagggccacttccccgccgcctacgtggaggagctgcccagcaacgccggcaacaccgccaccaaggcctag

SEQ ID NO: 229740 - protein, 2170 aa, Artificial Sequence
  derived and/or modified sequence
MKDSEGPQRPPLCFLSTLLSQKVPEKSDAVLRCIISGQPKPEVTWYKNGQAIDGSGIISNYEFFENQYIHVLHLSCCTKNDAAVYQISAKNSFGMICCSASVEVECSSENPQLSPNLEDDRDRGWKHETGTHEEERANQIDEKEHPYKEEESISPGTPRSADSSPSKSNHSLSLQSLGNLDISVSSSENPLGVKGTRHTGEAYDPSNTEEIANGLLFLNSSHIYEKQDRCCHKTVHSMASKFTDGDLNNDGPHDEGLRSSQQNPKVQKYISFSLPLSEATAHIYPGDSAVANKQPSPQLSSEDSDSDYELCPEITLTYTEEFSDDDLEYLECSDVMTDYSNAVWQRNLLGTEHVFLLESDDEEMEFGEHCLGGCEHFLSGMGCGSRVSGDAGPMVATAGFCGHHSQPQEVGVRSSRVSKHGPSSPQTGMTLILGPHQDGTSSVTEQGRYKLPTAPEAAENDYPGIQGETRDSHQAREEFASDNLLNMDESVRETEMKLLSGESENSGMSQCWETAADKRVGGKDLWSKRGSRKSARVRQPGMKGNPKKPNANLRESTTEGTLHLCSAKESAEPPLTQSDKRETSHTTAAATGRSSHADARECAISTQAEQEAKTLQTSTDSVSKEGNTNCKGEGMQVNTLFETSQVPDWSDPPQVQVQETVRETISCSQMPAFSEPAGEESPFTGTTTISFSNLGGVHKENASLAQHSEVKPCTCGPQHEEKQDRDGNIPDNFREDLKYEQSISEANDETMSPGVFSRHLPKDARADFREPVAVSVASPEPTDTALTLENVCDEPRDREAVCAMECFEAGDQGTCFDTIDSLVGRPVDKYSPQEICSVDTELAEGQNKVSDLCSSNDKTLEVFFQTQVSETSVSTCKSSKDGNSVMSPLFTSTFTLNISHTASEGATGENLAKVENSTYPLASTVHAGQEQPSPSNSGGLDETQLLSSENNPLVQFKEGGDKSPSPSAADTTATPASYSSIVSFPWEKPTTLTANNECFQATRETEDTSTVTIATEVHPAKYLAVSIPEDKHAGGTEERFPRASHEKVSQFPSQVQLDHILSGATIKSTKELLCRAPSVPGVPHHVLQLPEGEGFCSNSPLQVDNLSGDKSQTVDRADFRSYEENFQERGSETKQGVQQQSLSQQGSLSAPDFQQSLPTTSAAQEERNLVPTAHSPASSREGAGQRSGWGTRVSVVAETAGEEDSQALSNVPSLSDILLEESKEYRPGNWEAGNKLKIITLEASASEIWPPRQLTNSESKASDGGLIIPDKVWAVPDSLKADAVVPELAPSEIAALAHSPEDAESALADSRESHKGEEPTISVHWRSLSSRGFSQPRLLESSVDPVDEKELSVTDSLSAASETGGKENVNNVSQDQEEKQLKMDHTAFFKKFLTCPKILESSVDPIDEISVIEYTRAGKPEPSETTPQGAREGGQSNDGNMGHEAEIQPAILQVPCLQGTILSENRISRSQEGSMKQEAEQIQPEEAKTAIWQVLQPSEGGERIPSGCSIGQIQESSDGSLGEAEQSKKDKAELISPTSPLSSCLPIMTHASLGVDTHNSTGQIHDVPENDIVEPRKRQYVFPVSQKRGTIENERGKPLPSSPDLTRFPCTSSPEGNVTDFLISHKMEEPKIEVLQIGETKPPSSSSSSAKTLAFISGERELEKAPKLLQDPCQKGTLGCAKKSREREKSLEARAGKSPGTLTAVTGSEEVKRKPEAPGSGHLAEGVKKKILSRVAALRLKLEEKENIRKNSAFLKKMPKLETSLSHTEEKQDPKKPSCKREGRAPVLLKKIQAEMFPEHSGNVKLSCQFAEIHEDSTICWTKDSKSIAQVQRSAGDNSTVSFAIVQASPKDQGLYYCCIKNSYGKVTAEFNLTAEVLKQLSSRQDTKGCEEIEFSQLIFKEDFLHDSYFGGRLRGQIATEELHFGEGVHRKAFRSTVMHGLMPVFKPGHACVLKVHNAIAYGTRNNDELIQRNYKLAAQECYVQNTARYYAKIYAAEAQPLEGFGEVPEIIPIFLIHRPENNIPYATVEEELIGEFVKYSIRDGKEINFLRRESEAGQKCCTFQHWVYQKTSGCLLVTDMQGVGMKLTDVGIATLAKGYKGFKGNCSMTFIDQFKALHQCNKYCKMLGLKSLQNNNQKQKQPSIGKSKVQTNSMTIKKAGPETPGEKKT

SEQ ID NO: 229741 - DNA, 6513 bp, Artificial Sequence
  derived and/or modified sequence
atgaaggacagcgagggcccccagagaccccccctgtgcttcctgagcaccctgctgagccagaaggtgcccgagaagagcgacgccgtgctgagatgcatcatcagcggccagcccaagcccgaggtgacctggtacaagaacggccaggccatcgacggcagcggcatcatcagcaactacgagttcttcgagaaccagtacatccacgtgctgcacctgagctgctgcaccaagaacgacgccgccgtgtaccagatcagcgccaagaacagcttcggcatgatctgctgcagcgccagcgtggaggtggagtgcagcagcgagaacccccagctgagccccaacctggaggacgacagagacagaggctggaagcacgagaccggcacccacgaggaggagagagccaaccagatcgacgagaaggagcacccctacaaggaggaggagagcatcagccccggcacccccagaagcgccgacagcagccccagcaagagcaaccacagcctgagcctgcagagcctgggcaacctggacatcagcgtgagcagcagcgagaaccccctgggcgtgaagggcaccagacacaccggcgaggcctacgaccccagcaacaccgaggagatcgccaacggcctgctgttcctgaacagcagccacatctacgagaagcaggacagatgctgccacaagaccgtgcacagcatggccagcaagttcaccgacggcgacctgaacaacgacggcccccacgacgagggcctgagaagcagccagcagaaccccaaggtgcagaagtacatcagcttcagcctgcccctgagcgaggccaccgcccacatctaccccggcgacagcgccgtggccaacaagcagcccagcccccagctgagcagcgaggacagcgacagcgactacgagctgtgccccgagatcaccctgacctacaccgaggagttcagcgacgacgacctggagtacctggagtgcagcgacgtgatgaccgactacagcaacgccgtgtggcagagaaacctgctgggcaccgagcacgtgttcctgctggagagcgacgacgaggagatggagttcggcgagcactgcctgggcggctgcgagcacttcctgagcggcatgggctgcggcagcagagtgagcggcgacgccggccccatggtggccaccgccggcttctgcggccaccacagccagccccaggaggtgggcgtgagaagcagcagagtgagcaagcacggccccagcagcccccagaccggcatgaccctgatcctgggcccccaccaggacggcaccagcagcgtgaccgagcagggcagatacaagctgcccaccgcccccgaggccgccgagaacgactaccccggcatccagggcgagaccagagacagccaccaggccagagaggagttcgccagcgacaacctgctgaacatggacgagagcgtgagagagaccgagatgaagctgctgagcggcgagagcgagaacagcggcatgagccagtgctgggagaccgccgccgacaagagagtgggcggcaaggacctgtggagcaagagaggcagcagaaagagcgccagagtgagacagcccggcatgaagggcaaccccaagaagcccaacgccaacctgagagagagcaccaccgagggcaccctgcacctgtgcagcgccaaggagagcgccgagccccccctgacccagagcgacaagagagagaccagccacaccaccgccgccgccaccggcagaagcagccacgccgacgccagagagtgcgccatcagcacccaggccgagcaggaggccaagaccctgcagaccagcaccgacagcgtgagcaaggagggcaacaccaactgcaagggcgagggcatgcaggtgaacaccctgttcgagaccagccaggtgcccgactggagcgaccccccccaggtgcaggtgcaggagaccgtgagagagaccatcagctgcagccagatgcccgccttcagcgagcccgccggcgaggagagccccttcaccggcaccaccaccatcagcttcagcaacctgggcggcgtgcacaaggagaacgccagcctggcccagcacagcgaggtgaagccctgcacctgcggcccccagcacgaggagaagcaggacagagacggcaacatccccgacaacttcagagaggacctgaagtacgagcagagcatcagcgaggccaacgacgagaccatgagccccggcgtgttcagcagacacctgcccaaggacgccagagccgacttcagagagcccgtggccgtgagcgtggccagccccgagcccaccgacaccgccctgaccctggagaacgtgtgcgacgagcccagagacagagaggccgtgtgcgccatggagtgcttcgaggccggcgaccagggcacctgcttcgacaccatcgacagcctggtgggcagacccgtggacaagtacagcccccaggagatctgcagcgtggacaccgagctggccgagggccagaacaaggtgagcgacctgtgcagcagcaacgacaagaccctggaggtgttcttccagacccaggtgagcgagaccagcgtgagcacctgcaagagcagcaaggacggcaacagcgtgatgagccccctgttcaccagcaccttcaccctgaacatcagccacaccgccagcgagggcgccaccggcgagaacctggccaaggtggagaacagcacctaccccctggccagcaccgtgcacgccggccaggagcagcccagccccagcaacagcggcggcctggacgagacccagctgctgagcagcgagaacaaccccctggtgcagttcaaggagggcggcgacaagagccccagccccagcgccgccgacaccaccgccacccccgccagctacagcagcatcgtgagcttcccctgggagaagcccaccaccctgaccgccaacaacgagtgcttccaggccaccagagagaccgaggacaccagcaccgtgaccatcgccaccgaggtgcaccccgccaagtacctggccgtgagcatccccgaggacaagcacgccggcggcaccgaggagagattccccagagccagccacgagaaggtgagccagttccccagccaggtgcagctggaccacatcctgagcggcgccaccatcaagagcaccaaggagctgctgtgcagagcccccagcgtgcccggcgtgccccaccacgtgctgcagctgcccgagggcgagggcttctgcagcaacagccccctgcaggtggacaacctgagcggcgacaagagccagaccgtggacagagccgacttcagaagctacgaggagaacttccaggagagaggcagcgagaccaagcagggcgtgcagcagcagagcctgagccagcagggcagcctgagcgcccccgacttccagcagagcctgcccaccaccagcgccgcccaggaggagagaaacctggtgcccaccgcccacagccccgccagcagcagagagggcgccggccagagaagcggctggggcaccagagtgagcgtggtggccgagaccgccggcgaggaggacagccaggccctgagcaacgtgcccagcctgagcgacatcctgctggaggagagcaaggagtacagacccggcaactgggaggccggcaacaagctgaagatcatcaccctggaggccagcgccagcgagatctggccccccagacagctgaccaacagcgagagcaaggccagcgacggcggcctgatcatccccgacaaggtgtgggccgtgcccgacagcctgaaggccgacgccgtggtgcccgagctggcccccagcgagatcgccgccctggcccacagccccgaggacgccgagagcgccctggccgacagcagagagagccacaagggcgaggagcccaccatcagcgtgcactggagaagcctgagcagcagaggcttcagccagcccagactgctggagagcagcgtggaccccgtggacgagaaggagctgagcgtgaccgacagcctgagcgccgccagcgagaccggcggcaaggagaacgtgaacaacgtgagccaggaccaggaggagaagcagctgaagatggaccacaccgccttcttcaagaagttcctgacctgccccaagatcctggagagcagcgtggaccccatcgacgagatcagcgtgatcgagtacaccagagccggcaagcccgagcccagcgagaccaccccccagggcgccagagagggcggccagagcaacgacggcaacatgggccacgaggccgagatccagcccgccatcctgcaggtgccctgcctgcagggcaccatcctgagcgagaacagaatcagcagaagccaggagggcagcatgaagcaggaggccgagcagatccagcccgaggaggccaagaccgccatctggcaggtgctgcagcccagcgagggcggcgagagaatccccagcggctgcagcatcggccagatccaggagagcagcgacggcagcctgggcgaggccgagcagagcaagaaggacaaggccgagctgatcagccccaccagccccctgagcagctgcctgcccatcatgacccacgccagcctgggcgtggacacccacaacagcaccggccagatccacgacgtgcccgagaacgacatcgtggagcccagaaagagacagtacgtgttccccgtgagccagaagagaggcaccatcgagaacgagagaggcaagcccctgcccagcagccccgacctgaccagattcccctgcaccagcagccccgagggcaacgtgaccgacttcctgatcagccacaagatggaggagcccaagatcgaggtgctgcagatcggcgagaccaagccccccagcagcagcagcagcagcgccaagaccctggccttcatcagcggcgagagagagctggagaaggcccccaagctgctgcaggacccctgccagaagggcaccctgggctgcgccaagaagagcagagagagagagaagagcctggaggccagagccggcaagagccccggcaccctgaccgccgtgaccggcagcgaggaggtgaagagaaagcccgaggcccccggcagcggccacctggccgagggcgtgaagaagaagatcctgagcagagtggccgccctgagactgaagctggaggagaaggagaacatcagaaagaacagcgccttcctgaagaagatgcccaagctggagaccagcctgagccacaccgaggagaagcaggaccccaagaagcccagctgcaagagagagggcagagcccccgtgctgctgaagaagatccaggccgagatgttccccgagcacagcggcaacgtgaagctgagctgccagttcgccgagatccacgaggacagcaccatctgctggaccaaggacagcaagagcatcgcccaggtgcagagaagcgccggcgacaacagcaccgtgagcttcgccatcgtgcaggccagccccaaggaccagggcctgtactactgctgcatcaagaacagctacggcaaggtgaccgccgagttcaacctgaccgccgaggtgctgaagcagctgagcagcagacaggacaccaagggctgcgaggagatcgagttcagccagctgatcttcaaggaggacttcctgcacgacagctacttcggcggcagactgagaggccagatcgccaccgaggagctgcacttcggcgagggcgtgcacagaaaggccttcagaagcaccgtgatgcacggcctgatgcccgtgttcaagcccggccacgcctgcgtgctgaaggtgcacaacgccatcgcctacggcaccagaaacaacgacgagctgatccagagaaactacaagctggccgcccaggagtgctacgtgcagaacaccgccagatactacgccaagatctacgccgccgaggcccagcccctggagggcttcggcgaggtgcccgagatcatccccatcttcctgatccacagacccgagaacaacatcccctacgccaccgtggaggaggagctgatcggcgagttcgtgaagtacagcatcagagacggcaaggagatcaacttcctgagaagagagagcgaggccggccagaagtgctgcaccttccagcactgggtgtaccagaagaccagcggctgcctgctggtgaccgacatgcagggcgtgggcatgaagctgaccgacgtgggcatcgccaccctggccaagggctacaagggcttcaagggcaactgcagcatgaccttcatcgaccagttcaaggccctgcaccagtgcaacaagtactgcaagatgctgggcctgaagagcctgcagaacaacaaccagaagcagaagcagcccagcatcggcaagagcaaggtgcagaccaacagcatgaccatcaagaaggccggccccgagacccccggcgagaagaagacctag

SEQ ID NO: 229742 - DNA, 6513 bp, Artificial Sequence
  derived and/or modified sequence
atgaaagatagcgaagggccccagcgaccacccctgtgctttctcagtactctgctcagccaaaaggttccggagaagagcgatgctgtgctaagatgcattataagtggacaacctaagccagaggttacttggtacaaaaatggccaggctattgacggatctgggatcatctcgaactacgagttcttcgagaatcagtatatacatgtgctgcatctttcttgttgtaccaagaacgacgccgcagtataccagatcagtgcaaaaaatagctttgggatgatatgttgttcagcatctgtcgaggttgagtgttcatcagagaacccccaactctcccccaatctggaggacgacagggaccggggatggaaacacgagacggggacccacgaagaggagagagcaaaccagattgatgagaaagagcacccttacaaggaggaggagtctatcagtcccggcacaccgcgctcagcagactccagcccatccaagtcaaatcacagcttgtccttgcagagccttggcaacctcgacatttcagtttctagttccgagaatcctcttggagtcaaaggaacacgccataccggtgaggcgtacgatcctagtaacactgaggaaatcgctaatggccttctctttctgaactcatcacacatctacgagaagcaggatagatgctgtcacaagaccgtccacagtatggcctctaagttcacagatggcgatctgaacaacgatggcccccatgacgagggactaagaagtagtcagcagaacccgaaagtgcagaaatacattagctttagcctgccactctcagaggcaactgcacacatttatcctggggatagcgccgtggcaaataagcaaccttctccacaactgtcctctgaggatagcgactccgattacgagctatgccctgaaataaccctaacttataccgaggagttctccgatgatgatttggagtacttagagtgctcggatgtgatgacagactacagcaacgctgtatggcagaggaatctgctcgggaccgaacacgtgttccttttggaatcggacgacgaggaaatggagtttggagagcattgcctcggtggatgcgagcatttcttatcaggcatgggctgcggaagcagggtgagtggggacgccggtccaatggttgcaacagcaggattttgcgggcatcacagccaaccacaggaagtgggtgtgcggtccagccgcgtatcaaaacacgggcctagcagcccgcagacaggaatgactctaatactgggcccgcaccaggatggaacaagttccgtcacagaacagggcagatacaaactgccaaccgcacccgaagcagcagaaaatgactacccaggaattcagggcgagacacgggattcccaccaggcccgtgaagaattcgcgtcagacaatcttctgaatatggacgaatctgtacgcgagacggagatgaagctgttaagcggtgaaagcgagaatagtgggatgagccaatgctgggaaaccgcagcggacaagcgtgtgggtgggaaggacctgtggagcaagcgcgggtccaggaagtccgctagggtgaggcaacccggcatgaaaggtaaccctaaaaagcctaatgccaatttgagagagagtaccactgagggcactctgcatctatgttcggctaaggaaagtgcagagccaccacttacgcagtctgacaagcgggaaacctcgcatacaacagccgctgccactgggagatcgtcacacgcagacgcccgcgaatgtgccatttccactcaggcggagcaggaagccaagacgctgcaaacctcaactgattcagtctctaaagagggcaacaccaactgcaagggagagggaatgcaggtgaatactctgttcgagaccagtcaggtgcccgactggtccgacccgcctcaggtgcaggtccaagagactgtcagggagacgatttcctgcagccagatgccggccttttccgaacccgcgggagaagaaagcccgtttactggtacaactaccatcagtttcagcaacttgggaggcgtacataaagaaaacgccagtctcgctcagcactcggaggtcaaaccttgcacctgcggccctcagcatgaagaaaagcaggatagagatggcaacattcctgacaacttcagagaagatctgaagtatgagcagagcatcagcgaagcaaatgatgagacaatgtctcctggcgttttctcaaggcacttaccgaaagacgcccgcgccgatttccgggaaccagtggctgtcagcgttgcttcccccgaacctacagacaccgctcttacattggagaacgtgtgtgatgaaccccgggatcgggaggccgtttgtgcaatggaatgcttcgaggcaggggatcagggaacatgtttcgatactattgatagtttggttggtcggcctgtcgataagtactctccccaggagatttgcagtgtggataccgagctggcggagggacagaacaaggtgtcagacttatgctcttccaacgacaaaaccctggaggtttttttccagacacaggtgagtgagacctccgtgagcacttgtaaaagcagtaaggatggcaacagcgtcatgtcacccctgtttacatccacttttaccctgaatatcagccatactgcctctgagggagcaaccggcgagaatctcgctaaggttgagaacagtacttaccccttggcatccacagtccatgcaggccaggagcagcctagtccttctaacagcggcggactggacgagactcagctcctcagttcagaaaataatccactggtgcagtttaaggaagggggagacaaaagtcccagcccatctgctgccgataccaccgccacccccgcctcctacagctctattgtttcttttccctgggaaaaaccgacaaccctgactgcaaataacgagtgcttccaggcaacgcgcgagacagaagatacctcgaccgtgactatcgcaacagaggtgcatcccgccaaatatctggccgtgtcaatcccggaggacaaacacgcagggggcaccgaggagcggttcccacgcgcatcccatgagaaagtgagccagttcccttctcaagtccagctggatcacatactcagtggcgccaccattaagagtaccaaggagttgctatgcagagcaccatccgtcccaggcgtccctcaccatgttctacagctgcctgagggggagggcttttgctctaattcccccctgcaggtcgataatctgtccggagataagtcacagacagtcgatcgggccgattttcgctcttacgaggaaaacttccaggagcgcgggtctgagacaaagcagggggtgcagcaacaatctttgtcccagcagggctccctttccgcccccgattttcaacagagtctgcccacaacctcagccgctcaggaggaacgcaatctggtgccaaccgctcacagccctgctagctcccgggagggcgcaggccagagatcaggatgggggactcgcgtctctgttgttgcggaaaccgcaggcgaagaagactcccaggctttaagtaacgtccccagcttatcagacattttgctcgaggagagtaaggagtaccgacctgggaactgggaggctggcaacaagctcaagattatcacactggaggcgagcgctagcgagatctggccgcccaggcaacttacaaactccgaatctaaggcctctgatggcggcctgattattcccgacaaggtctgggccgtccccgattccctgaaggctgacgctgtggtgcccgagctagcacccagcgagatcgcagcactggcccactctccggaagacgcagagtccgcactggcagacagcagggagtcacacaaaggggaagaacctaccattagcgtgcactggcgcagtctgagctctcggggcttctctcagccacgacttctggagagttctgtggaccccgttgacgaaaaagaactgtccgtgactgactccctatctgctgcctctgaaacaggtggcaaggaaaacgtaaataatgtgagccaggatcaggaggagaagcagctgaaaatggaccacactgcattctttaaaaagtttttgacatgtcctaagattctcgaatcttctgtggaccctattgacgagattagtgtgatagaatatacaagagccggtaagcctgagccctccgaaacaacaccacagggcgcaagagagggggggcagtctaacgacgggaatatgggtcatgaagccgaaattcagcctgccatcttgcaagtgccctgtctgcagggaacaatactgagtgaaaatcggatctctcgttcccaggagggcagcatgaaacaggaagctgagcagatccagcctgaggaggctaagacggccatttggcaggtgctgcaaccctctgaaggtggggagcgaatcccttcaggctgtagtatcggacagattcaggagagctcggacgggtccctcggagaggccgaacagtccaaaaaggacaaggccgagctcattagccccaccagccctcttagttcttgtttgccgataatgacacacgcctcactgggcgtagacacccataactccacaggccagatacacgacgtaccagaaaatgatatcgtggagccacgaaaacgccagtatgtgttcccagtgagtcagaagagaggaacaatagagaatgagcgcggaaagccactgccaagtagcccggatctaactagatttccatgcacatcgtcccctgagggcaacgtcaccgactttctgatatcccataagatggaagagcccaaaattgaggtactgcagatcggagagacaaagccaccttccagctcaagcagctcggccaaaaccctagcttttatatccggtgagcgggaactggaaaaggccccaaagctcctgcaagatccttgtcagaaggggactctcgggtgcgccaaaaaatcgagggaacgcgaaaagtcattagaggctcgcgccggaaagagccccgggacattaactgccgtaacaggctccgaagaagtgaagcgtaagcccgaagccccgggaagcgggcatcttgcagagggcgtgaagaagaaaatcctctctcgggtggccgcactgcgtctgaagctcgaggagaaggaaaacatccgcaagaatagcgcctttcttaagaaaatgcccaagcttgaaaccagtctgtcccacaccgaggaaaaacaagacccaaaaaaaccatcatgcaagcgagaaggacgggccccggtcctgctgaaaaagatacaggccgaaatgtttccggaacatagcggcaacgtgaagctgagctgtcaattcgctgagatccacgaagacagtaccatctgctggactaaagattcaaaatctattgcccaagttcagaggagtgctggagacaattccacggttagctttgcaattgtccaggcatcccccaaggatcagggtctgtactattgctgtattaagaactcatacgggaaagttaccgccgagtttaacctcaccgccgaggtccttaagcagctctcttctcgccaggataccaaagggtgcgaagagatcgaatttagtcagcttattttcaaagaggacttcctgcacgattcgtatttcggcgggaggttacgcgggcaaatcgctaccgaggagctgcactttggtgagggagtccatcggaaggcgttcagatccacggtgatgcatgggctcatgccagtattcaagcctgggcacgcttgcgtgctgaaagtgcataatgctatcgcttatgggacccgaaacaatgatgagctaatacagaggaattataaactggccgcgcaagaatgttacgtacagaacacagcccgctactatgccaaaatttatgccgctgaggcccagcctctggaaggcttcggcgaagtaccagaaataatacctatcttcctcatccatcgacctgagaacaacataccatatgccaccgtcgaggaggagctgatcggggaattcgttaaatattccatcagagatggtaaagagattaactttttaagaagagagtcagaggccgggcaaaaatgttgcacgtttcagcattgggtgtaccagaagacctccggatgtctcctcgttactgacatgcaaggggtcgggatgaagctcacggacgtgggcatagcgacactagccaaaggttataagggctttaagggaaattgttccatgacctttatagaccagtttaaagccttgcatcagtgcaataaatattgcaagatgctcggtctgaagtctttacagaacaataatcagaaacagaaacagccaagtatcggaaaatcaaaagtgcagaccaattccatgacaataaagaaggctggtcccgagactccaggggagaagaagacgtag

SEQ ID NO: 229743 - DNA, 7303 bp, Artificial Sequence
  derived and/or modified sequence
aggaagagatgaactttctggaagcagacccatctatgctttgacctgatcatggaagaccctgagccctataaactcctttgaatccctgtcccgggaacagggacacccaatcaatgcctcacacacagcctggggaatccacagctgagccagccctcctacaacatttcttggacaaagagtactgaaaaatttggtgcggcatgaaaggatgaaagactccgaagggccccagaggcccccgctgtgttttttatctacattgctttcccagaaggttcctgagaagtcagacgctgtgcttcgctgcataatatctggtcagcccaagccagaggtaacttggtataagaatggtcaggccatcgatgggagtggcattatttccaactatgaattctttgagaatcagtatattcatgtgttacatctctcttgctgtaccaaaaatgatgctgctgtctatcaaatctcggctaaaaactcttttggaatgatctgttgttctgcttccgttgaggttgagtgctcatcagagaacccacaattgtctcctaacctggaagatgacagggacaggggttggaaacatgaaacagggacacatgaagaagaaagggcaaatcagattgatgagaaggaacatccttataaggaagaagaaagcatctccccgggcactcccaggtcagctgactcctccccctccaaatccaaccattcactctccctccagtcattgggcaatcttgacattagtgtgtccagttctgaaaatcctttgggtgttaaaggaacaaggcacactggagaggcttatgatccaagtaacacagaagaaattgcaaatgggttgctttttcttaattcaagtcatatttatgaaaaacaagacagatgttgccacaagacagtgcattccatggcatcaaagttcacggatggtgacctgaacaatgatggtcctcatgatgaaggcttacgctctagtcagcaaaatcccaaagtacagaaatacattagcttcagcctcccgctatctgaggcaactgcacacatttacccaggtgacagtgccgtggccaacaaacaacccagcccacagctttccagtgaagactctgacagtgactatgaactttgcccagagataaccctaacctacaccgaggagttttcagatgatgacctggagtatctggaatgttctgatgttatgacggattactctaatgcagtttggcaaaggaacctgctggggactgagcatgtttttttattagaaagcgatgacgaagagatggaattcggtgagcattgcctgggtgggtgtgagcatttcctcagtggaatgggttgtgggtctcgggtgtcgggtgacgctgggcctatggttgccactgctggcttctgtggtcatcactcacaaccccaagaagttggggtgaggagcagcagagtctccaagcacggtccctcatccccacaaacagggatgactctcattttgggacctcaccaggatggaacgtcttcagtgacagaacaggggagatataaactccccactgctcccgaggctgctgaaaatgattatccaggaattcaaggagaaaccagagacagccaccaagcaagagaggaatttgccagtgacaatctgctcaacatggatgaatcagtaagagagacagagatgaagctcttgtctggtgagtcagaaaactcagggatgagccagtgttgggagacggcagctgacaagagagtggggggaaaggacttatggagcaagaggggttcaaggaaatctgccagggtgaggcagccgggaatgaagggaaatcccaagaagccgaatgccaacctgagagaaagtacaacagaaggtacccttcatctctgctctgccaaagaatctgctgagcccccactaacccagagtgataaaagagagacttctcacaccacagcagcagcgactggtcggagttcccatgctgatgcaagagaatgtgctatttcaacccaggcagagcaagaagcaaaaacccttcaaacttcaacagactcagtctccaaagaaggcaacacaaattgcaagggagaaggcatgcaagttaatactctatttgaaacaagccaggttccagactggagtgatcctcctcaggtacaagttcaggaaacagtcagagagacaatctcttgcagccagatgccagctttctcagagcctgctggggaggagtccccattcactgggaccacaacaatttccttctcaaacttaggaggggtccacaaggaaaatgcatcattagctcaacactcggaggtcaaaccctgtacctgtggtccacagcatgaagaaaaacaagacagagatggcaacatacctgacaatttcagggaagacctaaaatatgagcagagcatctcagaagccaatgatgagactatgtccccaggtgtgttctcaaggcatctccccaaggatgctcgtgctgacttcagggagcctgtggctgtctctgttgcttcccctgaacccacagatactgccctcaccctggaaaatgtgtgtgatgagccaagggacagagaagcagtgtgtgcaatggagtgttttgaggctggtgaccaaggaacgtgttttgataccatagattctcttgttgggagaccagttgataaatattcgcctcaagaaatttgctctgtagatacggaactggcagaaggtcaaaacaaagtatctgatttatgttcttctaatgacaagacactggaagtcttttttcagacacaagtgtctgagacttcagtgtctacgtgcaaaagcagcaaggacggcaactcagtcatgtcccctctttttaccagtactttcaccttgaacatttcacacacagctagtgaaggtgccacaggagaaaatctagccaaggtggagaattccacctacccactggcctccacagtacatgctggccaggagcagccaagccccagcaactcaggagggcttgatgaaacacagctcctttcttctgagaacaatcctttagtgcaatttaaagaaggaggtgacaagagccccagtcctagtgccgcagacaccacagccacaccagccagttatagttcaattgtgagttttccttgggagaagccaacaacattaactgctaataatgagtgctttcaagcgaccagggagactgaggacacatcaactgttaccattgccaccgaagtccacccagccaaataccttgctgtgtcaattcctgaggacaagcatgcaggtggcactgaggagaggttccctcgtgcatcccatgaaaaggtttcccaatttccttcccaagtgcagttggatcatattttaagtggtgctaccatcaaatctacaaaagagctactttgcagggcacccagtgtgccaggagtcccacaccatgtcctgcagctcccagagggagagggtttctgcagtaattcccctcttcaggttgataacctgtctggagataagagccagactgtggacagagcagactttaggagctatgaagagaatttccaagaaagaggaagtgaaacaaagcagggggtccagcagcagagcctgtcccagcagggttctctttctgcacctgatttccaacaaagtttgcctacgacatctgctgcacaagaggaaagaaacttggtgcccacggcccactcacccgcaagctctagggaaggagcagggcagcgctcaggttgggggacgagggtctccgtggtggctgaaactgctggggaagaagacagtcaggctctgagcaacgttccatctctctctgatatccttttggaagagtctaaagaatatagacctggaaattgggaggcaggcaacaagctgaagattataactctagaggcttccgcttctgaaatctggccaccacgacaactgacaaattctgagagcaaggcatcagacggtggtctcataattcctgacaaggtctgggctgtacctgatagtctaaaggcagatgctgttgtgcctgaattggccccctctgaaatagcagcattggctcacagtccagaggatgctgagtcagcccttgctgatagcagagaaagccataaaggcgaagagcccaccatcagtgtacattggagaagtctttcttcccggggtttcagccaacccagactcctggagtcatccgtggaccctgtagatgaaaaggagttatctgtcacagattcactgtcagcggcttctgaaactggagggaaggaaaatgttaacaatgtgagtcaagaccaggaggaaaaacaactcaagatggatcacactgccttctttaaaaagtttctgacctgccctaaaatcctagagtcctctgtagatcccattgatgagataagtgtgatagagtacaccagggctggaaaaccagagccctctgaaaccacaccacagggcgccagagaagggggtcaatcaaatgacggaaacatgggccacgaagcggaaatccagccggccattttgcaagttccatgtctccagggaaccattctgagtgaaaatagaatcagcagaagccaagaaggcagtatgaagcaggaggctgaacaaattcaacctgaggaggcaaaaactgccatttggcaagtcctgcaacccagcgaaggcggtgaaagaattccaagtggatgtagcataggccaaatacaagaaagcagtgatgggagcttaggggaggctgagcaaagcaaaaaggacaaagcagaattgatttcccccacttcacctctttctagttgtcttccaataatgactcacgcttctcttggggttgacacgcacaactccacaggccaaattcatgacgtccctgaaaatgacatagttgagcccagaaagcgtcagtatgtgtttcctgtttcacagaaaaggggaactattgagaatgagcgtgggaaacctttgccctcttctcctgatcttaccaggttcccttgtacttcatctcctgaaggaaatgtcacagactttttgataagccacaaaatggaggaacctaaaatagaggtgcttcaaattggggaaaccaaacccccaagctcatctagctcctcagcgaagaccttggcatttatttcaggagaacgtgagttagagaaagcccctaaattactgcaggatccatgtcaaaagggcaccctgggctgtgcgaaaaagtccagggagagagagaagtccctggaagcccgagcaggcaaatcgccagggaccctcacagcagtgacggggtcagaggaggtcaagaggaagccagaagccccaggcagtggacatttagctgagggagtaaagaagaaaattttgtccagggtggcagcactgaggctgaaactggaagaaaaggaaaatatcagaaagaactcagcctttcttaaaaagatgcccaaactcgaaacatcattatcacacacagaagagaaacaagacccaaaaaagccatcttgcaaaagagaaggaagagctccagtattactgaaaaagatccaagctgagatgttccctgaacactctggaaatgtaaaattaagctgccaatttgcagaaattcatgaagattctactatctgctggacaaaagattcaaagtccatagcccaagtgcagagaagtgcaggggacaactccactgtttcctttgccatcgtgcaagccagtccgaaggaccagggactctattactgctgcatcaagaacagctacggaaaagtgactgctgaatttaacctcacagctgaagttctcaaacagctgtcaagtcgccaggatactaaaggatgtgaagagattgaattcagccaactcatcttcaaagaagacttcctccatgacagctactttgggggccgcctgcgtggtcagatcgccacggaggagctgcactttggagaaggggttcaccgcaaagccttccgcagcacagtgatgcacggcctcatgcctgtcttcaaacctggccatgcctgtgtgcttaaggtgcacaatgccattgcctatgggaccagaaataatgatgagctcatccaaaggaactacaaactcgctgcccaggaatgctatgttcaaaatactgccaggtattatgccaagatctacgctgctgaagcacagcctctggaaggctttggagaagtacctgagatcattcctatttttcttatccatcggcctgagaacaatatcccgtatgctacagtggaggaggagctgattggagaatttgtgaagtattccatcagggatgggaaagaaataaacttcttgagaagagaatcagaagctggtcagaaatgttgcaccttccagcactgggtgtaccagaaaacaagtggctgcctcctggtgacggacatgcaaggtgtaggaatgaagctaactgacgttggcatagcaacgctggctaaagggtacaagggatttaaaggcaactgttccatgaccttcattgatcagtttaaagcactacaccagtgtaacaagtattgcaaaatgctgggactgaaatcccttcaaaacaacaaccagaaacagaagcagccgagcattgggaaaagcaaagttcaaacaaactctatgacaataaagaaggcagggcctgagaccccaggcgaaaagaaaacctaacgtccctgggtaacctaatggccactggctagcagcacacaatctcgccagggaaaatctgaggccacacaggagagaatatacagcctgcagagagtgcgtggcaatccttactcccagccgactgtgcgccaagatgcttctaaacccatcacctgctgtcttcactcaaatgatttcagaacaggatttgcgaccaggtttatggggagattgaatcaacgattggtctcaaagacagtccattctttatatacatgtttagcatttttaccaacctcacatcatgtgtatatttgtgtatttgcacatggttgtgctgtcgaggacctggtgctgagaagagtctgttcacagccaaaattcttcccactgtcattcctaacctgggatttctagacacatcctgctgtgatgtaaacagaaatcacgaattcgctcactggatcaagttgttccactggtgtctaatacgctattgttgccggaggtgggttctgtgacgtgaagccatttcccatcattcaacagccagttacaattttctgtttaattaaattcatatttaaacaaaaa

SEQ ID NO: 229744 - DNA, 6513 bp, Artificial Sequence
  derived and/or modified sequence
atgaaggacagcgagggcccccagaggcctcccctgtgcttcctgagcaccctgctgagccagaaggtgcctgagaagagtgatgctgtgctgcgctgcatcatcagcggccagcccaagccagaggtgacctggtacaagaatggccaggccattgatggcagcggcatcatcagcaactatgagttctttgagaaccagtacatccacgtgctgcacctgagctgctgcaccaagaatgatgctgctgtgtaccagatcagcgccaagaacagctttggcatgatctgctgcagcgcctctgtggaggtggagtgcagcagcgagaacccccagctgagccccaacctggaggatgaccgggaccggggctggaagcatgaaacaggcacccatgaggaggagcgggccaaccagattgatgagaaggagcacccctacaaggaggaggagagcatcagccctggcacccccaggtctgctgacagcagccccagcaagagcaaccacagcctgagcctgcagagcctgggcaacctggacatctctgtgagcagcagcgagaaccccctgggcgtgaagggcaccaggcacactggagaggcctatgaccccagcaacacagaggagatcgccaacggcctgctcttcctgaacagcagccacatctatgagaagcaggaccgctgctgccacaagacagtgcacagcatggccagcaagttcacagatggagacctgaacaatgatggcccccatgatgagggcctgcggagcagccagcagaaccccaaggtgcagaagtacatctccttcagcctgcccctgtctgaggccacagcccacatctacccaggggacagcgctgtggccaacaagcagcccagcccccagctgagcagcgaggacagcgacagcgactatgagctgtgcccagagatcaccctgacctacacagaggagttcagtgatgatgacctggagtacctggagtgcagtgatgtgatgacagactacagcaatgctgtgtggcagaggaacctgctgggcacagaacatgtgttcctgctggagagtgatgatgaggagatggagtttggagagcactgcctgggcggctgtgagcacttcctgagcggcatgggctgcggcagccgggtgtctggagatgctggccccatggtggccacagctggcttctgtggccaccacagccagccccaggaggtgggcgtgcgcagcagccgggtgtccaagcacggccccagcagcccccagacaggcatgaccctcatcctgggcccccaccaggacggcaccagctctgtgacagagcagggccgctacaagctgcccacagcccctgaggccgcagaaaatgactacccaggcatccagggcgagacccgggacagccaccaggcccgggaggagtttgccagtgacaacctgctgaacatggatgagagcgtgcgggagacagagatgaagctgctgagcggggagagcgagaacagcggcatgagccagtgctgggagacagctgctgacaagagggtgggcggcaaggacctgtggagcaagaggggcagcaggaagagcgcccgggtgcggcagcccggcatgaagggcaaccccaagaagcccaatgccaacctgcgggagagcaccacagagggcaccctgcacctgtgcagcgccaaggagagcgctgagccccccctgacccagagcgacaagcgggagaccagccacaccacagctgctgccaccggccgcagcagccatgctgatgccagagaatgtgccatcagcacccaggccgagcaggaggccaagaccctgcagaccagcacagattctgtgtccaaggagggcaacaccaactgcaagggggagggcatgcaggtgaacaccctgtttgagaccagccaggtgcctgactggagcgaccccccccaggtgcaggtgcaggagaccgtgcgggagaccatcagctgcagccagatgcctgccttcagcgagcctgctggggaggagagccccttcaccggcaccaccaccatctccttcagcaacctgggcggcgtgcacaaggaaaatgccagcctggcccagcacagcgaggtgaagccctgcacctgtggcccccagcacgaggagaagcaggacagagatggcaacatcccagacaacttccgggaggacctgaagtatgagcagagcatcagcgaggccaatgatgagaccatgagccctggggtcttcagccgccacctgcccaaggatgcccgggctgacttccgggagcctgtggccgtgtctgtggccagccctgagcccacagacacagccctgaccctggagaatgtgtgtgatgagccccgggaccgggaggccgtgtgtgccatggagtgctttgaagctggggaccagggcacctgctttgacaccatcgacagcctggtgggccggcctgtggacaagtacagcccccaggagatctgcagcgtggacacagagctggccgagggccagaacaaggtgtctgacctgtgcagcagcaatgacaagaccctggaggtgttcttccagacccaggtgtctgagacctctgtgtccacctgcaagagcagcaaggatggcaacagcgtgatgagccccctcttcaccagcaccttcaccctgaacatcagccacacagccagcgagggcgccactggagagaacctggccaaggtggagaacagcacctaccccctggccagcacagtgcatgctggccaggagcagcccagccccagcaacagcggcggcctggatgagacccagctgctgagcagcgagaacaaccccctggtgcagttcaaggagggcggggacaagagccccagccccagcgctgctgacaccacagccaccccagccagctacagcagcatcgtgtccttcccctgggagaagcccaccaccctgacagccaacaatgaatgcttccaggccacccgggagacagaggacaccagcacagtgaccatcgccacagaggtgcacccagccaagtacctggccgtgtccatccctgaggacaagcatgctgggggcacagaggagcgcttcccccgggccagccatgagaaggtgtcccagttccccagccaggtgcagctggaccacatcctgagcggggccaccatcaagagcaccaaggagctgctgtgccgggcccccagcgtgcctggggtgccccaccacgtgctgcagctgcctgagggggagggcttctgcagcaacagccccctgcaggtggacaacctgagcggggacaagagccagacagtggacagagctgacttccgctcctatgaggagaacttccaggagcggggcagcgagaccaagcagggcgtgcagcagcagagcctgagccagcagggcagcctgagcgccccagacttccagcagagcctgcccaccaccagcgctgcccaggaggagaggaacctggtgcccacagcccacagccctgccagcagccgggagggcgccggccagaggagcggctggggcaccagggtgtctgtggtggccgagacagctggggaggaggacagccaggccctgagcaatgtgcccagcctgagtgacatcctgctggaggagagcaaggagtacagacctggcaactgggaggccggcaacaagctgaagatcatcaccctggaggccagcgccagcgagatctggccaccccggcagctgaccaacagcgagagcaaggccagtgatggcggcctcatcatcccagacaaggtgtgggccgtgcctgacagcctgaaggcagatgctgtggtgcctgagctggcccccagcgagattgctgccctggcccacagcccagaagatgctgagagcgccctggccgacagccgggagagccacaagggggaggagcccaccatctctgtgcactggaggagcctgagcagccggggcttcagccagccccggctgctggagagctctgtggaccctgtggatgagaaggagctgtctgtgacagacagcctgtctgctgccagcgagactggaggcaaggaaaatgtgaacaacgtgtcccaggaccaggaggagaagcagctgaagatggaccacacagccttcttcaagaagttcctgacctgccccaagatcctggagagctctgtggaccccattgatgagatcagcgtcatcgagtacaccagggctgggaagccagagcccagcgagaccaccccccagggcgcccgggagggcggccagagcaatgatggcaacatgggccatgaagctgagatccagcctgccatcctgcaggtgccctgcctgcagggcaccatcctgtctgagaaccgcatcagccgcagccaggagggctccatgaagcaggaggccgagcagatccagcctgaggaggccaagacagccatctggcaggtgctgcagcccagcgagggcggggagcgcatccccagcggctgcagcatcggccagatccaggagagcagtgatggcagcctgggggaggccgagcagagcaagaaggacaaggccgagctgatcagccccaccagccccctgagcagctgcctgcccatcatgacccacgccagcctgggcgtggacacccacaacagcacaggccagatccatgatgtgcctgaaaatgacatcgtggagcccaggaagaggcagtatgtgtttcctgtgtcccagaagaggggcaccattgaaaatgaaagaggcaagcccctgcccagcagcccagacctgacccgcttcccctgcaccagcagccctgagggcaatgtgacagacttcctgatcagccacaagatggaggagcccaagattgaggtgctgcagattggagagaccaagccacccagcagcagcagcagcagcgccaagaccctggccttcatctctggagagcgggagctggagaaggcccccaagctgctgcaggacccctgccagaagggcaccctgggctgtgccaagaagagccgggagcgggagaagagcctggaggcccgggccggcaagagccctggcaccctgacagctgtgacaggcagcgaggaggtgaagaggaagccagaggcccctggcagcggccacctggccgagggcgtgaagaagaagatcctgagccgggtggccgccctgcggctgaagctggaggagaaggagaacatcaggaagaacagcgccttcctgaagaagatgcccaagctggagaccagcctgagccacacagaggagaagcaggaccccaagaagcccagctgcaagcgggagggccgggcccctgtgctgctgaagaagatccaggccgagatgtttcctgagcacagcggaaatgtgaagctgagctgccagtttgctgagatccacgaggacagcaccatctgctggaccaaggacagcaagagcatcgcccaggtgcagaggtctgctggggacaacagcacagtgtcctttgccatcgtgcaggccagccccaaggaccagggcctgtactactgctgcatcaagaacagctatggcaaggtgacagctgagttcaacctgacagctgaggtgctgaagcagctgagcagccggcaggacaccaagggctgtgaggagattgagttcagccagctgatcttcaaggaggacttcctgcatgacagctactttggaggccgcctgcggggccagatcgccacagaggagctgcactttggagagggcgtgcacaggaaggccttccgcagcacagtgatgcacggcctgatgcctgtgttcaagccaggccacgcctgtgtgctgaaggtgcacaatgccatcgcctacggcaccagaaataatgatgagctgatccagaggaactacaagctggccgcccaggagtgctacgtgcagaacacagcccgctactatgccaagatctatgctgctgaggcccagcccctggagggctttggagaggtgcctgagatcatccccatcttcctgatccacaggcctgagaacaacatcccctatgccaccgtggaggaggagctgattggagaatttgtgaagtacagcatcagagatggcaaggagatcaacttcctgcggcgggagagcgaggccggccagaagtgctgcaccttccagcactgggtgtaccagaagaccagcggctgcctgctggtgacagacatgcagggcgtgggcatgaagctgacagatgtgggcatcgccaccctggccaagggctacaagggcttcaagggcaactgcagcatgaccttcatcgaccagttcaaggccctgcaccagtgcaacaagtactgcaagatgctgggcctgaagagcctgcagaacaacaaccagaagcagaagcagcccagcatcggcaagagcaaggtgcagaccaacagcatgaccatcaagaaggccggccctgagaccccaggagagaagaagacctag

SEQ ID NO: 229745 - DNA, 6513 bp, Artificial Sequence
  derived and/or modified sequence
atgaaggacagcgagggcccccagcggccccccctgtgcttcctgtctaccctgctgtctcagaaggtacctgaaaaatccgatgctgtactccgctgtattatctctggccagcccaagccagaggttacttggtacaaaaatgggcaggccatcgatggatcgggaattatcagcaattacgaattttttgaaaatcagtacattcacgttctgcatctgtcctgctgcactaaaaatgacgcagcagtgtatcaaatttctgcgaagaactctttcgggatgatttgctgcagcgcttctgtcgaggtagaatgttcgagtgagaatccccagctatcacctaatctggaagacgatcgggaccgcggatggaagcatgagacgggcacccatgaggaggagcgtgccaaccagattgacgagaaagagcacccatataaagaggaggaaagcatctcccctggtacccccagatctgctgatagttcgcctagcaagagcaaccacagtctgtcccttcaatcactggggaacctggacatcagcgtcagctcttcggagaaccccctgggcgtgaaggggacaagacacacgggggaggcttatgacccatctaacacggaagaaatcgctaatgggcttttgttcttgaactcatcacacatctacgagaagcaggatcgttgctgtcacaaaacggtccacagtatggcttctaagttcactgatggtgatctgaataatgacggaccccacgacgagggcctgaggtcctctcagcagaacccaaaggtacagaaatatatttccttttccctcccccttagcgaagccaccgcacatatctatcctggtgactccgcagtggccaacaagcagcccagccctcagctgtcctctgaagactctgactccgactacgaactgtgtccagaaattactcttacctacactgaagagttcagcgacgacgatctggagtaccttgagtgttcggacgtaatgacagactacagcaacgcagtgtggcagagaaacctcttgggaacagagcacgtctttcttctggagtcagatgatgaagagatggaatttggcgagcactgccttggaggatgtgaacactttttgagtgggatgggctgtggcagtagggtgtccggggatgccgggcccatggtggcaactgctggcttctgcggccaccattcacaaccgcaagaggtgggggttagatcatccagggtctcaaagcacggtccgtcatctccgcagaccgggatgacactgatccttgggccacaccaggacgggacatcatccgtgactgagcagggcaggtacaaattacccactgctcccgaggccgctgaaaacgattatcccggcattcagggcgaaacacgagatagtcatcaggccagagaagagttcgcctcagataatttactcaatatggatgagtccgtgcgggagactgagatgaaactgctgtcgggggagtcagagaacagtggtatgagtcagtgttgggaaactgccgcagacaaacgggtcggcggcaaagatctctggagcaagagaggctcacgcaaaagcgctcgcgtgaggcagcctgggatgaagggaaaccccaagaagccaaacgctaacttgcgcgagagcacaacagaaggaaccctccatctctgcagtgccaaggaaagcgctgagccaccattaacacagtcagacaagagggaaacttcacacacgaccgccgctgctaccggaaggtcatcccatgccgacgcccgcgagtgtgctattagtacacaggccgagcaagaagcaaaaaccttgcagacttccaccgatagtgtttctaaggaggggaacactaactgcaaaggcgagggcatgcaagtgaacactctgtttgaaacaagccaggtccctgattggtccgatccaccgcaagtccaggtgcaggagaccgtccgggagactatcagctgctcacagatgcccgcctttagcgagcccgccggggaagagtcgcctttcaccggtacaacgactatcagcttctcaaaccttggcggcgtgcataaagaaaatgccagcctggctcagcacagtgaggtaaaaccctgtacgtgtggtccacaacatgaggagaaacaggaccgggacggaaatattcccgataacttccgagaggacttgaagtatgaacagagcatatcagaggccaatgacgaaaccatgagtcccggggttttcagtcgacatctgcccaaggatgcgcgtgcggacttcagagagccagtggctgtgagcgtggcttctcccgagcccacggataccgccctcaccttagaaaacgtatgtgacgaaccccgcgacagggaagctgtctgtgcaatggagtgttttgaggccggggaccaagggacatgttttgatacaattgactcgctcgtcggacggcctgtggacaagtatagtccacaagaaatctgtagcgttgacacagagctggctgagggccagaacaaggtgagcgacctttgctcctccaacgataagacacttgaggtctttttccagactcaggtctcggagacctccgtgagcacatgcaaatctagcaaggacgggaatagcgtcatgagcccactgtttacctccaccttcactttgaacatcagccacaccgcatcggaaggcgctactggggagaatcttgccaaagttgagaactccacttatccgcttgccagtactgtccacgcgggacaggaacagcccagtccatcaaacagcggcggcttggatgagacacagttgctgagcagtgaaaataatccattagttcaatttaaagagggcggtgacaagtctccctcgccttctgcggccgacacgaccgcaacccctgcctcttattctagcatcgtttccttcccgtgggagaaacctacgacactcactgccaacaacgaatgtttccaggccactcgggagactgaagatacaagcacagtgacaatcgcgaccgaggtgcaccccgcgaagtacctggcggtctccatcccagaggataaacacgcaggcggaaccgaagagcggttccccagagcctcccacgaaaaggttagccagtttccatcgcaagtgcagctcgatcacattctgtccggcgcaactattaaatcaaccaaagagctgctgtgtcgagctcctagcgtgcctggcgtaccccatcacgtcctgcagctgcccgagggtgaaggtttttgtagcaattccccgctgcaggttgataatctgtctggagacaagagtcaaactgtggacagagccgattttcgatcttatgaagaaaacttccaggagagaggaagcgagaccaaacaaggcgttcaacagcaaagcttaagccaacagggatccttatcggcacctgacttccagcagtcccttcctacgacaagcgcggcacaggaagaacggaatcttgtgccgaccgcccattctcccgcatcttcaagagaaggtgccggccagcgttctggctggggcacgcgggtgagtgttgtcgcggagactgccggcgaggaagattcccaagctttgagcaatgttccttcactctctgatattctcttagaggagtcaaaagagtatagacctggcaactgggaagcgggcaataaactaaagattatcacactcgaggccagtgcttccgagatctggccgccgcgtcaactcacgaattcggagtcaaaggcctccgatggcggcctcataattcctgacaaggtgtgggcggtgccagatagcctgaaagccgacgctgtggtgccagaactagctccctccgaaatagctgccttggcccattctccagaggatgctgagtctgctctggccgattcacgcgaatcgcataaaggggaggagcctaccatcagtgtgcactggagatctttgagctcccgaggattcagccaaccaaggctattagagtcatcagttgaccccgttgacgaaaaggaactgagtgtgaccgattctctctctgctgcttcagaaaccggaggaaaagaaaacgtgaataacgttagtcaggatcaggaggagaagcagcttaagatggatcacacggccttcttcaaaaaatttttgacctgcccaaaaatcctggaatcaagcgttgaccccattgatgaaatctctgtgattgagtacacaagggccggtaaaccagaacctagtgaaactacccctcagggcgccagggagggcggtcagtccaatgatggcaacatggggcacgaagctgagatacagccagccatccttcaggtgccttgcctccaggggaccattttgtcggagaaccgtatctctcgcagtcaggaggggtcgatgaagcaagaagcggagcagatccaacctgaggaggcgaaaactgcgatatggcaggttctgcaaccgtctgagggcggcgaaaggattccttctggctgctcaataggccagatacaggagtcctctgacggatccctgggcgaggcggagcagtccaaaaaagacaaggcggagctgatctcgccaacgtccccactttcctcgtgcctgccgattatgacccacgcgtctctgggggtggacacacacaattcgactgggcagattcacgacgtccccgagaatgacattgtggaacctaggaaaagacagtacgttttccctgttagccagaagcgagggaccatagaaaacgaaaggggaaaacctctacccagttctcccgatctgaccagatttccatgtacctctagcccagagggcaatgtgacagacttcctgatcagccacaaaatggaagaaccaaaaatcgaagtcctgcaaatcggagaaactaaacctcctagctcctcctctagctctgccaaaacactggctttcatatcgggtgaacgcgagcttgaaaaagcgcctaaactgctccaagacccttgtcaaaagggaacgctggggtgcgccaaaaaatccagggagcgggagaagtcactggaggcccgggctgggaaaagccctgggacgcttaccgctgtcacaggctcggaagaggtcaaacgcaagccagaggcccccgggtccggacacctcgccgaaggcgtcaagaagaagattctgagtagggtagccgcgctccgcttgaaattagaggagaaagagaacattcggaaaaacagcgcgtttttgaaaaaaatgcctaagctggagacatcactgtcccacacggaggagaaacaggacccaaaaaaaccttcctgtaagagggaaggcagggccccagttttattaaagaagattcaggctgagatgtttcccgagcacagcgggaacgttaagctctcatgccagttcgcagaaatccatgaggatagtacgatatgttggacaaaggattctaagagcattgcccaggtacagagatccgctggtgacaactcgactgtgagttttgctatcgtccaagctagtcccaaggaccagggtctttattattgctgtatcaagaattcttatggtaaggtgactgcagaattcaacctgaccgcggaagtgctcaaacaactgtcctcacgtcaggatacaaagggttgtgaggaaatcgaattcagccagctgatctttaaagaggatttcctgcatgactcttacttcggcggacggcttagagggcagattgctaccgaggagcttcactttggagaaggcgtgcaccggaaggcatttcgctccactgtcatgcacggtctgatgccagtttttaaacccggccacgcctgcgtgctcaaagtccataacgctatagcgtacggaaccaggaacaacgacgaactcatccagcgtaattacaagctggccgcccaggaatgttatgtgcagaataccgctcgctactatgcaaagatttatgcggcagaggcacagcctctcgaagggtttggcgaagtgcccgaaatcatacctatattcctgatccaccgccctgagaacaatattccatacgccacagtcgaggaagaactgatcggcgaatttgtcaagtatagtatcagggatggcaaggagatcaattttctgcggagggagtctgaagctggccaaaaatgctgtacttttcagcactgggtgtaccaaaagacaagcggctgcttgctagtcacggatatgcaaggtgttggaatgaaattgactgacgtcggaatcgcgacacttgccaaagggtacaaaggtttcaagggcaattgttctatgacctttatagatcagttcaaggctttacaccagtgtaacaagtattgtaagatgttaggacttaagagtctccagaataacaaccagaaacagaagcagccgtctattggcaagtctaaggtccagaccaatagcatgactatcaaaaaagccggccctgaaaccccaggggaaaagaaaacctag

SEQ ID NO: 229746 - DNA, 6512 bp, Artificial Sequence
  derived and/or modified sequence
atgaaagactctgagggaccccaaaggccgccattgtgctttctaagtacactgcttagccaaaaagtcccagagaaatcagacgcggtcctccggtgtatcatttctgggcagcctaagcctgaggtaacttggtacaagaatggacaggcaatcgatggttctggaatcatcagcaactacgaattcttcgagaatcagtatatccacgtgctgcatcttagctgctgcaccaaaaatgacgccgctgtgtatcagattagcgcgaagaatagctttgggatgatttgttgcagtgccagtgtggaggtcgagtgctcaagcgagaacccccaactcagtcccaacctagaggatgaccgcgatagaggctggaagcacgagacaggaacccatgaggaggaaagggctaatcagatagacgagaaagagcatccctacaaagaggaagaatctatatccccaggtacgccaaggtctgccgacagcagcccctccaagagcaaccatagtctgtcactccagtcgctcggcaatctggatatctcagtaagtagctcagaaaatccacttggcgtgaagggaactcggcacactggggaagcctacgaccccagcaataccgaggagatcgccaacggcctgctgttcctaaactctagtcatatatacgagaagcaggatagatgttgccacaagaccgtccacagcatggccagcaaattcaccgacggcgacctcaacaatgacgggcctcacgatgagggattgcggtcctcccagcaaaatcctaaggtgcagaagtacatcagcttcagtctgcccctgtctgaagcgaccgcgcacatctacccgggtgattctgcagtcgcaaataagcaacccagcccgcagctcagttctgaagatagtgatagtgattatgagctgtgtccagagatcacgctcacctacactgaggaattctcggacgatgacctggaatacttagaatgctcagacgtcatgactgattacagcaacgccgtctggcagcgcaatctgcttggaacagagcacgtgttcctgttggagagcgacgatgaagaaatggaatttggagagcattgtctagggggatgcgagcactttctgtctggaatggggtgcgggtcccgggtgagtggggacgccggtcccatggtcgccacagcgggattttgtggacatcactcccaaccccaagaggtgggcgtaagatcttcccgcgtctctaagcatggcccttcctccccacagactggtatgacattaatactcggtccacaccaggacggtacgtcaagcgttactgagcaggggagatataagcttccaacggcccctgaggcagctgagaacgactatccgggaattcagggggagaccagagatagtcaccaagccagagaggaatttgcatccgacaacttactgaacatggacgagagtgtaagggagacagaaatgaaactgctgtccggtgagtcagaaaattctggtatgagccagtgctgggagacagctgccgacaagagagtcggtggaaaggatctgtggtcaaagagaggtagcagaaagtccgccagggtcaggcagcccggtatgaaaggtaacccaaagaagcccaatgctaacctgcgagagtcaaccaccgaaggaactttgcatctgtgcagtgccaaagaaagtgctgagcctccactgacccagagtgataagcgagagacaagccatacaactgccgctgccaccgggagatcatcccatgccgatgccagagagtgcgcaatctctacgcaagccgaacaggaggcaaaaacacttcaaacaagcacagacagcgtgtccaaggaaggaaataccaactgcaaaggggagggtatgcaagtgaacacactttttgaaaccagccaggttcccgattggtctgaccccccacaggtgcaggttcaggagaccgtccgcgaaactatttcttgctcccaaatgcccgctttcagtgagcctgctggagaggaatctccctttactggcaccactacaatttctttttctaatttgggaggtgtgcataaggagaacgcttctctcgcccagcattctgaggtgaaaccctgtacatgcggaccacagcatgaggagaagcaggaccgcgatgggaatattcctgataacttccgcgaggatttaaaatatgagcaatctattagcgaggccaacgatgaaactatgtcccctggcgttttcagccgtcatctccctaaggacgccagagccgacttcagggagcctgtggcggtgtcagtggctagcccggaacctaccgataccgccctaaccttagaaaacgtgtgcgacgaacctcgtgaccgggaagccgtgtgcgctatggaatgtttcgaagctggcgaccagggcacgtgctttgacactatcgacagcctggtgggacgcccagttgacaagtattccccacaggaaatctgttccgttgacacagaactggccgaaggccagaataaggtgtcagacctctgctcctccaacgacaaaacactagaggtgttttttcaaacacaggtctcagagacatccgtcagcacttgcaaaagttcaaaggacggtaacagcgtgatgtcccccttgttcacctctacctttaccctgaacatcagccatacagcaagcgaaggggctaccggcgagaacctggcaaaagttgaaaattctacataccccctagcgtcaaccgtccacgctggccaggaacagcccagcccatccaactctggaggtctggatgaaacccagttattgagttccgagaataatccgctagtccagttcaaggagggcggagacaagtccccctccccttctgcggcagacacaacggctacacccgctagctatagcagcatagtgtcttttccctgggagaaacctactacactgacggcgaataatgaatgctttcaagctacacgggaaaccgaggataccagcacagtgacgatcgccaccgaggttcaccctgcgaaatacttggccgtctcaattccggaagacaagcatgctgggggaacagaagagaggttcccgagagcctcgcacgagaaagtaagccaatttccttcccaggtgcagctggaccatatcctgtcaggcgctaccatcaagtctacaaaggagctcctgtgcagggcccctagtgtccccggtgtcccccaccacgtcttacagctccctgaaggcgagggattttgcagtaactcccctctccaggttgataacttgtcaggtgacaaatcccagacagtggaccgcgctgacttcagatcttacgaagagaactttcaagagcggggatcagagaccaaacagggtgtacaacaacagagcctgagccaacaaggatctctttctgctcccgactttcaacagtcattgccaactacctccgcagcccaagaggagcggaaccttgtgcccacggcacattcgccagctagctcacgagagggagcgggacagcggtccggttggggcactcgagtttcagtggtggcagagaccgcaggcgaagaagactctcaggccttatcaaacgtaccctcactgagcgacatactgctggaggaaagtaaggaataccggcctggaaattgggaagccggaaataagctcaaaatcattacactggaggcgagcgcctcagaaatatggcccccaaggcagcttaccaactccgaatccaaggcttccgatggtggattgattatacctgataaagtatgggccgtgcctgattcattgaaagccgacgctgtggtgcctgaattagcaccctcagagatcgccgctctggcacattctcccgaagatgcagagagcgccctggctgattcccgggaatctcacaagggcgaagagcctaccataagcgttcactggagatcactgtcttccagaggtttttcacagccccgactgctggagtcatctgtggaccctgtggatgagaaggagctgtcagtgaccgacagcctatcagccgctagcgagactggaggaaaggagaatgtgaacaatgtgtcacaagaccaggaggaaaaacaactgaagatggaccataccgctttcttcaaaaagtttttaacatgcccgaagattctggaatccagcgttgacccaattgatgaaatcagtgttattgagtatacacgtgcaggaaaaccggagccttctgagaccactcctcagggagcgagggaggggggtcagtcaaacgacggaaatatgggccacgaagccgaaatccagcccgctattctgcaggttccctgcctacaaggaacaatcctgtccgagaataggatctctcgctcccaagaagggtcgatgaagcaggaggccgaacagatacagcccgaagaagctaagactgcgatctggcaagtgctgcaaccttctgaagggggtgagcgaataccgagtggctgttcaatagggcaaatacaggaaagttcagacgggagcctgggggaagctgaacagagtaagaaagataaggctgagttaatcagccctacctcacctctgagcagctgcttgcctatcatgactcacgcatctctcggggtggatacacacaattctacaggacaaatccacgacgtgcctgagaacgatattgtggaaccacggaagcggcagtacgtgtttcctgtgagccagaagagaggcaccatcgagaatgaaagagggaaacctcttccgtccagtcccgatttgacccgctttccctgtacgtcgtcgccagaaggcaatgtgacagatttcctgatcagccataagatggaggagcccaagattgaggtgttacaaattggggaaaccaagccacccagctcaagcagctctagcgccaagactctcgccttcatatccggagagcgggagctagagaaagctccaaagcttctgcaggatccatgccagaaaggaaccttaggctgcgccaagaaaagtcgggagagagagaagagtctggaggctcgtgctgggaaatctccgggtacgctgactgccgttaccggttctgaggaagttaagagaaaacctgaggccccaggatccgggcatctggctgaaggcgttaagaaaaagatcctttcacgggtggctgcactgagattaaagctggaggaaaaggagaatatcagaaagaactcagctttcctaaagaagatgccaaaacttgagacctctctttcacacactgaagagaagcaggatccaaaaaaaccttcttgtaagcgggaggggagggcacccgtgctcctgaagaagattcaggcagaaatgttccccgagcactctggcaatgtaaagctctcctgtcagtttgccgagattcatgaggacagcaccatttgttggaccaaagattcaaaatccatcgctcaggttcagaggtccgccggtgataattcgaccgtctccttcgcaatcgtccaggcgtcacctaaggatcagggtctctattactgttgcattaaaaacagctacggcaaggtcacagctgaattcaatctgacagctgaagtcttaaaacagttgtcctctaggcaagataccaagggctgtgaggagatcgaattctcccagctcatttttaaagaagacttcttgcatgacagttattttggaggcagactccggggacagatcgccacagaggagctgcattttggcgagggtgttcaccggaaagcgttccgttctacagtcatgcatggtctgatgccagtgtttaagccgggacatgcctgcgtgctaaaagtgcacaacgccatagcttacggaactcgtaataacgacgagctgatccagaggaattataaattggctgcccaggaatgttacgttcagaataccgccagatattacgctaaaatttacgccgcagaggctcagccccttgagggattcggagaagtgccagagataatcccaatttttctgatccacaggcctgagaataatattccttatgctactgtggaagaggagttaattggggagttcgtgaagtacagtataagggatgggaaagagatcaattttctgaggcgtgagtccgaggctggacagaaatgctgcacctttcagcactgggtgtatcagaagacctccgggtgcctactggtgactgatatgcagggcgtgggtatgaagctcacggatgtaggcatcgctacactcgctaagggctacaaaggcttcaagggcaattgtagcatgacgttcattgaccagttcaaggcactccaccagtgcaataaatattgtaaaatgctggggctgaagtcactgcagaacaacaatcagaaacagaagcaaccgtccatcggtaagagcaaagtgcaaaccaacagcatgacaatcaagaaagccggaccagaaaccccaggcgagaaaaagaccta

SEQ ID NO: 229747 - protein, 400 aa, Artificial Sequence
  derived and/or modified sequence
MAAEIQPKPLTRKPILLQRMEGSQEVVNMAVIVPKEEGVISVSEDRTVRVWLKRDSGQYWPSVYHAMPSPCSCMSFNPETRRLSIGLDNGTISEFILSEDYNKMTPVKNYQAHQSRVTMILFVLELEWVLSTGQDKQFAWHCSESGQRLGGYRTSAVASGLQFDVETRHVFIGDHSGQVTILKLEQENCTLVTTFRGHTGGVTALCWDPVQRVLFSGSSDHSVIMWDIGGRKGTAIELQGHNDRVQALSYAQHTRQLISCGGDGGIVVWNMDVERQETPEWLDSDSCQKCDQPFFWNFKQMWDSKKIGLRQHHCRKCGKAVCGKCSSKRSSIPLMGFEFEVRVCDSCHEAITDEERAPTATFHDSKHNIVHVHFDATRGWLLTSGTDKVIKLWDMTPVVS

SEQ ID NO: 229748 - DNA, 1203 bp, Artificial Sequence
  derived and/or modified sequence
atggccgccgagatccagcccaagcccctgaccagaaagcccatcctgctgcagagaatggagggcagccaggaggtggtgaacatggccgtgatcgtgcccaaggaggagggcgtgatcagcgtgagcgaggacagaaccgtgagagtgtggctgaagagagacagcggccagtactggcccagcgtgtaccacgccatgcccagcccctgcagctgcatgagcttcaaccccgagaccagaagactgagcatcggcctggacaacggcaccatcagcgagttcatcctgagcgaggactacaacaagatgacccccgtgaagaactaccaggcccaccagagcagagtgaccatgatcctgttcgtgctggagctggagtgggtgctgagcaccggccaggacaagcagttcgcctggcactgcagcgagagcggccagagactgggcggctacagaaccagcgccgtggccagcggcctgcagttcgacgtggagaccagacacgtgttcatcggcgaccacagcggccaggtgaccatcctgaagctggagcaggagaactgcaccctggtgaccaccttcagaggccacaccggcggcgtgaccgccctgtgctgggaccccgtgcagagagtgctgttcagcggcagcagcgaccacagcgtgatcatgtgggacatcggcggcagaaagggcaccgccatcgagctgcagggccacaacgacagagtgcaggccctgagctacgcccagcacaccagacagctgatcagctgcggcggcgacggcggcatcgtggtgtggaacatggacgtggagagacaggagacccccgagtggctggacagcgacagctgccagaagtgcgaccagcccttcttctggaacttcaagcagatgtgggacagcaagaagatcggcctgagacagcaccactgcagaaagtgcggcaaggccgtgtgcggcaagtgcagcagcaagagaagcagcatccccctgatgggcttcgagttcgaggtgagagtgtgcgacagctgccacgaggccatcaccgacgaggagagagcccccaccgccaccttccacgacagcaagcacaacatcgtgcacgtgcacttcgacgccaccagaggctggctgctgaccagcggcaccgacaaggtgatcaagctgtgggacatgacccccgtggtgagctag

SEQ ID NO: 229749 - DNA, 1203 bp, Artificial Sequence
  derived and/or modified sequence
atggccgccgaaattcaacccaagccccttacccgaaagccgatattactgcagaggatggagggatcacaagaggtcgtgaacatggcagtaatagtgccaaaagaagaaggcgtgatctccgtcagtgaggacagaacagtgagggtgtggcttaagagagacagcggccagtattggccttccgtgtatcatgctatgccaagcccctgctcctgcatgtcattcaatcctgagacccggcgattatcaatcggcctggacaatggcacgattagcgagttcattctctccgaagattacaacaagatgacgccggtgaaaaactatcaagctcatcagagtcgggttacaatgatcctcttcgtgctcgagctggagtgggttctgagtaccggccaggacaagcagtttgcttggcactgttccgagagtgggcagagattgggagggtaccgcacaagcgctgtggccagcggtctccagttcgacgtcgagacgagacatgtcttcatcggcgaccactcagggcaagtaaccatcttgaagcttgagcaggaaaattgtacgctcgtgaccacattcagaggacataccggcggggtgacagcactgtgctgggatcctgttcaacgcgttcttttcagtggctcgagcgatcacagcgtgatcatgtgggacattggcggccgtaaaggtactgcaatcgagctgcaggggcataatgacagagtgcaggctctaagctacgcacaacacacacgtcaactgatcagctgcgggggagatggagggatcgtcgtgtggaacatggacgtggagaggcaggaaactccagaatggctcgacagcgactcttgccagaaatgtgaccaacccttcttttggaatttcaagcagatgtgggattcaaagaagattgggctgaggcaacaccactgtagaaagtgcggcaaagctgtctgtgggaagtgctcgtctaaacggagttcaatccctttaatgggattcgaatttgaagtgcgggtctgcgatagctgtcatgaggccatcaccgatgaggaaagggcacccacagccaccttccacgattccaagcataacatcgtccacgtacatttcgacgctactcgcggctggttgctaacctccggaaccgataaggtgatcaagctgtgggacatgacccctgtggtgtcatag

SEQ ID NO: 229750 - DNA, 1203 bp, Artificial Sequence
  derived and/or modified sequence
atggctgctgagatccagcccaagcccctgaccaggaagcccatcctgctgcagaggatggagggcagccaggaggtggtgaacatggccgtcatcgtgcccaaggaggagggcgtcatctctgtgtctgaggacagaacagtgcgggtgtggctgaagagggacagcggccagtactggcccagcgtgtaccacgccatgcccagcccctgcagctgcatgtccttcaaccctgagacccggcggctgagcatcggcctggacaatggcaccatcagcgagttcatcctgtctgaggactacaacaagatgacccctgtgaagaactaccaggcccaccagagccgggtgaccatgatcctgtttgtgctggagctggagtgggtgctgagcacaggccaggacaagcagtttgcctggcactgcagcgagagcggccagaggctgggcggctaccgcaccagcgctgtggccagcggcctgcagtttgatgtggagaccaggcatgtgttcatcggggaccacagcggccaggtgaccatcctgaagctggagcaggagaactgcaccctggtgaccaccttccggggccacactggaggagtgacagccctgtgctgggaccctgtgcagagggtgctcttcagcggcagcagtgaccacagcgtcatcatgtgggacatcggcggcaggaagggcacagccatcgagctgcagggccacaatgacagagtgcaggccctgtcctatgcccagcacacccggcagctgatcagctgtggaggagatggcggcatcgtggtgtggaacatggatgtggagcggcaggagaccccagagtggctggacagcgacagctgccagaagtgtgaccagcccttcttctggaacttcaagcagatgtgggacagcaagaagattggcctgcggcagcaccactgcaggaaatgtgggaaggctgtgtgtgggaagtgcagcagcaagaggagcagcatccccctgatgggctttgaatttgaggtgcgggtgtgtgacagctgccacgaggccatcacagatgaggagcgggcccccacagccaccttccatgacagcaagcacaacatcgtgcacgtgcactttgatgccacccggggctggctgctgaccagcggcacagacaaggtgatcaagctgtgggacatgacccctgtggtgtcctag

SEQ ID NO: 229751 - DNA, 1203 bp, Artificial Sequence
  derived and/or modified sequence
atggccgccgagatccagcccaagcccctgacccggaagcccatccttctccagagaatggagggatctcaggaagttgtgaacatggcggtaatcgtcccaaaagaggaaggcgtcatctctgttagcgaggataggaccgtgcgtgtgtggttgaaacgggattccggacaatattggccatctgtataccatgctatgccaagcccttgcagttgtatgtcattcaaccccgagacaagaaggctcagtataggtttggacaatggaaccattagtgagtttatactgtccgaagactacaataaaatgacgccggtaaagaactatcaggcccatcaaagccgggtgacaatgattctgttcgttctcgagctcgagtgggtactgtcaaccggccaagacaagcaatttgcgtggcactgtagtgaatctggccagcgtctgggtgggtacagaacatctgccgtggcctctggcctccagttcgacgtggagactcgtcacgtcttcatcggcgatcactcaggtcaggtcactattctgaaactggaacaggaaaattgtaccctggtcacaacttttagaggacatacaggaggcgtcaccgcgctgtgttgggatcccgtccagagagtgcttttcagcgggagcagtgaccactcagttatcatgtgggacattggcggtcggaagggcacagctatcgaattgcaggggcacaatgaccgagtccaggccctatcctatgcacaacataccaggcaattgatatcctgcgggggagacgggggtattgtggtgtggaatatggacgtcgagaggcaggagacacctgagtggctcgattccgactcttgtcagaaatgtgaccagccattcttttggaactttaagcaaatgtgggacagcaagaagataggccttaggcagcaccactgcaggaaatgcggtaaggccgtgtgtggcaaatgcagctcgaagagatcatccataccgcttatggggtttgaattcgaggtcagagtatgcgatagttgccacgaggccataactgatgaggagagggcccccacagccacgttccatgatagtaaacacaatattgtgcatgtccactttgatgcgacccgagggtggcttctgacctctggaacagacaaggtgatcaaactctgggacatgaccccagttgtgagctag

SEQ ID NO: 229752 - DNA, 1203 bp, Artificial Sequence
  derived and/or modified sequence
atggccgctgaaattcagcccaagccactcacaaggaaaccgatcctgcttcagcggatggagggcagccaggaagtagtaaacatggcagtgatagtgcccaaggaggagggagtgatttcagtatccgaggatcgaacagtgcgagtttggctgaagcgggactccggccagtattggccttcggtttaccacgcgatgccctctccatgctcttgtatgtctttcaacccggagacacgcagactgtcaataggcttagataacggtaccatttccgagtttatcctctccgaggactacaacaagatgacccccgtaaaaaactaccaggcccaccagtcccgggtgacaatgatcctgtttgtattagaacttgaatgggtgctcagtactgggcaggataagcagttcgcttggcattgctccgagtctggccagcggttgggcggttatcgcacttccgccgtggcatcaggcttgcagtttgacgtcgaaacacgacatgtttttatcggcgaccactcagggcaagtcacaatccttaagctagagcaggagaattgcaccctggtgacgacctttcggggacacacagggggtgtcaccgcattgtgctgggacccagtgcagcgtgttctcttttcagggtccagcgatcattctgtgattatgtgggacatcggcggtcgcaaaggcactgccattgagctacagggacataacgatagagtacaggccctgtcctacgctcagcatacacgtcagctcatatcctgtggcggagacggcggaattgtggtgtggaatatggacgttgaacgtcaggagacccccgaatggttggattcagacagctgccagaagtgcgaccagccctttttctggaattttaagcagatgtgggacagcaaaaagattggcctacgacagcaccactgcaggaagtgcggcaaggccgtgtgtgggaagtgtagctcaaagagaagttccataccactgatgggattcgagttcgaggtgcgagtttgtgactcctgccacgaggctattaccgacgaagaacgagccccaaccgcaaccttccatgactcgaaacacaacatagtgcatgtgcattttgacgcaacgaggggctggttgctgacttctggcaccgacaaagttatcaagttgtgggacatgacccccgtagtaagttag

SEQ ID NO: 229753 - DNA, 1613 bp, Artificial Sequence
  derived and/or modified sequence
gaagcagggagcgcggagtcgttcccgagagaggcggccaggctatgctcgccggtttccggcgttccgctccggccagccagagtctctgtctcaacctgtgtccgtgctccagcagtctcctcagcccggccccgcggcgcggttggcggcggcgccccaggcgcgccccctcctccgatggcggcggagatccagcccaagcctctgacccgcaagccgatcctgctgcagcggatggaggggtcccaggaggtggtgaatatggccgtgatcgtgcccaaagaggagggcgtcatcagcgtctccgaggacaggacagttcgtgtttggttaaagagagacagtggacagtattggccaagcgtataccatgcaatgccttctccatgttcatgcatgtcttttaacccggaaacaagaagactgtccataggtctagacaatggtacaatctcagagtttatattgtcagaagattataacaagatgactcctgtgaaaaactatcaagcgcatcagagcagagtgacgatgatcctgtttgtcctggagctggagtgggtgctgagcacaggacaggacaagcaatttgcctggcactgctctgagagtgggcagcgcctgggaggttatcggaccagtgctgtggcctcaggcctgcaatttgatgttgaaacccggcatgtgtttatcggtgaccactcaggccaagtaacaatcctcaaactggagcaagaaaactgcaccctggtcacaacattcagaggacacacaggtggggtgaccgctctctgttgggacccagtccagcgggtgttgttctcaggcagttcagatcactctgtcatcatgtgggacatcggtgggagaaaaggaacagccatcgagctccaaggacacaacgacagagtccaggccctctcctatgcacagcacacgcgacaattgatctcctgtggcggtgatggtgggattgtcgtctggaacatggacgtggagaggcaggagacccctgaatggttggacagtgattcctgccaaaagtgtgatcagcctttcttctggaacttcaagcaaatgtgggacagtaagaaaattggtctaagacagcaccactgccgcaagtgtgggaaggccgtctgtggcaagtgcagctccaagcgctcctccatccccctgatgggcttcgagtttgaagtgagggtctgtgacagctgccacgaggccatcacagatgaagaacgtgcacccacagccaccttccatgacagtaaacataacattgtgcatgtgcatttcgatgcaaccagaggatggttactgacttctggaactgacaaggttattaagttgtgggatatgaccccagtcgtgtcttgatgactctcccaggaatcagaaagatagtatttactaaagaaacggttgttttaacccaaatcattaccagagtggtaaagcagacatgtgagaagtaagaaagaaactaaagaccctgaatgaatttgcagattacccatgtgcacagtggggacctggccagtgagcactcgcaaggggactcttccaacttgttcatacaatataaaagaagctatttttttaacaaa

SEQ ID NO: 229754 - protein, 154 aa, Artificial Sequence
  derived and/or modified sequence
MDAPRLPVRPGVLLPKLVLLFVYADDCLAQCGKDCKSYCCDGTTPYCCSYYAYIGNILSGTAIAGIVFGIVFIMGVIAGIAICICMCMKNHRATRVGILRTTHINTVSSYPGPPPYGHDHEMEYCADLPPPYSPTPQGPAQRSPPPPYPGNARK

SEQ ID NO: 229755 - DNA, 465 bp, Artificial Sequence
  derived and/or modified sequence
atggacgcccccagactgcccgtgagacccggcgtgctgctgcccaagctggtgctgctgttcgtgtacgccgacgactgcctggcccagtgcggcaaggactgcaagagctactgctgcgacggcaccaccccctactgctgcagctactacgcctacatcggcaacatcctgagcggcaccgccatcgccggcatcgtgttcggcatcgtgttcatcatgggcgtgatcgccggcatcgccatctgcatctgcatgtgcatgaagaaccacagagccaccagagtgggcatcctgagaaccacccacatcaacaccgtgagcagctaccccggcccccccccctacggccacgaccacgagatggagtactgcgccgacctgccccccccctacagccccaccccccagggccccgcccagagaagccccccccccccctaccccggcaacgccagaaagtag

SEQ ID NO: 229756 - DNA, 465 bp, Artificial Sequence
  derived and/or modified sequence
atggatgccccacgtctgcctgtgcggcccggtgtgctgctgcctaaattggtcctgctctttgtttatgccgatgactgtctggctcagtgtggtaaagattgcaagtcctactgctgcgatggcacaactccttattgctgttcttactatgcatacatcgggaatatcctcagcgggaccgccattgccggaatcgtgtttggtatagttttcatcatgggggtcatcgccgggatcgccatctgcatttgcatgtgcatgaagaatcatagagccacgagagtggggattctgcggactacccacataaatactgtgagttcttatccaggcccgccaccgtacgggcacgatcacgagatggaatactgcgccgacctaccacccccatactccccaacccctcaagggcccgcccagcgctccccgccccctccgtatccagggaatgcgcgtaagtag

SEQ ID NO: 229757 - DNA, 465 bp, Artificial Sequence
  derived and/or modified sequence
atggatgccccccggctgcctgtgcggcctggggtgctgctgcccaagctggtgctgctgtttgtgtatgcagatgactgcctggcccagtgtgggaaggactgcaagagctactgctgtgatggcaccaccccctactgctgcagctactatgcctacatcggcaacatcctgtctggaacagccatcgccggcatcgtgtttggcatcgtgttcatcatgggcgtgattgctggcatcgccatctgcatctgcatgtgcatgaagaaccaccgggccaccagggtgggcatcctgcggaccacccacatcaacacagtgtcctcctacccaggccccccaccctacggccatgaccacgagatggagtactgtgccgacctgcccccaccctacagccccaccccccagggccctgcccagaggagccccccaccaccctacccaggaaatgccaggaagtag

SEQ ID NO: 229758 - DNA, 465 bp, Artificial Sequence
  derived and/or modified sequence
atggacgccccccggctgcccgtgcggcccggcgtgctgctgcccaaactggtgctactgtttgtatacgctgacgattgtctagcccaatgcgggaaggactgcaagagttactgctgtgatgggaccaccccttactgctgttcctactacgcgtatatcggaaacatattgagtgggacagcaattgctggtatcgtgtttgggatcgtgtttatcatgggagtgatcgctgggattgcaatctgtatctgtatgtgcatgaaaaaccaccgggccacgcgggttgggattctgcgcacaacccacatcaacactgtgagtagctacccagggccccccccttatggacacgatcatgaaatggagtactgcgccgatttgccccccccatattcgcctacaccacagggaccagctcagcgctcgccacctccgccatatccaggaaacgcgcgaaagtag

SEQ ID NO: 229759 - DNA, 465 bp, Artificial Sequence
  derived and/or modified sequence
atggatgctccacggttgccagtgcgtcctggggtgcttttgcctaagttggtgctcctgttcgtgtacgccgacgactgcctggcccagtgtggaaaggattgtaagagctactgttgtgatggcacaacaccttattgttgcagctactatgcatacatcgggaacatactgagtggaaccgcaattgctggcatagtgttcggcatcgtgtttataatgggtgtaatagccggaattgctatatgtatctgtatgtgtatgaaaaatcacagggccacacgggtgggcatactgagaaccacccatattaacaccgtgagttcctatcctggccctcctccttatggccacgaccacgaaatggaatactgcgctgatctgcccccaccttactcaccaaccccacagggccctgcccaacggtccccacctcccccatatcctgggaatgcgaggaaatag

SEQ ID NO: 229760 - protein, 710 aa, Artificial Sequence
  derived and/or modified sequence
MDQVATLRLESVDLQSSRNNKEHHTQEMGVKRLTVRRGQPFYLRLSFSRPFQSQNDHITFVAETGPKPSELLGTRATFFLTRVQPGNVWSASDFTIDSNSLQVSLFTPANAVIGHYTLKIEISQGQGHSVTYPLGTFILLFNPWSPEDDVYLPSEILLQEYIMRDYGFVYKGHERFITSWPWNYGQFEEDIIDICFEILNKSLYHLKNPAKDCSQRNDVVYVCRVVSAMINSNDDNGVLQGNWGEDYSKGVSPLEWKGSVAILQQWSARGGQPVKYGQCWVFASVMCTVMRCLGVPTRVVSNFRSAHNVDRNLTIDTYYDRNAEMLSTQKRDKIWNFHVWNECWMIRKDLPPGYNGWQVLDPTPQQTSSGLFCCGPASVKAIREGDVHLAYDTPFVYAEVNADEVIWLLGDGQAQEILAHNTSSIGKEISTKMVGSDQRQSITSSYKYPEGSPEERAVFMKASRKMLGPQRASLPFLDLLESGGLRDQPAQLQLHLARIPEWGQDLQLLLRIQRVPDSTHPRGPIGLVVRFCAQALLHGGGTQKPFWRHTVRMNLDFGKETQWPLLLPYSNYRNKLTDEKLIRVSGIAEVEETGRSMLVLKDICLEPPHLSIEVSERAEVGKALRVHVTLTNTLMVALSSCTMVLEGSGLINGQIAKDLGTLVAGHTLQIQLDLYPTKAGPRQLQVLISSNEVKEIKGYKDIFVTVAGAP

SEQ ID NO: 229761 - DNA, 2133 bp, Artificial Sequence
  derived and/or modified sequence
atggaccaggtggccaccctgagactggagagcgtggacctgcagagcagcagaaacaacaaggagcaccacacccaggagatgggcgtgaagagactgaccgtgagaagaggccagcccttctacctgagactgagcttcagcagacccttccagagccagaacgaccacatcaccttcgtggccgagaccggccccaagcccagcgagctgctgggcaccagagccaccttcttcctgaccagagtgcagcccggcaacgtgtggagcgccagcgacttcaccatcgacagcaacagcctgcaggtgagcctgttcacccccgccaacgccgtgatcggccactacaccctgaagatcgagatcagccagggccagggccacagcgtgacctaccccctgggcaccttcatcctgctgttcaacccctggagccccgaggacgacgtgtacctgcccagcgagatcctgctgcaggagtacatcatgagagactacggcttcgtgtacaagggccacgagagattcatcaccagctggccctggaactacggccagttcgaggaggacatcatcgacatctgcttcgagatcctgaacaagagcctgtaccacctgaagaaccccgccaaggactgcagccagagaaacgacgtggtgtacgtgtgcagagtggtgagcgccatgatcaacagcaacgacgacaacggcgtgctgcagggcaactggggcgaggactacagcaagggcgtgagccccctggagtggaagggcagcgtggccatcctgcagcagtggagcgccagaggcggccagcccgtgaagtacggccagtgctgggtgttcgccagcgtgatgtgcaccgtgatgagatgcctgggcgtgcccaccagagtggtgagcaacttcagaagcgcccacaacgtggacagaaacctgaccatcgacacctactacgacagaaacgccgagatgctgagcacccagaagagagacaagatctggaacttccacgtgtggaacgagtgctggatgatcagaaaggacctgccccccggctacaacggctggcaggtgctggaccccaccccccagcagaccagcagcggcctgttctgctgcggccccgccagcgtgaaggccatcagagagggcgacgtgcacctggcctacgacacccccttcgtgtacgccgaggtgaacgccgacgaggtgatctggctgctgggcgacggccaggcccaggagatcctggcccacaacaccagcagcatcggcaaggagatcagcaccaagatggtgggcagcgaccagagacagagcatcaccagcagctacaagtaccccgagggcagccccgaggagagagccgtgttcatgaaggccagcagaaagatgctgggcccccagagagccagcctgcccttcctggacctgctggagagcggcggcctgagagaccagcccgcccagctgcagctgcacctggccagaatccccgagtggggccaggacctgcagctgctgctgagaatccagagagtgcccgacagcacccaccccagaggccccatcggcctggtggtgagattctgcgcccaggccctgctgcacggcggcggcacccagaagcccttctggagacacaccgtgagaatgaacctggacttcggcaaggagacccagtggcccctgctgctgccctacagcaactacagaaacaagctgaccgacgagaagctgatcagagtgagcggcatcgccgaggtggaggagaccggcagaagcatgctggtgctgaaggacatctgcctggagcccccccacctgagcatcgaggtgagcgagagagccgaggtgggcaaggccctgagagtgcacgtgaccctgaccaacaccctgatggtggccctgagcagctgcaccatggtgctggagggcagcggcctgatcaacggccagatcgccaaggacctgggcaccctggtggccggccacaccctgcagatccagctggacctgtaccccaccaaggccggccccagacagctgcaggtgctgatcagcagcaacgaggtgaaggagatcaagggctacaaggacatcttcgtgaccgtggccggcgccccctag

SEQ ID NO: 229762 - DNA, 2133 bp, Artificial Sequence
  derived and/or modified sequence
atggatcaggtggcgaccctcagattggaatcagtggatctccagagttcgaggaataacaaggagcaccacacacaggaaatgggagtcaagcggctgaccgtgaggcgtggccagccgttttacctgaggctctccttttctagacctttccagagtcaaaacgatcatattacgtttgtggccgagaccggtccaaagccctcggaacttctcggaactagagccaccttctttttgactagagtccaacctggcaatgtttggagcgctagcgacttcactatcgacagtaactctctccaggtcagcctattcaccccagcaaatgcggtcattgggcattatacccttaagattgaaattagtcagggccaggggcactcagtcacttatcctttagggacatttattcttctgtttaatccatggtcgcccgaggatgatgtgtatctgcccagtgagattctgctacaggaatatataatgcgtgattatggtttcgtgtacaaaggccatgaaagattcatcacctcatggccctggaattacggtcaattcgaagaggacattatcgatatctgctttgagatcctgaacaagtccctttatcatctgaaaaatccagccaaagattgctctcaaaggaacgatgtagtatacgtttgcagggtggtaagcgccatgataaactcaaacgatgacaatggggtgttgcaggggaattggggggaggactatagcaaaggagtctccccgcttgaatggaaaggcagcgtcgctattctccagcagtggtctgccagaggcggacaacccgtgaaatatggccagtgctgggtttttgccagcgttatgtgcacagttatgcgctgtctaggggtacctacccgagtggtgagtaactttcgttcggcgcacaatgtggaccgcaacctgacaattgacacttactatgatcgaaacgctgagatgctctctacacaaaagagggataagatctggaactttcacgtgtggaacgagtgctggatgatccgaaaggacctgccacctggctacaatggctggcaggtgttagaccctactccccagcagacctcttctggtttattctgctgcggcccagcaagtgtgaaagcgatcagagagggagacgtgcacctggcatacgacaccccgttcgtgtatgcggaggttaacgcggacgaagtgatctggctcttgggggacggccaggcccaggagatactcgcccacaatacgtccagcatcggcaaggaaatcagtaccaaaatggtcggatctgaccagaggcagtctattacgagtagctataaatatccagaaggcagtccagaagaaagggcagtctttatgaaagcgtctcggaagatgctcggaccacagagggcctctctgcccttcctcgacctgctggagagcggcgggctgagagatcagcccgcacaactgcaactgcacctggccaggatcccggagtgggggcaggatctgcagctcctgctacggatacagagagtgccggactcaacacatcctcggggccctattgggcttgtggtgcggttctgcgcacaggcccttctgcacggtggaggcacacagaaacctttttggcgccacactgttcggatgaacctcgatttcgggaaggaaacacagtggccactgctgttgccatactccaactatcgaaataagcttaccgacgaaaagctgatacgtgtaagcgggattgctgaggtggaggagactgggcggtccatgctggtattgaaggacatatgtctcgaacctccccaccttagcatcgaggttagtgaacgcgcagaagtgggcaaagccttgcgagtccatgtgactctgaccaacacattgatggtcgccctgagttcttgcacgatggtgcttgaagggagtggccttattaacggacagattgccaaagatctgggtactctggtggccgggcatacccttcaaatccagctggacctctaccccaccaaggccggtcccaggcagctgcaggtgctgatatcaagtaatgaagtgaaggaaataaaagggtataaggacatcttcgtcactgtggccggagccccctag

SEQ ID NO: 229763 - DNA, 2133 bp, Artificial Sequence
  derived and/or modified sequence
atggaccaggtggccaccctgcggctggagagcgtggacctgcagagcagcaggaacaacaaggagcaccacacccaggagatgggcgtgaagaggctgactgtgcggcggggccagcccttctacctgcggctgtccttcagccggcccttccagagccagaatgaccacatcacctttgtggccgagaccggccccaagcccagcgagctgctgggcacccgggccaccttcttcctgaccagggtgcagcctggaaatgtgtggagcgccagtgacttcaccatcgacagcaacagcctgcaggtgtccctcttcaccccagccaatgctgtgattggccactacaccctgaagattgagatcagccagggccagggccacagcgtgacctaccccctgggcaccttcatcctgctcttcaacccctggagcccagaagatgatgtgtacctgcccagcgagatcctgctgcaggagtacatcatgagggactatggctttgtgtacaagggccacgagcgcttcatcacctcctggccctggaactacggccagtttgaggaggacatcatcgacatctgctttgagatcctgaacaagagcctgtaccacctgaagaacccagccaaggactgcagccagagaaatgatgtggtgtatgtgtgccgggtggtgtctgccatgatcaacagcaatgatgacaacggggtgctgcagggcaactggggcgaggactacagcaaaggagtgagccccctggagtggaagggctctgtggccatcctgcagcagtggagcgcccggggcggccagcctgtgaagtatggccagtgctgggtgtttgcctctgtgatgtgcaccgtgatgcgctgcctgggcgtgcccaccagggtggtgagcaacttccgcagcgcccacaacgtggacaggaacctgaccatcgacacctactatgacagaaatgctgagatgctgagcacccagaagagggacaagatctggaacttccacgtgtggaatgaatgctggatgatcaggaaggacctgcccccaggctacaacggctggcaggtgctggaccccaccccccagcagaccagcagcggcctcttctgctgcggccctgcctctgtgaaggccatccgggagggagatgtgcacctggcctatgacaccccatttgtgtatgcagaggtgaatgctgatgaagtcatctggctgctgggagatggccaggcccaggagatcctggcccacaacaccagcagcatcggcaaggagatcagcaccaagatggtgggcagtgaccagaggcagagcatcaccagcagctacaagtacccagagggcagccctgaggagagagctgtgttcatgaaggccagcaggaagatgctgggcccccagagggccagcctgcccttcctggacctgctggagagcggcggcctgcgggaccagcctgcccagctgcagctgcacctggcccgcatccctgagtggggccaggacctgcagctgctgctgcgcatccagagggtgcctgacagcacccacccccggggccccatcggcctggtggtgcgcttctgtgcccaggccctgctgcacggcggcggcacccagaagcccttctggaggcacacagtgaggatgaacctggactttgggaaggagacccagtggcccctgctgctgccctacagcaactacagaaacaagctgacagatgagaagctgatccgggtgtctggaattgctgaggtggaggagaccggccgctccatgctggtgctgaaggacatctgcctggagcccccccacctgagcattgaggtgtctgagcgggcagaggtgggcaaggccctgcgggtgcacgtgaccctgaccaacaccctgatggtggccctgagcagctgcaccatggtgctggagggcagcggcctcatcaatggccagatcgccaaggacctgggcaccctggtggccggccacaccctgcagatccagctggacctgtaccccaccaaggccggcccccggcagctgcaggtgctgatcagcagcaatgaggtgaaggagatcaagggctacaaggacatctttgtgacagtggccggggccccctag

SEQ ID NO: 229764 - DNA, 2133 bp, Artificial Sequence
  derived and/or modified sequence
atggaccaggtggccaccctgcggctggagagcgtggacctgcagagtagtagaaacaacaaggagcaccacacccaagagatgggcgtaaaaaggctgaccgttaggagaggtcagcccttctacttgagactaagcttctctcgtccattccagagtcagaatgatcacataacgttcgtcgctgagaccggccccaaaccctctgaactgcttggaacccgcgccacatttttcctgacacgggttcagcctggaaacgtgtggagcgctagtgacttcacaatcgacagtaatagtttacaggtcagcctctttacgcctgccaacgcggtaatcggacactatacactgaagatcgagatcagtcaaggacaggggcactctgtcacataccctttagggaccttcatcctcttgtttaacccctggtctccagaggatgatgtgtacttaccatctgagatccttcttcaggaatacattatgcgtgactacgggtttgtgtataagggacacgaaagattcattaccagctggccctggaactatggccagtttgaggaggatattatcgatatctgtttcgagatactcaataagtcattgtaccacctgaagaatccagccaaggactgctcacagcgaaacgacgtggtgtatgtctgccgggtggtttcagccatgatcaattccaacgacgataacggagtgttgcaaggcaactggggtgaggactactccaaaggtgtgtcgcccctagaatggaagggttcagttgccatcctccagcagtggtccgcgcgcggcgggcagcccgtgaagtacggacagtgctgggtgtttgcctcggttatgtgcactgtgatgaggtgcctcggtgtcccaacacgggtggtcagtaacttcaggagcgcccataacgtggaccgtaacttgacaatcgatacctactatgacagaaacgccgagatgctcagcacccagaaaagagacaagatttggaatttccacgtgtggaatgagtgctggatgatacggaaagatctacccccaggctataatggatggcaggtgctcgaccctaccccacagcagacttcttctggtctgttttgctgtggacccgcctctgttaaagcgatccgagagggcgacgttcacttagcttacgatactccttttgtgtatgccgaggtcaatgctgatgaagtaatttggctgctgggtgatggtcaagctcaggaaattctcgcccacaacacttcctcaatagggaaggagataagcaccaaaatggttggcagtgatcaacgccagagcattacgagttcctacaaatatcccgagggcagcccagaggaaagagccgtgttcatgaaggcctcccgcaagatgctgggcccacagcgcgcatcactcccttttcttgacttgctcgaaagcggaggacttcgcgatcagccagcccagctccagctgcatctggcccggatacccgaatggggccaagacctgcagctgttgctacgtatccagcgggtcccggactctacgcacccccgagggcccatcgggctggtggtgcgcttttgtgcgcaggcactgctgcacggaggagggacacagaaaccattctggcggcacactgtccgaatgaacctggactttgggaaagaaacacagtggcccctcttgctgccgtattcaaattataggaacaagctaacagatgagaagctgatccgagtcagtggtatcgctgaggtagaggagacgggtaggtctatgctagtgctgaaggacatttgcctggaacctcctcacttgtcaattgaagtgtcagaacgcgctgaggtaggcaaggctctaagagtgcatgtcaccttaacaaacacactgatggtggctctgtcgtcatgcactatggtgctcgaggggagtggcctcatcaatggacaaattgccaaagacctgggcaccctggttgctggacacacgttgcaaatccagctggacctgtacccaacgaaggcaggcccaagacagctccaagttctgatttctagtaatgaggtgaaggagataaaaggttacaaggatatcttcgtgacagttgctggcgctccctag

SEQ ID NO: 229765 - DNA, 2133 bp, Artificial Sequence
  derived and/or modified sequence
atggaccaggtggccacgctgagactggaatcagtcgacctgcagtcaagtagaaacaataaggaacatcacacacaggaaatgggagttaaaaggctgacggttaggcggggacaaccgttctacctacgactctccttttctagaccattccagagtcaaaatgaccatattaccttcgtggccgaaaccggcccaaagcccagtgagctgctgggcacccgtgcaaccttttttttgactcgcgttcagcctggcaatgtgtggtcagcttctgacttcactattgatagcaatagtctgcaggtatccttgtttacacccgcaaatgccgtgatagggcactatactctgaaaatcgaaatcagtcaagggcagggccatagcgtaacatacccactggggactttcattctgctgtttaatccatggtcacccgaggacgatgtctatttgccttctgaaattttactccaagaatacatcatgagggattacggctttgtttataagggacacgagaggttcattacctcatggccatggaactacggtcaattcgaagaagatattattgacatctgtttcgagattctgaataagagtttgtaccatttaaaaaatccagctaaagactgttctcagcggaacgacgtggtgtacgtctgcagagtggtgagcgctatgattaactctaacgacgacaacggcgtgctacagggtaattggggtgaagactacagtaagggggtgagccctctcgaatggaaagggagtgtcgccattttgcagcagtggtctgcccgaggaggacagcctgttaagtacggtcagtgttgggtcttcgcttccgttatgtgcaccgtgatgcgatgtctgggggtacccacgcgggtggttagcaattttagatctgctcacaacgtggaccgtaaccttaccatagatacatactacgaccggaacgcagagatgttgtcgactcagaagagggacaagatttggaactttcacgtttggaatgagtgttggatgatccgtaaagacctgcccccagggtacaacgggtggcaggtattagatcccactccacagcagacatcctccggactgttctgctgcgggccagcctctgttaaggccattcgggaaggtgacgtgcatctcgcctacgatactccatttgtatacgccgaggtgaacgcagacgaggtgatatggctcctgggagacggccaagctcaagaaatcctggctcacaataccagcagtatcggtaaggaaatcagcaccaagatggttgggtctgaccaacgtcagtctataacctcttcttacaagtacccagagggttcacccgaggaaagagccgtgttcatgaaggcaagccgaaaaatgctaggaccccagagggcctccctcccctttctcgatcttcttgagtctggagggctcagggatcagcctgcacagctgcagctccatctcgcccgtattccagagtgggggcaggatcttcagttattactgcgtatacagagagttcccgactccactcatcctcgagggcctatcggcctcgtagtcagattctgcgcacaggctctcctgcatggcggaggaacccagaaaccgttctggaggcacaccgtccgaatgaacctagacttcggcaaagagacccagtggccactcctcctcccgtatagcaactacagaaataaattgacggacgaaaagctgatccgggtgagcggcatagccgaggtggaggaaactgggaggtctatgctggtcctcaaggacatctgtctggaacctccacatctcagtatagaagtcagcgaaagagcggaggtggggaaggctctgagagtccatgttacccttaccaatacgctgatggtggcgctatcctcttgcacaatggtcctggagggcagcggcctcatcaatggacagatagcgaaggatcttggaacactcgtggcgggacacaccctacaaattcagctggatctgtatccaaccaaggcagggcctcgccagctgcaggtgcttataagctcaaatgaggtgaaggaaattaaagggtataaggatattttcgtaaccgttgcgggagctccgtag

SEQ ID NO: 229766 - DNA, 2312 bp, Artificial Sequence
  derived and/or modified sequence
gggagatggatcaggtggcaaccttgcggcttgagtctgtcgacctgcagagctccaggaacaacaaggagcaccacacgcaggagatgggcgtcaagcggctcactgtgcgccgcggccagcccttctacctccggctgagcttcagccgacccttccagtcccagaacgaccacatcacctttgtggctgagaccggacccaagccgtcagagctgctggggacccgagccacattcttcctcacccgggtccagcccgggaatgtctggagcgcttctgatttcaccattgactccaactctctccaagtttcccttttcacaccagccaatgcagttattggccattacactctgaaaatagagatctctcagggccaaggtcacagtgtgacttacccgctgggaactttcatcctactttttaacccttggagtccagaggacgacgtctacctgccaagtgaaatactgctgcaggagtatatcatgcgagattatggctttgtttacaagggtcatgaaagattcatcacctcctggccctggaactacgggcagtttgaagaggacatcatagacatctgctttgagatcctgaacaagagcctgtatcacttaaagaacccggccaaagactgttcccagcggaacgacgtggtgtatgtgtgcagggtggtgagtgccatgatcaacagcaacgatgacaatggcgtgctgcaggggaactggggcgaggactactccaaaggggtcagtcctctggagtggaagggcagtgtggccatcctacagcagtggtcagccaggggcgggcagcctgtgaagtacggacagtgctgggtcttcgcctctgttatgtgcaccgtaatgagatgcttaggtgttccaacccgtgttgtttccaatttccgttccgcgcacaacgtggataggaacttgaccatcgatacgtactatgaccgaaatgccgagatgctgtcaactcagaaacgagacaaaatatggaacttccacgtctggaatgagtgctggatgatccggaaagatctcccaccaggatacaacgggtggcaggttctggaccccactccccagcagaccagcagtgggctgttctgctgtggccctgcctctgtgaaggccatcagggaaggggatgtccacctggcctatgacaccccttttgtgtatgccgaggtgaacgccgatgaagtcatttggctccttggggatggccaggcccaggaaatcctggcccacaacaccagttccatcgggaaggagatcagcactaagatggtggggtcagaccagcgccagagcatcaccagctcctacaagtacccagaaggatcccctgaggagagagctgtcttcatgaaggcttctcggaaaatgctgggcccccaaagagcttctttgcccttcctggatctcctggagtctgggggtcttagggatcagccagcgcagctgcagcttcacctggccaggatacccgagtggggccaggacctgcagctgctgctgcgtatccagagggtgccagacagcacccaccctcgggggcccatcggactggtggtgcgcttctgtgcacaggccctgctgcatgggggtggtacccagaagcccttctggaggcacacagtgcggatgaacctggactttgggaaggagacacagtggccgctcctcctgccctacagcaattacagaaacaagctaacggacgaaaagctcatccgcgtgtctggcatcgcggaggttgaagagacagggaggtccatgctggtcctaaaagatatctgtctggagcctccccacttgtctattgaggtgtctgagagggctgaggtgggcaaggcgctgagagtccatgtcaccctcaccaacaccttaatggtggctctgagcagctgcacgatggtgctggaaggaagcggcctcatcaatgggcagatagcaaaggaccttgggactctggtggccggacacaccctccaaattcaactggacctctacccgaccaaagctggaccccgccagctccaggttctcatcagcagcaacgaggtcaaggagatcaaaggctacaaggacatcttcgtcactgtggctggggctccctgagacccgccctccagctgccctccctggcacccctgccccacctggctcctttctactcctggctatgtcgtcttggctccacctctgtcctctctctagcctgcctgggaatgaatgaagctctgttagaaacaccgtgtgctttgggaagagacaataaagatgtctttattt

SEQ ID NO: 229767 - protein, 427 aa, Artificial Sequence
  derived and/or modified sequence
MTKLITETPDQPIPFLIDHLQSKQGNRGQLQRTLSGSAALWAESEKSESKGTRRDFRSYDKPWQLNAKKPKKSKSDLAVSNISPPSPDSKSLPRSVEHPKWNWRTKPQSRDFDELNHILQESKKLGKALENLSRSIAISDELDKETVTFNSSLLRPRVIGEWIGREENDADPLAAEMLQPPIPRSKNDQWESEDSGSSPAGSLKMEPKNKGLKQQQQQHKKLLAAMLSQDSFESIHSPTPSVTEEDIDNEDDAMELLEDLNDLRMEGVTTLVPSGSKFNQGRPTYPAEPQAKVTLNICSRCARLQGDNLEERTEESLPILHSPDEKIPDSFDSLPGTEEALMEEGDEFEKASKLTGPGEASSGVGHSLKNYMEEDESLKQLQVVHQPWILPSDTESEGVEAEQEKRSADLLLCVPCSSCPTLVYSGL

SEQ ID NO: 229768 - protein, 538 aa, Artificial Sequence
  derived and/or modified sequence
MSSPLASELSELAALRPGFRLSAPHARVAPRAATHARGRGRASHAGQPRLRSSCPGPSPGKRRVVPSGGAQPRVLPALSSRSHLFPMASHPQTRIQAYLEKNKIGPLFEELMTKLITETPDQPIPFLIDHLQSKQGNRGQLQRTLSGSAALWAESEKSESKGTRRDFRSYDKPWQLNAKKPKKSKSDLAVSNISPPSPDSKSLPRSVEHPKWNWRTKPQSRDFDELNHILQESKKLGKALENLSRSIAISDELDKETVTFNSSLLRPRVIGEWIGREENDADPLAAEMLQPPIPRSKNDQWESEDSGSSPAGSLKMEPKNKGLKQQQQQHKKLLAAMLSQDSFESIHSPTPSVTEEDIDNEDDAMELLEDLNDLRMEGVTTLVPSGSKFNQGRPTYPAEPQAKVTLNICSRCARLQGDNLEERTEESLPILHSPDEKIPDSFDSLPGTEEALMEEGDEFEKASKLTGPGEASSGVGHSLKNYMEEDESLKQLQVVHQPWILPSDTESEGVEAEQEKRSADLLLCVPCSSCPTLVYSGL

SEQ ID NO: 229769 - protein, 452 aa, Artificial Sequence
  derived and/or modified sequence
MASHPQTRIQAYLEKNKIGPLFEELMTKLITETPDQPIPFLIDHLQSKQGNRGQLQRTLSGSAALWAESEKSESKGTRRDFRSYDKPWQLNAKKPKKSKSDLAVSNISPPSPDSKSLPRSVEHPKWNWRTKPQSRDFDELNHILQESKKLGKALENLSRSIAISDELDKETVTFNSSLLRPRVIGEWIGREENDADPLAAEMLQPPIPRSKNDQWESEDSGSSPAGSLKMEPKNKGLKQQQQQHKKLLAAMLSQDSFESIHSPTPSVTEEDIDNEDDAMELLEDLNDLRMEGVTTLVPSGSKFNQGRPTYPAEPQAKVTLNICSRCARLQGDNLEERTEESLPILHSPDEKIPDSFDSLPGTEEALMEEGDEFEKASKLTGPGEASSGVGHSLKNYMEEDESLKQLQVVHQPWILPSDTESEGVEAEQEKRSADLLLCVPCSSCPTLVYSGL

SEQ ID NO: 229770 - DNA, 1284 bp, Artificial Sequence
  derived and/or modified sequence
atgaccaagctgatcaccgagacccccgaccagcccatccccttcctgatcgaccacctgcagagcaagcagggcaacagaggccagctgcagagaaccctgagcggcagcgccgccctgtgggccgagagcgagaagagcgagagcaagggcaccagaagagacttcagaagctacgacaagccctggcagctgaacgccaagaagcccaagaagagcaagagcgacctggccgtgagcaacatcagcccccccagccccgacagcaagagcctgcccagaagcgtggagcaccccaagtggaactggagaaccaagccccagagcagagacttcgacgagctgaaccacatcctgcaggagagcaagaagctgggcaaggccctggagaacctgagcagaagcatcgccatcagcgacgagctggacaaggagaccgtgaccttcaacagcagcctgctgagacccagagtgatcggcgagtggatcggcagagaggagaacgacgccgaccccctggccgccgagatgctgcagccccccatccccagaagcaagaacgaccagtgggagagcgaggacagcggcagcagccccgccggcagcctgaagatggagcccaagaacaagggcctgaagcagcagcagcagcagcacaagaagctgctggccgccatgctgagccaggacagcttcgagagcatccacagccccacccccagcgtgaccgaggaggacatcgacaacgaggacgacgccatggagctgctggaggacctgaacgacctgagaatggagggcgtgaccaccctggtgcccagcggcagcaagttcaaccagggcagacccacctaccccgccgagccccaggccaaggtgaccctgaacatctgcagcagatgcgccagactgcagggcgacaacctggaggagagaaccgaggagagcctgcccatcctgcacagccccgacgagaagatccccgacagcttcgacagcctgcccggcaccgaggaggccctgatggaggagggcgacgagttcgagaaggccagcaagctgaccggccccggcgaggccagcagcggcgtgggccacagcctgaagaactacatggaggaggacgagagcctgaagcagctgcaggtggtgcaccagccctggatcctgcccagcgacaccgagagcgagggcgtggaggccgagcaggagaagagaagcgccgacctgctgctgtgcgtgccctgcagcagctgccccaccctggtgtacagcggcctgtag

SEQ ID NO: 229771 - DNA, 1617 bp, Artificial Sequence
  derived and/or modified sequence
atgagcagccccctggccagcgagctgagcgagctggccgccctgagacccggcttcagactgagcgccccccacgccagagtggcccccagagccgccacccacgccagaggcagaggcagagccagccacgccggccagcccagactgagaagcagctgccccggccccagccccggcaagagaagagtggtgcccagcggcggcgcccagcccagagtgctgcccgccctgagcagcagaagccacctgttccccatggccagccacccccagaccagaatccaggcctacctggagaagaacaagatcggccccctgttcgaggagctgatgaccaagctgatcaccgagacccccgaccagcccatccccttcctgatcgaccacctgcagagcaagcagggcaacagaggccagctgcagagaaccctgagcggcagcgccgccctgtgggccgagagcgagaagagcgagagcaagggcaccagaagagacttcagaagctacgacaagccctggcagctgaacgccaagaagcccaagaagagcaagagcgacctggccgtgagcaacatcagcccccccagccccgacagcaagagcctgcccagaagcgtggagcaccccaagtggaactggagaaccaagccccagagcagagacttcgacgagctgaaccacatcctgcaggagagcaagaagctgggcaaggccctggagaacctgagcagaagcatcgccatcagcgacgagctggacaaggagaccgtgaccttcaacagcagcctgctgagacccagagtgatcggcgagtggatcggcagagaggagaacgacgccgaccccctggccgccgagatgctgcagccccccatccccagaagcaagaacgaccagtgggagagcgaggacagcggcagcagccccgccggcagcctgaagatggagcccaagaacaagggcctgaagcagcagcagcagcagcacaagaagctgctggccgccatgctgagccaggacagcttcgagagcatccacagccccacccccagcgtgaccgaggaggacatcgacaacgaggacgacgccatggagctgctggaggacctgaacgacctgagaatggagggcgtgaccaccctggtgcccagcggcagcaagttcaaccagggcagacccacctaccccgccgagccccaggccaaggtgaccctgaacatctgcagcagatgcgccagactgcagggcgacaacctggaggagagaaccgaggagagcctgcccatcctgcacagccccgacgagaagatccccgacagcttcgacagcctgcccggcaccgaggaggccctgatggaggagggcgacgagttcgagaaggccagcaagctgaccggccccggcgaggccagcagcggcgtgggccacagcctgaagaactacatggaggaggacgagagcctgaagcagctgcaggtggtgcaccagccctggatcctgcccagcgacaccgagagcgagggcgtggaggccgagcaggagaagagaagcgccgacctgctgctgtgcgtgccctgcagcagctgccccaccctggtgtacagcggcctgtag

SEQ ID NO: 229772 - DNA, 1359 bp, Artificial Sequence
  derived and/or modified sequence
atggccagccacccccagaccagaatccaggcctacctggagaagaacaagatcggccccctgttcgaggagctgatgaccaagctgatcaccgagacccccgaccagcccatccccttcctgatcgaccacctgcagagcaagcagggcaacagaggccagctgcagagaaccctgagcggcagcgccgccctgtgggccgagagcgagaagagcgagagcaagggcaccagaagagacttcagaagctacgacaagccctggcagctgaacgccaagaagcccaagaagagcaagagcgacctggccgtgagcaacatcagcccccccagccccgacagcaagagcctgcccagaagcgtggagcaccccaagtggaactggagaaccaagccccagagcagagacttcgacgagctgaaccacatcctgcaggagagcaagaagctgggcaaggccctggagaacctgagcagaagcatcgccatcagcgacgagctggacaaggagaccgtgaccttcaacagcagcctgctgagacccagagtgatcggcgagtggatcggcagagaggagaacgacgccgaccccctggccgccgagatgctgcagccccccatccccagaagcaagaacgaccagtgggagagcgaggacagcggcagcagccccgccggcagcctgaagatggagcccaagaacaagggcctgaagcagcagcagcagcagcacaagaagctgctggccgccatgctgagccaggacagcttcgagagcatccacagccccacccccagcgtgaccgaggaggacatcgacaacgaggacgacgccatggagctgctggaggacctgaacgacctgagaatggagggcgtgaccaccctggtgcccagcggcagcaagttcaaccagggcagacccacctaccccgccgagccccaggccaaggtgaccctgaacatctgcagcagatgcgccagactgcagggcgacaacctggaggagagaaccgaggagagcctgcccatcctgcacagccccgacgagaagatccccgacagcttcgacagcctgcccggcaccgaggaggccctgatggaggagggcgacgagttcgagaaggccagcaagctgaccggccccggcgaggccagcagcggcgtgggccacagcctgaagaactacatggaggaggacgagagcctgaagcagctgcaggtggtgcaccagccctggatcctgcccagcgacaccgagagcgagggcgtggaggccgagcaggagaagagaagcgccgacctgctgctgtgcgtgccctgcagcagctgccccaccctggtgtacagcggcctgtag

SEQ ID NO: 229773 - DNA, 3652 bp, Artificial Sequence
  derived and/or modified sequence
gcccaggtaaagccatgttttcctacacttaaaaatgtaaataaatatcccttagataatctggacagcagtttcttatatagcatgtctgagcactatattttgctgggctataaaaggtttaattgttgtttattggtacaataagggattctagttactaatatctacctgtagtcaataaagcaaacattgattggttgatcgaatcattgattcattcaataggtattgattcagcaccagctatgagctaggcagagttctaggccctacagagaaaactgatatcaaactaagaaagtctttttccaagtgctacagtaggggtgggggaggagagagataacaaactggtgagcaaatgttaaacaaaatgattctagagagtgctaaatactgtgaggaagataaaatgataaaataataaagacttctgaagattggttagggtaacctcttgtagaagtatcattggagaccgaaggatgacacaccagccatctgaccatgagagaacatcattcaaggcaaaggaaacagaccaccaccaacaaaaaaagatgcactggggaatttccagtaacacttttgttagctctcttaatatctgattttttgagcactagaacactgcctctcacagaatcctagcttaaaacagcaatgaacagactagaattctaggctaaaaccaacaagatgaaatgtgactgatatgaatataaatggtgcacataagttcacaaacccaattacacagcacaaaatgatatccacgtggcttgacagctgttcatattagaaaaatctagggattctaatggactacatattggagattgctctttgctgttcctgactggaaaaaaaaatatgtagatattacccttgggcagatttcagcccaacttaaagtatcattagagctgtccaaaatggaacagcctgctttgcacatagagaactcacattgctcaactcaaaaaagagcagaaggaaggaagaaggaaggacacgtaacagggatttttacaaaaacagaattcggtatttcttggagactactttaagacagtttttggtttctgtaagtctgtgacttattacttgttcctttaattccaataaaattttcttcatttttgttatttttaaaacattaagaagaaaaaaatgatattgatataaggtagatggtgaagtttagcaaaagtttagtttataatgatatctctcaaaatagcaaactgaagtttaaaattcttaagctataattttaaaggaatttagattaaacttttaatatgttgttggctaagtataatacaaaataaaaactaaataaatcttggttttgccacatattagctgtgtaatatagacaatttacttctctgttattgtttcctcagaatgagggcagtaacttgtagccgtctgaaaagattgttataagcatggagttagttgctgtatataaagcagttagaccagtacctgacaatattacatgctaagtaagtgcttgctattactgttgctgttattattaattataattgtgtgctctattctgccttcaggaattaatgaccaagttaataactgagacacctgaccagccaatcccatttctcattgaccatcttcagtctaaacaagggaaccgtggacaacttcaaagaactttgtctggatctgcagctctatgggcagaaagtgaaaaatcagaatccaaaggaacaagaagggatttcagaagctatgataaaccttggcaattaaatgcaaagaagcctaaaaaatcaaaaagtgaccttgctgtgtctaatatttctccaccatcaccggactccaaatcattgccaaggtcagtagagcatccaaagtggaactggaggactaaaccacaaagccgtgattttgatgaattgaatcacatccttcaggagagcaagaagctggggaaagcccttgagaatctctctcgaagtattgcaatttcagatgaactcgataaggaaacagtgacatttaattcttctcttctgaggccccgtgtgattggagaatggattggtagagaagaaaatgatgctgatcccctagctgctgaaatgctacagcctccaattccaagaagcaaaaatgaccaatgggaaagtgaagatagtggctctagtcctgcaggaagcttaaagatggagcctaagaacaaaggattaaaacagcagcaacagcaacataagaaactcctggccgcaatgctctctcaagattcttttgagtccatccacagccctaccccatctgtaacagaagaagatattgataatgaagatgatgcaatggaattgctggaggatcttaatgatttaagaatggagggagtaacaaccctggtaccttctgggagcaaatttaaccaaggccgtcctacttaccctgctgagcctcaggccaaggtcacactgaacatctgttcaaggtgtgccaggcttcaaggagacaacctggaagaaaggacagaagagtcactaccaatactccattctccagatgaaaaaatcccagattcattcgattccttgcctgggactgaagaagcactaatggaggagggtgacgaatttgagaaagcatctaaactaacaggacctggagaagcctccagtggagtaggacactcactgaaaaactacatggaagaagatgaatccttaaagcaattgcaggtagttcatcaaccatggatcttgccaagtgacacagaaagtgaaggagtggaagcagaacaagagaaacgttccgctgatcttcttctttgcgttccatgctcttcttgtcctacgctggtctactctggtttgtgaaacagagagaagaagttgcaagtggtccttaaagaaatgcagttattcaaatccttatgtatagttctaattttatttactatgtgtaatcatttagagaatggttatttttataatctcaataataaacaagtactatcgtagccagggggtgcccaagtatgtaatcagagaacactaatcctggcaaaggattgtggggtggtcaggaggccggctgccttttgacatggttagagtcctgggtttagattactttataaatagttattaagattaatatttgatatattaaatattgcctgattcaaataactttgcttaaaatttttctgtattttaacttgtctagggttttctacttcttctatttttataatattttctcattttttagattactaaacattctacttatccacatgtgccaagatgtgccatttaggtctctgcagaaattagctgtttggtatcatcacctgccatacatgttgtgtgcagcagtgagaagtatattctctaccactgctctttctcatgattattttctctattcctattaaaatgaataattgatatgttaattaagtaaagcaaatcaataaggaatgaaatgcatggcccaaaacatagaaaatgaaaatcgtttgaccatttatccaattattgaacccaattaagatgatccattttaaatttaatatatgctcgcttttggaatgtgttatgcattgatgttaagtgaatggatctaagtaaatctattgatatctcta

SEQ ID NO: 229774 - DNA, 2223 bp, Artificial Sequence
  derived and/or modified sequence
agcctcggggagcagcccgggctgtttgttccgtcaccggggaaaggaggtacacacagtcgcgcgcgcacggacacacacacacacgcacgcacgcacacacaccggtggcgagttcgagccccgcggcccctgtccgcccgcgtgcgcccctcgacacagctcgcctcccgccccctgattcctgctgctgccgcccagaggagaaaggaacctctgcctcgaatttccccactgcgccgggcgctgcggagagcggcgagggtgggcgcgaggcggagaacgcgatgaatgagttctcccctcgcctcggagttgtctgagttggcggcgctgcgcccaggcttccggctctcagcgccccacgcgcgcgtggctccccgggctgccacccacgcccgcggccggggccgagccagccacgcagggcagccgaggctccggagctcctgtcccggccccagtccgggtaaaaggagggttgtccccagcggaggcgcacagccgcgcgttctccctgcactctcttcgcggtcccatctgttccccatggcgtctcatccgcaaacccggatccaggcttacctggagaagaacaagatcggtcccctgtttgaggaattaatgaccaagttaataactgagacacctgaccagccaatcccatttctcattgaccatcttcagtctaaacaagggaaccgtggacaacttcaaagaactttgtctggatctgcagctctatgggcagaaagtgaaaaatcagaatccaaaggaacaagaagggatttcagaagctatgataaaccttggcaattaaatgcaaagaagcctaaaaaatcaaaaagtgaccttgctgtgtctaatatttctccaccatcaccggactccaaatcattgccaaggtcagtagagcatccaaagtggaactggaggactaaaccacaaagccgtgattttgatgaattgaatcacatccttcaggagagcaagaagctggggaaagcccttgagaatctctctcgaagtattgcaatttcagatgaactcgataaggaaacagtgacatttaattcttctcttctgaggccccgtgtgattggagaatggattggtagagaagaaaatgatgctgatcccctagctgctgaaatgctacagcctccaattccaagaagcaaaaatgaccaatgggaaagtgaagatagtggctctagtcctgcaggaagcttaaagatggagcctaagaacaaaggattaaaacagcagcaacagcaacataagaaactcctggccgcaatgctctctcaagattcttttgagtccatccacagccctaccccatctgtaacagaagaagatattgataatgaagatgatgcaatggaattgctggaggatcttaatgatttaagaatggagggagtaacaaccctggtaccttctgggagcaaatttaaccaaggccgtcctacttaccctgctgagcctcaggccaaggtcacactgaacatctgttcaaggtgtgccaggcttcaaggagacaacctggaagaaaggacagaagagtcactaccaatactccattctccagatgaaaaaatcccagattcattcgattccttgcctgggactgaagaagcactaatggaggagggtgacgaatttgagaaagcatctaaactaacaggacctggagaagcctccagtggagtaggacactcactgaaaaactacatggaagaagatgaatccttaaagcaattgcaggtagttcatcaaccatggatcttgccaagtgacacagaaagtgaaggagtggaagcagaacaagagaaacgttccgctgatcttcttctttgcgttccatgctcttcttgtcctacgctggtctactctggtttgtgaaacagagagaagaagttgcaagtggtccttaaagaaatgcagttattcaaatccttatgtatagttctaattttatttactatgtgtaatcatttagagaatggttatttttataatctcaataataaacaagtactatcgtagccagggggtgcccaagtatgtaatcagagaacactaatcctggcaaaggattgtggggtggtcaggaggccggctgccttttgacatggttagagtcctgggtttagattactttataaatagttattaagattaatatttgatatattaaatattgcctgattcaaataa

SEQ ID NO: 229775 - DNA, 2217 bp, Artificial Sequence
  derived and/or modified sequence
agcctcggggagcagcccgggctgtttgttccgtcaccggggaaaggaggtacacacagtcgcgcgcgcacggacacacacacacacgcacgcacgcacacacaccggtggcgagttcgagccccgcggcccctgtccgcccgcgtgcgcccctcgacacagctcgcctcccgccccctgattcctgctgctgccgcccagaggagaaaggaacctctgcctcgaatttccccactgcgccgggcgctgcggagagcggcgagggtgggcgcgaggcggagaacgcgatgaatgagttctcccctcgcctcggagttgtctgagttggcggcgctgcgcccaggcttccggctctcagcgccccacgcgcgcgtggctccccgggctgccacccacgcccgcggccggggccgagccagccacgcagggcagccgaggctccggagctcctgtcccggccccagtccgggtaaaaggagggttgtccccagcggaggcgcacagccgcgcgttctccctgcactctcttcgcggtcccatctgttccccatggcgtctcatccgcaaacccggatccaggcttacctggagaagaacaagatcggtcccctgtttgaggaattaatgaccaagttaataactgagacacctgaccagccaatcccatttctcattgaccatcttcagtctaaacaagggaaccgtggacaacttcaaagaactttgtctggatctgcagctctatgggcagaaagtgaaaaatcagaatccaaaggaacaagaagggatttcagaagctatgataaaccttggcaattaaatgcaaagaagcctaaaaaatcaaaaagtgaccttgctgtgtctaatatttctccaccatcaccggactccaaatcattgccaaggtcagtagagcatccaaagtggaactggaggactaaaccacaaagccgtgattttgatgaattgaatcacatccttcaggagagcaagaagctggggaaagcccttgagaatctctctcgaagtattgcaatttcagatgaactcgataaggaaacagtgacatttaattcttctcttctgaggccccgtgtgattggagaatggattggtagagaagaaaatgatgctgatcccctagctgctgaaatgctacagcctccaattccaagaagcaaaaatgaccaatgggaaagtgaagatagtggctctagtcctgcaggaagcttaaagatggagcctaagaacaaaggattaaaacagcagcaacagcaacataagaaactcctggccgcaatgctctctcaagattcttttgagtccatccacagccctaccccatctgtaacagaagaagatattgataatgaagatgatgcaatggaattgctggaggatcttaatgatttaagaatggagggagtaacaaccctggtaccttctgggagcaaatttaaccaaggccgtcctacttaccctgctgagcctcaggccaaggtcacactgaacatctgttcaaggtgtgccaggcttcaaggagacaacctggaagaaaggacagaagagtcactaccaatactccattctccagatgaaaaaatcccagattcattcgattccttgcctgggactgaagaagcactaatggaggagggtgacgaatttgagaaagcatctaaactaacaggacctggagaagcctccagtggagtaggacactcactgaaaaactacatggaagaagatgaatccttaaagcaattgcaggtagttcatcaaccatggatcttgccaagtgacacagaaagtgaaggagtggaagcagaacaagagaaacgttccgctgatcttcttctttgcgttccatgctcttcttgtcctacgctggtctactctggtttgtgaaacagagagaagaagttgcaagtggtccttaaagaaatgcagttattcaaatccttatgtatagttctaattttatttactatgtgtaatcatttagagaatggttatttttataatctcaataataaacaagtactatcgtagccagggggtgcccaagtatgtaatcagagaacactaatcctggcaaaggattgtggggtggtcaggaggccggctgccttttgacatggttagagtcctgggtttagattactttataaatagttattaagattaatatttgatatattaaatattgcctgattc

SEQ ID NO: 229776 - DNA, 1284 bp, Artificial Sequence
  derived and/or modified sequence
atgaccaaactaattactgagactcctgatcagccaatcccatttctgatcgaccacctacaaagtaaacaggggaatcgcggccagcttcagcgtaccttgagcggatctgctgcgctctgggctgagagcgagaagagcgagtccaaggggacaaggcgtgacttcagaagctacgacaaaccgtggcaactcaacgccaagaagcccaagaaaagtaagtccgacctcgctgtgagtaatatctctccccccagtcccgatagcaagagcttacctcgttctgtcgagcaccctaaatggaattggagaaccaagccacagtctcgtgatttcgacgagctaaatcacatcttgcaagaaagtaaaaagctgggcaaggccttggaaaacctgagccggtccatcgcaatctcagatgagctggataaagagacagtgacatttaactcatctctgctgagaccgagagtcatcggggagtggatcggtcgcgaagagaacgatgccgaccctcttgccgccgagatgctgcagcctcctatccccaggagtaaaaacgatcaatgggagagcgaagactctggttcttcccctgcagggagtctgaagatggagcccaaaaataaggggctcaaacagcaacagcagcagcacaagaagctccttgctgctatgttgtctcaggactctttcgagtctatacattcccccaccccctctgtaacggaagaggacattgacaatgaagacgatgcaatggagctcctcgaagaccttaatgatctccgtatggagggtgtcacaaccttagtgccctccggttcaaagtttaatcaggggaggccaacgtatcctgctgaaccacaggccaaggtgaccctgaacatctgttcacgatgcgctaggcttcagggagacaacctcgaggaaagaaccgaagagtccctgccgattttacatagccccgatgaaaaaattccagattcatttgatagcctgccaggaacagaagaagcattgatggaagagggggatgagttcgaaaaagcttccaagctcactggacccggcgaggcctccagtggcgtggggcattctttgaaaaattacatggaagaagatgaaagtctgaagcagcttcaagtagtgcaccagccgtggattctacccagcgacacagagtccgagggcgtagaggccgaacaggagaagcgaagcgcagatctgctcctctgtgtgccttgctcctcctgccctaccctggtgtactctggcctttag

SEQ ID NO: 229777 - DNA, 1617 bp, Artificial Sequence
  derived and/or modified sequence
atgtcctcaccactggctagcgagctgtccgagctcgccgcacttaggcccgggtttagactgagtgcaccacatgccagagtggccccgcgggctgccacgcacgcaaggggccgcggtcgtgctagccacgccgggcagccaagacttagaagtagctgtcccgggccgagtcccggcaaacgtcgcgttgtgccgtcaggtggtgcccagcctcgcgtactgcccgcgctaagctcccgtagccatctcttcccaatggcaagccacccgcagactcggattcaagcatacctcgagaaaaataagatcgggcccctatttgaggagctgatgacgaagctcataactgaaacccctgatcaacccataccatttcttatagatcacctccaatccaagcaagggaaccgcggccaattgcagcgtacgctatcaggatcagctgctctgtgggccgaaagcgaaaagtccgagtcaaaaggcacacggagggatttccgctcttacgataagccatggcagcttaacgcaaagaagcccaaaaaatcaaaatctgatctggccgtgtccaatataagccctccatcgccagacagcaagtcccttcctaggtccgttgagcatccgaagtggaactggagaactaaaccccagtcgagggactttgatgagcttaatcatatcctacaggagagtaaaaaactggggaaggccctcgaaaatctgtctagaagcatagccatcagcgatgagctggataaggaaaccgtgactttcaattctagccttctccgtccaagagtcattggggagtggattgggagagaggagaatgatgccgacccactggcagctgaaatgcttcagcccccaatccctcgctccaaaaacgaccaatgggagagcgaggactccggatcttccccagccggaagcctgaagatggagccaaaaaataagggcctcaaacagcagcagcagcaacataagaagcttctggcagcgatgctttcacaggatagtttcgagagcattcactccccaaccccgtcagtcacagaagaggacatagataacgaggacgacgcaatggagttactggaggacctgaacgacctccgtatggagggggtgacgaccttggtgccttcaggatccaagttcaaccaaggtcgaccaacctatcctgccgaaccccaggctaaggtaacgctgaatatttgctctcggtgcgcacgattgcagggagataacctggaggagagaaccgaagaaagcctgccaatccttcattcgcccgacgaaaagatccctgactccttcgactctcttccagggaccgaagaggcattgatggaggagggcgatgagtttgaaaaggcttctaagctgacaggtccaggcgaagcttctagtggcgttggacactctctgaagaattatatggaggaagacgaatctttgaagcagttacaggtggttcaccagccctggatccttcctagcgacacagagagtgaaggggtcgaagccgaacaggaaaagcgctcggccgatctattgctgtgcgtcccttgctcgagttgccccacactggtctactcaggattgtag

SEQ ID NO: 229778 - DNA, 1359 bp, Artificial Sequence
  derived and/or modified sequence
atggcgtcccaccctcagacacgcatccaggcatacttggagaagaacaaaatagggcctctctttgaggaactgatgacgaagctcattactgagacacctgatcagccaattccttttctgatcgaccaccttcaaagtaagcagggcaaccggggccagctacagagaaccctttctggatcagcagccctgtgggcagagagtgagaagagcgaatccaagggaacccggcgagactttaggagttatgataaaccttggcagctgaacgccaagaagcccaaaaagagcaagtctgacctggctgtgtcaaacatctcccccccttctccagattcaaagagtttgcctaggtctgtagagcatccaaaatggaactggcggaccaagccacaatctcgtgattttgacgaacttaatcacattctgcaagagagtaaaaagctgggaaaggcactagaaaacttatcccgttcaatcgctatctcagacgagctggataaggagaccgtcacctttaatagttctctcctgcgcccccgagtgatcggtgaatggatcggcagggaagaaaatgatgccgacccattggcagcagaaatgctccagcctccgataccgaggtccaaaaacgaccagtgggagtccgaggatagtggaagcagccctgccggttctctgaagatggaacccaagaacaagggtttaaaacagcagcagcagcagcataagaagctgttggccgccatgttgtctcaagattcttttgagagcatccactcacctactcccagcgttacggaagaggatattgataacgaggacgatgcaatggaacttttagaagatctcaacgacctgcggatggaaggcgtgacaaccctggttccttctggctcaaaattcaatcaggggcggcccacttaccctgcagaacctcaagccaaggtgactctgaatatttgtagcaggtgcgcccgcctgcagggcgataatctcgaagagcggacagaagagagcctgcccattctgcattcacctgacgaaaaaatccccgactcctttgattcactgccaggaacagaggaagcgctcatggaagagggtgacgagtttgaaaaagcatcaaagttgacagggcccggagaagcttcgagtggggtaggccactccctgaaaaactacatggaggaagacgagtcgttgaagcagttacaagtggtgcatcagccgtggatcctgccttcagataccgagtctgaaggcgttgaagcagaacaggagaagcggtctgccgatctgttgctctgtgtaccctgttcatcctgtcctactctggtttactctggactatag

SEQ ID NO: 229779 - DNA, 1284 bp, Artificial Sequence
  derived and/or modified sequence
atgaccaagctgatcacagagaccccagaccagcccatccccttcctgattgaccacctgcagagcaagcagggcaacagaggccagctgcagaggaccctgagcggcagcgctgccctgtgggccgagagcgagaagtctgagagcaagggcacccggcgggacttccgctcctatgacaagccctggcagctgaatgccaagaagcccaagaagagcaagagtgacctggccgtgagcaacatcagcccccccagcccagacagcaagagcctgcccaggtctgtggagcaccccaagtggaactggaggaccaagccccagagccgggactttgatgagctgaaccacatcctgcaggagagcaagaagctgggcaaggccctggagaacctgagccgcagcatcgccatcagtgatgagctggacaaggagaccgtgaccttcaacagcagcctgctgcggccccgggtgattggagagtggattggccgggaggagaatgatgctgaccccctggccgctgagatgctgcagccccccatccccaggagcaagaatgaccagtgggagagtgaagattctggcagcagccctgctggcagcctgaagatggagcccaagaacaagggcctgaagcagcagcagcagcagcacaagaagctgctggccgccatgctgagccaggacagctttgagagcatccacagccccaccccatctgtgacagaagaagatattgacaatgaagatgatgccatggagctgctggaggacctgaatgacctgaggatggagggcgtgaccaccctggtgcccagcggcagcaagttcaaccagggccggcccacctacccagctgagccccaggccaaggtgaccctgaacatctgcagccgctgtgcccggctgcagggcgacaacctggaggagaggacagaggagagcctgcccatcctgcacagcccagatgagaagatcccagacagctttgacagcctgcctggaacagaggaggccctgatggaggagggagatgaatttgagaaggccagcaagctgactggacctggagaggccagcagcggcgtgggccacagcctgaagaactacatggaggaggatgagagcctgaagcagctgcaggtggtgcaccagccctggatcctgcccagcgacacagagagcgagggcgtggaggccgagcaggagaagaggtctgctgacctgctgctgtgtgtgccctgcagcagctgccccaccctggtgtacagcggcctgtag

SEQ ID NO: 229780 - DNA, 1617 bp, Artificial Sequence
  derived and/or modified sequence
atgagcagccccctggccagcgagctgtctgagctggccgccctgcggcccggcttccggctgagcgcccctcatgcccgggtggccccccgggccgccacccacgcccggggccggggccgggccagccatgctggccagccccggctgcggagcagctgccccggccccagccctgggaagagaagagtggtgcccagcggcggggcccagccccgggtgctgcctgccctgagcagccgcagccacctgttccccatggccagccacccccagacccgcatccaggcctacctggagaagaacaagattggccccctgtttgaggagctgatgaccaagctgatcacagagaccccagaccagcccatccccttcctgattgaccacctgcagagcaagcagggcaacagaggccagctgcagaggaccctgagcggcagcgctgccctgtgggccgagagcgagaagtctgagagcaagggcacccggcgggacttccgctcctatgacaagccctggcagctgaatgccaagaagcccaagaagagcaagagtgacctggccgtgagcaacatcagcccccccagcccagacagcaagagcctgcccaggtctgtggagcaccccaagtggaactggaggaccaagccccagagccgggactttgatgagctgaaccacatcctgcaggagagcaagaagctgggcaaggccctggagaacctgagccgcagcatcgccatcagtgatgagctggacaaggagaccgtgaccttcaacagcagcctgctgcggcccagggtcatcggggagtggattggccgggaggagaatgatgctgaccccctggccgctgagatgctgcagccccccatccccaggagcaagaatgaccagtgggagagcgaggacagcggcagcagccctgctggcagcctgaagatggagcccaagaacaagggcctgaagcagcagcagcagcagcacaagaagctgctggccgccatgctgagccaggacagctttgagagcatccacagccccacccccagcgtgacagaggaggacatcgacaatgaagatgatgccatggagctgctggaggacctgaatgacctgaggatggagggcgtgaccaccctggtgcccagcggcagcaagttcaaccagggccggcccacctacccagctgagccccaggccaaggtgaccctgaacatctgcagccgctgtgcccggctgcagggcgacaacctggaggagaggacagaggagagcctgcccatcctgcacagcccagatgagaagatcccagacagctttgacagcctgcccggcacagaggaggccctgatggaggagggagatgaatttgagaaggccagcaagctgaccggccctggagaggccagcagtggagtgggccacagcctgaagaactacatggaggaggatgagagcctgaagcagctgcaggtggtgcaccagccctggatcctgcccagcgacacagaaagtgaaggagtggaggccgagcaggagaagaggtctgctgacctgctgctgtgtgtgccctgcagcagctgccccaccctggtgtacagcggcctgtag

SEQ ID NO: 229781 - DNA, 1359 bp, Artificial Sequence
  derived and/or modified sequence
atggccagccacccccagacccgcatccaggcctacctggagaagaacaagattggccccctgtttgaggagctgatgaccaagctgatcacagagaccccagaccagcccatccccttcctgattgaccacctgcagagcaagcagggcaacagaggccagctgcagaggaccctgagcggcagcgctgccctgtgggccgagagcgagaagtctgagagcaagggcacccggcgggacttccgctcctatgacaagccctggcagctgaatgccaagaagcccaagaagagcaagagtgacctggccgtgagcaacatcagcccccccagcccagacagcaagagcctgcccaggtctgtggagcaccccaagtggaactggaggaccaagccccagagccgggactttgatgagctgaaccacatcctgcaggagagcaagaagctgggcaaggccctggagaacctgagccgcagcatcgccatcagtgatgagctggacaaggagaccgtgaccttcaacagcagcctgctgcggcccagggtcatcggggagtggattggccgggaggagaatgatgctgaccccctggccgctgagatgctgcagccccccatccccaggagcaagaatgaccagtgggagagcgaggacagcggcagcagccctgctggcagcctgaagatggagcccaagaacaagggcctgaagcagcagcagcagcagcacaagaagctgctggccgccatgctgagccaggacagctttgagagcatccacagccccacccccagcgtgacagaggaggacatcgacaatgaagatgatgccatggagctgctggaggacctgaatgacctgaggatggagggcgtgaccaccctggtgcccagcggcagcaagttcaaccagggccggcccacctacccagctgagccccaggccaaggtgaccctgaacatctgcagccgctgtgcccggctgcagggcgacaacctggaggagaggacagaggagagcctgcccatcctgcacagcccagatgagaagatcccagacagctttgacagcctgcccggcacagaggaggccctgatggaggagggagatgaatttgagaaggccagcaagctgaccggccctggagaggccagcagtggagtgggccacagcctgaagaactacatggaggaggatgagagcctgaagcagctgcaggtggtgcaccagccctggatcctgcccagcgacacagaaagtgaaggagtggaggccgagcaggagaagaggtctgctgacctgctgctgtgtgtgccctgcagcagctgccccaccctggtgtacagcggcctgtag

SEQ ID NO: 229782 - DNA, 1284 bp, Artificial Sequence
  derived and/or modified sequence
atgaccaagctgatcaccgagacccccgaccagcccatccccttcctgattgaccacctgcagagtaaacaggggaataggggacagctgcagaggacactgtccggttccgcagctctttgggcggagtccgaaaaaagcgaatccaaaggcacccgacgagattttaggtcatatgataaaccatggcaacttaatgcaaaaaaaccgaaaaaatctaagtctgatttagcagttagcaatatttcaccgccctctcctgattccaagagtctgccgcgttcggtcgagcaccctaagtggaactggcgcaccaagccacaatcaagagattttgacgagctgaatcacattcttcaagaatctaaaaaactcggcaaagccctggaaaatctttctagatcaattgctatcagtgatgagctggataaagagacggtgacctttaatagttctctgcttaggcctcgcgtgattggagagtggattggtcgggaggagaatgacgcggatccccttgccgcagagatgctgcagccaccaataccccgctcaaaaaatgatcagtgggaaagcgaggatagcggaagcagcccagcgggcagtttaaaaatggagcctaaaaacaaggggcttaagcagcagcagcagcaacacaagaagttgctggcagctatgctgtctcaagattcattcgagtcaattcatagccccaccccttcagtaacagaagaggacattgacaacgaggacgatgctatggaactcctggaagacctcaacgacctccgcatggagggggtgaccacgctagtaccaagtggttccaagttcaaccagggtaggcctacgtacccagccgagcctcaggccaaagtaacccttaatatttgttctcgatgcgctcgcctgcagggggataatctagaagagagaaccgaagagagtctacctatcctgcattctccagacgagaagatccccgactcttttgactctctaccgggaactgaggaagcactgatggaggagggcgacgagtttgagaaggccagcaaactaactgggcccggagaagcaagctctggcgtcggacatagtctgaagaattatatggaggaagatgaatccctgaaacagctgcaggttgtgcatcagccctggattctgccgagcgatacagaatctgagggggtggaggccgagcaggaaaagcgttccgcggaccttctgctgtgtgtgccgtgtagctcctgtccaacgctggtgtacagcgggttgtag

SEQ ID NO: 229783 - DNA, 1617 bp, Artificial Sequence
  derived and/or modified sequence
atgagcagccccctggccagcgagctgagcgagctggccgccctgaggcccggatttaggttatctgccccgcatgcaagagtagcgccacgagccgctacacatgcgagaggacgcggccgcgcttctcatgccggacagcccagactgagatcttcttgtcctggaccctcccctggtaaaaggcgggtcgtgccttctggaggcgcacagccccgagtgttgcctgcgctgtcgtctcggtcccatctatttccgatggcttcccatccgcagacgcgcattcaggcctaccttgaaaaaaataaaatcggtcctctgtttgaagaactcatgacaaagcttattactgaaacgcccgaccagcccattccattcctgatcgatcaccttcagtccaagcagggtaatcggggccagcttcaacggactctctcagggagcgccgccctgtgggcagaatcagaaaaaagcgagtccaaaggcacccgacgggactttagatcctacgataagccttggcagctgaacgccaagaaacctaagaagtcaaaatccgacctagctgtatccaatatctcccccccaagtccagacagtaaatctctgccgagaagcgtcgaacaccctaaatggaactggcggaccaagcctcagtccagggactttgacgagctgaatcatatcctccaagaaagtaaaaaacttggcaaagcattagaaaatctgtcccggagcatcgcaatctcagatgagctcgataaagaaacagttacttttaacagcagcttactgcgcccgcgagtaatcggagagtggattgggagagaggagaatgacgcagacccccttgcagctgagatgctgcagccccccattcctcgcagcaaaaatgaccaatgggagagtgaggatagcggctcttcccccgcaggaagtctcaaaatggaaccaaagaataaaggcttgaaacagcaacagcagcagcataagaagctactggcagcaatgctctctcaggattcgtttgagagtatccatagtccaactcctagcgtgacggaggaagatatcgacaacgaggatgatgccatggaactcctagaggatttgaatgatctgagaatggagggggttacaaccctggttccttctgggtcgaaattcaaccagggcagacccacctatccggcggagccccaggcaaaggtgaccttgaacatctgcagccggtgtgcgagactgcagggagacaatcttgaggaacgaacggaagaatctctccccatcctacacagtcccgacgagaaaattccagatagcttcgatagcctgccaggcaccgaggaagccctgatggaggaaggcgacgagtttgagaaggcaagtaagctgaccggacccggcgaggctagctcaggggtgggccactccttgaaaaactatatggaagaagacgagtccctgaagcagctccaggtggtgcaccagccttggatcctgcctagtgataccgagtcagaaggtgtggaagctgagcaggagaagcgttcagctgacctcctcctatgtgttccctgctcctcatgccccaccctggtctactcaggattatag

SEQ ID NO: 229784 - DNA, 1359 bp, Artificial Sequence
  derived and/or modified sequence
atggccagccacccccagacccggatccaggcctacctggagaagaacaaaattggtcccctctttgaggagttgatgactaaactaatcacggagacccccgatcagccgatcccttttcttatcgaccacttgcaaagcaagcagggcaacaggggacaactgcaacgtaccctgagcggatctgccgcgctttgggcagaatcagagaagtccgaatcaaaggggacgcggagggatttccgaagttacgataagccctggcagttaaacgccaaaaagcccaaaaagtcaaagtccgacctggctgtgtccaacatttcacctccgtccccagatagtaaaagcctgccccgaagtgtcgagcacccgaagtggaattggagaactaaacctcagtcacgagattttgatgagctgaatcatattctacaggagagtaagaagctcgggaaagctctggagaaccttagtcgatctatcgcgatttccgacgaattggacaaagagacagtcaccttcaactcttcactgctgcggcccagggttatcggggagtggatcggccgcgaggagaatgatgcagatccacttgctgcagaaatgctccagcctcccattccccggagtaagaacgatcagtgggagagtgaggattcagggtcttcacctgcgggatcattgaaaatggagccaaagaacaagggtttgaaacagcagcagcaacagcacaaaaagctcctggccgcaatgctgagccaggattcttttgagtccatccattcacctacaccaagtgtgacagaagaagacatcgacaacgaagatgacgcgatggaactcctggaagacctgaatgatctacgcatggaaggcgttacaacactcgtccccagcggtagtaagttcaatcaggggagaccgacttacccagcggagccgcaagccaaggtcacgttgaatatttgttcacgctgtgccaggctgcagggggataacctggaggagcggactgaagagtcactaccaatccttcattctcccgacgagaagatccccgacagctttgactcactgccgggcactgaagaagcccttatggaagaaggggatgagtttgaaaaggccagcaagctaacaggccccggtgaggcgtcttcaggagtgggtcatagtctgaaaaactacatggaagaggacgaatccctgaaacagctgcaggtggttcaccagccctggatactccccagcgatactgaaagcgaaggggtcgaagccgagcaggagaagcgcagtgcagatctgctgctctgcgtgccctgttccagttgccccacccttgtttacagcggcctatag

SEQ ID NO: 229785 - DNA, 1284 bp, Artificial Sequence
  derived and/or modified sequence
atgactaagctaatcaccgagacaccagatcagccaataccgttcctcattgaccacctacagagcaagcagggtaataggggccagttacagcgcacgctttcaggaagtgccgcactgtgggcggagagcgaaaaaagcgaatccaaggggacccgtcgtgatttccggagctatgacaagccgtggcagcttaatgcaaagaagccaaagaaatcaaagagcgacctggctgtgtccaatatttcccccccaagtcctgactccaaatcactgcccaggtcggtcgaacaccctaagtggaattggcggacaaaaccccaaagccgggacttcgacgaattgaaccacattctccaggaatcgaagaagttgggcaaagcccttgagaacctctcccgatcaatcgctatctcagatgaattggacaaagaaaccgtcacttttaattctagtcttctgcgcccacgagttattggcgaatggatcggaagggaagagaacgatgctgatccactcgctgccgagatgcttcagccaccaatccccagaagcaaaaacgaccagtgggagtcagaggatagcgggagctcaccagccggatctctgaaaatggaacctaaaaataaggggctgaaacagcagcagcagcagcataaaaaactcttggctgcaatgttatcccaggatagcttcgaatctattcattcaccaacccctagcgtcactgaagaggatattgacaatgaagacgacgctatggagctcttggaagatctgaatgacctgcgcatggaaggagtaacaacactggtcccatctgggagcaagttcaaccagggtaggcccacctatcctgcagaaccgcaggccaaggttactctgaacatttgctccagatgcgccagactacagggcgacaacctggaagagcggacggaagagagcctcccaatactccatagtcctgatgaaaagatccccgacagctttgatagtttgcccggtactgaggaagcccttatggaggaaggagacgagtttgaaaaggcctccaaactgacaggtcccggagaggcctcatccggagtcggccacagccttaaaaattatatggaggaagatgaatctttgaaacagttgcaagttgtgcaccaaccttggatcctgccatccgacacagagtccgaaggtgttgaggccgaacaggagaaacgaagcgccgaccttctcctctgcgttccttgctcctcgtgcccgactctggtatattctggcctttag

SEQ ID NO: 229786 - DNA, 1617 bp, Artificial Sequence
  derived and/or modified sequence
atgtcttcacctctcgcatccgaactctcagagctcgcagccttgcgccctggatttaggcttagtgccccacacgcccgagtggcgcctagggcggctacgcatgcacgtggccgtgggagagcttcccacgccggacagcccagactgcgtagctcttgcccagggccatcccctggcaagcggcgagtggtgcctagcggcggagcccagccccgagttcttcctgccctatcttcaagatcgcatctgtttccaatggcctcccacccccagacacgcattcaggcatatttagaaaaaaacaaaatcgggccactgttcgaggagttgatgactaaacttattacagagactccggaccagccgatacctttcctcatcgatcacctccaatctaaacaggggaaccgcggacaactgcagagaaccctttcgggaagtgccgctctgtgggccgagagcgagaaatctgagtccaagggcaccagacgggactttaggagctacgataagccgtggcagctgaacgccaaaaagcccaagaaaagcaaaagcgatttggccgtctccaatatttcaccgccatcacctgactctaagtcgttgccccgaagcgttgaacatcctaagtggaactggcgcaccaagccccaatctagggacttcgacgagctaaatcatattttacaggaatcaaaaaagctggggaaagcgctcgaaaatctgtccagatctatcgccatcagcgatgagctggacaaggagaccgttaccttcaactcatcacttctacgtcccagagtgatcggtgaatggatagggagggaagagaatgatgccgatcccctggcagcagagatgctccagccccctatacccaggagcaagaatgaccagtgggaaagcgaagactcaggcagctcacccgcaggctcgctgaagatggaaccaaaaaacaaaggactgaagcagcagcagcagcagcataaaaaactgctggcagcgatgctgagccaagacagctttgaaagcatccactccccaaccccctccgtaacagaagaggacatagacaatgaagatgatgctatggaactgctggaggacttaaacgatcttaggatggaaggcgtgaccacacttgtgccttctggctccaaatttaaccagggtaggcctacctatccagcggaacctcaagctaaggtgacacttaacatttgttcaagatgtgcacggcttcagggcgacaacttggaggagcgcactgaagagtctctgccgatcctgcactctcccgacgagaaaatcccagacagcttcgactcactgccaggcacagaggaggctctgatggaggaaggcgacgaatttgagaaagcaagtaagctcactggaccaggcgaagccagctccggtgtgggccatagtctgaagaactacatggaggaggatgaaagcttaaagcagttgcaagtcgtgcaccagccatggattctgccttctgacaccgagagcgagggcgttgaagccgaacaggagaagcggtcagctgatctgcttctctgtgtcccatgctcgagctgtccaaccctcgtgtactccggactgtag

SEQ ID NO: 229787 - DNA, 1359 bp, Artificial Sequence
  derived and/or modified sequence
atggcttcccatccgcagacccggattcaggcctacctcgagaaaaataaaattggccctctctttgaggaattgatgactaagctgattaccgagactccagatcagcccatcccctttctgatagaccacctccaaagtaaacagggaaacagaggccagctccagcgcaccctgtcaggcagtgctgcgctgtgggccgagtccgagaaatccgagtccaagggaaccagacgggatttccgcagttacgacaaaccgtggcagctgaatgccaaaaagccgaagaagtcaaagagcgacttggccgtcagcaacatcagccctcccagccccgacagcaaaagtctgccgaggtccgtggagcacccaaaatggaactggaggactaagccccagtccagagacttcgacgagctgaaccacattttgcaagagtcaaagaagctaggtaaagctttggaaaacctatcccgctccattgctattagtgacgagttggataaggagactgttaccttcaactctagtttactcagacctagggtaatcggcgaatggatcggacgggaagaaaacgatgcagatcccctcgccgcagaaatgctgcagccacccatcccacgctcaaagaacgaccaatgggagtcggaggattcaggttccagtccggcagggagtctaaagatggagccgaagaataaagggctgaaacaacagcagcagcaacacaaaaaattgctggcagcaatgctttcccaggatagcttcgagagtattcatagcccaacaccaagcgtaaccgaagaagacatcgacaatgaagatgacgccatggagcttctcgaagacttgaacgatctgaggatggagggtgtgactacactggtaccttctgggtcgaagttcaatcaaggcaggcctacataccccgctgagcctcaagcaaaggtgacgctgaatatctgctcgagatgcgccagactgcaaggggataatctggaggaaagaacagaggagtccctgcccattttacactcccctgacgagaagattcccgattccttcgacagcctccccggaaccgaggaggcgctcatggaggagggggatgagtttgaaaaggcttctaaactgacgggccctggtgaggcgtcctctggagtgggccattccctcaagaactacatggaggaggatgaaagtctgaaacaattacaggttgtacatcaaccatggatcttgccttctgataccgaatccgagggagtggaggctgaacaggaaaagcggtcagcggaccttctgctgtgcgtgccctgcagcagctgccctaccttggtctatagcgggctgtag

SEQ ID NO: 229788 - protein, 263 aa, Artificial Sequence
  derived and/or modified sequence
MMPKHCFLGFLISFFLTGVAGTQSTHESLKPQRVQFQSRNFHNILQWQPGRALTGNSSVYFVQYKIMFSCSMKSSHQKPSGCWQHISCNFPGCRTLAKYGQRQWKNKEDCWGTQELSCDLTSETSDIQEPYYGRVRAASAGSYSEWSMTPRFTPWWETKIDPPVMNITQVNGSLLVILHAPNLPYRYQKEKNVSIEDYYELLYRVFIINNSLEKEQKVYEGAHRAVEIEALTPHSSYCVVAEIYQPMLDRRSQRSEERCVEIP

SEQ ID NO: 229789 - DNA, 792 bp, Artificial Sequence
  derived and/or modified sequence
atgatgccaaaacactgtttcctgggattcctgatcagcttcttccttactggcgtggcaggaacacagtcaacacacgagagcctcaagcctcagcgcgttcaattccagtctagaaacttccacaacatattgcagtggcagcctggacgagcacttacgggaaactcaagcgtgtactttgtgcagtacaagatcatgttctcttgtagcatgaagtcaagccaccagaagccctctggctgttggcaacacatttcctgtaactttcccggctgtaggaccctggcgaagtatggacagcgtcaatggaaaaataaagaggactgctggggaacacaggagctctcctgcgacctgacatctgagacctccgacattcaggagccatattacggacgtgtgcgggctgcttccgcagggtcttatagtgagtggagcatgacccctcgctttacaccttggtgggaaactaaaattgatccccctgtcatgaatattacccaagtgaatggtagcctcctggtcattctgcacgctcctaacttaccatacagatatcagaaagagaagaacgtctcaatcgaggattattacgagctcctgtaccgggtgtttattatcaacaattctctggaaaaggaacagaaagtttacgagggcgcacaccgtgccgtggagatcgaggccctgaccccgcattctagttattgcgtcgtggcagagatatatcagcccatgcttgatagaagatctcagagatctgaagagaggtgtgtggaaataccctag

SEQ ID NO: 229790 - DNA, 2886 bp, Artificial Sequence
  derived and/or modified sequence
ctcactttaccactactcgctatagagccctggtcaagttctctccacctctctatctatgtctcagtttcttcatctgtaacatcaaatgaataataataccaatctcctagacttcataagaggattaacaaagacaaaatatgggaaaaacataacatggcgtcccataattattagatcttattattgacactaaaatggcattaaaattaccaaaaggaagacagcatctgtttcctctttggtcctgagctggttaaaaggaacactggttgcctgaacagtcacacttgcaaccatgatgcctaaacattgctttctaggcttcctcatcagtttcttccttactggtgtagcaggaactcagtcaacgcatgagtctctgaagcctcagagggtacaatttcagtcccgaaattttcacaacattttgcaatggcagcctgggagggcacttactggcaacagcagtgtctattttgtgcagtacaaaatcatgttctcatgcagcatgaaaagctctcaccagaagccaagtggatgctggcagcacatttcttgtaacttcccaggctgcagaacattggctaaatatggacagagacaatggaaaaataaagaagactgttggggtactcaagaactctcttgtgaccttaccagtgaaacctcagacatacaggaaccttattacgggagggtgagggcggcctcggctgggagctactcagaatggagcatgacgccgcggttcactccctggtgggaaacaaaaatagatcctccagtcatgaatataacccaagtcaatggctctttgttggtaattctccatgctccaaatttaccatatagataccaaaaggaaaaaaatgtatctatagaagattactatgaactactataccgagtttttataattaacaattcactagaaaaggagcaaaaggtttatgaaggggctcacagagcggttgaaattgaagctctaacaccacactccagctactgtgtagtggctgaaatatatcagcccatgttagacagaagaagtcagagaagtgaagagagatgtgtggaaattccatgacttgtggaatttggcattcagcaatgtggaaattctaaagctccctgagaacaggatgactcgtgtttgaaggatcttatttaaaattgtttttgtattttcttaaagcaatattcactgttacaccttggggacttctttgtttatccattcttttatcctttatatttcatttgtaaactatatttgaacgacattccccccgaaaaattgaaatgtaaagatgaggcagagaataaagtgttctatgaaattcagaactttatttctgaatgtaacatccctaataacaaccttcattcttctaatacagcaaaataaaaatttaacaaccaaggaatagtatttaagaaaatgttgaaataatttttttaaaatagcattacagactgaggcggtcctgaagcaatggtttttcactctcttattgagccaattaaattgacattgctttgacaatttaaaacttctataaaggtgaatatttttcatacatttctattttatatgaatatactttttatatatttattattattaaatatttctacttaatgaatcaaaattttgttttaaagtctactttatgtaaataagaacaggttttggggaaaaaaatcttatgatttctggattgatatctgaattaaaactatcaacaacaaggaagtctgctctgtacaattgtccctcatttaaaagatatattaagcttttcttttctgtttgtttttgttttgtttagtttttaatcctgtcttagaagaacttatctttattctcaaaattaaatgtaatttttttagtgacaaagaagaaaggaaacctcattactcaatccttctggccaagagtgtcttgcttgtggcgccttcctcatctctatataggaggatcccatgaatgatggtttattgggaactgctggggtcgaccccatacagagaactcagcttgaagctggaagcacacagtgggtagcaggagaaggaccggtgttggtaggtgcctacagagactatagagctagacaaagccctccaaactggcccctcctgctcactgcctctcctgagtagaaatctggtgacctaaggctcagtgtggtcaacagaaagctgccttcttcacttgaggctaagtcttcatatatgtttaaggttgtctttctagtgaggagatacatatcagagaacatttgtacaattccccatgaaaattgctccaaagttgataacaatatagtcggtgcttctagttatatgcaagtactcagtgataaatggattaaaaaatattcagaaatgtattggggggtggaggagaataagaggcagagcaagagctagagaattggtttccttgcttccctgtatgctcagaaaacattgatttgagcatagacgcagagactgaaaaaaaaatttactttgatctctgtttttgaattcttattatttatattttgcttactaccttttttgccttttgtccttttgtggagagggcgatgaattaagagtagtggggtgggtggcgagtaagtaaaatttcaaatagcattttagtgaatgcaattcagtagtcctgaagcctgacttaataaaacaaaattcatttatggttgtttcatgaaagttattagataggatcaagttttgtttgtatattgtttgccttgctctgtttttgcttttgtgcttaggcaagtgcaaaatactctatggaaatcataattgtcatcttcttcatggtgttagggatatattgtcacatgatttcaataaatcctt

SEQ ID NO: 229791 - DNA, 792 bp, Artificial Sequence
  derived and/or modified sequence
atgatgcccaagcactgcttcctgggcttcctgatctccttcttcctgactggagtggccggcacccagagcacccatgagagcctgaagccccagagggtgcagttccagagcaggaacttccacaacatcctgcagtggcagcccggccgggccctgaccggcaacagctctgtgtactttgtgcagtacaagatcatgttcagctgcagcatgaagagcagccaccagaagcccagcggctgctggcagcacatcagctgcaacttccctggctgcaggaccctggccaagtatggccagaggcagtggaagaacaaggaggactgctggggcacccaggagctgagctgtgacctgaccagcgagaccagtgacatccaggagccctactacggccgggtgcgggccgccagcgctggcagctacagcgagtggagcatgaccccccgcttcaccccctggtgggagaccaagattgacccccctgtgatgaacatcacccaggtgaatggcagcctgctggtgatcctgcacgcccccaacctgccctaccgctaccagaaggagaagaatgtgtccattgaggactactatgagctgctgtacagagtcttcatcatcaacaacagcctggagaaggagcagaaggtgtatgaaggagcccacagagctgtggagattgaggccctgaccccccacagcagctactgtgtggtggccgagatctaccagcccatgctggaccggcgcagccagaggtctgaggagcgctgtgtggagatcccctag

SEQ ID NO: 229792 - DNA, 792 bp, Artificial Sequence
  derived and/or modified sequence
atgatgcccaagcactgcttcctgggcttcctgatcagcttcttcctcacaggggtagcgggaactcagtccacacacgagtccttgaaacctcaaagggttcaattccagtcccgcaattttcacaatatccttcagtggcagcccggtcgcgccctcaccggaaacagttccgtgtattttgtccaatacaagattatgttctcttgcagcatgaagagctctcaccagaagccgtcgggctgttggcagcacatttcgtgtaattttcctggttgtcggacactggcgaaatacggacaaagacagtggaaaaacaaggaagattgttggggcacccaggagttgagctgcgacctgacctcagagacatccgacatccaagagccatactacggccgagtccgggccgccagcgccggaagctactctgagtggtctatgacacctcgctttacaccatggtgggaaaccaaaatcgacccgcccgtgatgaatattacgcaggtgaacggttccttactggtgatcctacacgctccaaatttaccctaccggtaccagaaggaaaagaatgtcagtatcgaagattattatgaacttctgtaccgggtgtttattatcaataacagcctcgaaaaagagcagaaagtgtacgagggcgcccacagggccgtggagatcgaggccctgacacctcattcttcgtattgtgtggtagccgaaatctaccaacccatgcttgaccgccgtagccagaggtccgaggagcgatgcgtcgaaataccttag

SEQ ID NO: 229793 - DNA, 792 bp, Artificial Sequence
  derived and/or modified sequence
atgatgcctaaacactgcttcctgggatttctgataagtttttttctgaccggcgtggcaggaacccagagtacacacgagtctctcaaaccacagcgcgttcagtttcagtctcggaacttccacaatatcctgcaatggcagccagggagagctctgaccggcaattcttccgtatatttcgttcagtacaaaattatgttctcctgctcgatgaagtccagtcatcagaagccgtccggatgctggcagcacatctcatgcaattttcccggttgcagaacccttgcaaagtacggtcagcgccaatggaagaataaggaagactgttggggcacacaagagctctcctgtgacctaacctcggaaactagtgacatccaagaaccatattatgggagggtgcgagccgcaagcgccggttcctactctgaatggtctatgacaccgaggtttaccccgtggtgggagactaagatcgatccacccgtgatgaacatcacccaggtcaacggcagcctgttggtaattctccacgccccaaatctgccttaccggtaccaaaaggagaagaacgttagtatcgaagactattatgagttactttacagagtgtttattatcaacaattccttagagaaggaacagaaggtgtatgagggtgctcaccgcgctgtggaaatcgaggccctgacaccacactcatcatattgcgtggtggccgagatctatcaaccgatgctggaccgaaggagtcagcgctctgaggagcgatgtgtcgagatcccctag

SEQ ID NO: 229794 - DNA, 792 bp, Artificial Sequence
  derived and/or modified sequence
atgatgcccaagcactgcttcctgggcttcctgatcagcttcttcctgaccggcgtggccggcacccagagcacccacgagagcctgaagccccagagagtgcagttccagagcagaaacttccacaacatcctgcagtggcagcccggcagagccctgaccggcaacagcagcgtgtacttcgtgcagtacaagatcatgttcagctgcagcatgaagagcagccaccagaagcccagcggctgctggcagcacatcagctgcaacttccccggctgcagaaccctggccaagtacggccagagacagtggaagaacaaggaggactgctggggcacccaggagctgagctgcgacctgaccagcgagaccagcgacatccaggagccctactacggcagagtgagagccgccagcgccggcagctacagcgagtggagcatgacccccagattcaccccctggtgggagaccaagatcgacccccccgtgatgaacatcacccaggtgaacggcagcctgctggtgatcctgcacgcccccaacctgccctacagataccagaaggagaagaacgtgagcatcgaggactactacgagctgctgtacagagtgttcatcatcaacaacagcctggagaaggagcagaaggtgtacgagggcgcccacagagccgtggagatcgaggccctgaccccccacagcagctactgcgtggtggccgagatctaccagcccatgctggacagaagaagccagagaagcgaggagagatgcgtggagatcccctag

SEQ ID NO: 229795 - DNA, 1179 bp, Artificial Sequence
  derived and/or modified sequence
atgaaccccagaggcaacagaaagaccaccaaggagggcagcaacgacctgaagttccagaacttcagcctgcccaagaacagaagctggcccagaatcaacagcgccaccggccagtaccagagaatgaacaagcccctgctggactgggagagaaacttcgccgccgtgctggacggcgccaagggccacagcgacgacgactacgacgaccccgagctgagaatggaggagacctggcagagcatcaagatcctgcccgccagacccatcaaggagagcgagtacgccgacacccactacttcaaggtggccatggacacccccctgcccctggacaccagaaccagcatcagcatcggccagcccacctggaacacccagaccagactggagagagtggacaagcccatcagcaaggacgtgagaagccagaacatcagaccccccctgagccagagacacaccttccccgaggtgcagagaatgcccagccagatcagcctgagagacctgagcgagagcctggaggccaagaaggtgccccacaaccagagaaagcccgagagcacccacctgctggagaaccagaacacccaggagatccccctggccatcagcagcagcagcttcaccaccagcaaccacagcgtgcagaacagagaccacagaggcggcatgcagccctgcagcccccagagatgccagccccccgccagctgcagcccccacgagaacatcctgccctacaagtacaccagctggagaccccccttccccaagagaagcgacagaaaggacgtgcagcacaacgagtggtacatcggcgagtacagcagacaggccgtggaggaggccttcatgaaggagaacaaggacggcagcttcctggtgagagactgcagcaccaagagcaaggaggagccctacgtgctggccgtgttctacgagaacaaggtgtacaacgtgaagatcagattcctggagagaaaccagcagttcgccctgggcaccggcctgagaggcgacgagaagttcgacagcgtggaggacatcatcgagcactacaagaacttccccatcatcctgatcgacggcaaggacaagaccggcgtgcacagaaagcagtgccacctgacccagcccctgcccctgaccagacacctgctgcccctgtag

SEQ ID NO: 229796 - DNA, 510 bp, Artificial Sequence
  derived and/or modified sequence
atgaacaagcccctgctggactgggagagaaacttcgccgccgtgctggacggcgccaagggccacagcgacgacgactacgacgaccccgagctgagaatggaggagacctggcagagcatcaagatcctgcccgccagacccatcaaggagagcgagtacgccgacacccactacttcaaggtggccatggacacccccctgcccctggacaccagaaccagcatcagcatcggccagcccacctggaacacccagaccagactggagagagtggacaagcccatcagcaaggacgtgagaagccagaacatcaagggcgacgccagcgtgagaaagaacaagatccccctgcccccccccagacccctgatcaccctgcccaagaagtaccagcccctgccccccgagcccgagagcagcagaccccccctgagccagagacacaccttccccgaggtgcagagaatgcccagccagatcagcctgagagacctgagcgagccctag

SEQ ID NO: 229797 - DNA, 1287 bp, Artificial Sequence
  derived and/or modified sequence
atgaacagacagggcaacagaaagaccaccaaggagggcagcaacgacctgaagttccagaacttcagcctgcccaagaacagaagctggcccagaatcaacagcgccaccggccagtaccagagaatgaacaagcccctgctggactgggagagaaacttcgccgccgtgctggacggcgccaagggccacagcgacgacgactacgacgaccccgagctgagaatggaggagacctggcagagcatcaagatcctgcccgccagacccatcaaggagagcgagtacgccgacacccactacttcaaggtggccatggacacccccctgcccctggacaccagaaccagcatcagcatcggccagcccacctggaacacccagaccagactggagagagtggacaagcccatcagcaaggacgtgagaagccagaacatcaagggcgacgccagcgtgagaaagaacaagatccccctgcccccccccagacccctgatcaccctgcccaagaagtaccagcccctgccccccgagcccgagagcagcagaccccccctgagccagagacacaccttccccgaggtgcagagaatgcccagccagatcagcctgagagacctgagcgaggtgctggaggccgagaaggtgccccacaaccagagaaagcccgagagcacccacctgctggagaaccagaacacccaggagatccccctggccatcagcagcagcagcttcaccaccagcaaccacagcgtgcagaacagagaccacagaggcggcatgcagccctgcagcccccagagatgccagccccccgccagctgcagcccccacgagaacatcctgccctacaagtacaccagctggagaccccccttccccaagagaagcgacagaaaggacgtgcagcacaacgagtggtacatcggcgagtacagcagacaggccgtggaggaggccttcatgaaggagaacaaggacggcagcttcctggtgagagactgcagcaccaagagcaaggaggagccctacgtgctggccgtgttctacgagaacaaggtgtacaacgtgaagatcagattcctggagagaaaccagcagttcgccctgggcaccggcctgagaggcgacgagaagttcgacagcgtggaggacatcatcgagcactacaagaacttccccatcatcctgatcgacggcaaggacaagaccggcgtgcacagaaagcagtgccacctgacccagcccctgcccctgaccagacacctgctgcccctgtag

SEQ ID NO: 229798 - DNA, 1944 bp, Artificial Sequence
  derived and/or modified sequence
atgaatcccaggggcaatagaaagacaactaaagaaggatccaacgatttgaaattccagaacttcagtctgccaaaaaacaggtcatggcctcgcatcaatagtgccacaggccagtaccagaggatgaacaagcctcttctagactgggaaagaaactttgctgcagtcctggatggagcaaaaggccacagtgatgatgactatgatgaccctgagcttcggatggaagagacatggcagtcgattaaaattttaccagcccggcctataaaggaatctgaatatgcagatacacactatttcaaggttgcaatggacactccccttccgttagacaccaggacctctatctccattggacagccgacctggaacacacagacgaggttggaaagagtggacaaacccatttccaaggacgtcagaagccaaaacatcaggccacctttatctcagagacacacctttccagaagtccagagaatgcccagtcagataagcttaagggacttaagtgagtccttggaagcaaagaaagttcctcataaccagaggaagcctgaatcaactcatctgttagaaaaccaaaatactcaagagattccacttgccattagcagttcttcattcacgacaagcaaccacagtgtgcaaaacagagatcatagaggaggcatgcagccctgttctcctcagagatgccagcctccagccagctgcagccctcacgaaaatatactgccctataaatacacaagctggagaccacctttccccaaaaggtctgatagaaaggatgtccagcacaatgaatggtacattggagaatacagccgccaggcagtggaagaggcattcatgaaggagaacaaggatggtagtttcttggtccgagattgttccacaaaatccaaggaagagccctatgttttggctgtgttttatgagaacaaagtctacaatgtaaaaatacgcttcctggagaggaatcagcagtttgccctggggacaggactcagaggagatgagaagtttgattcagtagaagacatcatcgaacactacaagaattttcccattatactaattgatgggaaagataaaactggggtccacaggaaacagtgtcacctcactcagccactccctctcaccagacacctcttgcctctgtagcctggtctttgtgttatctttggtttactggattcagcgcttccattgttttcattgatttcaaaagtttattttctgtgccttcaagggacaacttttttaactttggagaaaagaaaaacactctataacagagagtggaaaatcactcacggttttgaaagttcaaaccacagagaaaatatttataacatgcaaaaaataaaaacattctagtaactggccactggaaaataaataaaaataaaaactagggttttaaaagtatcttctaaaaaacaacaacaaaaaatactataaacatagccattatgctcatgatacaggcgagcagcaaagggcaccagaagctgttgcttaaatgtttgcagtcagtgcaagacaagtctatgggaaattcccaaatctgtgctctttacaggacactgcgctgcctttatgtcagttgttgggccttacatatatacaatgtgtggatgatttcttacactaaagatgctgggctgggtgcggtgcctcatgcctgtaatcccagcactttgggaggctgaggtggacagatcacgaggtcaggagatcaagaccatcctggctaacatggtgaaaccccatgtctactaaaaatacaaaaaatcagctgggcgtggtggtgggtgcctgtagtcccagctactcgggaggctgaggcaggagaatggtgtgaacccgggaggcggagcttgcagtgagccgaaatcgcgccactgcactccaatccagcctggg

SEQ ID NO: 229799 - DNA, 1143 bp, Artificial Sequence
  derived and/or modified sequence
gacaaagtcatgccagtccttccatactggcagttttaatttttacgaaaccacattcttcacgatgcctgatgctgtgcagaagagcgtagtctagaagaaagaacacggattttggagacaggcattcctctcaaccccaaacctgccatctcctagccatgtaactttggacaaggggcaatagaaagacaactaaagaaggatccaacgatttgaaattccagaacttcagtctgccaaaaaacaggtcatggcctcgcatcaatagtgccacaggccagtaccagaggatgaacaagcctcttctagactgggaaagaaactttgctgcagtcctggatggagcaaaaggccacagtgatgatgactatgatgaccctgagcttcggatggaagagacatggcagtcgattaaaattttaccagcccggcctataaaggaatctgaatatgcagatacacactatttcaaggttgcaatggacactccccttccgttagacaccaggacctctatctccattggacagccgacctggaacacacagacgaggttggaaagagtggacaaacccatttccaaggacgtcagaagccaaaacattaaaggagatgcatccgtaagaaagaacaagattcctttaccacctcctcggcctctcataacacttccgaagaagtaccaacccttgccccctgagccggagagcagcaggccacctttatctcagagacacacctttccagaagtccagagaatgcccagtcagataagcttaagggacttaagtgagccataaaatagggatgggggccaggtgcagtggctcacgcctgtaatcccagcactttgggaggccgaggtgggcggatcacctgaggtcaggggttcaagatcagcctgaccaacatgaagaaaccccatctctacaaaaaatacaaaattagccaggtgtggtggcgcatgcctgtaatcccagccacgctactcgggaggctgaggaaggagaatcgcttgaacccaggaggcagaggttacggtgagccaagatcatgccattgtactccagcttgggcaacaagagcgaagctccatctcaaaataaataaattaattaaataaataaaaataaaataaaa

SEQ ID NO: 229800 - DNA, 1179 bp, Artificial Sequence
  derived and/or modified sequence
atgaaccctcggggcaataggaaaaccacaaaagagggctccaacgatttgaagtttcagaatttttccttacccaaaaacaggagctggcctcgtatcaattccgccacaggccagtatcagcggatgaacaaaccactgctcgactgggaaaggaactttgccgcggtgttggacggcgccaagggccattcagatgacgactacgatgacccagaacttagaatggaggaaacttggcagtctattaaaattcttccagcccgaccaattaaagagtctgagtacgctgatacacattacttcaaggtggctatggacactcctttaccgctggacacgagaacgagtatcagtatcgggcaaccaacctggaatacccagaccagactggagcgcgtcgacaagcctatcagtaaggatgtgcgctcccagaacatccggcctcctctgtctcagagacataccttccccgaggtccagaggatgccctctcaaatcagcttgcgggatctttccgagagcctggaggcaaaaaaggtgccacacaaccagagaaaacctgagtccactcatcttctcgagaaccaaaacacccaggagatccctctggccatatcctctagtagctttaccacctccaatcactcggtacagaaccgcgaccaccgcggtggtatgcagccatgttcacctcagcgctgccagccccccgccagttgctcccctcacgaaaatatactgccatataaatatacgtcgtggcggccccccttcccaaagcgaagcgacaggaaggacgtgcagcacaatgagtggtacatcggtgaatattcccgccaggcggtcgaagaagcattcatgaaggagaataaagatggtagtttcctggtgagggactgttccaccaagagtaaggaggaaccctacgtgctggccgtcttttatgagaataaggtgtataatgtcaaaatccgcttcctggaacgcaaccagcaattcgccttaggaacaggcctcagaggcgatgagaagttcgattctgtcgaggacatcatcgagcattacaagaactttcctatcattctcatcgatgggaaagataagacgggggtgcacaggaagcagtgccacctgactcagcccctgccactcactcgccatctgcttcctctgtag

SEQ ID NO: 229801 - DNA, 510 bp, Artificial Sequence
  derived and/or modified sequence
atgaacaaacccttgctcgactgggaacggaattttgccgccgttctagacggtgctaaaggccattccgatgacgattacgatgatccagaattgagaatggaagagacgtggcaatctataaagatcctgcccgctagaccgattaaggagtctgagtacgctgacacgcactactttaaagtagccatggatacacccctgcccttggacaccagaaccagcataagtatcggacagccaacctggaacacacaaacaagactagaaagagtggacaagccaatcagcaaagatgtgcgctcacagaatattaaaggcgacgccagcgtgagaaagaataaaattcctctccctcctccacgaccattgattaccctgcccaaaaaataccaaccgctgcctcccgagccggaaagtagcagacccccgctgtctcagcgtcataccttccccgaggtacagcggatgccttctcagatctctctgcgggatctgagcgagccttag

SEQ ID NO: 229802 - DNA, 510 bp, Artificial Sequence
  derived and/or modified sequence
atgaataaacctctcctggattgggagcgaaacttcgctgccgtcttagatggcgcaaaaggccattcggatgatgattatgatgatcccgagctgcggatggaagaaacctggcaatccattaaaatcctgccagcgagaccaattaaagagagcgaatacgccgacactcactactttaaagtggcgatggacactcccctccctctcgacacgcgaacttcaatatctatcggacagcctacatggaacacacagacccggctcgaacgggttgacaaaccaatttctaaagatgttagatctcagaacataaagggagacgccagcgtgagaaagaacaagatcccactaccgccccccaggcctttaatcacactgcccaagaaataccagcccctccctcctgaaccagaatccagcaggccaccactgtcccagcgacacactttccccgaggtgcagcgcatgccctctcagattagtctcagagacctgagcgaaccgtag

SEQ ID NO: 229803 - DNA, 1287 bp, Artificial Sequence
  derived and/or modified sequence
atgaataggcagggaaatcggaagaccacgaaggagggctctaacgatctcaagtttcagaacttttccctgcccaagaaccgatcttggcctagaatcaattccgccaccggacagtatcaacggatgaacaaacccctgttggattgggagcggaactttgcagctgtactcgacggcgcaaaaggacactcagacgacgactacgatgatcctgaactgagaatggaggaaacttggcagagcattaaaattctcccagctagaccaattaaggaatctgagtacgcagacacacattatttcaaggtggcaatggatacacccctccccctagatacaagaacctcaatttctattggtcagcccacttggaatactcagactaggctagagagagtggacaaaccaatcagtaaggacgtgaggagtcagaacataaagggcgacgccagcgttaggaaaaacaagatacccctacctcctcctaggcctttgatcacattgccgaagaaataccaacccctaccacccgaacctgaaagtagtcgcccgcccctgtcccagcggcatacattccctgaggtacaacggatgccttcccagatctctttacgggacctgtcggaagtgttggaagcagaaaaagtaccccacaaccagaggaagcccgagtctacccatttgctcgaaaaccagaatacacaggaaatcccgctggccatctccagctcctcttttacaacttcaaatcactctgttcagaacagggaccacagaggtggcatgcaaccatgctccccgcagcgctgtcagccaccggcctcatgttccccacatgaaaacatcctgccttataagtatacttcctggaggcccccttttcctaagcggagcgacagaaaggacgtccagcataatgagtggtacataggggagtactcacgacaggccgtggaagaggccttcatgaaggagaataaagacggctcatttttggttcgcgactgtagcaccaaatccaaggaagaaccctacgtcctggccgtgttctatgagaataaggtctataatgtaaagatccgattcctggaacggaaccagcaattcgcactcggtaccggcttaaggggtgacgaaaagtttgatagcgttgaagatatcatcgaacactacaagaactttcctatcattcttatagacggcaaggacaaaaccggggtgcacaggaagcagtgccacctaacccagccactaccattgacacgtcatcttttgccactgtag

SEQ ID NO: 229804 - DNA, 1179 bp, Artificial Sequence
  derived and/or modified sequence
atgaacccccggggcaacaggaagaccaccaaggagggcagcaatgacctgaagttccagaacttcagcctgcccaagaacagatcctggccccgcatcaacagcgccaccggccagtaccagaggatgaacaagcccctgctggactgggagaggaactttgctgctgtgctggatggagccaagggccacagtgatgatgattatgatgatcctgagctgaggatggaggagacctggcagagcatcaagatcctgcctgcccggcccatcaaggagagtgaatatgctgacacccactacttcaaggtggccatggacacccccctgcccctggacaccaggaccagcatcagcatcggccagcccacctggaacacccagacccggctggagcgggtggacaagcccatcagcaaggatgtgcgcagccagaacatccggccccccctgagccagaggcacaccttccctgaggtgcagaggatgcccagccagatcagcctgcgggacctgtctgagagcctggaggccaagaaggtgccccacaaccagaggaagccagagagcacccacctgctggagaaccagaacacccaggagatccccctggccatcagcagcagcagcttcaccaccagcaaccacagcgtgcagaacagagaccacagaggaggcatgcagccctgcagcccccagcgctgccagcccccagccagctgcagcccccatgagaacatcctgccctacaagtacacctcctggaggcctcccttccccaagagaagtgacaggaaggatgtgcagcacaatgagtggtacatcggggagtacagccggcaggccgtggaggaggccttcatgaaggagaacaaggatggcagcttcctggtgcgggactgcagcaccaagagcaaggaggagccctacgtgctggccgtgttctatgagaacaaggtgtacaacgtgaagatccgcttcctggagaggaaccagcagtttgccctgggcaccggcctgcggggagatgagaagtttgacagcgtggaggacatcatcgagcactacaagaacttccccatcatcctgattgatggcaaggacaagacaggagtgcacaggaagcagtgccacctgacccagcccctgcccctgaccaggcacctgctgcccctgtag

SEQ ID NO: 229805 - DNA, 510 bp, Artificial Sequence
  derived and/or modified sequence
atgaacaagcccctgctggactgggagaggaactttgctgctgtgctggatggagccaagggccacagtgatgatgattatgatgatcctgagctgaggatggaggagacctggcagagcatcaagatcctgcctgcccggcccatcaaggagagtgaatatgctgacacccactacttcaaggtggccatggacacccccctgcccctggacaccaggaccagcatcagcatcggccagcccacctggaacacccagacccggctggagcgggtggacaagcccatcagcaaggatgtgcgcagccagaacatcaagggagatgcctctgtgaggaagaacaagatccccctgcccccaccccggcccctcatcaccctgcccaagaagtaccagcccctgcccccagagcctgagagcagcaggcctcccctgagccagaggcacaccttccctgaggtgcagaggatgcccagccagatcagcctgcgggacctgtctgagccctag

SEQ ID NO: 229806 - DNA, 1287 bp, Artificial Sequence
  derived and/or modified sequence
atgaaccggcagggcaacaggaagaccaccaaggagggcagcaatgacctgaagttccagaacttcagcctgcccaagaacagatcctggccccgcatcaacagcgccaccggccagtaccagaggatgaacaagcccctgctggactgggagaggaactttgctgctgtgctggatggagccaagggccacagtgatgatgattatgatgatcctgagctgaggatggaggagacctggcagagcatcaagatcctgcctgcccggcccatcaaggagagtgaatatgctgacacccactacttcaaggtggccatggacacccccctgcccctggacaccaggaccagcatcagcatcggccagcccacctggaacacccagacccggctggagcgggtggacaagcccatcagcaaggatgtgcgcagccagaacatcaagggagatgcctctgtgaggaagaacaagatccccctgcccccaccccggcccctcatcaccctgcccaagaagtaccagcccctgcccccagagcctgagagcagcaggcctcccctgagccagaggcacaccttccctgaggtgcagaggatgcccagccagatcagcctgcgggacctgtctgaggtgctggaggccgagaaggtgccccacaaccagaggaagccagagagcacccacctgctggagaaccagaacacccaggagatccccctggccatcagcagcagcagcttcaccaccagcaaccacagcgtgcagaacagagaccacagaggaggcatgcagccctgcagcccccagcgctgccagcccccagccagctgcagcccccatgagaacatcctgccctacaagtacacctcctggaggcctcccttccccaagagaagtgacaggaaggatgtgcagcacaatgagtggtacatcggggagtacagccggcaggccgtggaggaggccttcatgaaggagaacaaggatggcagcttcctggtgcgggactgcagcaccaagagcaaggaggagccctacgtgctggccgtgttctatgagaacaaggtgtacaacgtgaagatccgcttcctggagaggaaccagcagtttgccctgggcaccggcctgcggggagatgagaagtttgacagcgtggaggacatcatcgagcactacaagaacttccccatcatcctgattgatggcaaggacaagacaggagtgcacaggaagcagtgccacctgacccagcccctgcccctgaccaggcacctgctgcccctgtag

SEQ ID NO: 229807 - DNA, 1179 bp, Artificial Sequence
  derived and/or modified sequence
atgaacccccggggcaaccggaagaccaccaaggagggcagcaacgacctcaagttccagaacttctcactgcctaaaaataggagctggcctaggattaacagcgcaacaggccaataccagcgcatgaacaaacccctgttagattgggagagaaatttcgccgccgttctcgacggggctaaaggacacagcgacgacgattacgacgatcccgagctgcgtatggaagaaacatggcagtctatcaagatattgccggcccggcccatcaaagaaagcgagtatgccgatactcactactttaaggttgccatggacacaccccttccgctcgacacgcgcacgagtatctcaatcggacaacccacttggaatacacaaaccaggctggagcgggtggataaacccattagcaaggatgttaggtcacaaaatattaggccacctctgagccagcgacacactttccccgaagtccaaagaatgccgagccagatctccctcagagatctgtccgaatcccttgaggctaagaaagttccccacaaccagaggaaaccagaatccacccatctcctcgaaaaccaaaatacacaggagatccctttggcaattagctcgagttcctttaccacaagtaaccacagcgtgcagaatagggaccatcgtggaggaatgcagccttgtagcccccagaggtgtcaacctcccgcctcctgctccccccatgaaaatattttgccttataaatatactagttggagacccccattccctaaacggagtgaccggaaggatgtgcagcacaatgaatggtacatcggcgagtacagcagacaagccgttgaagaggcatttatgaaggagaataaagatggttcttttttggtgagagattgcagcactaagtcaaaagaggagccatacgtgctggccgtcttctacgaaaacaaggtttataacgtgaagataagattcctggagcgaaaccagcaatttgccttgggcactgggctgaggggcgatgaaaagttcgatagcgtggaggacataatcgaacactataaaaattttccgattatcctgatagacggcaaggacaaaactggggttcaccgcaagcagtgccacctgacccagccccttcctctcactaggcacctgttgccactgtag

SEQ ID NO: 229808 - DNA, 510 bp, Artificial Sequence
  derived and/or modified sequence
atgaacaagcccctgctggactgggagcggaacttcgccgccgtgctggacggcgccaaagggcattccgacgacgactatgacgacccagaactgcgaatggaggagacgtggcagagcattaaaattctgccagctaggcctatcaaggagagtgaatatgcagatacacactattttaaggtcgcgatggatacccccctccctctggacacccgcacttcgatatctataggtcagccaacctggaacacacaaacgaggctggagcgggtggacaaaccaatctcaaaagatgtgcgttctcagaatattaagggcgatgcctccgtacgaaagaataaaatcccactgccccctccccgcccattaataacacttcctaagaagtaccaacctcttccaccagaacctgagagctcaaggcctccactgtcccagcggcacaccttcccagaagtgcagcggatgccttctcagatcagcttgagggatttatccgaaccgtag

SEQ ID NO: 229809 - DNA, 510 bp, Artificial Sequence
  derived and/or modified sequence
atgaacaagcccctgctggactgggagcggaacttcgccgccgtgctagatggcgctaagggtcattccgatgatgattacgatgatccagagttgcgaatggaagagacttggcagtcaataaaaattctgcccgctagacccataaaagagagcgaatacgcagacactcattactttaaagtggctatggacacccccctcccccttgacaccagaacctcaattagtattggccaacctacctggaacacccaaacaagactggagagagttgacaagcccatttctaaagacgttaggagccagaatatcaagggggacgcaagtgttcggaaaaataagatccccctcccacccccaaggccactcataacattgccaaagaagtaccaaccgctgcctccggaaccagagagttcccggccgcctctgagtcagagacatacctttccagaggtccagaggatgccctctcagatttccttacgagacttgtccgagccttag

SEQ ID NO: 229810 - DNA, 1287 bp, Artificial Sequence
  derived and/or modified sequence
atgaaccggcagggcaaccggaagaccaccaaggagggcagcaacgatctcaagttccagaatttctccctcccaaagaaccggagttggccgaggatcaactcagcgacgggacagtatcagcgcatgaataagccactgctagattgggagcgaaatttcgctgcagtgctcgatggtgccaaagggcatagcgatgatgactacgatgacccagaactgagaatggaggaaacttggcaatccatcaagattttgcctgcaagaccaattaaggaaagtgagtacgctgatacccattactttaaagtagccatggacacccccctgcccttggacacaaggactagcatctccatagggcagccgacatggaatacgcagacaagacttgaaagagtagataagccgattagcaaggacgtgcggtctcagaatattaaaggggatgcatccgtgaggaagaataagatccctctcccaccccccagacccctcattaccctgccaaaaaaataccaaccccttcctccagagcccgagagtagtcggccccctctgtctcagcgtcatacttttccggaagttcaaagaatgccttcccagatcagtctgagagacctctcagaggtgctagaagctgagaaagtgccacacaaccagcggaagcccgaatccacacacctattggagaatcagaatacacaggaaatacccctcgcaatcagcagtagctcgtttactacctctaaccacagtgttcagaacagagatcaccggggagggatgcagccatgctctcctcagcgctgccagccgcctgcatcctgttctcctcatgaaaatattctgccttacaaatataccagttggaggcccccgtttcccaagcgctctgatcgcaaagatgtccagcataacgaatggtatattggagaatattcacgccaggccgtcgaagaagcgtttatgaaggagaataaagatggatctttcctagtacgagattgtagcactaaatcaaaggaggaaccgtacgtattagcagtcttctacgaaaataaggtctacaatgtgaaaattcgctttctagagaggaaccagcagttcgccctaggaacaggcctgcgcggggatgagaaattcgactccgttgaagacataatagaacactacaagaacttcccgatcatactcattgacggaaaggacaaaaccggagtccacagaaaacagtgccatctgactcagcctctccctctcactcgtcatctgctgcctctctag

SEQ ID NO: 229811 - DNA, 1179 bp, Artificial Sequence
  derived and/or modified sequence
atgaatccaaggggcaaccgaaagacaaccaaggaaggctctaacgacctgaaatttcagaatttctcactccctaagaatcgaagctggcctcgcattaatagtgctactggacagtatcagaggatgaataagccgctactcgattgggaacgcaattttgctgccgttctggatggtgcgaagggccattcggatgacgattatgacgacccagaactgcgaatggaggaaacttggcagagcatcaaaatattacccgcacggcctatcaaggagtctgagtacgccgatactcactattttaaagtggcaatggatacacccctccccctggataccagaacaagcatttccattggccagcctacatggaacacacagactcgactggaaagagttgacaagcccatctccaaggacgtaagatcacaaaatataaggccacccttgtcccaaaggcacactttcccggaagttcaacgcatgcctagtcaaattagtctgcgcgacctatctgagtcccttgaggccaaaaaagtcccccacaaccagcgcaagcccgaatcaactcatcttctggaaaatcagaatacccaggagatcccactggcgataagctcctccagcttcacaactagcaaccatagtgtccagaaccgagaccatagaggaggaatgcagccatgctcgcctcagaggtgccagccccctgccagttgctcgccccacgagaatattctaccttacaaatacacaagctggaggccgccatttccaaaacgaagtgatcggaaggacgtgcagcacaacgagtggtatataggagagtactcacgacaggcagtggaggaagccttcatgaaagaaaacaaggacggctctttcctggtgcgggactgttccaccaaatcgaaagaagagccatacgtgctcgccgtgttctacgagaataaagtgtataatgtaaagattaggtttcttgagaggaaccagcagttcgccctgggcactggcctgcggggagatgagaagttcgactccgtggaagatattattgagcactacaaaaattttcctatcatcttgatcgatggcaaagataagaccggagttcacagaaaacagtgtcacctcacccagccgctccccctaactcgacatctcctccccctctag

SEQ ID NO: 229812 - DNA, 510 bp, Artificial Sequence
  derived and/or modified sequence
atgaataagccgctgctcgattgggagagaaacttcgccgcagttcttgatggcgcaaaaggccattccgatgacgactacgacgatccagagctgaggatggaagagacttggcagtccataaagatcttgcctgctaggccaatcaaggagtccgaatatgcagacacacattactttaaagtcgcaatggacacgccactgccgctggatacacggacttctatcagcattggccagcctacttggaacacccagactcggttagaaagagtcgacaagcccatcagtaaggacgtccgaagccagaatatcaagggggacgcaagcgtgagaaaaaataaaatccccctcccgcctccgcgtcccctgattaccctgccaaaaaaatatcagccactcccccctgaaccagagagctctcgcccacctctgtcacagaggcacacgttcccagaagtgcagagaatgcctagccaaatatcgttaagagacctgagcgagccctag

SEQ ID NO: 229813 - DNA, 510 bp, Artificial Sequence
  derived and/or modified sequence
atgaacaaacctctcttggactgggaaagaaactttgccgctgtcctggacggcgctaagggacatagcgacgacgactatgatgacccagagctacgcatggaggagacctggcagtctataaagattctgcccgctcgcccaatcaaggagtctgaatatgctgatactcattatttcaaggttgcaatggatacaccgctgccactagacacccggactagtatttccatcggtcagcccacttggaacacacagactcgcctcgagagggttgataagcccatttcgaaagacgtgcgttcacagaatatcaagggcgatgcctcagtaaggaagaataaaatccccctccctcctccaagacctctgataaccttacccaaaaagtatcaacctctgccacctgagcccgagtccagtaggcccccactttcccagcgacacacctttccagaagtgcaaagaatgcccagccagatctccctgcgagatttgtccgaaccttag

SEQ ID NO: 229814 - DNA, 1287 bp, Artificial Sequence
  derived and/or modified sequence
atgaaccgccaggggaatcgcaaaaccaccaaagaagggtccaatgacctgaagttccaaaatttcagcctgcctaaaaatagaagctggccccgaattaactcagccacaggccagtaccaacggatgaacaaaccactgcttgactgggaacgaaactttgcggctgtcctcgatggagccaagggccatagcgacgacgattacgacgaccctgaattgaggatggaggaaacttggcagagcatcaagatcctgcccgctcgtcctattaaagagagtgagtacgccgacacccactacttcaaggtcgcgatggatactcctctccctctggatacacggactagcatctccattggacagcctacctggaatacacagaccagactggagcgagtggacaagcccatatcaaaggacgttaggagccaaaatatcaaaggcgatgcaagcgtccgaaagaataagatccctttgcctcctcccagaccactgattacactccccaagaagtaccagccactccctccggagcctgagagttccagacctccactcagccagagacacacatttcccgaggtccagagaatgcccagccagatctcccttcgcgacctgtctgaggtcctggaggccgagaaggtacctcataatcaacggaagcccgagagcacccacctactcgaaaatcagaatacccaggaaattccgcttgctatcagctcttcctctttcacaacgtccaaccatagtgtgcaaaatcgggaccaccgaggaggaatgcagccttgttccccacagcgatgccagccgccagctagttgctctcctcatgaaaacattctgccatataagtacacatcatggagaccaccgtttccaaagcgatccgatcgtaaagacgtccagcacaatgagtggtacatcggagaatacagtagacaggccgttgaggaggcatttatgaaagagaataaggatggaagcttcctggtgagggattgcagtacgaagagtaaggaggaaccatacgttctggcagtgttttacgagaacaaagtctacaacgttaaaatccggtttcttgagagaaatcagcagtttgccctgggaacaggtcttagaggagatgagaaatttgacagtgttgaagacattatcgaacactataagaattttccaatcatcctgatcgatggaaaagacaaaactggcgtccatagaaagcagtgtcatttaacgcagccgctccccctcaccaggcacctgcttcccctgtag

SEQ ID NO: 229815 - protein, 928 aa, Artificial Sequence
  derived and/or modified sequence
MGGSASSQLDEGKCAYIRGKTEAAIKNFSPYYSRQYSVAFCNHVRTEVEQQRDLTSQFLKTKPPLAPGTILYEAELSQFSEDIKKWKERYVVVKNDYAVESYENKEAYQRGAAPKCRILPAGGKVLTSEDEYNLLSDRHFPDPLASSEKENTQPFVVLPKEFPVYLWQPFFRHGYFCFHEAADQKRFSALLSDCVRHLNHDYMKQMTFEAQAFLEAVQFFRQEKGHYGSWEMITGDEIQILSNLVMEELLPTLQTDLLPKMKGKKNDRKRTWLGLLEEAYTLVQHQVSEGLSALKEECRALTKGLEGTIRSDMDQIVNSKNYLIGKIKAMVAQPAEKSCLESVQPFLASILEELMGPVSSGFSEVRVLFEKEVNEVSQNFQTTKDSVQLKEHLDRLMNLPLHSVKMEPCYTKVNLLHERLQDLKSRFRFPHIDLVVQRTQNYMQELMENAVFTFEQLLSPHLQGEASKTAVAIEKVKLRVLKQYDYDSSTIRKKIFQEALVQITLPTVQKALASTCKPELQKYEQFIFADHTNMIHVENVYEEILHQILLDETLKVIKEAAILKKHNLFEDNMALPSESVSSLTDLKPPTGSNQASPARRASAILPGVLGSETLSNEVFQESEEEKQPEVPSSLAKGESLSLPGPSPPPDGTEQVIISRVDDPVVNPVATEDTAGLPGTCSSELEFGGTLEDEEPAQEEPEPITASGSLKALRKLLTASVEVPVDSAPVMEEDTNGESHVPQENEEEEEKEPSQAAAIHPDNCEESEVSEREAQPPCPEAHGEELGGFPEVGSPASPPASGGLTEEPLGPMEGELPGEACTLTAHEGRGGKCTEEGDASQQEGCTLGSDPICLSESQVSEEQEEMGGQSSAAQATASVNAEEIKVARIHECQWVVEDAPNPDVLLSHKDDVKEGEGGQESFPELPSEE

SEQ ID NO: 229816 - protein, 100 aa, Artificial Sequence
  derived and/or modified sequence
  misc_feature (1)..(1): Xaa can be any naturally occurring amino acid
XAVAIEKVKLRVLKQYDYDSSTIRKKIFQEALVQITLPTVQKALASTCKPELQKYEQFIFADHTNMIHVENVYEEILHQILLDETLKGAYIPIKCSSLKS

SEQ ID NO: 229817 - DNA, 2787 bp, Artificial Sequence
  derived and/or modified sequence
atgggcggcagcgccagcagccagctggacgagggcaagtgcgcctacatcagaggcaagaccgaggccgccatcaagaacttcagcccctactacagcagacagtacagcgtggccttctgcaaccacgtgagaaccgaggtggagcagcagagagacctgaccagccagttcctgaagaccaagccccccctggcccccggcaccatcctgtacgaggccgagctgagccagttcagcgaggacatcaagaagtggaaggagagatacgtggtggtgaagaacgactacgccgtggagagctacgagaacaaggaggcctaccagagaggcgccgcccccaagtgcagaatcctgcccgccggcggcaaggtgctgaccagcgaggacgagtacaacctgctgagcgacagacacttccccgaccccctggccagcagcgagaaggagaacacccagcccttcgtggtgctgcccaaggagttccccgtgtacctgtggcagcccttcttcagacacggctacttctgcttccacgaggccgccgaccagaagagattcagcgccctgctgagcgactgcgtgagacacctgaaccacgactacatgaagcagatgaccttcgaggcccaggccttcctggaggccgtgcagttcttcagacaggagaagggccactacggcagctgggagatgatcaccggcgacgagatccagatcctgagcaacctggtgatggaggagctgctgcccaccctgcagaccgacctgctgcccaagatgaagggcaagaagaacgacagaaagagaacctggctgggcctgctggaggaggcctacaccctggtgcagcaccaggtgagcgagggcctgagcgccctgaaggaggagtgcagagccctgaccaagggcctggagggcaccatcagaagcgacatggaccagatcgtgaacagcaagaactacctgatcggcaagatcaaggccatggtggcccagcccgccgagaagagctgcctggagagcgtgcagcccttcctggccagcatcctggaggagctgatgggccccgtgagcagcggcttcagcgaggtgagagtgctgttcgagaaggaggtgaacgaggtgagccagaacttccagaccaccaaggacagcgtgcagctgaaggagcacctggacagactgatgaacctgcccctgcacagcgtgaagatggagccctgctacaccaaggtgaacctgctgcacgagagactgcaggacctgaagagcagattcagattcccccacatcgacctggtggtgcagagaacccagaactacatgcaggagctgatggagaacgccgtgttcaccttcgagcagctgctgagcccccacctgcagggcgaggccagcaagaccgccgtggccatcgagaaggtgaagctgagagtgctgaagcagtacgactacgacagcagcaccatcagaaagaagatcttccaggaggccctggtgcagatcaccctgcccaccgtgcagaaggccctggccagcacctgcaagcccgagctgcagaagtacgagcagttcatcttcgccgaccacaccaacatgatccacgtggagaacgtgtacgaggagatcctgcaccagatcctgctggacgagaccctgaaggtgatcaaggaggccgccatcctgaagaagcacaacctgttcgaggacaacatggccctgcccagcgagagcgtgagcagcctgaccgacctgaagccccccaccggcagcaaccaggccagccccgccagaagagccagcgccatcctgcccggcgtgctgggcagcgagaccctgagcaacgaggtgttccaggagagcgaggaggagaagcagcccgaggtgcccagcagcctggccaagggcgagagcctgagcctgcccggccccagccccccccccgacggcaccgagcaggtgatcatcagcagagtggacgaccccgtggtgaaccccgtggccaccgaggacaccgccggcctgcccggcacctgcagcagcgagctggagttcggcggcaccctggaggacgaggagcccgcccaggaggagcccgagcccatcaccgccagcggcagcctgaaggccctgagaaagctgctgaccgccagcgtggaggtgcccgtggacagcgcccccgtgatggaggaggacaccaacggcgagagccacgtgccccaggagaacgaggaggaggaggagaaggagcccagccaggccgccgccatccaccccgacaactgcgaggagagcgaggtgagcgagagagaggcccagcccccctgccccgaggcccacggcgaggagctgggcggcttccccgaggtgggcagccccgccagcccccccgccagcggcggcctgaccgaggagcccctgggccccatggagggcgagctgcccggcgaggcctgcaccctgaccgcccacgagggcagaggcggcaagtgcaccgaggagggcgacgccagccagcaggagggctgcaccctgggcagcgaccccatctgcctgagcgagagccaggtgagcgaggagcaggaggagatgggcggccagagcagcgccgcccaggccaccgccagcgtgaacgccgaggagatcaaggtggccagaatccacgagtgccagtgggtggtggaggacgcccccaaccccgacgtgctgctgagccacaaggacgacgtgaaggagggcgagggcggccaggagagcttccccgagctgcccagcgaggagtag

SEQ ID NO: 229818 - DNA, 303 bp, Artificial Sequence
  derived and/or modified sequence
tgagccgtggccatcgagaaggtgaagctgagagtgctgaagcagtacgactacgacagcagcaccatcagaaagaagatcttccaggaggccctggtgcagatcaccctgcccaccgtgcagaaggccctggccagcacctgcaagcccgagctgcagaagtacgagcagttcatcttcgccgaccacaccaacatgatccacgtggagaacgtgtacgaggagatcctgcaccagatcctgctggacgagaccctgaagggcgcctacatccccatcaagtgcagcagcctgaagagctag

SEQ ID NO: 229819 - DNA, 6928 bp, Artificial Sequence
  derived and/or modified sequence
cccacggatcatcagaaggcgcggacctggaggaggcgccccagaaggcgacgcctcttgcctcctgtctctcgcctctcgaaggaagtttgctcttaatttcagagccgggttcgccgtcggatcaacctccaggagctagcagcgggcgcggaccgggcagtttccgcgctcagcacaggcagctcgcggtcatgggcggctcagcctccagccagctggacgagggcaagtgcgcttacatccgagggaaaactgaggctgccatcaaaaacttcagtccctactacagtcgtcagtactctgtggctttctgcaatcacgtgcgcactgaagtagaacagcaaagagatttaacgtcacagtttttgaagaccaagccaccattggcgcctggaactattttgtatgaagcagagctatcacaattttctgaagacataaagaagtggaaggagagatacgttgtagttaaaaatgattatgctgtggagagctatgagaataaagaggcctatcagagaggagctgctcctaaatgtcgaattcttccagccggtggcaaggtgttaacctcagaagatgaatataatctgttgtctgacaggcatttcccagaccctcttgcctccagtgagaaggagaacactcagccctttgtggtcctgcccaaggaattcccagtgtacctgtggcagcccttcttcagacacggctacttctgcttccacgaggctgctgaccagaagaggtttagtgccctcctgagtgactgcgtcaggcatctcaatcatgattacatgaagcagatgacatttgaagcccaagcctttttagaagctgtgcaattcttccgacaggagaagggtcactatggttcctgggaaatgatcactggggatgaaatccagatcctgagtaacctggtgatggaggagctcctgcccactcttcagacagacctgctgcctaagatgaaggggaagaagaatgacagaaagaggacgtggcttggtctcctcgaggaggcctacaccctggttcagcatcaagtttcagaaggattaagtgccttgaaggaggaatgcagagctctgacaaagggcctggaaggaacgatccgttctgacatggatcagattgtgaactcaaagaactatttaattggaaagatcaaagcgatggtggcccagccggcggagaaaagctgcttggagagtgtgcagccattcctggcatccatcctggaggagctcatgggaccagtgagctcgggattcagtgaagtacgtgtactctttgagaaagaggtgaatgaagtcagccagaacttccagaccaccaaagacagtgtccagctaaaggagcatctagaccggcttatgaatcttccgctgcattccgtgaagatggaaccttgttatactaaagtcaacctgcttcacgagcgcctgcaggatctcaagagccgcttcagattcccccacattgatctggtggttcagaggacacagaactacatgcaggagctaatggagaatgcagtgttcacttttgagcagttgctttccccacatctccaaggagaggcctccaaaactgcagttgccattgagaaggttaaactccgagtcttaaagcaatatgattatgacagcagcaccatccgaaagaagatatttcaagaggcactagttcaaatcacacttcccactgtgcagaaggcactggcgtccacatgcaaaccagagcttcagaaatacgagcagttcatctttgcagatcataccaatatgattcacgttgaaaatgtctatgaggagattttacatcagatcctgcttgatgaaactctgaaagtgataaaggaagctgctatcttgaagaaacacaacttatttgaagataacatggccttgcccagtgaaagtgtgtccagcttaacagatctaaagccccccacagggtcaaaccaggccagccctgccaggagagcttctgccattctgccaggagttctgggtagtgagaccctcagtaacgaagtattccaggagtcagaggaagagaagcagcctgaggtccctagctcgttggccaaaggagaaagcctttctctccctgggccaagcccacccccagatgggactgagcaggtgattatttcaagagtggatgaccccgtggtgaatcctgtggcaacagaggacacagcaggactcccgggcacatgctcatcagagctggagtttggagggacccttgaggatgaagaacccgcccaggaagagccagaacccatcactgcctcgggttctttgaaggcgctcagaaagttgctgacagcgtccgtggaagtaccagtggactctgctccagtgatggaagaagatacgaatggggagagccacgttccccaagaaaatgaagaagaagaggaaaaagagcccagtcaggcagctgccatccaccccgacaactgtgaagaaagtgaagtcagcgagagggaggcccaacctccctgtcccgaggcccatggggaggagttggggggatttccagaggtaggcagcccagcctctccgccagccagtggagggctcaccgaggagcccctggggcccatggagggggagctcccaggagaggcctgcacactcactgcccatgaaggaagagggggcaagtgtaccgaggaaggggatgcctcacagcaagagggctgcaccttaggttctgaccccatctgcctcagtgagagccaggtttctgaggaacaagaagagatgggagggcaaagcagcgcggcccaggccacggccagtgtgaatgcagaggagatcaaggtagcccgtattcatgagtgtcagtgggtggtggaggatgctccaaacccggatgtcctgctgtcacacaaagatgacgtgaaggagggagaaggtggtcaggagagtttcccagagctgccctcagaggagtgaaagggacaatttggctgaagtctttctctgaaaaaagccaaagggttataggggtacacttaggggttgcatgcaagctgttaccaaaaaatttttaagtattttcttaatttgaataataaaaccagaggaaatgcatacagggcatgagcaactgaggcaaacctttgtggacatgaattgttctacgatgaatttttgctttagtattttaataagaattacaaagacaatggcatacttggggtgagagggagctgaggatgtctgaggagggaatagtattgcagggaagactgagaaaacagtaggatgacagttttgagtatactctgcacttttcaattgtgcaatcttcttgtgcactttaaggctttttaattttgtttgagaatgcaaatgtatactgtaagtctacctttactatctactatgcctacttcaccatctcttaaggactcggcatttgtccacagtcagactgcaagagagggtaggtcatgaacagtcacccgtgctggctgtagcccccacagaggcaatcatgcccaatagattcaagagaagctaagcggaaatggagggtggaaggtgtgatctgtgggactgtctgggcctgttactcatcctgctatcaatttcttattaattaatcttgatgattcttattaattaatcacatttgcaggaaattcagatgaggcaagaaaattttattggcctgggtaagactgaaagcattccaaattaggcttagactgtgcaaagggcttagctaagttatcgagcttaaaacccgtcaattaaacaaacattatttgaacagttactgcatgccacgcactgtgttgggcttagtaataaaaaaaagaaaagataagtgcttgttctagcataaattaaaaggtccaagggaatttaatctggaagagaacatatgccaatttttaaactatgacagcttttttttttctctttccattcaaatagtcctggttcattcccagaagggcacaaaatgaatgaataaataaataaatgaataaagacaaaagccaaggtgtatgctctcaagttccaaagatgttatcaaaagctgaaatcatttgtttggtcattcagcaagctaattgagtctctgttatataccaagcactggggataccatggcgaaaaacaactttgttccttcctcctagaacttacattttaatggaaatagacaaaacacatcttcttaacggatggtgacctataaccattaatgttgaaaatggaagagacttgcttccaaaagattaaaaggagttgttcttttctccttcagaaaaataccagatcatttcctaaaatctccagtcccaagtattacatcgtggtttccctccccgactttttattttattttattctatttttttgagatggagtctcactctgtcgccaaggctggagtgcagtggtgtgatctcggctcactgcaacctccgcctcctgggttcaggagattctcctctgtcagcgtcccaagtagctggaattacagccatgcggcaccattcccggctaatttttgtatttttggtagagatgggttttcaccatgttggccaggctggtctcaaactcctgatttcaagcgatccacccacctcgacttcccaaagtgctgggattacagcgtgagctacctggcccctccccaaattttaacatcagatctcaacatatttgttgagaacttgtttagatcatcactatcgagtaaatttatgtcagttctttagagcatttgcttcacacacagttcaaccatttaaccagaaattaaaatatcacccttttcagccctcccatgaagaatttctaggtcataaacatgaataatactcagtatatgtataatatcatatttaattgttgcaacttttcttggcgtgtttaaatcctcatgtctttgagggatcccaccacaggtgaaggaagtaaagaccacttctcccccagtctctgctttctgcagtgctcactcatatcctggcatttagcatggtgtgttgaaattaggtttacttcttgtctctccaagtggctcctctcttaaaagacagaaactagggtttagtcatcatttgtgcttcctgctagaaacccacagccttgaataatggcttcctgcctccttgagtcactttaatatccctggtgcataggacctggcatgcgtcaggctgctcgggaaatgtgggaactggacacccagaacactgctgtgctggggctatttggggcctgctgtcaggcagaaagacgttttgaattgggctttctgcccttgttgagttttctcttaagtaaagtccaaagtccaaggggcagatggccagatgcactgcccagtaaggcaggaagccaaagaggcagtgcccagccccacaaaggctgcccgactccctgggacagtagtgtggagtcccagcccaggctgacctcacaccggagcttcctagcttcctttctttgctcaatgcagggcttcttgcaccccctggaaagctaagagatttttttcaaccctaaaagagagtacctttcactgcattggatggatgaacatcagtgccctaactttatccatcatgtaggtcagggaggactgggcactatttggcaggatgtactccagaatataatcaaagaattttctgtacatatttcactaaagacaagtttttgggctggatgtggtagcttacacctataatcccagcactttgggaggctgaggtgagagggtcacttgagcccaggagttctagacaagcctgggaaacatagcaagatctcatccttacaaaaaataataatggtgtgtgcctgcagtcctagctacttgggtggttgaggcaggaggattgtttgagcgagggaagttgaggctgcagtgaactatgattttaccactgcactccagcttgggcaacaaaatgagaccctgtctcaaaaaaaaaaaaaaagttttctagaataagcaggatgattgtttaatttgaagatggaacaggaaactagagtgcatttaaaatactctgtcttcattttaacatgttgaatggaataactgcatatcaccatgagtttgttttgcttttcatacagacttgtatgtgtcatttgagtggtttccagattggagcgaggttattctgatctaaatgaacagcatttttttccttagcctctgtttgccactctgggtatctctcctatgggcaaagccattagaaatgcataaaacctcgagacatggtttttggcaaaaactccatgactttaaactagctcttttactactgacctttcacagagaaaaaatatttcccttgaaaaaaactgggcttgtcattttttcccttgtagctttaagcagagacataagtgccttgcattacacatagtaaactttctttaaaaaaaaaaaaaaaagattttggagactaccagggtaagattccaacttgtccaaaagctttctggccttacatattttattataaaaattctcaagtctggtaatcttctatgtcagagctagtgatttcaaaaggtttcacaattccccaagacaaaagtgattttcgttcattataataaggttaagtgatatgtgattcatagcaattttgatgtgaagaagggaaggacatcattgacttaataatagtatcagtcggtgcaacagttggcaacatgtgccttcacactttaccataaagagacgggtttgagggtttgccttctaaagtctgcaacttcaagaaaaaaaatcgacactgtggattgactttcccggtcactatataaagcaaataaacttaaaacactttgtaaccatgtatttactctgccaggtgcctatattccaataaaatgttcatccttgaaga

SEQ ID NO: 229820 - DNA, 602 bp, Artificial Sequence
  derived and/or modified sequence
tgcagttgccattgagaaggttaaactccgagtcttaaagcaatatgattatgacagcagcaccatccgaaagaagatatttcaagaggcactagttcaaatcacacttcccactgtgcagaaggcactggcgtccacatgcaaaccagagcttcagaaatacgagcagttcatctttgcagatcataccaatatgattcacgttgaaaatgtctatgaggagattttacatcagatcctgcttgatgaaactctgaaaggtgcctatattccaataaaatgttcatccttgaagagctgaccagatgtcatttatttggaaggaggctggtttcatcttttaagcagatgtcacatttgaattgtgaggtacagccctctgaaacgaaaaggcgagtcattcttgctgtatcatggaccttttacttttctgttgtcacgaaggaatctgcagggaaaccacttaatgtcaggtgtaattatgctttgataatgcatatgcttacgtctccaggaattggatcacattcataatacagcagtgggcaattattcttgatgtaattgaactgctgttcaaacttaaatttattttcaatggg

SEQ ID NO: 229821 - DNA, 2787 bp, Artificial Sequence
  derived and/or modified sequence
atgggaggctccgcctctagccagttagatgaaggaaagtgtgcctatatccgaggcaaaaccgaagccgctatcaagaacttctcaccctactactcccgacagtactcagttgcgttctgtaaccacgtcaggacagaggtggaacagcagcgggatctaacttctcaattcctgaaaacaaaaccgccactagctcctggtacaatcctgtatgaagctgagttgagccagttctccgaagacatcaagaagtggaaagagcgttacgttgtcgttaagaacgactacgccgtggagtcctatgagaataaagaagcatatcagaggggtgccgcacccaagtgccggattctccccgctggtgggaaagtcctgacttcagaggatgagtacaatttgctctcggatcgtcacttccctgatcctttagcctcttccgagaaggagaatacacagcctttcgttgttctgccaaaagaatttccagtctatctgtggcagcctttcttccggcacggttatttctgcttccatgaggccgcagaccaaaagcgattttcagccttgctgagcgactgtgtaagacatctaaatcacgactacatgaaacagatgaccttcgaggcacaggcattcctggaagcggtgcagttcttccggcaagaaaaaggacactatggctcctgggagatgatcacaggagacgagattcaaatcttatctaatctggtgatggaagagttgctgcccaccctgcagaccgatctgttgcccaagatgaaaggcaagaagaacgaccgtaagagaacctggctcggcttgctcgaggaggcatatacactggtgcagcatcaggtatccgagggtctctccgcgctcaaggaagaatgcagggcactaacgaaggggctggaaggtaccatccgctcagatatggaccaaattgtgaattctaagaactatctgattgggaagatcaaggcaatggtcgcgcagccggccgaaaagagttgccttgaatcagttcagccattcctggcaagtatcttggaggagttgatgggtccggtcagtagtgggttcagcgaagtgagagtgttgtttgaaaaggaggtcaacgaagtctcgcagaatttccaaacaacgaaagattctgtccagcttaaggaacatcttgatcggctcatgaatctgccgctacactccgtgaagatggagccatgctacactaaggtcaatcttctgcacgagcgccttcaggacctaaagagtcggtttcggtttccccacattgatctggttgtgcaaaggacccaaaattatatgcaggaacttatggagaacgcagtctttacgttcgaacagttactcagccctcacctccaaggcgaggcttcgaagacagcagtggctatcgagaaagtgaaactccgcgtgttgaaacagtacgactatgattcctccaccatccgaaagaaaatattccaggaggccctggtgcaaatcactctgcccaccgtgcagaaagcgctggctagcacatgcaagcctgagttacagaagtatgaacaattcattttcgcggatcatacaaacatgatccacgtggaaaacgtttatgaggagatcctgcaccagatactactcgatgaaactctgaaagtgatcaaagaggctgcaatcctcaaaaagcacaaccttttcgaggacaacatggctctccctagcgagagcgtttcatctctgacagacctaaaaccgcccaccgggtctaatcaagcaagtcctgcccgccgcgcctcggccatcctcccgggggtgttgggctctgagaccctcagtaatgaggttttccaggagagtgaagaggagaaacagcccgaagtaccttcttccttggccaaaggcgagtcattatcactccctggccccagtcctccacccgacggcaccgagcaagtcattattagccgtgtggatgacccggtggtgaaccctgtggcaaccgaggacacggccggactccctgggacctgttccagcgaactggaatttggtggaacactggaagatgaggagccagcacaggaggaaccagagccaatcaccgcctctggaagcctaaaagctcttcgtaaacttctaacagcttccgtcgaggtgcccgtggattccgctcctgtgatggaagaagacacgaatggcgagtcccatgtcccacaagagaacgaagaggaagaggaaaaggaaccttctcaggcagccgctatacatcccgataattgtgaagagtcggaagtatcagagagagaggcccagcctccttgcccagaggcccatggcgaggagttagggggatttcctgaagtgggcagtcctgccagcccccccgccagtggaggtctgaccgaggaacctcttggcccaatggagggagaactgcctggggaggcttgtacactgaccgcacatgaaggacgcgggggtaaatgcactgaggaaggtgacgcgtcgcagcaggaagggtgtacgctaggttctgatccgatttgtctcagcgagagccaggtgagcgaagaacaggaggagatgggagggcagtcttctgctgcccaggctacagcatccgtcaacgccgaagagatcaaggtggcgagaatccacgaatgccagtgggtggtcgaagacgctcccaacccagacgttttactaagccataaggatgatgtcaaagaaggcgagggaggccaggaatcatttccggagttgccaagtgaggagtag

SEQ ID NO: 229822 - DNA, 303 bp, Artificial Sequence
  derived and/or modified sequence
taagccgtggccatcgagaaggtcaaactgcgtgtgttgaagcagtatgattatgactcatcaaccatacgaaagaaaatctttcaggaggctctggtgcagattaccctcccaactgtgcagaaggctctcgcatccacttgcaagcccgagcttcagaagtatgagcagtttatttttgcggatcataccaacatgattcacgtagaaaacgtgtacgaggaaattctccaccagatactactggatgaaacactgaaaggcgcttacattcctataaaatgcagtagcctgaagagttag

SEQ ID NO: 229823 - DNA, 2787 bp, Artificial Sequence
  derived and/or modified sequence
atgggcggcagcgccagcagccagctggatgagggcaaatgtgcctacatccggggcaagacagaagctgccatcaagaacttcagcccctactacagccggcagtacagcgtggccttctgcaaccacgtgaggacagaggtggagcagcagagggacctgaccagccagttcctgaagaccaagccacccctggcccctggcaccatcctgtatgaggccgagctgagccagttcagcgaggacatcaagaagtggaaggagcgctacgtggtggtgaagaatgactatgctgtggagagctatgagaacaaggaggcctaccagagaggagctgcccccaagtgccgcatcctgcctgctgggggcaaggtgctgaccagtgaagatgagtacaacctgctgagtgacagacacttcccagaccccctggccagcagcgagaaggagaacacccagccctttgtggtgctgcccaaggagttccctgtgtacctgtggcagcccttcttcagacatggctacttctgcttccatgaagctgctgaccagaagcgcttcagcgccctgctgagtgactgtgtgcgccacctgaaccacgactacatgaagcagatgacctttgaggcccaggccttcctggaggccgtgcagttcttccggcaggagaagggccactacggctcctgggagatgatcactggagatgagatccagatcctgagcaacctggtgatggaggagctgctgcccaccctgcagacagacctgctgcccaagatgaagggcaagaagaatgacaggaagaggacctggctgggcctgctggaggaggcctacaccctggtgcagcaccaggtgtctgagggcctgagcgccctgaaggaggagtgccgggccctgaccaagggcctggagggcaccatccgcagtgacatggaccagatcgtgaacagcaagaactacctgattggcaagatcaaggccatggtggcccagcctgctgagaagagctgcctggagagcgtgcagcccttcctggccagcatcctggaggagctgatgggccctgtgagcagcggcttcagcgaggtgcgggtgctgtttgagaaggaggtgaatgaggtgtcccagaacttccagaccaccaaggacagcgtgcagctgaaggagcacctggaccggctgatgaacctgcccctgcacagcgtgaagatggagccctgctacaccaaggtgaacctgctgcacgagcggctgcaggacctgaagagccgcttccgcttcccccacatcgacctggtggtgcagaggacccagaactacatgcaggagctgatggagaatgctgtgttcacctttgagcagctgctgagcccccacctgcagggcgaggccagcaagacagctgtggccatcgagaaggtgaagctgcgggtgctgaagcagtatgactatgacagcagcaccatcaggaagaagatcttccaggaggccctggtgcagatcaccctgcccaccgtgcagaaggccctggccagcacctgcaagccagagctgcagaagtatgagcagttcatctttgctgaccacaccaacatgatccacgtggagaatgtgtatgaggagatcctgcaccagatcctgctggatgagaccctgaaggtgatcaaggaggccgccatcctgaagaagcacaacctgtttgaggacaacatggccctgcccagcgagagcgtgagcagcctgacagacctgaagccacccaccggcagcaaccaggccagccctgcccggcgggccagcgccatcctgcccggggtgctgggcagcgagaccctgagcaatgaggtgttccaggagagcgaggaggagaagcagcctgaggtgcccagcagcctggccaagggggagagcctgagcctgcccggccccagccccccaccagatggaacagagcaggtgatcatcagccgggtggatgatcctgtggtgaaccctgtggccacagaggacacagctggcctgcccggcacctgcagcagcgagctggagtttggaggcaccctggaggatgaggagcccgcccaggaggagcctgagcccatcacagccagcggcagcctgaaggccctgaggaagctgctgacagcctctgtggaggtgcctgtggacagcgcccctgtgatggaggaggacaccaatggagagagccacgtgccccaggagaatgaggaggaggaggagaaggagcccagccaggccgccgccatccacccagacaactgtgaggagagcgaggtgtctgagcgggaggcccagcccccctgcccagaggcccatggagaggagctgggcggcttccctgaggtgggcagccctgccagccccccagccagcggcggcctgacagaggagcccctgggccccatggagggggagctgcccggggaggcctgcaccctgacagcccacgagggccggggcggcaaatgtacagaggagggagatgccagccagcaggagggctgcaccctgggcagtgaccccatctgcctgtctgagagccaggtgtctgaggagcaggaggagatgggcggccagagcagcgctgcccaggccacagcctctgtgaatgctgaggagatcaaggtggcccgcatccacgagtgccagtgggtggtggaggatgcccccaacccagatgtgctgctgagccacaaggatgatgtgaaggagggggagggcggccaggagagcttccctgagctgcccagcgaggagtag

SEQ ID NO: 229824 - DNA, 303 bp, Artificial Sequence
  derived and/or modified sequence
tgagctgtggccatcgagaaggtgaagctgcgggtgctgaagcagtatgactatgacagcagcaccatcaggaagaagatcttccaggaggccctggtgcagatcaccctgcccaccgtgcagaaggccctggccagcacctgcaagccagagctgcagaagtatgagcagttcatctttgctgaccacaccaacatgatccacgtggagaatgtgtatgaggagatcctgcaccagatcctgctggatgagaccctgaagggggcctacatccccatcaagtgcagcagcctgaagagctag

SEQ ID NO: 229825 - DNA, 2787 bp, Artificial Sequence
  derived and/or modified sequence
atgggcggcagcgccagcagccagctggacgagggcaagtgcgcctatattagggggaagaccgaggctgccattaagaatttcagcccgtattactctcgccaatacagcgttgcattctgtaaccatgtgcgaacggaggtggagcagcagcgtgacctgacatcacaattcctcaagacaaagcctccactggctcctggaacaattctgtacgaggccgagctcagccaattttccgaggatataaagaagtggaaagagcgctatgtcgtggtgaaaaacgactacgctgtcgagagttacgagaacaaggaggcttaccagagaggagccgcaccaaagtgccgtatcttgcccgccgggggtaaagtcctgacaagtgaggacgagtataatttgcttagcgaccgccatttcccagaccccttggcatcgtccgaaaaagagaacactcagcccttcgtagtgttgccaaaagagtttccggtctatctttggcaaccgtttttcaggcatggatacttctgcttccatgaagcggccgaccagaagcgcttttctgcattgctgagcgactgtgtgcgacacctaaaccacgattatatgaaacagatgacattcgaagcacaggcgtttttagaggccgtacagttctttagacaggagaagggtcactacggttcttgggagatgatcacaggcgatgaaattcaaattctgtcgaatctggtgatggaggaactgctgcctactttgcagacagatcttcttccaaagatgaagggcaagaagaatgataggaagcggacgtggttggggctgctggaggaggcatataccctggtccagcaccaggtgtctgaaggtctgagcgccctgaaagaggagtgccgagctctgaccaagggcctcgagggcacaataagaagtgacatggaccagatcgtgaactccaagaactatctcatcggaaaaattaaagccatggtagctcaaccggctgaaaaaagctgtttagagagcgtgcaaccttttttggcgtctatcctggaggagttgatgggtcccgtatcgtcaggattttctgaggtgagggtactgtttgagaaggaggtcaatgaagtctcgcagaactttcaaaccactaaggattcagtgcagctcaaggaacacttagacaggctgatgaatctccccctgcactcggtgaagatggaaccttgctacacaaaagtgaacttactgcatgaacggcttcaggaccttaagagccggttccggtttccacacatcgacttggtcgtccagaggacccaaaattacatgcaggagctcatggagaacgccgtgttcacctttgaacaactgctcagcccgcacttgcagggagaggccagcaagaccgccgtagcgatcgagaaagtgaagcttagagtcttgaagcagtacgactatgattctagtacaattcgaaagaaaatttttcaggaggccctggtgcagatcactttgcccaccgtgcagaaggctctggcatcaacatgtaagccggaactgcaaaaatacgagcagttcatcttcgccgatcacacaaatatgattcacgttgaaaacgtgtatgaggagattctgcatcaaatattgctcgacgaaaccctgaaggttatcaaagaagccgctatcctgaagaagcacaatttgtttgaagacaatatggcattgccatctgagagtgtgagcagccttactgacctgaagcctccgacgggcagcaatcaggcaagccctgcgcgcagagcaagcgccatccttcctggagttctgggatccgaaaccctgtccaatgaagtcttccaagaatccgaggaagaaaagcagcccgaggtcccctctagcctagccaaaggtgaaagcttgtccctgcccggtccgtcgcccccccctgatggtacagaacaagtgatcatcagtagggttgacgaccccgtggtcaaccccgtggctacagaagatacagccggccttcccgggacttgcagtagcgaactcgaatttgggggcacactcgaggacgaggaacccgctcaagaggaaccagaacccataacagcttcgggatccttgaaggcgcttagaaaattactaaccgcctccgttgaggtcccagttgattccgcacccgtgatggaagaggacacgaacggagagtctcacgtgcctcaggaaaacgaggaggaggaagagaaggagccctctcaagctgccgcaattcacccagataactgcgaagagtccgaagtgtccgagcgggaagcgcagcccccgtgtcccgaagcccatggtgaggagctgggtggcttccctgaggtggggagtccagcctctccaccggcctcagggggccttaccgaagagccattgggccctatggagggagaactgccaggtgaagcctgtactctgactgctcacgaaggacggggcgggaagtgtaccgaagagggtgacgcttcccagcaggaagggtgtacgctgggttctgacccaatatgcttgtccgagagccaagtgtcagaggaacaggaagagatgggcggacagtctagcgcagctcaagccacagcttccgtaaacgcagaagaaataaaagttgctaggatccatgaatgtcagtgggttgtcgaggatgcaccgaatcctgatgtcttgctttcccataaggacgacgtcaaagagggtgagggcgggcaggaatcattcccagaactaccctcagaggagtag

SEQ ID NO: 229826 - DNA, 303 bp, Artificial Sequence
  derived and/or modified sequence
tgagccgtggccatcgagaaggtgaagctgcgggtgctgaagcagtacgattatgattcatctaccatccgtaagaagattttccaggaggccctggtgcagatcacattgcccacagtacagaaggccctcgcctctacctgcaaaccagagctgcagaaatacgaacagtttatttttgctgatcacacaaacatgatccacgtcgagaatgtgtacgaggagattctgcatcagatccttctggacgagacattgaagggcgcatacattcctatcaagtgctcttccctaaagtcgtag

SEQ ID NO: 229827 - DNA, 2787 bp, Artificial Sequence
  derived and/or modified sequence
atgggtgggtcagcatcctctcagctggacgaaggtaaatgcgcatatattcgaggcaaaactgaagccgctattaagaactttagcccttactacagtcggcagtattcggtagctttctgtaaccacgttaggacagaggtggagcagcaaagggacctgacgtcccaattcttgaaaacaaaaccgccactggccccaggcaccattctgtatgaggccgagctctcacagttctctgaagacataaaaaagtggaaagaaaggtatgtcgttgtgaagaacgactacgctgtggaaagctacgagaataaagaagcataccaacgcggagcagcccctaagtgtcggattctgcctgcaggaggaaaagtgctgacatcagaagatgagtataatctgctgtccgaccgtcactttccggaccctctcgccagttcagagaaagaaaatacccaaccatttgtggtccttccgaaagagtttcccgtgtatctatggcaaccctttttccgccatggttatttctgttttcatgaagctgccgatcagaaaaggttctccgctctcctgagcgactgtgttagacatttaaatcacgactacatgaaacagatgacttttgaggctcaggcgtttctggaagccgttcaatttttccgacaggagaagggacactatgggtcttgggaaatgatcactggcgacgagattcagattctttccaacctcgtaatggaagagttgctgcctacactgcaaacagatcttctgccgaagatgaagggaaagaagaacgatcgtaagcgtacctggctgggcttgctcgaagaggcctatactctggtgcagcaccaggtctctgagggactgagtgcactgaaggaggagtgtagggcgttaacaaaaggactcgaaggtactatcaggagcgacatggatcagatcgtgaacagcaagaattacctcatcggaaagatcaaggccatggttgctcagcctgcagaaaaatcttgtctagagtctgttcagccattcctggcgtccatccttgaagaactcatgggccctgtgtcttccggtttttctgaagtgagggtgctgttcgagaaagaggtgaatgaggtttcacagaattttcagacaacaaaagattccgtccagctgaaggagcacctggaccggttaatgaatctgcctctgcattctgttaaaatggagccctgttacacaaaagtaaatctgctgcatgaaagactacaggacctgaagtccagattcaggtttccccacatagatctagtcgtgcagcgcactcagaattacatgcaggagctgatggagaacgcggtgtttacgttcgagcagctccttagccctcacctacaaggagaagcctctaagaccgcagtcgcaattgagaaggtgaaactcagggtgctaaaacagtatgactacgactcgtccacaattcgcaaaaagatttttcaggaagccctcgtgcagatcacccttccaaccgtgcagaaggcattagcctccacgtgtaagcccgagttacagaaatacgagcagttcatctttgctgatcacaccaatatgatccacgtggaaaatgtgtatgaggagattctgcatcagattttgctggatgaaacactcaaagttatcaaggaggccgcaatcttaaaaaagcataacctgttcgaagacaatatggccttgccgagcgaatccgtgtccagtctcacagaccttaagccccctacgggaagtaatcaggctagtccagcaagaagggcatctgcgatcctgcccggagtgttggggagcgaaactctgagcaatgaagtgttccaggagtcggaagaagaaaaacagcccgaggtccctagctccttggccaagggtgagagcctaagcctacctggcccaagtcctccacccgacggcacggagcaggtaatcatatcaagagtggacgatcccgtagtgaatccagtggcgacagaagacactgccggtctccctggaacttgtagtagtgagctcgaattcggcggaaccctggaggacgaagaaccggctcaggaggagccagaaccaatcactgcttctgggagcttaaaagcccttaggaaactgctaacagcctctgtagaagtgccagtcgattccgctcctgtgatggaagaagatacaaacggagaatctcacgtgccccaggagaacgaggaagaggaagaaaaggaacccagccaggcagccgcaatacatcctgataactgtgaggaatccgaggtgtctgagagggaggcacagcccccttgcccggaagcccacggtgaagagcttgggggattccctgaagtcgggtctccagcctcccctcctgcctccggagggctaacggaggagcccctcggccctatggagggcgagctccccggtgaagcatgtactctcaccgctcacgagggacggggtggcaaatgtaccgaggagggggatgcctcacagcaagaggggtgcacactgggctctgatcccatttgtctgagcgaaagccaggtctcagaagagcaggaggaaatggggggtcagagttcagcggctcaagcaactgcctctgtgaacgccgaagagattaaggttgctcgtattcatgagtgccagtgggtggtggaagatgctccaaatcccgatgtgcttttgagccataaggacgatgtgaaggagggagaaggcggacaggaatcatttcccgagcttcctagtgaggaatag

SEQ ID NO: 229828 - DNA, 303 bp, Artificial Sequence
  derived and/or modified sequence
tgagcagtcgccatcgaaaaagtgaaactgagagttttaaaacagtatgattatgactcaagcaccattcgcaagaaaatctttcaggaggctctggtgcagatcaccttgcccaccgtacagaaggctctcgcatctacctgcaagcctgaactgcagaagtatgagcagtttattttcgccgaccacacgaacatgattcatgtagagaatgtctatgaagaaattctccaccagatcctgctcgacgaaacccttaaaggtgcatacattcccataaaatgttcctcgctgaagtcctag

SEQ ID NO: 229829 - protein, 378 aa, Artificial Sequence
  derived and/or modified sequence
MVWGKICWFSQRAGWTVFAESQISLSCSLCLHSGDQEAQNPNLVSQLCGVFLQNETNETIHMQMSMAVGQQALPLNIIAPKAVLVSLCGVLLNGTVFWLLCCGATNPYMVYILHLVAADVIYLCCSAVGFLQVTLLTYHGVVFFIPDFLAILSPFSFEVCLCLLVAISTERCVCVLFPIWYRCHRPKYTSNVVCTLIWGLPFCINIVKSLFLTYWKHVKACVIFLKLSGLFHAILSLVMCVSSLTLLIRFLCCSQQQKATRVYAVVQISAPMFLLWALPLSVAPLITDFKMFVTTSYLISLFLIINSSANPIIYFFVGSLRKKRLKESLRVILQRALADKPEVGRNKKAAGIDPMEQPHSTQHVENLLPREHRVDVET

SEQ ID NO: 229830 - DNA, 1137 bp, Artificial Sequence
  derived and/or modified sequence
atggtatggggtaagatctgttggttctctcaacgggcagggtggaccgtgttcgctgagtcacagatttccctgtcttgctcgctgtgtctgcacagcggtgaccaggaggcgcagaaccccaacctggtctcccagttgtgtggagtctttctgcagaatgagacaaacgagacaattcacatgcagatgtccatggctgtgggccaacaggctctgccgttgaacattatcgcccccaaggctgttttggtttctctgtgcggcgtgctgttgaacggaaccgtcttttggctgctctgttgtggagctacgaacccctacatggtctatatcctccacttggtggcggccgacgtcatctacttgtgttgctctgcagtgggcttcctgcaagtgacacttctgacatatcacggcgttgtcttcttcataccagatttcttggcaatcttgagcccgtttagtttcgaggtatgtctgtgtttgctcgtggccatctcaaccgagaggtgcgtctgcgtgctgtttcccatatggtatcggtgtcataggccaaaatatacgtccaacgtcgtctgcacactgatatggggacttcctttctgtatcaatattgttaaaagtttgttcctgacctattggaaacacgttaaggcttgtgtgatatttcttaaactgtccgggctgttccacgctatcctgtccctagtgatgtgcgtgtcgagtctgacacttctcatcaggtttctctgctgctcgcagcagcagaaggcgactagggtgtacgccgttgtgcagatttctgctcccatgttcctattgtgggcactccctttatccgttgctccgttgatcacggatttcaagatgttcgtgactacctcgtacttaattagcctgttcctcataatcaattctagtgctaacccaattatttacttttttgtcggctcactgcgaaagaagcggctgaaggaatcgctgcgcgtgatactgcagagagccttggctgacaaaccagaggtgggccggaacaagaaggcagcaggaatagaccctatggaacaaccgcactccactcagcacgtagagaatctgcttccaagggagcacagagtcgatgtggaaacatag

SEQ ID NO: 229831 - DNA, 1137 bp, Artificial Sequence
  derived and/or modified sequence
atggtttgggggaagatctgttggttttcccagagggcaggttggactgtttttgccgagagccagatcagtctttcatgtagtctctgcttgcacagtggggaccaagaggctcaaaaccctaatctggtgtcacagttgtgtggagtattcctacaaaatgagaccaacgaaacaatacacatgcagatgtccatggctgttggacaacaagctctgcccctgaacatcatagctccaaaggccgtgctggtgtctctttgtggcgtgttgctgaatggcactgtgttttggctcctgtgctgtggggcaacaaacccttacatggtctacatcctacacctggttgccgccgacgtgatttacttgtgttgtagcgcagtgggcttcctgcaggtgacccttttgacgtaccacggcgtggtttttttcatacctgatttcctagctattctgtccccattcagcttcgaggtgtgcctttgcctgttggtagctattagtactgagaggtgtgtgtgtgtgctgttcccgatctggtataggtgtcatcgccccaagtataccagcaacgtcgtatgcaccttaatttggggtctacccttctgcattaacattgttaaaagtctatttctgacctactggaagcatgtgaaggcctgcgtgatcttcctgaagcttagcggtctatttcatgcaatccttagtttggtcatgtgcgtctctagccttactttacttattagatttctctgctgctcacagcagcagaaggccacgcgtgtatatgctgtcgtgcaaattagtgctcctatgtttctgttatgggctcttccactgagtgtcgcacctctcattacagactttaaaatgttcgtgaccacctcctatctgatttctctttttttaatcataaatagttctgctaatccaatcatctactttttcgtcggatcccttcggaagaagcgattgaaggagagcctgcgcgttatcttgcaacgcgcgttggccgataagccagaggttgggagaaataagaaggctgctggaattgacccaatggagcagccccattcaacacagcacgtcgaaaaccttctccccagagaacatcgcgtagacgttgagacgtag

SEQ ID NO: 229832 - DNA, 1137 bp, Artificial Sequence
  derived and/or modified sequence
atggtatggggaaaaatctgctggttcagccagcgggctggttggacggtttttgccgaaagccaaatctccctcagctgttccctgtgccttcactcgggggatcaggaggcccagaatcctaacctggtttcgcagctttgtggagtgttcttgcagaacgaaaccaacgagactatccatatgcagatgagcatggctgtcgggcagcaggcactgccgcttaatatcattgctcctaaagcagtgctagtgtcattgtgtggggtcttattgaacggcacagttttctggctcctgtgctgcggagctacaaacccctacatggtgtacattctgcacctggtcgccgcagatgtcatctacctctgttgtagcgctgtaggcttcctgcaagtgactctgctgacatatcacggtgtggtgtttttcatcccggactttctggcaatcctgtcccccttcagcttcgaagtgtgcttgtgtttattggtggccatcagcacagaacggtgtgtgtgtgtactcttccccatatggtataggtgccatcgacccaaatacacatctaatgtcgtgtgcacactcatctggggactgcctttttgcatcaatatcgtcaaaagcttgtttctgacttattggaagcatgtgaaggcctgcgtgatttttttgaaactctccggactgttccatgcgattcttagcttggtgatgtgcgtatctagtctaactcttctgattagattcctctgctgctcccagcagcagaaggccacccgcgtgtatgctgttgtacaaatttctgctccaatgttcctgctgtgggccttgccactttctgtcgcgcctctcatcacggacttcaaaatgttcgtcaccacctcatatctgatttccttgttcttaattatcaacagctcagctaatccaattatatatttctttgtgggctccctgcgcaagaagaggctgaaggaatcattgagagttatcctgcagagggccctggcagacaaacctgaagtagggcggaataagaaagccgccggaatagaccctatggagcagccccattccactcagcacgtggagaatttactgccacgcgaacaccgggtggatgtcgaaacctag

SEQ ID NO: 229833 - DNA, 1137 bp, Artificial Sequence
  derived and/or modified sequence
atggtctgggggaaaatctgttggttttcccagagagccggttggaccgtgttcgcagagagccagatctccctttcttgcagcctctgcctgcactctggggatcaggaggcacagaaccccaatcttgtgtcccagctctgcggcgtttttctgcaaaacgaaaccaatgagaccattcacatgcaaatgagcatggccgtgggacagcaggcattacctctgaacattattgccccgaaggctgtgctagtgtcgctgtgcggtgtcctcttgaacggaactgtattctggctgttgtgctgcggcgctaccaacccttatatggtttacatcctgcatctcgtggctgccgacgtgatctacctgtgctgctcagccgttggcttcctccaggtaacactcctgacctatcacggcgtggtgttctttattcccgatttcctcgcaatcctatcccctttctcattcgaggtgtgcctttgtctccttgtcgccatctctacggagcgttgcgtgtgcgtgctcttccccatttggtatcggtgtcacaggccaaagtacacctccaacgtcgtgtgtacactgatctggggcctgcccttctgcattaacatcgtgaaaagcttgtttcttacctactggaaacacgtgaaggcttgcgtgattttcctcaaacttagtggccttttccatgctatccttagtttggtgatgtgtgtgtcctcactgacgttattgatcagattcctgtgttgttctcaacagcagaaagccacccgagtgtacgcagtggtccaaatctcagctcctatgtttctgctttgggccctgccgctgtccgttgcccccttgattacggacttcaaaatgttcgtgaccacctcctatttaatttccctttttctgattatcaattcttccgccaaccctattatttatttctttgtcggaagcctccgcaaaaagaggctgaaggagagcctgcgcgttatcctgcagcgcgcattggctgacaagcccgaggttggccgcaacaaaaaggccgccggcatcgacccgatggaacagccccatagcactcagcacgtcgagaatctgctgccacgagaacatagggtagacgtggaaacctag

SEQ ID NO: 229834 - DNA, 1137 bp, Artificial Sequence
  derived and/or modified sequence
atggtttgggggaaaatctgttggttcagtcaaagggccgggtggacggtgttcgctgagtctcagatatcactgagttgttctctgtgcctacatagtggcgaccaggaagcccagaaccccaacttggtatctcagctttgtggagtctttttgcagaacgaaactaatgagaccatccatatgcagatgtctatggccgtaggccagcaagctctgcccctgaacattattgctcctaaagcagtcttggtgagcctttgcggagtgttgctcaacggcaccgtgttttggctcctttgctgtggcgccaccaatccatacatggtgtatatcctgcacctggtggctgcagatgtaatctatctctgctgcagcgcggtcggatttttgcaagtgacacttctcacctaccacggagtcgtcttttttatcccagatttcttagctattctgtcccccttttcctttgaagtttgcctgtgtctgctcgtggcgatctcgaccgagcggtgcgtttgcgtgctattccccatttggtaccgatgccatcgtccaaagtacactagtaatgtggtgtgcactcttatctggggtctgcctttctgcatcaacatagtgaagagccttttcctcacctattggaaacacgttaaagcatgcgtgatctttcttaagttgtccggactgtttcatgcaatactgtccctcgttatgtgcgttagctctctgacgttgctgattcgatttctgtgttgttctcaacagcagaaagcaacgcgcgtatacgctgtggtgcagatcagcgccccgatgttcctgctgtgggccctcccgctgtccgtcgccccccttatcacggacttcaagatgtttgtgaccacaagctacctgatttcactttttctgatcattaattctagcgctaatcccatcatctatttctttgtggggtccctgcggaaaaaacgtctgaaggagagtttgagagttattctgcaacgggccttggctgacaaacccgaagtaggtaggaataagaaggccgcaggtattgaccctatggaacagccacattctacacaacacgtggagaacctccttcccagagagcaccgggttgatgttgaaacctag

SEQ ID NO: 229835 - DNA, 1137 bp, Artificial Sequence
  derived and/or modified sequence
atggtgtggggaaagatctgctggttttctcaacgagccggttggaccgtattcgctgagagccagatttctctttcttgcagtctgtgtctccactccggtgaccaggaagcccagaaccccaacctggtgtcccaactctgtggcgttttcttgcagaatgaaaccaatgaaacaatccatatgcaaatgagcatggctgtcggacaacaagctctccccctgaacattattgcacctaaggccgtcctcgtgtccttatgtggtgtgctgctgaacggcacagttttttggttactatgctgcggcgccacaaacccatacatggtgtacattctccacctcgttgccgcagatgttatctacctttgctgctccgcggtgggcttcttgcaggtgactctattgacttaccatggtgtagtcttctttatcccagatttcttggcaattctttcacctttttcttttgaggtctgtctgtgtctgctcgttgctatctcaaccgagagatgtgtgtgcgtcctgttcccgatctggtatcggtgccaccggcctaagtatacgtccaacgtggtctgcacccttatctgggggctgcctttctgcatcaacatcgttaaaagcctgttcctgacatactggaagcatgtgaaggcatgtgtgatattcttgaagctgtccgggctgtttcacgccattcttagcctcgtgatgtgtgtcagttctctgacactgttaatcaggtttctgtgctgcagccagcaacagaaagcaacgagagtttacgctgtagtgcagatcagcgcacctatgtttctgctctgggccttgcccttatctgttgctcccctgattaccgatttcaagatgttcgtaaccactagttacctgatctccctgtttctcataatcaatagttccgcaaaccctatcatttatttctttgtgggcagcctgaggaaaaagcggctgaaggagagcctccgagtgattcttcagcgggccctcgcggacaagcccgaggtgggtcggaacaagaaggcggccgggatcgacccaatggaacagccgcacagtacccagcacgtcgaaaacctcctgccaagggagcacagggtggatgtggagacatag

SEQ ID NO: 229836 - DNA, 1137 bp, Artificial Sequence
  derived and/or modified sequence
atggtgtggggcaagatatgttggttctcacaacgcgccggctggactgtgttcgcagaatcacaaatttctctttcctgctccctatgtttgcactccggggaccaagaggctcagaacccaaatttggtctctcagctgtgtggtgtgttcctccaaaatgaaactaacgagaccatacatatgcaaatgtcgatggccgtgggccaacaggctctgcctctgaacatcattgcccccaaagccgtgcttgtgagcctctgtggcgtgttgctgaatggcacagtattctggttgctctgttgtggggcaaccaatccatacatggtgtacattctccacctcgttgcggcagacgttatctacttatgctgctccgcggtgggctttctgcaagtcactttgttgacataccatggcgttgtcttcttcatcccagatttcctggctatactatctccgttcagctttgaggtttgtctttgcttgctggtggctatctcgaccgagcgctgtgtttgcgtattgttccctatatggtacagatgtcaccgacccaagtatacttctaacgtagtctgtacactgatctgggggctgcctttttgcataaatattgttaaatccctgttcctgacctattggaagcatgttaaggcttgcgtcatttttttgaagctgtccgggctctttcacgccatcctgagtttggtcatgtgtgtgtccagcttgacactactcatcagatttctctgttgctcacagcagcagaaggccactcgtgtgtacgccgtcgtgcagataagtgccccaatgttcttgctgtgggctctccctctgagcgtagcaccactgataacagattttaaaatgtttgtgaccacatcttatttgatctccctgttcttaattatcaactccagcgcgaacccaatcatttattttttcgtcggtagtctgaggaaaaaaaggctgaaggagtcactgagggtaatactgcaacgggctctggctgacaaacctgaggtcggacgaaacaagaaagccgccggtatcgaccctatggaacagccacactccactcagcacgtggaaaacctgttgccacgggagcatcgcgtcgatgtcgaaacctag

SEQ ID NO: 229837 - DNA, 1137 bp, Artificial Sequence
  derived and/or modified sequence
atggtctgggggaagatctgttggttctcccaacgggccggatggacagtctttgccgagagccaaatttcgctgagctgttctctgtgcttgcactcaggcgaccaggaggctcagaatcccaacttggttagccagctatgtggagtctttctgcaaaacgagaccaatgagactattcatatgcagatgtccatggctgtgggccaacaggccctgcccttaaacattatcgccccgaaagccgtgcttgtgagcctctgcggcgtgctgttaaatggcacagtattttggctgttgtgctgcggagctacaaatccatacatggtgtatattctacatctggtcgccgccgacgtcatctatctttgttgtagcgctgtcggctttcttcaggtcaccctgctgacataccatggcgtagttttcttcatccctgacttcctagcgattcttagtccttttagctttgaggtgtgcctctgtctcctggtcgctatctccactgaaagatgcgtctgcgtgctgttccccatttggtaccgctgtcataggccaaagtataccagtaacgtggtgtgtactctgatttgggggctgcctttctgtataaacattgtcaagtccctgtttctaacgtactggaaacacgtgaaggcttgcgtaatcttcctgaagcttagcggcctgttccacgccattctgtcactggtgatgtgcgtgagttcactgaccctgctgatccgtttcctgtgttgcagtcagcagcaaaaggcgaccagagtatatgctgtggtgcaaatctctgcaccaatgtttcttctgtgggctctgcctttatctgtcgcgcctctcattaccgacttcaaaatgtttgtgacaactagctacttgattagtctttttcttataattaactccagtgcaaatcctataatctacttctttgtgggctcactgaggaaaaagcggcttaaagaaagtctacgcgtgatcttgcaaagagccctggctgataagcctgaagttggcagaaataaaaaggccgcaggaattgaccccatggagcagcctcactccactcaacatgtggagaacctgctgccccgagagcatagagtggacgtggagacctag

SEQ ID NO: 229838 - DNA, 1137 bp, Artificial Sequence
  derived and/or modified sequence
atggtgtggggcaagatctgctggttcagccagagagctggctggacagtgtttgctgagagccagatcagcctgagctgcagcctgtgcctgcacagcggggaccaggaggcccagaaccccaacctggtgtcccagctgtgtggggtcttcctgcagaatgagaccaatgagaccatccacatgcagatgtccatggctgtgggccagcaggccctgcccctgaacatcatcgcccccaaggctgtgctggtgtccctgtgtggggtgctgctgaatggaacagtgttctggctgctgtgctgcggggccaccaacccctacatggtgtacatcctgcacctggtggccgcagatgtgatctacctgtgctgcagcgctgtgggcttcctgcaggtgaccctgctgacctaccatggagtggtgttcttcatcccagacttcctggccatcctgagccccttctcctttgaggtgtgcctgtgcctgctggtggccatcagcacagagcgctgtgtgtgtgtgctcttccccatctggtaccgctgccaccggcccaagtacaccagcaatgtggtgtgcaccctcatctggggcctgcccttctgcatcaacatcgtgaagagcctcttcctgacctactggaagcacgtgaaggcctgtgtgatcttcctgaagctgagcggcctcttccacgccatcctgagcctggtgatgtgtgtgagcagcctgaccctgctgatccgcttcctgtgctgcagccagcagcagaaggccaccagggtgtatgctgtggtgcagatcagcgcccccatgttcctgctgtgggccctgcccctgtctgtggcccccctcatcacagacttcaagatgtttgtgaccaccagctacctgatcagcctcttcctgatcatcaacagcagcgccaaccccatcatctacttctttgtgggcagcctgaggaagaagaggctgaaggagagcctgcgggtcatcctgcagagggccctggccgacaagccagaggtgggcaggaacaagaaggccgccggcatcgaccccatggagcagccccacagcacccagcacgtggagaacctgctgccccgggagcaccgggtggatgtggagacctag

SEQ ID NO: 229839 - DNA, 1265 bp, Artificial Sequence
  derived and/or modified sequence
actagatggaccactgctcctgactgtgatgttgtggcccactcaggtcccagcaccccatggtctgggggaaaatttgctggttcagccagagggctggatggacagtgtttgctgagtcacagatatctctctcatgtagcctttgtctccacagtggtgaccaggaggcacagaacccaaacctggtatctcagctctgtggcgtctttcttcaaaatgagacgaatgaaaccatacatatgcagatgagcatggcagtgggacagcaggccctgcccttgaatatcattgcccccaaggctgtgctggtctccctctgtggggtcttattgaatggcactgtcttctggctgctttgctgtggggccacgaatccctacatggtatacatcctccacctggtcgctgctgacgtgatctatctttgctgctcggcagtggggttcttacaggtgactctgctaacttatcatggagtcgtgttttttatccctgatttcctggccatattgtctcccttctcctttgaggtgtgtctctgtctcctggtggccatcagcacagagcggtgtgtgtgtgtcctcttccccatctggtacagatgccaccgcccaaaatacacatctaatgttgtctgcaccctcatctggggcctgcctttttgcatcaacatagtaaaatcacttttcctaacttactggaaacatgtaaaggcatgtgtcatatttctaaagctttctgggctcttccatgctatcctttcacttgtgatgtgtgtgtcgagtctgactctactcattagattcctgtgctgctcccagcagcaaaaggccaccagggtctatgcggtggtgcagatctcggcccccatgttcctactctgggccctacccctgagcgtggcacccctcataacagatttcaaaatgtttgtcaccacctcctatttaatttccttgttcctcattataaacagcagcgccaaccctatcatttatttctttgtggggagcctcagaaagaaaaggctgaaggaatctctcagagtgattctccaacgggcgttagcagataagccagaggtggggaggaacaaaaaggcagctggcatcgacccaatggagcaaccacactctactcagcatgtggagaaccttcttcccagggagcacagggtcgatgtggaaacataatttcccacatctgagctggggaattgtacacatagtaacccagcctgttctgcatcataaggctgctgc

SEQ ID NO: 229840 - DNA, 1137 bp, Artificial Sequence
  derived and/or modified sequence
atggtgtggggcaagatctgctggttcagccagcgggccggctggactgtgttcgcggaaagtcagatctcattgagttgcagcttgtgcctgcactcaggagatcaggaggctcagaaccctaacctggtttcccagctgtgcggtgtttttcttcaaaacgagacaaacgagaccatacacatgcagatgagcatggcagtgggtcagcaggctcttccccttaacataatagctccaaaagccgtactagtcagcctgtgcggcgtattgctgaacggcacagtgttttggttgctgtgttgcggagccacaaacccttacatggtctacattttgcatctggtcgcagccgacgttatctatttgtgctgctccgccgtaggatttttgcaggttactctgctgacataccatggcgtggtgtttttcatccccgacttcctggccattctgagccccttttctttcgaggtttgcctatgcctgctggtagccatttcaactgagagatgcgtctgtgtgctattccctatttggtatcggtgccatcggccaaagtataccagtaacgtggtctgcaccctgatctgggggttgccattttgcatcaatattgttaagtcgctctttctgacttactggaaacatgttaaagcctgtgtgatctttctgaagctctcaggcctgtttcatgctattttatctcttgtcatgtgcgttagcagtctgacgcttctcattcgattcctttgctgtagccagcagcagaaagcgacacgcgtctatgctgtggtacaaatcagcgcacctatgtttctgttgtgggccttaccactgtccgtcgctccactgatcacagattttaaaatgttcgtcacaacaagctatctgatttcactctttctgatcattaatagctccgcaaaccctatcatctatttcttcgtaggcagtctgcgcaaaaagagactcaaagagagcttgcgagtaatactgcagagagcccttgccgataaacctgaggttggcaggaacaagaaagccgcaggtattgacccaatggagcaaccacatagcacccagcatgtcgaaaacttactccccagagagcatagggtggacgtagagacttag

SEQ ID NO: 229841 - DNA, 1137 bp, Artificial Sequence
  derived and/or modified sequence
atggtgtggggcaagatctgctggttcagccagcgggccggctggacagtatttgcagagagccaaatctccctgtcttgctcattgtgcttgcactccggagatcaggaagcccaaaaccccaatctagtgtctcaattatgtggtgtttttttacagaacgagactaacgaaacgatacatatgcagatgtctatggctgtcggccagcaagcgctccctttaaacatcattgcccctaaggctgtgctcgtcagtttgtgcggagtgctgcttaatggtacagtgttctggcttctgtgttgtggagccacaaacccatatatggtgtacatcttacacttggtggccgcagacgtgatctacctgtgttgcagcgccgttggtttcctgcaggtgaccttgctgacctaccatggcgtggttttcttcatacctgactttcttgcgatcctgtctcccttttccttcgaggtgtgtctatgtctattagttgctatttccacagaacgctgcgtctgtgtgcttttccccatatggtatcgctgtcacagaccgaaatataccagtaacgtcgtgtgcacactgatctggggccttcccttctgcatcaacatcgttaaaagtctctttctcacttattggaagcacgtaaaggcatgtgttatcttcctcaagctgagtggactcttccatgctatcctgagccttgtgatgtgtgtatctagtctgacgctgttgataagatttctgtgttgctctcagcaacaaaaggctactcgtgtctacgcagtggtccagatttccgctccgatgttcctgctttgggctttacccctgagtgtggctcccttgattacagacttcaaaatgtttgtaacaacgtcatatctaatcagcctcttcctgatcatcaactctagtgcgaaccccattatctattttttcgtaggttctctgagaaagaagagactcaaagagtcgctgagagtgatcctgcaaagagccctggccgacaaacccgaggtcggccgaaataagaaggccgctggcattgatcccatggaacagccacatagcacacagcacgtggagaacctcctgccacgcgagcaccgtgtggacgtggaaacctag

SEQ ID NO: 229842 - DNA, 1137 bp, Artificial Sequence
  derived and/or modified sequence
atggtgtggggcaagatctgctggttcagccagcgggccggctggaccgtgtttgccgagagtcaaatcagtctctcctgctcactgtgcctgcacagcggagatcaagaagcccagaatcccaatctggtaagccaactttgtggcgtgttcttgcagaacgagacaaacgaaacgattcatatgcagatgtccatggcagtgggccagcaggccttacctctaaatatcatcgcccctaaggcggtccttgtatcgctttgcggagtcttactcaacggaactgtgttttggttgttatgctgtggtgcaactaacccttacatggtgtacatcctgcacttggtggccgccgatgtgatttatctgtgctgctcggccgttggatttctgcaggtcaccctgctgacttaccacggagtagtgttcttcatacccgatttcctcgccattctttcgccgttttctttcgaagtgtgcctatgtctgctggtcgccatctcgacggaacgttgcgtgtgtgtcctgttccccatctggtacagatgtcatcgccctaaatacacatccaacgtggtttgtacacttatatggggacttccattctgcattaatatcgtgaagtccctgtttctcacttactggaagcacgttaaggcctgtgtgattttcttaaaactctccggactgttccacgcaatcctgagtcttgtgatgtgcgtgtcctcacttaccctcctcatccggttcctgtgctgttcccagcagcaaaaggcaaccagggtgtatgccgtggtgcagatttctgcacctatgtttctgctctgggctctgccactcagcgtagccccactgatcactgactttaaaatgtttgtgaccacctcctacctgatctcgctctttctcattataaattcatccgcaaacccaatcatttatttcttcgtgggatcccttcgcaaaaagcgcctcaaggagtccctgagagtgatcctccagagagcactcgccgacaaaccagaggtgggtaggaacaaaaaagcggccggcatcgacccaatggagcagccacactccactcagcatgtagagaacctgctgccaagagagcatcgggttgatgtggagacatag

SEQ ID NO: 229843 - DNA, 1137 bp, Artificial Sequence
  derived and/or modified sequence
atggtgtggggcaagatctgctggttcagccagcgggccggctggacggtcttcgccgagagccagatttccttaagctgttcgctctgtctccacagcggcgaccaggaggcccaaaatccgaacttagtgagtcagctttgcggagtctttctccaaaacgagactaacgaaacgatccatatgcagatgagcatggcagtgggacagcaggcactcccactcaacataattgcccccaaggctgtcctcgtgtcattgtgcggcgtgcttttgaatggaaccgtgttttggctgctgtgctgcggcgccaccaatccatacatggtgtacattctgcaccttgtggcggccgatgtaatctatttgtgctgttccgcggtgggattccttcaggtaacattactgacgtatcatggagtggtttttttcatccctgactttttagcaatactgtctcccttttcttttgaggtgtgtttgtgcttactcgtggctatttcaaccgaacgatgtgtctgcgtgctgtttccaatctggtacagatgtcacaggcccaagtatacttctaatgtggtctgcactctcatatggggcctgcctttctgcataaatatcgtgaaatccttatttctgacatattggaagcacgtaaaggcttgtgtcatttttttaaaattaagcggcttgttccacgcaatcctgtcccttgtgatgtgcgtaagctctttgacactcctgatcagatttctctgctgttcgcagcagcagaaggccactcgcgtgtacgccgttgtgcagatctcagcccctatgtttctgttgtgggccctcccactctctgtggcccctctgatcactgacttcaaaatgttcgtgacgacatcttacctgatctccctcttcctcattatcaattcttccgccaatccgataatctacttctttgtgggctccttacgaaagaagaggctgaaagagagcctgagggtgattctgcagcgggcccttgcagataaacccgaggtcggacgtaacaagaaggctgccggcatcgatcctatggaacagccacacagcacacagcacgtggaaaatctgctgccaagggagcacagggtcgatgtggaaacttag

SEQ ID NO: 229844 - DNA, 1137 bp, Artificial Sequence
  derived and/or modified sequence
atggtgtggggcaagatctgctggttcagccagcgggccggctggacagttttcgctgaatcacagatcagcctgtcttgcagcctttgtctgcattccggggaccaagaagcccaaaaccccaatttggtatctcagctgtgtggggtgttccttcagaatgagacaaacgagacaattcatatgcagatgagtatggccgttgggcagcaggctctgcccctcaacattattgctcctaaggccgttttggtctccctctgcggcgtgctgcttaacggcaccgtcttctggctgttatgctgcggtgccacaaacccttatatggtttacatcctgcatctggtggccgctgatgttatctacctctgctgcagtgctgtcggattcctgcaagtcaccctactcacctaccatggagttgtctttttcatcccagactttctcgccatccttagtccattttcctttgaggtatgcctgtgcctcttggtcgccataagcacagagcgttgcgtgtgtgttctgtttccaatatggtacagatgccatcgcccaaagtatacgtcaaatgtggtctgtacacttatatggggcctgcctttttgtattaatattgtgaagagcctcttcttgacttattggaagcacgtgaaagcttgcgtgatttttcttaaacttagtggactgtttcacgccatcctcagtctggttatgtgcgtgagcagcttgaccctgcttattcgctttctatgttgtagtcaacagcaaaaagcaacaagggtctacgccgtcgtccagatttcagcaccaatgttcttgctgtgggcactgccactttcggtggcgccgctaataaccgacttcaagatgtttgtcacaacttcatacctgatttctcttttcctgatcatcaatagctccgcaaaccccattatttacttcttcgttggcagtctgcgaaagaagaggctgaaggagtctctaagggtaatactacagcgagcattggccgacaagcccgaagtgggccgaaacaagaaggctgcaggcatcgaccccatggaacagccccatagcacccagcatgtggaaaatctcttgcctcgggaacatcgggtggatgtagagacctag

SEQ ID NO: 229845 - DNA, 1137 bp, Artificial Sequence
  derived and/or modified sequence
atggtgtggggcaagatctgctggttcagccagcgggccggctggaccgtgtttgctgaatcccagatctctctttcctgtagtttgtgtctccactctggcgatcaagaggcccagaatccaaatttagtgagccagctctgcggagttttccttcagaatgagactaacgaaactatacacatgcagatgagcatggcagttggtcagcaggcgttgcctctcaacatcattgcacccaaggccgttctcgtatccttgtgtggggtgttgctgaacggtacggtgttttggctcctatgttgcggcgccaccaatccatacatggtttacatactccatcttgtcgccgctgatgtaatctacttatgctgcagcgccgtcggcttcttgcaggtgaccctgcttacctatcatggggtcgtcttctttattcccgactttctggccatcttgtctcccttcagtttcgaggtttgtttatgcctcctcgtcgcaatctccacggaacgttgcgtttgcgtactatttcccatttggtaccgatgccacaggccgaaatacacatcaaatgtggtgtgtacactcatttggggtctccccttctgcatcaatattgtcaagagtctatttctcacatactggaagcatgtgaaagcgtgcgttatcttcctgaagctgagcggcttgtttcacgcgatactctctctggtcatgtgtgtaagttcgcttacactgcttattcggttcttgtgctgctcccagcagcaaaaggctacaagggtgtacgccgtcgtgcagatctccgcaccaatgtttctcctctgggccctgcctctcagcgtggcacctctgatcaccgacttcaagatgtttgtaacgacatcctacctgatctccctcttcctgattattaacagcagtgcaaaccccataatttactttttcgtagggagcctgaggaaaaagaggctgaaggaatccctgagagtgatactgcagcgcgctctggcagataaacctgaggtgggacggaataagaaagcagccggaatagacccaatggagcagccccatagcacccagcacgtggagaatctgcttccacgggaacacagggtggacgtggagacctag

SEQ ID NO: 229846 - DNA, 1137 bp, Artificial Sequence
  derived and/or modified sequence
atggtgtggggcaagatctgctggttcagccagcgggccggctggacagttttcgctgagtctcagatctctttaagctgctctctgtgcctgcactctggggaccaggaagcccagaacccaaatttggtgtcccagctctgtggcgtcttcctgcagaatgaaaccaacgaaacaatccacatgcagatgtcgatggctgtgggacagcaggctttgcccctgaatattattgctcctaaagcagtgctggtttctctctgtggggtgctcctgaacggaactgtgttttggcttctgtgttgtggcgcaactaatccttatatggtgtacatccttcacctggttgctgccgatgttatctatctctgctgctcggccgttggctttctgcaagtaactcttctgacttatcacggagtcgtgttttttatccctgacttcctcgctattttatcacctttctcatttgaggtatgcctgtgtttactggtcgctatatcaacagaacggtgcgtgtgcgtgcttttccccatctggtataggtgccataggcctaaatataccagcaatgtggtctgcactttgatttggggacttccattctgcatcaacatcgttaagtcactgtttctgacttactggaaacacgtgaaagcctgtgttatcttcctgaagctcagcggattatttcacgcgatcctgagtcttgtaatgtgcgtgagctcactgacactactgattcgtttcctctgctgcagtcagcagcaaaaagccactcgcgtgtacgccgtggtccagattagcgccccaatgtttcttctttgggctctgccgctatcagtcgcgcccttgataacagatttcaagatgttcgtcacaacaagctacctgatctccctcttcttaatcattaacagctccgctaatccaatcatctattttttcgtgggctctttgcgcaagaagcgtttgaaggaaagcctccgggtcattctacagagggctcttgctgataagccagaggttggtcggaataaaaaagccgccggcatcgatccaatggaacagccacacagtacgcagcatgtggaaaaccttctccctcgcgagcaccgggtagacgtggagacttag

SEQ ID NO: 229847 - DNA, 1137 bp, Artificial Sequence
  derived and/or modified sequence
atggtgtggggcaagatctgctggttcagccagcgggccggctggacagtgttcgcggaatcccagatcagtctctcctgtagcctctgcctgcacagcggggaccaggaagcacaaaatccgaacttagtatcccagttgtgtggagtgtttttacaaaacgaaactaacgaaactattcatatgcagatgagcatggcggtggggcagcaggccttacctttaaatattatcgcacccaaagcagtgttggtgtctctctgcggggtgttgctgaatgggactgtgttctggctgctgtgctgcggggctaccaacccttacatggtgtacatcctgcacctcgtcgctgcagacgtcatctacctctgctgctccgccgtgggttttctgcaggtcactcttctgacgtaccatggggtggtcttctttatcccagactttctggctatcctgtctcccttttccttcgaggtgtgcctgtgtttgctggttgctatcagtactgagagatgcgtatgcgtgctttttcctatatggtaccgatgtcatcggccaaaatatacgtccaacgtggtttgcaccttgatctggggcctccccttctgcattaatatcgtgaagtctctgttcctcacatattggaaacacgtgaaggcctgcgtgatcttccttaagctgtccggcttatttcatgcaattctaagcctggtcatgtgcgtctcaagcctgactttattgatccggttcctgtgttgcagccaacagcagaaggccacacgggtgtatgccgtggtccaaatcagtgcaccaatgtttcttctgtgggccctgccactatctgttgcccctctgataacagacttcaaaatgtttgttactacttcatacctaataagcctgttcttaattatcaatagcagcgctaatccaataatttatttcttcgtgggctccctacggaagaaacggcttaaggagagtctgagagtgatactccagagggccctcgctgacaagccagaggtcgggaggaataagaaagcagctggaatagatcccatggaacaacctcactccacccagcacgtcgagaacctactcccaagggagcacagggtggacgtcgaaacctag

SEQ ID NO: 229848 - DNA, 1137 bp, Artificial Sequence
  derived and/or modified sequence
atggtgtggggaaaaatatgctggttttcccagcgagctgggtggactgtattcgccgagagccagatcagcttgtcctgtagcctctgtctgcactcaggtgatcaagaggctcagaatccaaacttggtgtcacaactttgtggcgtgtttttacagaatgagaccaatgaaaccattcatatgcagatgtccatggcagtgggccagcaggccctccccctcaatatcatcgcccctaaggccgtgttagtgagcctgtgcggggtactgcttaatggcaccgttttttggctcctgtgctgtggtgccacaaatccgtacatggtttacattctgcacctggtggctgccgatgttatttatctgtgctgcagcgcggtgggcttcttgcaagttacgctgctaacttaccacggcgtcgtcttcttcatcccagacttcctggcgatcctctccccatttagcttcgaggtatgcctctgtctgctcgtcgcaatctcgacagagcgctgcgtgtgtgttctcttccccatatggtatcggtgccatcggcctaaatacacgtccaatgtggtgtgtacactgatttggggtctacccttttgtatcaatatcgtgaagtctctcttcttaacatattggaaacacgtaaaagcttgcgttattttcctgaagctgtctggcctcttccatgccatcctgagcctcgtcatgtgtgtgagctcactgactctcctaatccgatttctgtgctgcagtcaacaacaaaaagctacccgtgtgtacgcggtggtgcagataagcgcaccaatgtttctgctgtgggccttgcctctgtcagttgccccactcatcacagatttcaaaatgtttgtgaccactagttacctgataagccttttcctcattatcaattcatccgctaacccaatcatttactttttcgttgggagcttgcggaagaagaggctgaaggaaagcctcagggtcattctccagagagccctggcagataagccagaggtcggaagaaacaagaaagctgccggaattgaccccatggaacagccccactccacccagcatgtggagaatctgttgccccgagaacacagagttgacgtggagacctag

SEQ ID NO: 229849 - DNA, 1137 bp, Artificial Sequence
  derived and/or modified sequence
atggtgtggggcaaaatctgctggttctcacagagagcaggatggactgtgtttgcagagtcccagatttctctgtcctgcagcctttgtcttcactccggcgaccaagaggcgcagaacccaaatctggtgagccagctgtgcggcgtctttttgcagaatgaaacaaacgaaacaattcatatgcaaatgagcatggccgttggacagcaggcccttcccctaaatatcattgctcctaaagctgtgttagtgtccctttgcggcgtgttgcttaacggaacggtcttctggctgttgtgttgtggtgctacaaatccatacatggtgtatattctgcaccttgttgccgcagacgtcatttacttgtgttgtagtgccgtagggtttctgcaagtcacactgctgacctatcacggagtcgtgttctttatacctgatttcctcgcgatactgagtcctttctctttcgaggtgtgtctttgtctgctcgtcgcgatcagtactgaaaggtgcgtgtgtgtgctgtttccaatttggtacagatgtcaccggccaaaatacacttctaatgtcgtttgcaccttgatttggggtctgccgttttgcataaacattgttaagtccctgtttctcacctattggaagcatgtgaaagcttgcgtcattttccttaagctctctggcttgtttcacgcgatactgagcttggttatgtgcgtgagctcactgaccctcctgatcaggttcttgtgttgcagtcagcaacaaaaagcaacccgagtttatgctgtagtgcagatttccgcccctatgttcctgctctgggctttgccactaagtgtggcacctctgatcacagactttaagatgtttgtgactacttcctatctaatcagcctgtttctgattatcaacagcagcgccaatcccattatttatttttttgtcggcagtttgcgcaaaaagcggttgaaggagtccttgcgcgtgatattacagcgcgcacttgctgataaacctgaagtggggaggaataagaaagctgcaggcatcgatccaatggagcagcctcattctacacagcacgtcgaaaacttgttacctagggagcatcgcgtcgatgttgagacttag

SEQ ID NO: 229850 - DNA, 1137 bp, Artificial Sequence
  derived and/or modified sequence
atggtgtgggggaaaatctgctggttttcacagagggccggatggacagtgttcgccgaatctcagatttcactcagttgctccctgtgcctccacagtggcgatcaagaagcacagaatcccaacctggtatctcagttgtgtggggtgttccttcagaatgagactaacgaaaccatccacatgcaaatgagcatggctgtggggcagcaagctcttcccttgaacatcattgcaccaaaagccgtgctggtcagcttatgcggcgtcctcttgaatggcaccgtgttctggctcctgtgttgcggtgccacaaacccttatatggtgtatatcctgcatctggtagccgctgacgtcatttatttgtgctgtagcgcagtgggcttcctgcaggtgacgctgctcacataccacggtgtggtgttttttatcccagattttttggccatcctctcaccttttagcttcgaggtgtgtctctgccttcttgtggctatctcaaccgagaggtgcgtgtgtgtgctgtttccaatatggtatcggtgtcatcgtccgaaatacacaagcaacgttgtctgtactctcatctggggattgcctttctgcattaacatcgtaaagagcctgttcctgacttactggaagcatgttaaggcatgcgtcatcttcctaaaattaagtggcctgttccatgccattctgtcgttagtaatgtgtgtcagtagtctgacactcctcatacgattcctctgctgtagtcagcagcaaaaggcaaccagagtgtatgccgtggtacagatatccgcgccaatgtttttattgtgggccctgccattgtctgtcgcgcctctgattacggactttaagatgttcgttaccacaagctacctgatcagtctgtttctgataattaattcgagcgccaaccccataatatatttctttgtcggctctcttcgaaaaaaaagactgaaagagtccttaagggtaatcctccagagggctctcgccgataaaccagaggtaggtcgaaacaaaaaggctgctggcatagaccccatggaacagccacactctacccagcacgtggagaacttgctcccgcgtgaacaccgggtggacgtggaaacatag

SEQ ID NO: 229851 - DNA, 1137 bp, Artificial Sequence
  derived and/or modified sequence
atggtgtggggcaaaatttgctggttcagtcagcgagccggatggaccgtcttcgccgaatcccagataagcctctcttgttcactttgcttacacagtggggaccaggaggcacagaaccctaacctggtatctcagctgtgcggggtgttcctacaaaacgagacaaacgaaacaattcacatgcagatgagcatggccgtggggcaacaggcccttcctctgaacataattgccccaaaggccgtgttggtgtcattgtgcggtgtgcttctcaacggcacagtcttttggctcttatgctgtggcgcaaccaacccatatatggtctacatactgcacctggtggccgctgacgtgatctatctttgttgcagcgctgttggtttcctgcaagtgacgctgctcacctaccatggggtggtattcttcatcccggattttctcgctatcttgtcccccttttcgtttgaggtctgtctgtgtctgttggtggctatctctactgagcggtgtgtctgcgtcctgtttcccatctggtacagatgccatcgacccaagtatacgagtaacgttgtgtgcactctgatttgggggttgccattttgcatcaacattgtaaaaagtctttttttgacatactggaaacacgtcaaggcttgtgtcatattcttaaaactgtcggggctgttccatgccatcctgtcacttgtaatgtgtgtgagttcattgaccttgctgatccgctttctgtgctgctcacagcagcagaaggcgaccagggtttacgccgttgtgcaaatcagcgcacccatgtttctactttgggccctgcctttaagtgtagctccactgatcacggactttaagatgtttgtgaccacctcatacctgatttccttattcttgataatcaacagttcggctaaccccatcatttactttttcgttggatctctgcgtaaaaaacggctcaaagagtcactgagggtaatcttgcaaagagcgcttgccgataagcccgaggtcgggcgaaacaaaaaggcagcagggatcgatccaatggagcagcctcactcgacacagcacgtagaaaatctcctccctcgagagcaccgcgtcgatgttgaaacatag

SEQ ID NO: 229852 - DNA, 1137 bp, Artificial Sequence
  derived and/or modified sequence
atggtatggggaaagatctgttggttctctcagagggccggatggaccgtattcgctgagtcacagatctccttgtcttgctccttgtgcctgcactccggcgatcaggaagcacagaatccgaacctggtgagtcagttgtgcggcgtttttctgcagaatgaaaccaacgagacgatccacatgcagatgtctatggcagtgggtcaacaggccctacctttaaacatcatcgccccaaaggctgtgctcgtgtcgttgtgcggggtgctgcttaatggtactgtgttctggctgttgtgttgcggcgcaactaacccatatatggtttacatcctgcacctggtggcagccgatgtgatttacctgtgttgtagtgctgttggatttcttcaagtcaccctgctcacgtaccatggtgtggtctttttcattcctgacttcctggcaatcctgagcccttttagcttcgaggtttgtctgtgcctcttggtagccatttcaacagagagatgtgtgtgtgtgctgttccctatatggtaccggtgtcaccgcccaaagtacacgagcaacgtcgtgtgcaccttgatctggggattgcctttctgtattaatattgtgaaatcgctctttctcacatattggaagcacgtcaaggcttgcgtgatctttctcaaactcagcgggttgtttcacgctatcctgtccttagtaatgtgcgtaagctctttaacattacttattcggttcctgtgctgctcccaacagcagaaggccacacgcgtttatgcagtggtccagatcagcgcacctatgttcctgctctgggctcttcctctgtcagttgcccctctaattacagactttaaaatgttcgtcacaactagctatctcatcagcctcttcctgatcataaattccagtgccaacccaatcatctacttcttcgtgggatcgcttcgcaagaagcggctcaaggaaagccttagggtgattctgcaaagagcattggccgataaacccgaggtcggcagaaacaagaaagccgcaggcatcgatcccatggagcaaccccattctacacagcacgtggaaaacctgttgcccagagagcatagagtggacgtcgagacttag

SEQ ID NO: 229853 - DNA, 1137 bp, Artificial Sequence
  derived and/or modified sequence
atggtgtggggcaagatctgttggttctcacagcgggctggatggaccgtgttcgcagagtcgcagattagtctgtcctgtagcctctgcttgcatagtggggaccaggaggctcaaaatcctaacctggtgtcccaactgtgtggcgttttcctgcaaaatgaaactaacgagacaattcacatgcagatgtcaatggccgtgggacaacaggcgctgccactgaatattatcgcccctaaggccgtcttagtaagcttgtgcggagtgctcttaaacgggaccgtgttttggctcctctgttgtggcgcaacaaatccttatatggtgtacattctccacctagtggccgctgatgtcatctacctgtgctgcagtgctgtggggttcttacaggtaactttgcttacttatcacggagtagtattttttattcccgacttcttggccatcctcagccctttcagtttcgaggtctgtctgtgtctgctggttgccatatctaccgagcgatgcgtctgtgtcctgtttcccatatggtaccgatgccacaggcccaaatacacatcgaacgtggtctgtaccttaatctggggcttgcctttctgcattaacatagtgaagtctctgttcctcacctactggaagcacgtgaaagcttgcgtaatttttctgaagctgtccggattgttccatgccatcctcagcctggtgatgtgcgtgtcctcgctaacactgctgattaggttcctatgttgcagccagcaacaaaaggctaccagagtctatgccgtggtgcagatatccgcccctatgttcctgctgtgggccttgcctctctcagttgcccctcttataacagactttaagatgtttgttacaacctcatacctaatctctctttttctaatcatcaactcctcagccaaccctatcatatacttcttcgtcggctctctccgaaagaaaagactgaaggagtccctccgagtgatcctccagcgcgcactggcagacaagccagaagtgggaaggaacaagaaggcagccggaattgacccgatggagcagccccactctacgcagcacgtcgaaaacctcctgcccagggaacacagggtagatgtggaaacctag

SEQ ID NO: 229854 - DNA, 1137 bp, Artificial Sequence
  derived and/or modified sequence
atggtctggggtaagatctgctggttcagccagcgagccggatggactgtgtttgctgagtcccagataagtctgtcctgctccctctgcctccattcaggcgaccaggaggctcagaaccctaatctcgtttctcaactatgtggagttttcctacaaaacgagacaaacgaaacaatccacatgcagatgtcaatggctgtaggacagcaggctctgccactgaatataatcgctccgaaagccgttctggtaagcctgtgcggcgtgcttcttaacggcacagtgttttggctgctttgttgtggcgctacaaacccctacatggtttatattctacatctcgtggccgctgacgttatctatctgtgctgttccgccgtgggcttcttgcaagtgacgttattgacgtaccatggtgtggtcttttttatacctgatttcctcgcgatcctgtcccctttttcattcgaggtttgtctatgtctactggtcgcaatcagtaccgaacggtgcgtttgtgtactgttcccaatctggtataggtgtcacaggccaaaatacacatccaatgtggtatgcacccttatctggggactgcctttctgcattaatatcgtgaagtccttatttctcacttattggaagcatgttaaagcctgtgtgatttttcttaaactgtctggcctatttcacgccattctgagcctcgtgatgtgtgtctcttcacttacactactgattaggttcctgtgttgtagtcagcagcagaaggccacgcgggtttacgccgtagtgcagatatcggcccctatgtttctcctgtgggcgttgcctttatcggtagctcctcttatcaccgactttaagatgtttgtgacaacgtcgtatttgatctccttatttcttataatcaattcttccgctaatcctatcatctacttcttcgttggatccctccgcaagaagcgtcttaaagagtcactgagagttatcctgcaacgtgctttggccgacaagccggaggtgggaaggaacaagaaagcggcagggatagaccctatggagcagccccactcaacccagcacgttgagaacctcctgcctagggagcaccgagtggatgttgagacttag

SEQ ID NO: 229855 - DNA, 1137 bp, Artificial Sequence
  derived and/or modified sequence
atggtttgggggaagatctgctggttctcgcaacgagcgggttggactgttttcgcagaaagtcagatcagtctgagctgttctctgtgcctgcattccggggaccaagaggcccagaacccaaacttggtgagccagctctgcggtgttttcctccaaaacgagacaaacgaaaccattcacatgcagatgtcaatggctgttggccaacaggctctccctctgaacatcatagccccaaaggctgtgcttgtgagtttatgcggtgtactgttaaatggcaccgtgttctggctgctgtgctgcggagctactaacccatatatggtttatatcctgcacttagtggcagccgatgtgatctatctatgttgttctgcagtcgggttcctacaggttaccctgctaacatatcatggggtggtgtttttcattcctgactttctagcaatattatcgcctttcagctttgaagtctgtctgtgtcttctggtggcaatttccactgagcgctgcgtttgcgtgttgtttcctatatggtatagatgtcaccggccaaagtacacctctaacgtagtttgcactttgatttggggcctgccattctgtatcaatattgtgaagtccttatttttaacatactggaaacacgttaaagcctgtgtgattttcctaaagctttcggggctctttcacgcaatactgtctctcgtaatgtgcgtcagttctctcacactgttaattcggttcctctgctgctcacaacaacagaaagctaccagagtatatgctgtagtgcagatctcagctcccatgttcttgttgtgggccttgccactgtcagtagctcccctgataaccgatttcaaaatgtttgtgacgacgagttatctcatctctctattcctgatcattaactcttctgctaatcctatcatctacttttttgtcggaagtctgcgcaaaaagaggctgaaggagagccttcgtgtcatactccaacgcgctctggctgacaagcctgaagtcggaagaaataagaaagccgctggtattgaccccatggagcagccccattcaacccagcatgttgagaatctattaccacgcgaacatcgggtagacgtcgaaacctag

SEQ ID NO: 229856 - DNA, 1137 bp, Artificial Sequence
  derived and/or modified sequence
atggtgtggggcaagatctgctggttcagccagagagccggctggaccgtgttcgccgagagccagatcagcctgagctgcagcctgtgcctgcacagcggcgaccaggaggcccagaaccccaacctggtgagccagctgtgcggcgtgttcctgcagaacgagaccaacgagaccatccacatgcagatgagcatggccgtgggccagcaggccctgcccctgaacatcatcgcccccaaggccgtgctggtgagcctgtgcggcgtgctgctgaacggcaccgtgttctggctgctgtgctgcggcgccaccaacccctacatggtgtacatcctgcacctggtggccgccgacgtgatctacctgtgctgcagcgccgtgggcttcctgcaggtgaccctgctgacctaccacggcgtggtgttcttcatccccgacttcctggccatcctgagccccttcagcttcgaggtgtgcctgtgcctgctggtggccatcagcaccgagagatgcgtgtgcgtgctgttccccatctggtacagatgccacagacccaagtacaccagcaacgtggtgtgcaccctgatctggggcctgcccttctgcatcaacatcgtgaagagcctgttcctgacctactggaagcacgtgaaggcctgcgtgatcttcctgaagctgagcggcctgttccacgccatcctgagcctggtgatgtgcgtgagcagcctgaccctgctgatcagattcctgtgctgcagccagcagcagaaggccaccagagtgtacgccgtggtgcagatcagcgcccccatgttcctgctgtgggccctgcccctgagcgtggcccccctgatcaccgacttcaagatgttcgtgaccaccagctacctgatcagcctgttcctgatcatcaacagcagcgccaaccccatcatctacttcttcgtgggcagcctgagaaagaagagactgaaggagagcctgagagtgatcctgcagagagccctggccgacaagcccgaggtgggcagaaacaagaaggccgccggcatcgaccccatggagcagccccacagcacccagcacgtggagaacctgctgcccagagagcacagagtggacgtggagacctag

SEQ ID NO: 229857 - protein, 51 aa, Artificial Sequence
  derived and/or modified sequence
MSSHKTFTIKRFLAKKQKQNRPIPQWIQMKPGSKIRYNSKRRHWRRTKLGL

SEQ ID NO: 229858 - DNA, 156 bp, Artificial Sequence
  derived and/or modified sequence
atgtcatcccacaagaccttcacgatcaaacgcttcctggctaagaagcagaagcagaataggcctatccctcagtggattcagatgaagcccggtagcaagatccgctataattccaagcggcgacactggcgccgaactaagcttgggctgtag

SEQ ID NO: 229859 - DNA, 156 bp, Artificial Sequence
  derived and/or modified sequence
atgtcctcacataaaacctttacaatcaaacggtttctggctaagaaacagaagcagaatcgccctatcccacagtggattcagatgaagcctggtagtaagattcgctacaatagtaaacgccgccactggaggagaaccaaattggggctctag

SEQ ID NO: 229860 - DNA, 156 bp, Artificial Sequence
  derived and/or modified sequence
atgtcttcccacaaaactttcacgatcaaacgctttctggcaaagaagcagaaacagaaccggcccatccctcagtggatacagatgaagcccggaagcaaaatccggtacaactccaaacggcgccattggaggcggacaaaactcggcctgtag

SEQ ID NO: 229861 - DNA, 156 bp, Artificial Sequence
  derived and/or modified sequence
atgagcagccacaagaccttcaccatcaagcgcttcctggccaagaagcagaagcagaaccggcccatcccccagtggatccagatgaagccaggcagcaagatccgctacaacagcaagagaagacactggaggaggaccaagctgggcctgtag

SEQ ID NO: 229862 - DNA, 156 bp, Artificial Sequence
  derived and/or modified sequence
atgagcagccacaagaccttcaccatcaagcggttcctggccaagaagcagaaacaaaatcgccctatcccacaatggatccaaatgaagccagggagtaagataaggtacaatagcaaacggagacattggaggcgcaccaaactgggcttatag

SEQ ID NO: 229863 - DNA, 156 bp, Artificial Sequence
  derived and/or modified sequence
atgagcagccacaagaccttcaccatcaagcggttcctggccaagaaacagaagcagaacagaccgataccgcagtggatccagatgaaacctgggtccaagatccgctataattccaagagacgacactggcgacgcaccaaactgggcctttag

SEQ ID NO: 229864 - DNA, 156 bp, Artificial Sequence
  derived and/or modified sequence
atgagcagccacaagaccttcaccatcaagcggttcctggccaagaagcagaagcagaatagaccaatcccacagtggatccagatgaaaccaggcagcaagatccgctataactccaaacggagacactggaggcggacaaaactgggtctgtag

SEQ ID NO: 229865 - DNA, 156 bp, Artificial Sequence
  derived and/or modified sequence
atgtcctcccacaagacattcacaatcaaacgctttctcgccaagaagcagaaacagaatcggccaattccacagtggatccaaatgaagcccggatctaaaattagatataatagcaaacggcgtcactggaggcgtaccaaattgggcctttag

SEQ ID NO: 229866 - DNA, 156 bp, Artificial Sequence
  derived and/or modified sequence
atgagttctcataagacgttcaccattaaaaggttcttggccaagaagcaaaaacaaaacaggccaatcccccaatggatccagatgaaaccaggcagcaaaatccgctataactccaagagaagacattggcgcaggacaaagctgggcctgtag

SEQ ID NO: 229867 - DNA, 156 bp, Artificial Sequence
  derived and/or modified sequence
atgagcagccacaaaacttttactatcaagaggttcttagccaagaagcagaaacaaaacagacctatccctcagtggattcagatgaaacccggatctaaaattcgttacaacagcaagcgacggcactggaggaggacgaagctgggcttgtag

SEQ ID NO: 229868 - DNA, 756 bp, Artificial Sequence
  derived and/or modified sequence
atcaccgccctagcatccggggaaatcgcggtcttagcatccggcgcgcggcggttgaattgctgcgcccagcgaggcaaccgcctccgaacgccaggtgggggcgaggcgtctcggagtctcagagacaccaaggcccctgcgacaaggtggctgcagctaggccgggggcgtcaggacgacggagcgggttcgggtcggtgacacgcagacctgagggagctgggcccgccttttccgcccgcgccccaggcccttgcagatcgagatttgcgtcctagagtgggaaaaaagcagaggccagggcgccgattttatttggagagaagcaagcatctttgcctctttggagtaggaaattcagacttgaaaaagtggtgtgtggttgactctgtttctcgccatgtcttctcacaagactttcaccattaagcgattcctggccaagaaacaaaagcaaaatcgtcccatcccccagtggattcagatgaaacctggtagtaaaatcaggtacaactccaaaaggaggcattggagaagaaccaagctgggtctataaggaattgcacatgagatggcacacatatttatgctgtatcaagttcacgatcatcttacgatatcaagctgaaaatgtcaccactacctggacagttgcacatgttttactgggaatatttttttctgtttttctgtatgctctgtgctagtagggtggattcagtaataaatatgtgaaagcttttgtttcaaaaa

SEQ ID NO: 229869 - DNA, 749 bp, Artificial Sequence
  derived and/or modified sequence
cttttcagactcagcccgcctgcacccaggtgaaataaacagccatgttgctcacacaaagcctgtttggtggtctcttcacatggacgcgcatgaaatttggtgccgtgactcagatcgggggacctcccttgggagatcaatcccctgtcctcctgttctttgctccatgagaaagatccacctacgacctcaggtcctcagacggaccagcccaaggaacatctcaccaattttaaatcagatattttgcctgtgatctatataattttatgccagaagacttggactcaagcattaagatattttatttggagagaagcaagcatctttgcctctttggagtaggaaattcagacttgaaaaagtggtgtgtggttgactctgtttctcgccatgtcttctcacaagactttcaccattaagcgattcctggccaagaaacaaaagcaaaatcgtcccatcccccagtggattcagatgaaacctggtagtaaaatcaggtacaactccaaaaggaggcattggagaagaaccaagctgggtctataaggaattgcacatgagatggcacacatatttatgctgtatcaagttcacgatcatcttacgatatcaagctgaaaatgtcaccactacctggacagttgcacatgttttactgggaatatttttttctgtttttctgtatgctctgtgctagtagggtggattcagtaataaatatgtgaaagcttttgtttcaaaaa

SEQ ID NO: 229870 - DNA, 653 bp, Artificial Sequence
  derived and/or modified sequence
tccggcgcgcggcggttgaattgctgcgcccagcgaggcaaccgcctccgaacgccaggtgggggcgaggcgtctcggagtctcagagacaccaaggcccctgcgacaaggtggctgcagctaggccgggggcgtcaggacgacggagcgggttcgggtcggtgacacgcagacctgagggagctgggcccgccttttccgcccgcgccccaggcccttgcagatcgagatttgcgtcctagagtgggaaaaaagcagaggccagggcgccgtggtgtgtggttgactctgtttctcgccatgtcttctcacaagactttcaccattaagcgattcctggccaagaaacaaaagcaaaatcgtcccatcccccagtggattcagatgaaacctggtagtaaaatcaggtacaactccaaaaggaggcattggagaagaaccaagctgggtctataaggaattgcacatgagatggcacacatatttatgctgtatcaagttcacgatcatcttacgatatcaagctgaaaatgtcaccactacctggacagttgcacatgttttactgggaatatttttttctgtttttctgtatgctctgtgctagtagggtggattcagtaataaatatgtgaaagcttttgtttcaaaaa

SEQ ID NO: 229871 - DNA, 156 bp, Artificial Sequence
  derived and/or modified sequence
atgagcagccacaagaccttcaccatcaagagattcctggccaagaagcagaagcagaacagacccatcccccagtggatccagatgaagcccggcagcaagatcagatacaacagcaagagaagacactggagaagaaccaagctgggcctgtag

SEQ ID NO: 229872 - protein, 686 aa, Artificial Sequence
  derived and/or modified sequence
MLAVPEMGLQGLYIGSSPERSPVPSPPGSPRTQESCGIAPLTPSQSPKPEVRAPQQASFSVVVAIDFGTTSSGYAFSFASDPEAIHMMRKWEGGDPGVAHQKTPTCLLLTPEGAFHSFGYTARDYYHDLDPEEARDWLYFEKFKMKIHSATDLTLKTQLEAVNGKTMPALEVFAHALRFFREHALQELREQSPSLPEKDTVRWVLTVPAIWKQPAKQFMREAAYLAGLVSRENAEQLLIALEPEAASVYCRKLRLHQLLDLSGRAPGGGRLGERRSIDSSFRQAREQLRRSRHSRTFLVESGVGELWAEMQAGDRYVVADCGGGTVDLTVHQLEQPHGTLKELYKASGGPYGAVGVDLAFEQLLCRIFGEDFIATFKRQRPAAWVDLTIAFEARKRTAGPHRAGALNISLPFSFIDFYRKQRGHNVETALRRSSVNFVKWSSQGMLRMSCEAMNELFQPTVSGIIQHIEALLARPEVQGVKLLFLVGGFAESAVLQHAVQAALGARGLRVVVPHDVGLTILKGAVLFGQAPGVVRVRRSPLTYGVGVLNRFVPGRHPPEKLLVRDGRRWCTDVFERFVAAEQSVALGEEVRRSYCPARPGQRRVLINLYCCAAEDARFITDPGVRKCGALSLELEPADCGQDTAGAPPGRREIRAAMQFGDTEIKVTAVDVSTNRSVRASIDFLSN

SEQ ID NO: 229873 - protein, 600 aa, Artificial Sequence
  derived and/or modified sequence
MMRKWEGGDPGVAHQKTPTCLLLTPEGAFHSFGYTARDYYHDLDPEEARDWLYFEKFKMKIHSATDLTLKTQLEAVNGKTMPALEVFAHALRFFREHALQELREQSPSLPEKDTVRWVLTVPAIWKQPAKQFMREAAYLAGLVSRENAEQLLIALEPEAASVYCRKLRLHQLLDLSGRAPGGGRLGERRSIDSSFRQAREQLRRSRHSRTFLVESGVGELWAEMQAGDRYVVADCGGGTVDLTVHQLEQPHGTLKELYKASGGPYGAVGVDLAFEQLLCRIFGEDFIATFKRQRPAAWVDLTIAFEARKRTAGPHRAGALNISLPFSFIDFYRKQRGHNVETALRRSSVNFVKWSSQGMLRMSCEAMNELFQPTVSGIIQHIEALLARPEVQGVKLLFLVGGFAESAVLQHAVQAALGARGLRVVVPHDVGLTILKGAVLFGQAPGVVRVRRSPLTYGVGVLNRFVPGRHPPEKLLVRDGRRWCTDVFERFVAAEQSVALGEEVRRSYCPARPGQRRVLINLYCCAAEDARFITDPGVRKCGALSLELEPADCGQDTAGAPPGRREIRAAMQFGDTEIKVTAVDVSTNRSVRASIDFLSN

SEQ ID NO: 229874 - protein, 520 aa, Artificial Sequence
  derived and/or modified sequence
MPALEVFAHALRFFREHALQELREQSPSLPEKDTVRWVLTVPAIWKQPAKQFMREAAYLAGLVSRENAEQLLIALEPEAASVYCRKLRLHQLLDLSGRAPGGGRLGERRSIDSSFRQAREQLRRSRHSRTFLVESGVGELWAEMQAGDRYVVADCGGGTVDLTVHQLEQPHGTLKELYKASGGPYGAVGVDLAFEQLLCRIFGEDFIATFKRQRPAAWVDLTIAFEARKRTAGPHRAGALNISLPFSFIDFYRKQRGHNVETALRRSSVNFVKWSSQGMLRMSCEAMNELFQPTVSGIIQHIEALLARPEVQGVKLLFLVGGFAESAVLQHAVQAALGARGLRVVVPHDVGLTILKGAVLFGQAPGVVRVRRSPLTYGVGVLNRFVPGRHPPEKLLVRDGRRWCTDVFERFVAAEQSVALGEEVRRSYCPARPGQRRVLINLYCCAAEDARFITDPGVRKCGALSLELEPADCGQDTAGAPPGRREIRAAMQFGDTEIKVTAVDVSTNRSVRASIDFLSN

SEQ ID NO: 229875 - DNA, 2061 bp, Artificial Sequence
  derived and/or modified sequence
atgctggcggtgccagagatgggtttgcagggcctgtacatcgggagcagtccggaacgatctccagtgccatctccccccggaagcccgaggacacaggagagttgcggcattgcgcccctgacgccgagccaaagccccaagccagaggtgagggccccacagcaagcgagtttttccgttgtggtggcgattgattttggcactaccagctccgggtatgcattttctttcgcgagtgatcccgaggccatacacatgatgcgaaaatgggaaggaggcgacccaggcgtggctcaccagaagacaccaacttgtctgctgctaactccagagggtgcattccatagttttggttatactgcccgcgactattatcacgacctagacccagaagaagccagggactggctgtatttcgagaagtttaagatgaagatccattccgccacggatctgacccttaagactcagctggaagctgtcaatggaaaaactatgcctgctctggaggtgttcgcacatgctctgagattcttccgggagcatgctttacaagaactgagggaacagtccccttctctccctgagaaggacacagtgcggtgggttcttaccgtgccagcaatatggaaacagcctgcaaagcagtttatgcgcgaggctgcgtacctggccggattggtctcacgcgaaaacgccgagcagctgctcatcgctttggaacctgaggccgctagtgtctattgcagaaaactgaggttacaccagctattggacctgtcggggcgtgctcccggtggagggcgtctcggagaaagacggagcatcgatagttcatttcggcaagcccgggagcagttaaggcggagtcgccacagtcgcacttttctcgtggaatctggcgtgggagaactttgggctgagatgcaggccggcgacaggtatgtggttgccgattgtggaggcggaactgtggacctgaccgtccaccagctggagcagccgcatgggacactgaaggaactatacaaagcaagcgggggtccgtacggagccgttggcgtcgaccttgccttcgaacagctgctgtgtaggatattcggtgaagatttcatagctaccttcaaaaggcagagacctgcagcgtgggttgaccttaccattgctttcgaggctagaaaaaggactgccgggccccaccgcgcaggcgcgctgaatatttccctgccctttagtttcatcgatttttacaggaaacagagaggccataatgtcgagacagccttacgaaggtcgtcagtgaatttcgtgaagtggtcatcccaggggatgttacggatgagctgcgaggctatgaatgaactgttccaacccactgtgtcgggtatcattcagcatatcgaagccctccttgccaggcccgaggtgcaaggcgttaaattactgtttttagttgggggttttgccgagagtgccgtcctgcaacacgctgtgcaggcagcattgggggccagagggcttcgggtcgtcgtgccacacgatgttggcctgaccatcttaaagggagctgtgctgttcggccaggcacccggcgttgtgagagtgcgcaggtccccgctcacatacggggttggagtgctgaaccgattcgtcccaggacgccacccacctgaaaaacttctggttagggatggcagacgatggtgtactgacgttttcgaacgattcgtggccgctgagcagagcgttgcactcggggaggaggtgcgccggagttactgcccagctagaccgggccagcgccgtgtgctaatcaacctttactgctgtgccgcagaagacgcccgttttatcaccgatcccggggtcagaaagtgcggggctctgagcttagaactggagcccgccgattgtgggcaggatactgcaggagcccctccaggaaggcgtgagatacgtgccgccatgcagtttggggacacagagattaaagtgaccgctgtggatgtgtcaacgaatcgctccgttcgggcttcaatcgatttcctttcaaactag

SEQ ID NO: 229876 - DNA, 1803 bp, Artificial Sequence
  derived and/or modified sequence
atgatgcgcaagtgggagggcggagatcctggggtcgcacatcaaaagacgcctacctgtctgctgttgactcccgaaggagccttccactcctttgggtacacagctagggactactaccatgacttggatccggaggaggcccgggactggctctatttcgaaaaattcaaaatgaagatccatagtgcgaccgatcttacattgaagacacagctggaagccgtaaatggtaaaacaatgcctgccctcgaagtatttgcccacgctctacgcttcttccgggagcatgcactgcaggagctgagggagcagagccccagcctgccagagaaggacacagttcgctgggtgctgactgtaccagctatctggaaacaacctgcaaagcaattcatgcgggaggccgcgtatctggccggacttgtatctagggagaacgctgagcagctcctgattgccctggaaccagaggcggcttcggtatactgtcgcaagctgcgcttacatcagctgcttgatctatccggaagggccccaggcggcggacgcctgggagaacgaagaagcatagattcatcattccggcaagcccgtgaacagctgcgccggtcaaggcacagcagaacttttctggtggaatccggtgtcggtgaattatgggctgagatgcaggccggagatagatatgtcgtggcagactgcggtggcggcactgtcgacctgacagttcatcagctcgagcagccgcatggaactctaaaagagttatataaggcaagcggcggcccatatggcgcagtgggcgtggacctcgctttcgagcagctgctgtgtagaatctttggcgaggatttcatcgcaacgttcaagagacaaaggcctgcagcttgggtggaccttactattgctttcgaggcacgtaaacgcacagccgggccgcatagagccggtgccctcaacatcagtcttccttttagtttcatcgacttctacagaaagcagagggggcacaacgtggagaccgcactgcggaggagctccgtaaatttcgtcaagtggtccagccaagggatgttaagaatgagttgcgaagccatgaatgagctattccaaccaaccgtctccggtatcatccagcacatcgaggctctattggctaggcctgaggtccagggggtgaagctgctgttcctggtgggggggttcgccgagtctgcagtgttacagcacgccgtccaggccgcgctcggtgcccggggtcttcgagtcgtggtgccccacgacgtggggttgacaatcctgaaaggagctgtgctattcgggcaagcacctggcgtggtacgcgtgaggcgatccccactcacttatggtgtgggtgttctgaatcgctttgtgcctggccggcatccaccagagaagctgctggtacgggacgggcgcaggtggtgtacagatgtattcgagcgctttgtggctgccgaacagtccgtggctctcggggaagaggtgagaagatcttactgccctgctagacctggacagagacgcgtgctgatcaacttgtattgttgtgctgctgaagatgctcggtttatcactgatcctggcgtgcgtaaatgcggagctctgagtctggagttagagccggctgattgtggccaggacaccgccggtgctccgccggggagacgtgaaatacgagccgcaatgcagtttggcgatactgagattaaagtcacagccgtggatgtcagcactaacagatccgttcgcgctagcattgacttcctgtccaactag

SEQ ID NO: 229877 - DNA, 1563 bp, Artificial Sequence
  derived and/or modified sequence
atgcctgcgttggaggtcttcgcccacgctctcaggtttttcagagagcacgccctgcaggagttacgggaacagagcccaagtctacccgaaaaggacacggttaggtgggtgctgacagtccctgctatttggaaacaacccgccaagcagttcatgagagaagccgcttacctagccgggcttgtgtcacgggagaacgccgagcagctgctcatcgcactggaacccgaggccgcatctgtttactgcaggaagcttagattacatcagctgctggacctttcaggtcgcgcacccggagggggaaggttgggggagagacgcagtatcgattcaagtttccgccaggctcgggaacagctgcgtaggagccgtcacagtcggacctttctagttgagtccggggtcggcgagctgtgggccgaaatgcaggcaggggacagatacgttgtcgccgattgtggggggggcacggtggatctgaccgttcaccagctggaacagccccacgggaccctgaaggaactatacaaagctagtggagggccatatggcgccgtcggcgtcgatctagccttcgagcagctcctatgcaggatttttggtgaagatttcatagcaactttcaaaagacagcgacctgcagcctgggtggatttgacaattgccttcgaggccagaaagcggaccgctggtccacaccgagcaggggccctcaatatcagtctgcctttcagcttcatcgacttttatcggaagcagcgcggacacaacgtggaaactgcactcagaagatcatccgtgaacttcgtcaagtggtcctcacagggcatgcttaggatgtcctgtgaagctatgaacgagctgtttcagcccacggtgagcggcataatacagcacattgaagcgcttctggcacgccctgaagtccaaggcgtcaagctgctctttctggtggggggcttcgccgaatctgcagtacttcagcatgcagtgcaggccgctttgggggcacgtggccttagggtggtggtgccacatgacgtcgggctgaccatcctgaagggggctgtgctgttcggacaggcacccggagtggtcagagtgcgacggtcacccctgacctacggagtgggcgtgcttaatcgcttcgtgcccggccgccacccccccgaaaaactccttgtccgggatgggagacggtggtgtaccgatgtgttcgaaagattcgttgctgccgagcagtctgtggcccttggtgaggaagtgagaagaagttactgccccgcccggcccggacagcgccgcgtgctgataaatttgtattgttgcgccgctgaagacgcccggtttatcacagacccaggcgtcagaaaatgcggagccctgtcactggaactcgagccagccgactgcgggcaagatactgcgggggctccacctggacggagagaaatccgtgcagcaatgcagttcggagacacagaaatcaaggttacagccgtcgacgtgagcactaatcgcagtgtgcgggctagtatcgatttcctctctaattag

SEQ ID NO: 229878 - DNA, 3009 bp, Artificial Sequence
  derived and/or modified sequence
ggccgccgcagcgggcacggccaacgagctgcgggcccgggatcgcggcggctggacggggctggagctgtcgggagggcggagctacagggcctgcaaggatgttggctgtcccggagatgggcctgcaggggctgtacatcgaaacccgaggtccgagccccccagcaggcctccttctctgtggtggtggccattgacttcggcaccacgtctagtggctatgctttcagctttgccagtgaccctgaggccatccacatgatgaggaaatgggagggcggagacccgggcgtggcccaccagaagaccccgacctgcctgctgctgactccggagggcgccttccacagctttggctacaccgcccgcgattactaccatgacctggaccccgaagaggcgcgggactggctctacttcgagaagttcaagatgaagatccacagcgccacggatctcaccttgaagacccagctagaggcagtaaatggaaagacgatgcccgccctggaggtgttcgcccatgccctgcgcttcttcagggagcacgcccttcaggagctgagggagcagagcccatcgctgccagagaaggacactgtgcgctgggtgttgacggtgcctgccatctggaaacagccagccaagcagttcatgcgggaggctgcctacctggctggactagtgtcccgagagaatgcagagcagctactcatcgccctggagcccgaggccgcctcggtatactgccgcaagctgcgcctgcaccagctcctggacctgagtggccgggccccaggtggtgggcgcctgggtgagcgccgctccatcgactccagcttccgtcaggctcgggagcagctgcgaaggtcccgccacagccgcacgttcctggtggagtcaggcgtaggagagctgtgggcagagatgcaagcaggagaccgctacgtggtggccgactgcggcggaggcaccgtggacctgacggtgcaccagctggagcagccccatggcaccctcaaggagctctacaaggcatctgggggcccttatggcgcggtgggcgtggacctggccttcgagcagctgctgtgccgcatcttcggcgaggacttcatcgccaccttcaaaaggcaacggccggcagcctgggtagatctgaccatcgccttcgaggctcgcaagcgcactgctggcccacaccgtgcaggggcgctcaacatctcgctgcccttctccttcattgacttctaccgcaagcagcggggccacaacgtggagaccgctctgcgcaggagcagcgtgaacttcgtgaagtggtcctcacaggggatgctccgaatgtcttgtgaagccatgaacgagctctttcagcccaccgtcagcgggatcatccagcacatagaggccctgctggcacggccggaggtgcagggtgtgaagctgctgttcctagtgggcggcttcgccgagtcagcggtgctgcagcacgcggtgcaggcggcgctgggcgcccgcggtctgcgtgtcgtggtcccgcacgacgtgggcctcaccatcctcaaaggcgcggtgctgttcggccaggcgccgggcgtggtgcgggtccgccgctcgccgctcacctatggcgtgggcgtgctcaaccgctttgtgcctgggcgccacccgcccgaaaagctgctggttcgcgacggccgccgctggtgcaccgacgtcttcgagcgcttcgtggccgccgagcagtcggtggccctgggcgaggaggtgcggcgcagctactgcccggcgcgtcccggccagcggcgcgtactcatcaacctgtactgctgcgcggcagaggatgcgcgcttcatcaccgaccccggcgtgcgcaaatgcggcgcgctcagcctcgagcttgagcccgccgactgcggccaggacaccgccggcgcgcctcccggccgccgcgagatccgcgccgccatgcagtttggcgacaccgaaattaaggtcaccgccgtcgacgtcagcaccaatcgctccgtgcgcgcgtccatcgactttctttccaactgagggcgcgccggcgcggtgccagcgccgtctgcccggccccgccctctttcggttcaggggcctgcggagcgggttggggcgggggaaacgatagttctgcagtctgcgcctttccacgccctccagccccgggggagataaggtcatgggagagtgggtggggacacacccagagactggctttgggattgggcactggtccgctgactgccaggctgaagggacccgccaaggactgaacgggtaagagaagaggtttgcaagacagagcgcgcagcccggcaaggggcatgtgaccccgaaggaagaacgcaacagaagagtcctggtctgaacttggccgagtaggggtgggggtgggatggcaggaggagccgcaggaggaaggaggttgtgcagggtctggacctgcagggctgaagttcactcatcgaccgactcagccccaaccgggagccaggcagaaaaaccctgtgccgtaggaaagtgactggaagtggactccagagggacaggtgtggtggcacagtcctggtgtggtgctgaccacccaaatatgactgtgaattgtggaaagggcagtagatctctaatgtggaggtgggaacattattgtggtggaggcaattatgagggtagcatttctttcgagacaaaacacccgtctgggaaggccccaaggtcagcttatgaaggaccccacttgcaccccaccccagccatggaagagcagctggagggtggatggggaggccagagggagcaatgaggggtggtcccagctctgctattgactcggtatgcctttaggacattctcttaccgctcatgggcctcagtttcctaaagtgtgaaatgtcaggcacttccctctaactggcatgcaacagccccacctgcctgagagccctgaggtgacaataaaacatttatgctcaaggggaa

SEQ ID NO: 229879 - DNA, 2126 bp, Artificial Sequence
  derived and/or modified sequence
ggaggcctcagggccgggcgcacgtcgagggctgcggccgccgcagcgggcacggccaacgagctgcgggcccgggatcgcggcggctggacggggctggagctgtcgggagggcggagctacagggcctgcaaggatgttggctgtcccggagatgggcctgcaggggctgtacatcggaaatgggagggcggagacccgggcgtggcccaccagaagaccccgacctgcctgctgctgactccggagggcgccttccacagctttggctacaccgcccgcgattactaccatgacctggaccccgaagaggcgcgggactggctctacttcgagaagttcaagatgaagatccacagcgccacgagccgccctgtgtccctgccaggatctcaccttgaagacccagctagaggcagtaaatggaaagacgatgcccgccctggaggtgttcgcccatgccctgcgcttcttcagggagcacgcccttcaggagctgagggagcagagcccatcgctgccagagaaggacactgtgcgctgggtgttgacggtgcctgccatctggaaacagccagccaagcagttcatgcgggaggctgcctacctggctggactagtgtcccgagagaatgcagagcagctactcatcgccctggagcccgaggccgcctcggtatactgccgcaagctgcgcctgcaccagctcctggacctgagtggccgggccccaggtggtgggcgcctgggtgagcgccgctccatcgactccagcttccgtcaggctcgggagcagctgcgaaggtcccgccacagccgcacgttcctggtggagtcaggcgtaggagagctgtgggcagagatgcaagcaggagaccgctacgtggtggccgactgcggcggaggcaccgtggacctgacggtgcaccagctggagcagccccatggcaccctcaaggagctctacaaggcatctgggggcccttatggcgcggtgggcgtggacctggccttcgagcagctgctgtgccgcatcttcggcgaggacttcatcgccaccttcaaaaggcaacggccggcagcctgggtagatctgaccatcgccttcgaggctcgcaagcgcactgctggcccacaccgtgcaggggcgctcaacatctcgctgcccttctccttcattgacttctaccgcaagcagcggggccacaacgtggagaccgctctgcgcaggagcagcgtgaacttcgtgaagtggtcctcacaggggatgctccgaatgtcttgtgaagccatgaacgagctctttcagcccaccgtcagcgggatcatccagcacatagaggccctgctggcacggccggaggtgcagggtgtgaagctgctgttcctagtgggcggcttcgccgagtcagcggtgctgcagcacgcggtgcaggcggcgctgggcgcccgcggtctgcgtgtcgtggtcccgcacgacgtgggcctcaccatcctcaaaggcgcggtgctgttcggccaggcgccgggcgtggtgcgggtccgccgctcgccgctcacctatggcgtgggcgtgctcaaccgctttgtgcctgggcgccacccgcccgaaaagctgctggttcgcgacggccgccgctggtgcaccgacgtcttcgagcgcttcgtggccgccgagcagtcggtggccctgggcgaggaggtgcggcgcagctactgcccggcgcgtcccggccagcggcgcgtactcatcaacctgtactgctgcgcggcagaggatgcgcgcttcatcaccgaccccggcgtgcgcaaatgcggcgcgctcagcctcgagcttgagcccgccgactgcggccaggacaccgccggcgcgcctcccggccgccgcgagatccgcgccgccatgcagtttggcgacaccgaaattaaggtcaccgccgtcgacgtcagcaccaatcgctccgtgcgcgcgtccatcgactttctttccaactgagggcgcgccggcgcggtgccagcgccgtctgcccggccccgccctctttcggttcaggggcctgcggagcgggttggggcgggggaaacgatagttctgcagtctgcgcctttccacgccctccagcccc

SEQ ID NO: 229880 - DNA, 2061 bp, Artificial Sequence
  derived and/or modified sequence
atgctggccgtgcctgagatgggcctgcagggcctgtacatcggcagcagccctgagaggagccctgtgcccagccccccaggcagccccaggacccaggagagctgtggcatcgcccccctgacccccagccagagccccaagccagaggtgcgggccccccagcaggccagcttctctgtggtggtggccatcgactttggcaccaccagcagcggctacgccttctcctttgccagtgaccctgaggccatccacatgatgaggaagtgggagggcggggaccccggggtggcccaccagaagacccccacctgcctgctgctgaccccagagggcgccttccacagctttggctacacagcccgggactactaccatgacctggaccctgaggaggcccgggactggctgtactttgagaagttcaagatgaagatccacagcgccacagacctgaccctgaagacccagctggaggccgtgaatggcaagaccatgcctgccctggaggtgtttgcccacgccctgcgcttcttccgggagcacgccctgcaggagctgcgggagcagagccccagcctgcctgagaaggacacagtgcgctgggtgctgactgtgcctgccatctggaagcagcctgccaagcagttcatgagggaggccgcctacctggccggcctggtgtcccgggagaatgctgagcagctgctgattgccctggagcctgaggccgcctctgtgtactgcaggaagctgcggctgcaccagctgctggacctgagcggccgggcccctgggggcggccgcctgggggagcggcgcagcattgacagcagcttccggcaggcccgggagcagctgcggcgcagccgccacagcaggaccttcctggtggagagcggcgtgggggagctgtgggccgagatgcaggccggggaccgctacgtggtggccgactgtggcggcggcaccgtggacctgactgtgcaccagctggagcagccccacggcaccctgaaggagctgtacaaggccagcggcggcccctatggagctgtgggcgtggacctggcctttgagcagctgctgtgccgcatctttggagaggacttcatcgccaccttcaagaggcagaggcctgctgcctgggtggacctgaccatcgcctttgaggccaggaagaggacagctggcccccacagagctggggccctgaacatcagcctgcccttctccttcatcgacttctacaggaagcagaggggccacaacgtggagacagccctgcggcgcagctctgtgaactttgtgaagtggagcagccagggcatgctgaggatgagctgtgaggccatgaatgagctgttccagcccaccgtgtctggcatcatccagcacatcgaggccctgctggcccggcctgaggtgcagggcgtgaagctgctcttcctggtgggcggctttgctgagagcgctgtgctgcagcacgctgtgcaggccgccctgggcgcccggggcctgcgggtggtggtgccccatgatgtgggcctgaccatcctgaagggagctgtgctgtttggccaggcccctggggtggtgcgggtgagaagaagccccctgacctatggagtgggcgtgctgaacagatttgtgcccggccgccaccccccagagaagctgctggtgagagatggaagacgctggtgcacagatgtgtttgaaagatttgtggccgctgagcagagcgtggccctgggggaggaggtgagaagaagctactgcccagcccggcccggccagaggagagtgctgatcaacctgtactgctgtgccgcagaagatgcccgcttcatcacagaccccggggtgaggaaatgtggggccctgagcctggagctggagcctgctgactgtggccaggacacagctggggcccctcctggccggcgggagatccgggccgccatgcagtttggagacacagagatcaaggtgacagctgtggatgtgtccaccaacagatctgtgcgggccagcattgacttcctgagcaactag

SEQ ID NO: 229881 - DNA, 1803 bp, Artificial Sequence
  derived and/or modified sequence
atgatgaggaagtgggagggcggggaccccggggtggcccaccagaagacccccacctgcctgctgctgaccccagagggcgccttccacagctttggctacacagcccgggactactaccatgacctggaccctgaggaggcccgggactggctgtactttgagaagttcaagatgaagatccacagcgccacagacctgaccctgaagacccagctggaggccgtgaatggcaagaccatgcctgccctggaggtgtttgcccacgccctgcgcttcttccgggagcacgccctgcaggagctgcgggagcagagccccagcctgcctgagaaggacacagtgcgctgggtgctgactgtgcctgccatctggaagcagcctgccaagcagttcatgagggaggccgcctacctggccggcctggtgtcccgggagaatgctgagcagctgctgattgccctggagcctgaggccgcctctgtgtactgcaggaagctgcggctgcaccagctgctggacctgagcggccgggcccctgggggcggccgcctgggggagcggcgcagcattgacagcagcttccggcaggcccgggagcagctgcggcgcagccgccacagcaggaccttcctggtggagagcggcgtgggggagctgtgggccgagatgcaggccggggaccgctacgtggtggccgactgtggcggcggcaccgtggacctgactgtgcaccagctggagcagccccacggcaccctgaaggagctgtacaaggccagcggcggcccctatggagctgtgggcgtggacctggcctttgagcagctgctgtgccgcatctttggagaggacttcatcgccaccttcaagaggcagaggcctgctgcctgggtggacctgaccatcgcctttgaggccaggaagaggacagctggcccccacagagctggggccctgaacatcagcctgcccttctccttcatcgacttctacaggaagcagaggggccacaacgtggagacagccctgcggcgcagctctgtgaactttgtgaagtggagcagccagggcatgctgaggatgagctgtgaggccatgaatgagctgttccagcccaccgtgtctggcatcatccagcacatcgaggccctgctggcccggcctgaggtgcagggcgtgaagctgctcttcctggtgggcggctttgctgagagcgctgtgctgcagcacgctgtgcaggccgccctgggcgcccggggcctgcgggtggtggtgccccatgatgtgggcctgaccatcctgaagggagctgtgctgtttggccaggcccctggggtggtgcgggtgagaagaagccccctgacctatggagtgggcgtgctgaacagatttgtgcccggccgccaccccccagagaagctgctggtgagagatggaagacgctggtgcacagatgtgtttgaaagatttgtggccgctgagcagagcgtggccctgggggaggaggtgagaagaagctactgcccagcccggcccggccagaggagagtgctgatcaacctgtactgctgtgccgcagaagatgcccgcttcatcacagaccccggggtgaggaaatgtggggccctgagcctggagctggagcctgctgactgtggccaggacacagctggggcccctcctggccggcgggagatccgggccgccatgcagtttggagacacagagatcaaggtgacagctgtggatgtgtccaccaacagatctgtgcgggccagcattgacttcctgagcaactag

SEQ ID NO: 229882 - DNA, 1563 bp, Artificial Sequence
  derived and/or modified sequence
atgcctgccctggaggtgtttgcccacgccctgcgcttcttccgggagcacgccctgcaggagctgcgggagcagagccccagcctgcctgagaaggacacagtgcgctgggtgctgactgtgcctgccatctggaagcagcctgccaagcagttcatgagggaggccgcctacctggccggcctggtgtcccgggagaatgctgagcagctgctgattgccctggagcctgaggccgcctctgtgtactgcaggaagctgcggctgcaccagctgctggacctgagcggccgggcccctgggggcggccgcctgggggagcggcgcagcattgacagcagcttccggcaggcccgggagcagctgcggcgcagccgccacagcaggaccttcctggtggagagcggcgtgggggagctgtgggccgagatgcaggccggggaccgctacgtggtggccgactgtggcggcggcaccgtggacctgactgtgcaccagctggagcagccccacggcaccctgaaggagctgtacaaggccagcggcggcccctatggagctgtgggcgtggacctggcctttgagcagctgctgtgccgcatctttggagaggacttcatcgccaccttcaagaggcagaggcctgctgcctgggtggacctgaccatcgcctttgaggccaggaagaggacagctggcccccacagagctggggccctgaacatcagcctgcccttctccttcatcgacttctacaggaagcagaggggccacaacgtggagacagccctgcggcgcagctctgtgaactttgtgaagtggagcagccagggcatgctgaggatgagctgtgaggccatgaatgagctgttccagcccaccgtgtctggcatcatccagcacatcgaggccctgctggcccggcctgaggtgcagggcgtgaagctgctcttcctggtgggcggctttgctgagagcgctgtgctgcagcacgctgtgcaggccgccctgggcgcccggggcctgcgggtggtggtgccccatgatgtgggcctgaccatcctgaagggagctgtgctgtttggccaggcccctggggtggtgcgggtgagaagaagccccctgacctatggagtgggcgtgctgaacagatttgtgcccggccgccaccccccagagaagctgctggtgagagatggaagacgctggtgcacagatgtgtttgaaagatttgtggccgctgagcagagcgtggccctgggggaggaggtgagaagaagctactgcccagcccggcccggccagaggagagtgctgatcaacctgtactgctgtgccgcagaagatgcccgcttcatcacagaccccggggtgaggaaatgtggggccctgagcctggagctggagcctgctgactgtggccaggacacagctggggcccctcctggccggcgggagatccgggccgccatgcagtttggagacacagagatcaaggtgacagctgtggatgtgtccaccaacagatctgtgcgggccagcattgacttcctgagcaactag

SEQ ID NO: 229883 - DNA, 2061 bp, Artificial Sequence
  derived and/or modified sequence
atgctggccgtgcccgagatgggcctgcagggcctgtacatcggctcctcccctgagaggagccctgtaccaagtccacctggatcaccccgaacccaggagtcttgtggaattgctcccctcacaccctctcaaagccccaaacccgaggtacgcgccccccaacaagcctcattttccgttgtcgtggcaatcgatttcggcactacgagctccggctacgcgttttccttcgcatccgatccagaggctatacacatgatgcgcaagtgggaagggggcgatcccggggtggcacatcagaaaaccccaacctgtctgctgctcacaccggagggagcatttcattcttttgggtatacagccagggactattatcacgatcttgatccggaggaagcacgggactggctgtatttcgagaaatttaagatgaaaattcacagtgccaccgacctcaccctgaagacgcagttagaagcagtgaatggtaaaacgatgcctgccttggaggtattcgcacacgctctccgcttcttcagagaacatgcccttcaggagctgcgcgagcagtccccttcccttcccgagaaggataccgtacggtgggtactgactgtgcccgccatctggaagcagcctgcaaagcaattcatgcgcgaagccgcctacctcgccggactcgtcagtcgcgaaaacgccgaacagctgctaattgctcttgaacctgaagccgcctctgtgtattgccggaagctccgccttcatcaattactcgacctgtctgggcgggccccaggcggcggaagactcggagagcgcagatcaatcgattccagcttcaggcaggccagagaacaactgcggcgaagtcgacactcaaggacattcctagtcgaaagtggcgtcggagagttgtgggccgagatgcaggctggcgataggtacgttgtggcggattgcggcggcggtactgtggatttgactgtacatcaattggaacaacctcacggaactctcaaggaattgtataaagcctcggggggaccatatggcgccgtcggtgtagacctggctttcgagcagctcttatgccgaatattcggggaggatttcattgctacttttaagaggcaacgaccggccgcctgggtagatttgacgatcgccttcgaagcccgaaagagaacagccggccctcaccgcgccggagctcttaatatctcactccctttctcctttatcgacttctatcgcaaacagcgaggccacaacgtggagaccgcattgcgacggtcttctgttaactttgttaaatggtcatcacagggaatgctgcgtatgagctgtgaagctatgaatgagctcttccagcctactgtctccggaataattcagcacatcgaggccctgctggcaagaccagaggtgcagggagtgaaactgctgttcctggttggtggctttgctgagtccgctgtgttgcaacatgccgtccaggcagccctgggggcccgagggctcagagtcgtggttcctcacgacgttggcctcacgatcctgaaaggtgctgtattgtttgggcaagcacctggtgtggttagagtacgccgtagccccttgacgtatggagtaggcgtcctcaataggttcgtaccaggaagacatccccctgagaagcttctggtgcgtgacggcaggagatggtgtaccgacgtattcgagcgcttcgtggccgccgagcaatctgtagcactgggtgaagaagtccgacgatcatattgccccgctcggcccggtcaacgccgggtactgatcaatctatactgctgcgccgcagaggatgctaggtttatcaccgaccccggagtgagaaaatgcggcgcactgtctcttgagctggagccagccgattgtgggcaagatactgcgggcgctccccccggccgacgggaaattcgcgcggccatgcagttcggcgacaccgagatcaaggttaccgctgtggacgtaagcacaaaccgcagcgtacgggctagtattgacttcctgagcaactag

SEQ ID NO: 229884 - DNA, 1803 bp, Artificial Sequence
  derived and/or modified sequence
atgatgcggaagtgggagggcggcgaccccggcgtggcccaccagaagacccccacctgtttgttgctgacaccggaaggtgctttccactcgttcggatataccgccagagactattaccatgatctcgaccccgaggaggcaagggattggctttattttgaaaagtttaaaatgaagatccatagcgccacagatctcaccctgaaaacccagctggaggctgttaacggtaaaaccatgcctgccttagaggtgtttgcccacgccctgagatttttccgcgagcacgctttgcaagagctgagagaacaaagcccttcactgccggaaaaggatacagtgaggtgggttttaacagttcctgctatatggaagcagcctgccaagcaatttatgagggaggcagcttacctggccggattggtgagcagagagaatgccgaacagctcctgatcgcactggagcccgaagctgctagcgtctactgccgaaaactgcggttacatcaattgctggatctctctggccgcgctccgggtggaggcagactgggcgaacgccgcagcattgactcaagcttccgccaggctagagagcagcttcgtaggagcagacacagtcgaactttccttgttgagagcggtgtgggagagctctgggctgagatgcaggccggtgacagatatgtggtggcagactgcggcggcggaaccgtggatctaacagtccatcagctagagcagcctcatggcactctgaaggagctgtacaaagcctcaggagggccttatggggcggtcggtgttgatttagctttcgaacagctactatgtagaatctttggagaggatttcattgctacctttaaaagacagcgccctgctgcttgggtggacctgaccattgcatttgaagcaagaaaacgcaccgccgggccacaccgcgccggggccctgaacatcagtttaccgttttcgttcattgacttttaccggaaacagaggggacataatgtcgagaccgctctcaggaggagttccgtaaacttcgtgaagtggtcttcccaagggatgttgagaatgtcttgcgaggccatgaacgaactttttcagcccacggtttcgggaataatccagcacattgaggcactcctggccagacctgaggttcagggagttaagctgctgtttttggtgggtggttttgccgaatcggccgttttgcagcacgcagtgcaggcagccctgggcgcgcgaggtcttcgtgtggtcgtgccccacgacgtgggactgacgatcttgaagggcgcagtgctttttggtcaggctcctggcgtcgtgcgggtcagacgctcaccgttaacgtatggggtaggagtgctaaacagattcgtccccggccggcacccccccgaaaagttgctggttagggacgggaggcggtggtgcaccgacgtatttgaacgctttgtcgccgcggagcaaagcgtcgctcttggggaagaagtgagacgctcttattgtcctgcacgaccgggacagcgaagagtgttaattaacctttactgttgcgccgcagaagacgcccggttcataacggaccccggggtgagaaagtgcggcgccctctcactagagctggaacccgcagattgcggccaggataccgctggcgcccctcccggcagaagggagattcgagctgctatgcagtttggtgacacagagatcaaagtgaccgctgtcgacgtcagcaccaatcgctctgtaagagcctctatcgacttcctatcaaattag

SEQ ID NO: 229885 - DNA, 1563 bp, Artificial Sequence
  derived and/or modified sequence
atgcccgccctggaggtgttcgcccacgccctgcggttcttccgggaacacgctcttcaggagctcagagagcagagcccaagtctgcctgagaaggatacagtgcgctgggtcttaaccgtcccggcgatctggaagcagcccgccaagcagttcatgcgagaggccgcatacctggccggtcttgtatcccgtgagaatgctgaacagctcctcatcgctctagagccagaagcagcatcggtgtactgcaggaagctaaggctgcaccagctgttggacttatcaggccgagccccaggcggggggcggttaggggagcgacgaagcatcgatagctccttcagacaggcccgagagcagcttcggcgatctcgtcactctcgaactttcctagtggagtccggggtgggcgaattgtgggcagaaatgcaggcaggggataggtacgtcgtcgccgactgtggggggggtactgttgatttgacagtgcatcagctcgagcaaccgcatggcacgctgaaagagttgtacaaagcctctggaggcccgtatggagccgtgggagtcgatctagctttcgagcagttactttgcaggatattcggggaagatttcatcgcaacattcaagagacaaaggccagccgcgtgggtggaccttactatagcgtttgaggctaggaagagaacggctggtcctcaccgggcaggagctctaaatatatctttacccttcagctttattgatttctataggaagcagaggggccacaacgtcgaaactgcgctccggcgttcctccgtcaatttcgtgaaatggagctcccagggaatgctgcggatgtcctgcgaggcaatgaacgaactttttcagcctacggtgtccggcatcatccagcacatcgaggctctgctggcacgtcctgaggtgcagggggtcaaactgctttttctcgtgggcgggttcgccgagtccgctgtgttgcagcacgccgtgcaggctgctttgggcgcccggggcctgagggtcgtggtgccccacgatgtgggattaaccatcttgaaaggagcagtcctattcggccaggcccccggcgtggtcagggtgcggcgctcgccactaacctacggtgtcggggtgctgaatagatttgttcctggaagacatcctccagaaaaactcctggtgcgtgacggtcgccgctggtgcaccgacgtatttgaaaggttcgtcgccgccgagcaaagcgtggccctaggcgaggaggtgcggcgcagttactgccccgcccgccccgggcagagaagggtgctgatcaatctctattgttgtgccgccgaagacgcacgattcatcactgaccctggagtgcgcaaatgtggcgctctgagcctggaactggaacccgccgattgcggccaagataccgcaggtgcacctcctgggcggagggagatccgggctgccatgcaattcggcgataccgaaattaaggtcaccgccgtggatgtgagcacaaaccggtcggtccgagcatcaattgactttcttagcaactag

SEQ ID NO: 229886 - DNA, 2061 bp, Artificial Sequence
  derived and/or modified sequence
atgctagccgtgcctgaaatggggttgcaggggctgtatatcgggtcttcaccagaaagatcaccagtccccagcccacccggtagtcctcgaactcaggagagctgcggaattgccccactgacgccgtcacagtctccgaaaccagaggtccgcgctccacagcaggcttctttttctgttgtggttgcaatcgattttggaaccactagttccggctacgccttttccttcgcctccgacccagaagccattcacatgatgagaaagtgggaggggggagacccaggcgtggcacatcagaagactccaacctgtttgctgctcaccccagaaggcgcattccacagctttgggtacactgctcgtgactattaccatgaccttgacccagaggaggcccgtgattggttgtacttcgagaagttcaagatgaagatccactccgccacagacctaacactcaaaacccagctggaagctgtgaatgggaaaactatgcctgccctggaagtgttcgcccatgcactgcggttttttagagagcacgcccttcaggagctgagagaacagagccctagtctccctgaaaaggatacagtgcgatgggtgctgacagtgcccgcaatttggaagcagcctgctaagcaatttatgagggaggccgcatacctggctggactggtttcccgcgaaaatgctgaacagctgctgatcgcactagaacctgaggccgcaagcgtctattgcaggaagttaagactccaccagctcttggaccttagtggtcgggcacccggtgggggtagacttggtgaacgcaggtccatcgactcctcattcaggcaggccagagagcagctgaggcggtccagacactccaggaccttcctggtcgagagtggggtgggcgagctctgggcagagatgcaggccggagaccgatacgtcgtggcagactgcgggggtggcaccgtcgaccttaccgtgcaccagctggagcagcctcacggcacactgaaggagttatataaggcctcgggtggtccctatggcgcagtgggagtcgacctcgccttcgagcaactcctgtgcagaattttcggcgaagattttatagccacctttaagagacagcgacctgctgcctgggtagacctgaccattgctttcgaagcgaggaagaggactgccggtcctcaccgggctggcgctttgaatatttcactccctttttccttcatcgatttttatcgcaagcagcgagggcataatgtggaaacagccctgcgaaggtcaagcgtgaatttcgtcaaatggagctcacaaggcatgctgagaatgagctgtgaagcaatgaatgagttgtttcagcctaccgtaagcggcatcatccaacatatcgaggctcttctcgcccgacccgaagtccagggcgttaaactgctgtttcttgtaggtgggtttgccgaatctgctgttctgcagcatgccgtccaggctgcccttggagcccgaggattgcgggtggtggttccacacgacgtgggacttacaattcttaaaggggcagtgctttttggccaagccccaggcgtggtgcgggtccgcagaagtcctttgacctatggggtaggcgtgctcaacagatttgttccgggaagacatcctcccgagaagctgttagtccgggacggaagaagatggtgcactgacgtgttcgaacgctttgtggcggctgagcagagtgtggccctcggtgaagaggtccggagaagctattgccccgctcggcctgggcagcgaagggttctcataaacctatactgctgtgcggcagaggacgctagattcatcaccgacccaggggtgagaaaatgtggagctctcagcttagagttggagcccgctgattgtgggcaagacaccgcaggggctcccccagggagaagggaaatccgcgctgctatgcagtttggagacacggaaattaaggtaaccgccgtcgacgtgtcaaccaatcggagcgttcgcgcttccatagacttcctgtctaactag

SEQ ID NO: 229887 - DNA, 1803 bp, Artificial Sequence
  derived and/or modified sequence
atgatgcgaaaatgggaaggaggagacccgggtgtcgcccatcagaagacccctacttgcttgcttcttacccccgaaggcgcattccattcctttgggtacacagccagggactactatcatgacctggatccggaggaggctcgtgactggctgtatttcgagaaatttaagatgaaaattcactccgccactgaccttactctgaagacacagcttgaggctgtgaacgggaaaaccatgcccgctttggaggtgttcgcgcatgcactgcggttttttcgcgagcacgccctgcaagagttgcgtgagcagagcccaagtctccctgagaaggacacagttcggtgggtgctgactgtcccagcgatttggaaacagcccgcaaagcaattcatgagagaagccgcttacctggccggactggtgagtcgcgaaaacgcagagcagcttttgattgcgctggaacctgaggcagcctcagtttactgtagaaaactgaggttacaccagctgttggatctctcgggtcgagctcccggtggcggacgacttggggagagacgttcaatcgactccagcttccgtcaggcgagagaacagctgaggcggtcccgacatagtcgcacattcctcgtggagtccggcgtgggcgagttatgggcggagatgcaggcgggagatcgttacgtcgtcgctgactgtggcggtggcaccgttgatctcactgtccaccagctcgagcagcctcatggcaccctcaaggagctatacaaggcttcgggcggtccctacggcgcagtcggagtggatctcgcttttgagcagctgctttgccgaatattcggtgaggattttatcgctacttttaaaaggcagcgacccgcagcttgggtggaccttactattgcatttgaggcacgcaaacggactgccggacctcacagggccggtgccctgaatatcagcctgcccttctcttttattgatttttataggaagcaacgtggtcacaatgtggagaccgccctgagaaggtcgtccgtcaactttgtcaagtggtccagccaggggatgctacgtatgtcctgtgaggccatgaacgaactgtttcaacccactgtctcgggcatcatccagcatattgaagccctgctcgcccgtcctgaagttcagggagtcaagctgttgtttttagtgggaggatttgcagagagcgcagttcttcagcacgctgtccaggcggcactgggagcccgaggtctccgggtcgttgtacctcacgatgtggggttaacaattcttaagggcgcagtgctgtttggacaggcaccaggcgtggtgagagtaagaaggtctccgctgacctatggagtcggtgtcttgaacaggtttgtccccggacgccacccccctgaaaaattgctcgttcgcgatggtcgtaggtggtgcacggatgtgttcgagcggtttgtggccgcagagcaatccgtggcattaggcgaggaagtccggagaagttattgtccagcacgacctggccagcggcgtgtcttgattaatctatactgttgcgcagctgaggatgcacggtttataaccgaccccggtgtccgcaagtgtggtgcactgtccttagaactggagcccgctgactgcgggcaagatactgccggagcaccacccggacgaagggagatccgggctgcgatgcagtttggggacaccgaaatcaaggtcactgccgtagacgtgtcaaccaaccggtccgttagagcgagcatcgacttcttgtccaactag

SEQ ID NO: 229888 - DNA, 1563 bp, Artificial Sequence
  derived and/or modified sequence
atgccggctctggaagtgtttgcccacgccttgaggttcttcagggaacacgcattacaggaactgagagagcaatcaccctcactgccagaaaaagatactgtcagatgggtattaaccgtgccggcaatctggaaacagccggcaaaacaatttatgagggaagctgcctacctggcagggctggtgagcagggagaacgccgagcagctattgatcgctttagaacctgaggcagcttcagtctactgccgaaaacttcgcctgcatcagctgctcgacctttcaggacgggcacctggcggaggtcgcctaggagagcggagaagcattgactcctcgttcagacaggccagagagcagctgaggcgcagcagacatagtcggacatttctcgtcgagtcaggcgtgggtgaactctgggcagagatgcaagcaggtgatagatacgtagtcgccgactgtggcggtgggaccgttgacctgaccgttcaccaattggaacaaccccacggtaccctgaaggaactctataaggcatcagggggaccttacggtgcggtgggggttgatctggcgttcgaacagttgttgtgtcggatcttcggcgaagacttcattgccacgttcaagaggcagaggcccgcagcgtgggtagacctgaccatagcttttgaagccaggaagcggacagccggtcctcatcgagcaggtgcgctgaatatatccctgcccttttcattcatcgacttctaccgcaagcaacgtggacacaacgtcgagaccgcactccgccgttcatcggtcaattttgtgaagtggtcgtctcaaggcatgctcaggatgagctgtgaggcgatgaatgaactttttcaaccgaccgtttccggcattatacaacacatcgaggccctgctggctcgtcctgaggtgcagggagtaaagttgctgttcctggtgggtggattcgcagaatcagcggtcctgcagcatgcagtgcaggcagcgctgggagcgcgaggtctccgtgtggtcgtgcctcatgacgttggactgactattctgaaaggggcagtgctgtttgggcaggctccaggggtggtcagggtgcgcagatcccccctgacctacggcgtgggcgttttaaaccgctttgtacccggacgccatccccctgagaagctcctcgttagagacggacgcagatggtgtacagacgtgtttgaaaggtttgtggcagctgagcagtcggtggccttaggcgaggaggtgaggaggtcctattgccctgccaggcctggccagcggcgagtgctgatcaacctgtattgttgtgccgcagaagatgcacggttcataactgatccgggagtcagaaaatgcggagctttgtcactggagctagagcccgctgactgcggccaggacaccgccggagctccacctggccgtcgggaaatacgcgctgctatgcagttcggagatactgagattaaggtcaccgccgtggatgtatctactaaccgctccgtgcgggcaagcatagattttcttagcaactag

SEQ ID NO: 229889 - DNA, 2061 bp, Artificial Sequence
  derived and/or modified sequence
atgctggccgtgcccgagatgggcctgcagggcctgtacatcggcagcagccccgagagaagccccgtgcccagcccccccggcagccccagaacccaggagagctgcggcatcgcccccctgacccccagccagagccccaagcccgaggtgagagccccccagcaggccagcttcagcgtggtggtggccatcgacttcggcaccaccagcagcggctacgccttcagcttcgccagcgaccccgaggccatccacatgatgagaaagtgggagggcggcgaccccggcgtggcccaccagaagacccccacctgcctgctgctgacccccgagggcgccttccacagcttcggctacaccgccagagactactaccacgacctggaccccgaggaggccagagactggctgtacttcgagaagttcaagatgaagatccacagcgccaccgacctgaccctgaagacccagctggaggccgtgaacggcaagaccatgcccgccctggaggtgttcgcccacgccctgagattcttcagagagcacgccctgcaggagctgagagagcagagccccagcctgcccgagaaggacaccgtgagatgggtgctgaccgtgcccgccatctggaagcagcccgccaagcagttcatgagagaggccgcctacctggccggcctggtgagcagagagaacgccgagcagctgctgatcgccctggagcccgaggccgccagcgtgtactgcagaaagctgagactgcaccagctgctggacctgagcggcagagcccccggcggcggcagactgggcgagagaagaagcatcgacagcagcttcagacaggccagagagcagctgagaagaagcagacacagcagaaccttcctggtggagagcggcgtgggcgagctgtgggccgagatgcaggccggcgacagatacgtggtggccgactgcggcggcggcaccgtggacctgaccgtgcaccagctggagcagccccacggcaccctgaaggagctgtacaaggccagcggcggcccctacggcgccgtgggcgtggacctggccttcgagcagctgctgtgcagaatcttcggcgaggacttcatcgccaccttcaagagacagagacccgccgcctgggtggacctgaccatcgccttcgaggccagaaagagaaccgccggcccccacagagccggcgccctgaacatcagcctgcccttcagcttcatcgacttctacagaaagcagagaggccacaacgtggagaccgccctgagaagaagcagcgtgaacttcgtgaagtggagcagccagggcatgctgagaatgagctgcgaggccatgaacgagctgttccagcccaccgtgagcggcatcatccagcacatcgaggccctgctggccagacccgaggtgcagggcgtgaagctgctgttcctggtgggcggcttcgccgagagcgccgtgctgcagcacgccgtgcaggccgccctgggcgccagaggcctgagagtggtggtgccccacgacgtgggcctgaccatcctgaagggcgccgtgctgttcggccaggcccccggcgtggtgagagtgagaagaagccccctgacctacggcgtgggcgtgctgaacagattcgtgcccggcagacacccccccgagaagctgctggtgagagacggcagaagatggtgcaccgacgtgttcgagagattcgtggccgccgagcagagcgtggccctgggcgaggaggtgagaagaagctactgccccgccagacccggccagagaagagtgctgatcaacctgtactgctgcgccgccgaggacgccagattcatcaccgaccccggcgtgagaaagtgcggcgccctgagcctggagctggagcccgccgactgcggccaggacaccgccggcgccccccccggcagaagagagatcagagccgccatgcagttcggcgacaccgagatcaaggtgaccgccgtggacgtgagcaccaacagaagcgtgagagccagcatcgacttcctgagcaactag

SEQ ID NO: 229890 - DNA, 1803 bp, Artificial Sequence
  derived and/or modified sequence
atgatgagaaagtgggagggcggcgaccccggcgtggcccaccagaagacccccacctgcctgctgctgacccccgagggcgccttccacagcttcggctacaccgccagagactactaccacgacctggaccccgaggaggccagagactggctgtacttcgagaagttcaagatgaagatccacagcgccaccgacctgaccctgaagacccagctggaggccgtgaacggcaagaccatgcccgccctggaggtgttcgcccacgccctgagattcttcagagagcacgccctgcaggagctgagagagcagagccccagcctgcccgagaaggacaccgtgagatgggtgctgaccgtgcccgccatctggaagcagcccgccaagcagttcatgagagaggccgcctacctggccggcctggtgagcagagagaacgccgagcagctgctgatcgccctggagcccgaggccgccagcgtgtactgcagaaagctgagactgcaccagctgctggacctgagcggcagagcccccggcggcggcagactgggcgagagaagaagcatcgacagcagcttcagacaggccagagagcagctgagaagaagcagacacagcagaaccttcctggtggagagcggcgtgggcgagctgtgggccgagatgcaggccggcgacagatacgtggtggccgactgcggcggcggcaccgtggacctgaccgtgcaccagctggagcagccccacggcaccctgaaggagctgtacaaggccagcggcggcccctacggcgccgtgggcgtggacctggccttcgagcagctgctgtgcagaatcttcggcgaggacttcatcgccaccttcaagagacagagacccgccgcctgggtggacctgaccatcgccttcgaggccagaaagagaaccgccggcccccacagagccggcgccctgaacatcagcctgcccttcagcttcatcgacttctacagaaagcagagaggccacaacgtggagaccgccctgagaagaagcagcgtgaacttcgtgaagtggagcagccagggcatgctgagaatgagctgcgaggccatgaacgagctgttccagcccaccgtgagcggcatcatccagcacatcgaggccctgctggccagacccgaggtgcagggcgtgaagctgctgttcctggtgggcggcttcgccgagagcgccgtgctgcagcacgccgtgcaggccgccctgggcgccagaggcctgagagtggtggtgccccacgacgtgggcctgaccatcctgaagggcgccgtgctgttcggccaggcccccggcgtggtgagagtgagaagaagccccctgacctacggcgtgggcgtgctgaacagattcgtgcccggcagacacccccccgagaagctgctggtgagagacggcagaagatggtgcaccgacgtgttcgagagattcgtggccgccgagcagagcgtggccctgggcgaggaggtgagaagaagctactgccccgccagacccggccagagaagagtgctgatcaacctgtactgctgcgccgccgaggacgccagattcatcaccgaccccggcgtgagaaagtgcggcgccctgagcctggagctggagcccgccgactgcggccaggacaccgccggcgccccccccggcagaagagagatcagagccgccatgcagttcggcgacaccgagatcaaggtgaccgccgtggacgtgagcaccaacagaagcgtgagagccagcatcgacttcctgagcaactag

SEQ ID NO: 229891 - DNA, 1563 bp, Artificial Sequence
  derived and/or modified sequence
atgcccgccctggaggtgttcgcccacgccctgagattcttcagagagcacgccctgcaggagctgagagagcagagccccagcctgcccgagaaggacaccgtgagatgggtgctgaccgtgcccgccatctggaagcagcccgccaagcagttcatgagagaggccgcctacctggccggcctggtgagcagagagaacgccgagcagctgctgatcgccctggagcccgaggccgccagcgtgtactgcagaaagctgagactgcaccagctgctggacctgagcggcagagcccccggcggcggcagactgggcgagagaagaagcatcgacagcagcttcagacaggccagagagcagctgagaagaagcagacacagcagaaccttcctggtggagagcggcgtgggcgagctgtgggccgagatgcaggccggcgacagatacgtggtggccgactgcggcggcggcaccgtggacctgaccgtgcaccagctggagcagccccacggcaccctgaaggagctgtacaaggccagcggcggcccctacggcgccgtgggcgtggacctggccttcgagcagctgctgtgcagaatcttcggcgaggacttcatcgccaccttcaagagacagagacccgccgcctgggtggacctgaccatcgccttcgaggccagaaagagaaccgccggcccccacagagccggcgccctgaacatcagcctgcccttcagcttcatcgacttctacagaaagcagagaggccacaacgtggagaccgccctgagaagaagcagcgtgaacttcgtgaagtggagcagccagggcatgctgagaatgagctgcgaggccatgaacgagctgttccagcccaccgtgagcggcatcatccagcacatcgaggccctgctggccagacccgaggtgcagggcgtgaagctgctgttcctggtgggcggcttcgccgagagcgccgtgctgcagcacgccgtgcaggccgccctgggcgccagaggcctgagagtggtggtgccccacgacgtgggcctgaccatcctgaagggcgccgtgctgttcggccaggcccccggcgtggtgagagtgagaagaagccccctgacctacggcgtgggcgtgctgaacagattcgtgcccggcagacacccccccgagaagctgctggtgagagacggcagaagatggtgcaccgacgtgttcgagagattcgtggccgccgagcagagcgtggccctgggcgaggaggtgagaagaagctactgccccgccagacccggccagagaagagtgctgatcaacctgtactgctgcgccgccgaggacgccagattcatcaccgaccccggcgtgagaaagtgcggcgccctgagcctggagctggagcccgccgactgcggccaggacaccgccggcgccccccccggcagaagagagatcagagccgccatgcagttcggcgacaccgagatcaaggtgaccgccgtggacgtgagcaccaacagaagcgtgagagccagcatcgacttcctgagcaactag

SEQ ID NO: 229892 - protein, 40 aa, Artificial Sequence
  derived and/or modified sequence
MTPFWRGVSLRPIGASCRDDSECITRLCRKRRCSLSVAQE

SEQ ID NO: 229893 - protein, 78 aa, Artificial Sequence
  derived and/or modified sequence
LAAWCLVIMVLSQQVASSPVPVMEILSGSVQGVQRSLRRMARMTPLWRIVGTKPHGAYCQNNYECSTGICRKGHCSFS

SEQ ID NO: 229894 - protein, 44 aa, Artificial Sequence
  derived and/or modified sequence
RLKRMTPFWRGVSLRPVGASCRDNSECITMLCRKNRCFLRTASE

SEQ ID NO: 229895 - protein, 78 aa, Artificial Sequence
  derived and/or modified sequence
LLAWCLVFLVIVQQVTSSPVPQSDTPLTSVQEVQRSLKRTARMTPLWRIMGTKPHGAYCQNHYECSTGICRKGHCSYS

SEQ ID NO: 229896 - protein, 73 aa, Artificial Sequence
  derived and/or modified sequence
LVLMVLAQQVAPSPVREIEAALGSLQGVQRSLRRMARMTPLWRIMGTKPHGAYCQNNYECSTGICRKGHCSFS

SEQ ID NO: 229897 - protein, 41 aa, Artificial Sequence
  derived and/or modified sequence
RRVARMTPLWRIMSSKPFGAYCQNNYECSTGLCRAGHCSTS

SEQ ID NO: 229898 - protein, 40 aa, Artificial Sequence
  derived and/or modified sequence
MTPFWRAVSLRPIGASCRDDSECITRLCRKRRCSLSVAQE

SEQ ID NO: 229899 - protein, 40 aa, Artificial Sequence
  derived and/or modified sequence
MTPFWRAVSLRPIGASCRDDSECLTRLCRKRRCSLSVAQE

SEQ ID NO: 229900 - protein, 40 aa, Artificial Sequence
  derived and/or modified sequence
MTPFWRGVSLRPIGASCRDDSECITRLCKKRRCSLSVAQE

SEQ ID NO: 229901 - protein, 65 aa, Artificial Sequence
  derived and/or modified sequence
SPIGSHDSRLSLQQGTKLLERRTRMTPLWRFMGTKPTGAYCRDHFECSTQICRRGHCALSGAVHS

SEQ ID NO: 229902 - protein, 53 aa, Artificial Sequence
  derived and/or modified sequence
PEGQRALKRMARMTPLWRTMGTKPYGAYCLNNYECSTGICRGGHCMFSQPIKS

SEQ ID NO: 229903 - protein, 77 aa, Artificial Sequence
  derived and/or modified sequence
GVCLVALILMHQVCASPIGSHDSRLSLQQGTKLLERRTRMTPLWRFMGTKPTGAYCRDHFECSTQICRRGHCALSGA

SEQ ID NO: 229904 - protein, 40 aa, Artificial Sequence
  derived and/or modified sequence
MTPFWRGVSLRPVGASCRDNSECITMLCRKNRCFLRTASE

SEQ ID NO: 229905 - protein, 77 aa, Artificial Sequence
  derived and/or modified sequence
MWHLKLCAVLMIFLLLLGQIDGSPIPEVSSAKRRPRRMTPFWRGVSLRPIGASCRDDSECITRLCRKRRCSLSVAQE

SEQ ID NO: 229906 - DNA, 234 bp, Artificial Sequence
  derived and/or modified sequence
atgtggcacttaaagctttgcgctgttctgatgatttttctcctgttgctgggccaaattgatggctctccaatacccgaggtatcatccgctaagcgacgaccccgtaggatgacccctttttggcgtggagtaagcttgcggcctattggtgccagttgccgcgacgattcggagtgtatcacccgtctctgtagaaaaaggcgctgctccctgagtgtggcccaggaatag

SEQ ID NO: 229907 - DNA, 234 bp, Artificial Sequence
  derived and/or modified sequence
atgtggcacttaaagctatgcgcagtgttaatgatatttctgctgctgttaggccaaatcgacggatcccctataccagaggtgagctctgctaaaagaagacctcgccggatgactcccttttggcggggggttagcctgagacccattggagctagctgccgagacgattccgaatgcattactcgcttgtgcaggaagcgaaggtgctccctctctgttgcccaagaatag

SEQ ID NO: 229908 - DNA, 2207 bp, Artificial Sequence
  derived and/or modified sequence
aggactagaatcaggacagtcagatctgtggtcacatcctgcccaattccagctctgaggtccatcaaaccatctgcttctcccttggcaagaagctccctctgtctgactggcagcagggtcagtggccatccttttctaccttcagctgttgtgcatctcctccacgttttcctggagtaaaggaacaagcaggttcttatccaaatacccaacctgtgaagatgagacggcccttgggaagaggtattagccaagttttcagtatgatgcccggcagaaagaatttgttgtctttgtcttaagcttattatcctcccaggtcataggaagatctaaagtccaatcagtctccttactcagaattcacagctttcccctcaaacttaaaatgcccatgtcatttcacgagtacccataactacccatcgtttagatacatgtcctcccttggtctagaaatctgcagcagttcctacttaaactgatggatgctttgggctttggaggtatctcatccctatgcctgttgccctgaagctgccggaaggaaaggccccactcaactactgggaagaaagcccataattcaaggcttttaatacagtcactacacaagctctccctctgatttaggagatcttgttacctcctcatctacatgtgcttaaaaacaaaaagaaacctataattattcaattcacctgtggtccaaataagtctcacatccagccattcccctgagagggcaggaggccagactttgaactttccacagctgggtcttcattttactagtgagataaagaggtgcagattagggtgacagtccatctaagcaagtggacgatctggggaactgtaggccttgctgaagcatcctcccacagaaaggagataagggccttatccaattggctgtacacaatagatcagtgcttctttcctagacaaggctgaaaggggccaacattatttctgaagacttcattattggaattctatgggagtgatctcactgagctattttggaatagaaatgtggctagttgcctgacctccctcaatggtttcacgtggctttcaaagggaaggaagggcagtgctgacttttggtaaaatgggcgaaagggtccatgccagcaacacaatcactcaaagtccagatgagggatcagtaaatacaacgtgcctgaaaggtggcccttgagcacattcctccggtagacattaacttattaaattgattctgattacaaatataaactttgcccccatctcacccagtaacaatgcaagagttgatgtcagtctataaaaggaagtaggaactgtccctggctttcaggctccaacatcctccccctgtcaagatgtggcacctcaaactttgtgcagtcctcatgatcttcctgttgctgttgggccagatagatggctccccaataccagaagtgagttcggcaaagagaaggccacggagaatgaccccattttggagaggggtttccctcaggcctattggagcctcctgccgggatgattctgagtgtatcacaaggctatgcagaaaaagacgctgttccttaagtgtggcccaggaatgatgtacataccagggaaagaaaggacagcagtcacctccgacaatgctccgttctatggaatattgattaactgcattttggctggagacacccaagtgaagcaatcttgtatttttaatatttaaaggcagatgtacgctttaaattggtctccatttcttcttagaatgttgatatatggataagcataactaaacttgtcaatttagagtttatttttctatggatactattaaatgtctcaaattgaaattttagcagtctggaattcaagcttttgagggaaagaaggattcattttgtatactaaagaaaaaaacagcattgcccaataatgtgttaacttctcaatctggaaagtgtagtgagagctacataatcaatagctacgtaatcaacttcagcaagttcctaagctgtggccctggatcccttcactccatactcttcagggaggtgtcaaaggtggtcaagcttgggaggctgaggcaggagaatcacttgaacctgggaggtggaggttgcagtgagccaagatcatgccactgcaccccagcctgggtgacatagagagactctgtctcaaaaaaaaaaaaaaaa

SEQ ID NO: 229909 - DNA, 234 bp, Artificial Sequence
  derived and/or modified sequence
atgtggcacctgaagctgtgcgccgtgctgatgatcttcctgctgctgctgggccagatcgacggcagccccatccccgaggtgagcagcgccaagagaagacccagaagaatgacccccttctggagaggcgtgagcctgagacccatcggcgccagctgcagagacgacagcgagtgcatcaccagactgtgcagaaagagaagatgcagcctgagcgtggcccaggagtag

SEQ ID NO: 229910 - DNA, 234 bp, Artificial Sequence
  derived and/or modified sequence
atgtggcacctgaagctttgtgctgttctgatgatcttccttctgctgttgggtcagatcgacggatcgccaattcctgaagtgagtagtgctaagcgcagacccaggaggatgacccctttttggcgaggggttagcttacgccccatcggtgcatcttgcagagacgactcagaatgcattacccgcctgtgcagaaaaaggaggtgtagtctgtctgtcgcccaggagtag

SEQ ID NO: 229911 - DNA, 234 bp, Artificial Sequence
  derived and/or modified sequence
atgtggcacctgaagctgtgtgctgtgctgatgatcttcctgctgctgctgggccagattgatggcagccccatccctgaggtgagcagcgccaagagaagacccaggaggatgacccccttctggaggggcgtgtccctgcggcccatcggggccagctgcagagatgacagcgagtgcatcacccggctgtgcaggaagaggcgctgcagcctgtctgtggcccaggagtag

SEQ ID NO: 229912 - DNA, 234 bp, Artificial Sequence
  derived and/or modified sequence
atgtggcacctgaagctgtgcgccgtgctgatgatcttcctgctgctgctgggccaaatcgacggctctccgattcccgaagtctcaagcgccaagcggcggcccaggagaatgacgcccttctggaggggcgtgtctttgagacccatcggcgccagttgtagggacgactctgagtgtatcacaaggctatgtcgcaagagaagatgttccctttccgtggcacaggagtag

SEQ ID NO: 229913 - RNA, 234 nt, Artificial Sequence
  derived and/or modified sequence
auguggcacuuaaagcuaugcgcaguguuaaugauauuucugcugcuguuaggccaaaucgacggauccccuauaccagaggugagcucugcuaaaagaagaccucgccggaugacucccuuuuggcgggggguuagccugagacccauuggagcuagcugccgagacgauuccgaaugcauuacucgcuugugcaggaagcgaaggugcucccucucuguugcccaagaauag

SEQ ID NO: 229914 - protein, 347 aa, Artificial Sequence
  derived and/or modified sequence
MSSWSRQRPKSPGGIQPHVSRTLFLLLLLAASAWGVTLSPKDCQVFRSDHGSSISCQPPAEIPGYLPADTVHLAVEFFNLTHLPANLLQGASKLQELHLSSNGLESLSPEFLRPVPQLRVLDLTRNALTGLPPGLFQASATLDTLVLKENQLEVLEVSWLHGLKALGHLDLSGNRLRKLPPGLLANFTLLRTLDLGENQLETLPPDLLRGPLQLERLHLEGNKLQVLGKDLLLPQPDLRYLFLNGNKLARVAAGAFQGLRQLDMLDLSNNSLASVPEGLWASLGQPNWDMRDGFDISGNPWICDQNLSDLYRWLQAQKDKMFSQNDTRCAGPEAVKGQTLLAVAKSQ

SEQ ID NO: 229915 - protein, 330 aa, Artificial Sequence
  derived and/or modified sequence
MSSWSRQRPKSPGGIQPHVSRTLFLLLLLAASAWGVTLSPKDCQVFRSDHGSSISCQPPAEIPGYLPADTVHLAVEFFNLTHLPANLLQGASKLQELHLSSNGLESLSPEFLRPVPQLRVLDLTRNALVLKENQLEVLEVSWLHGLKALGHLDLSGNRLRKLPPGLLANFTLLRTLDLGENQLETLPPDLLRGPLQLERLHLEGNKLQVLGKDLLLPQPDLRYLFLNGNKLARVAAGAFQGLRQLDMLDLSNNSLASVPEGLWASLGQPNWDMRDGFDISGNPWICDQNLSDLYRWLQAQKDKMFSQNDTRCAGPEAVKGQTLLAVAKSQ

SEQ ID NO: 229916 - DNA, 993 bp, Artificial Sequence
  derived and/or modified sequence
atgagcagctggagccggcagcggcccaagagccccggcggcatccagccccacgtgtctcgcaccttgtttctgttgttgttactggctgcatctgcttggggcgtgacactctcccccaaggattgccaagtcttcagatcagatcacggaagttccatctcatgccagccccctgctgaaattcccggttacctgccagctgacaccgtgcatctggctgtggaattcttcaatctcacacacctccccgcaaacctgttacaaggcgctagcaagctgcaggaattgcatctgagctctaacggcctggagtctctctcacctgaatttctgcgccctgtaccccagctcagagtccttgatcttacgcgcaatgccttggtcctgaaagagaatcagttggaggttctggaggtgagctggctccacggactgaaggccctgggacacctggatctgtcaggaaatcgcttacggaagttaccccccggcctgttggcaaacttcactctcttgcgcaccctggatctcggtgagaaccaattggaaactctccccccagacttgctgcgcggacctttacaactcgagcgcctgcacttagaggggaataagctccaggtcctcggaaaagacctgttactccctcagcccgaccttcggtacctgtttctgaatgggaataagctcgcccgagtggccgctggggctttccagggcctccgacagctcgatatgctggaccttagcaacaatagcttagcgtcagttccggagggcctgtgggctagcttgggacagcccaattgggacatgcgcgatggatttgacatttctggcaacccctggatctgcgaccaaaacctctctgacttatacagatggttacaggcacagaaggataagatgtttagtcagaatgatacccggtgtgctggtccggaggccgtcaaggggcagaccctcctcgcagtggctaagagccaatag

SEQ ID NO: 229917 - DNA, 1044 bp, Artificial Sequence
  derived and/or modified sequence
atgtccagttggtctcgacaaagaccaaaatcacctgggggaatccaacctcatgtttccagaacactgttcctgttgctgctgcttgccgcatccgcgtggggagtgactctcagccctaaggactgccaggtcttccgaagcgaccacggatcaagcatcagttgccagccgccagctgagataccagggtatctgccggcagacacagtgcatcttgctgttgagttctttaatctcacccatctgccagcaaatctccttcaaggagccagtaagctccaggaactgcacttgtcatctaatggtctagaatcattgtctcccgagtttttgcgtcctgtgccacagttgcgagtccttgacctaactaggaacgccctgaccggacttcccccaggactcttccaggcttccgcaactctggacacactggtgctcaaagagaatcagctggaagttctagaggtgagttggctgcatgggctcaaggctttgggtcacctcgatttatccggcaacaggttgaggaaattacctccaggcttactggccaatttcaccttactacgaacattggacctgggcgagaaccagttggagactctcccgcctgacctgctccgaggccctctccagctcgagaggctccacctggaaggaaacaaactgcaagtactgggaaaagacctgctgctccctcaaccagatctgaggtatctattccttaatggcaataagctagcccgtgtggccgcaggggcattccaaggacttaggcagctcgatatgctagacctgagtaataattcattagccagcgtgcccgaggggctgtgggcttctctggggcagcccaactgggatatgagagacgggtttgacatttctggaaacccttggatttgcgatcagaatctgagcgatctgtatagatggctccaggcgcagaaagacaagatgttttctcaaaatgacacccggtgcgccggtcctgaagccgtgaaagggcagaccctccttgcagtcgccaagtcccagtag

SEQ ID NO: 229918 - DNA, 993 bp, Artificial Sequence
  derived and/or modified sequence
atgagttcttggagtaggcagcgccctaagagtccaggcggtattcagccccatgtctcccggaccctctttctgctcctcctcctggccgctagtgcctggggcgtgacgctgtcacctaaagactgtcaagtattccgtagtgatcacggatccagcatctcttgccagccaccagccgagatccctggatacttacccgctgatactgtgcatttggctgtggagttttttaacctaacgcacctaccagcgaatctgctccagggggctagtaagcttcaagaactacatctttccagcaatgggctggagtccctgtccccagaatttcttagacctgtgccccagctgagggtgttggatctcacaagaaacgccctcgttctgaaggaaaaccaactagaagtgctggaggtgtcatggcttcacgggttgaaagcattggggcacttggatttgtccgggaaccggttacgtaagctccctccagggctcttagcgaatttcacattactgcggactctagacctgggagagaaccagctggaaacactgcctccggacctgctgcggggtcccctgcagcttgagaggctgcatctggagggaaataagctgcaggtgctgggcaaagatctgttgcttccacagccggacctgaggtacctgttcctcaacggcaacaaacttgccagagtcgcggctggagcatttcagggtctcaggcaattggacatgctagatttaagcaacaacagtctggccagcgtgccagagggactatgggctagcctgggccagccgaactgggatatgcgggatggattcgatatttccggaaatccgtggatatgcgatcaaaacctttcggatctctaccggtggctgcaggcccagaaagataagatgttctcccaaaacgatacccgctgcgcaggccctgaagccgtcaaggggcagacactgctcgcagtcgctaaatcccagtag

SEQ ID NO: 229919 - DNA, 1044 bp, Artificial Sequence
  derived and/or modified sequence
atgagtagttggtctcgccagcgcccaaaatcccccggtgggatccagcctcacgtgtctcgtacactgtttctgctgcttctgctggcagcctccgcctggggcgtaacattatcaccaaaagattgccaggtttttagaagtgatcacggttcctctatcagttgtcagccacctgctgagatacccgggtacttacctgccgacaccgtccatcttgccgttgaattttttaacctcactcacttacccgcgaacctcctccagggcgcatctaagctgcaggagctacacctgagctccaatggactggagagccttagcccggaattcctgcgcccagttccccagttgagggtcctggacctcacccgtaacgccctgactggcctcccacccggactcttccaggcttccgctacccttgacaccctcgttctgaaggagaaccaacttgaagtgctcgaagtgtcctggctgcacggactgaaggcactcgggcacctggacctgagcggcaaccggctgagaaagttgcctcctggcctgctggctaattttacactactgagaaccctggacttaggagaaaaccaactcgaaacattgcctcctgacctgttaagggggcctttgcagctagagcgactccaccttgaggggaacaagctccaggtgctgggtaaagaccttctcctaccacagccggacctgcgatacttgtttctgaatgggaacaagcttgctagggtagcagctggcgcattccagggcttacgtcagctggacatgctggacttatccaacaattcgcttgcaagcgtgccggagggcctgtgggccagtcttggacaaccaaattgggacatgcgtgacggattcgatattagcggtaacccttggatttgtgaccaaaacttgtccgatttgtatcgatggctgcaggcacaaaaggataagatgttttctcagaacgatacccgatgcgcagggcctgaggcggttaaggggcaaaccttacttgccgtcgctaaatctcagtag

SEQ ID NO: 229920 - DNA, 993 bp, Artificial Sequence
  derived and/or modified sequence
atgagttcctggtctcggcagcgtcccaaatctccaggagggatacagccccacgtttctcgtactctgtttttgcttttactcctggcggctagcgcatggggggttactttatcacctaaggactgtcaggtgtttcgaagtgatcatggatcatctatctcctgccaaccacccgcagagatccccggctatctccccgccgacaccgtgcatctggccgtagaatttttcaatctcacacacctacctgccaatctcttacagggagcgtctaaattgcaggaattacatttatcttcaaacggcttggagtccctctcgcctgaatttctgaggccagtaccacagctgcgggtacttgatctgacccgcaatgccttggttcttaaggagaatcagttggaagtgctggaggtgagttggctgcacggcctgaaagccctagggcacctagatctcagtggaaaccggctccggaagctaccccccggcctgctggctaatttcacacttctgagaaccctggatctgggagaaaatcagctcgaaaccctgcctcctgacttactgagaggacctcttcaactggagcgcctgcacctggagggaaataaactccaagtcctcggcaaagatctgctcctgccccagcccgatctgagatacctgttcctcaatggcaataagctggcacgcgtggccgccggggcatttcagggacttaggcagctggacatgctggatctctccaacaactcgctcgcatcggtgccagaagggctgtgggcatctctgggccagcctaattgggatatgagggacggcttcgacatctccggaaacccgtggatctgtgatcaaaacctgagtgatctgtataggtggctccaggcccagaaggacaaaatgttctcccagaatgatactcgttgtgccggtcccgaggctgttaaaggacagactctgctcgccgtcgccaagtcccagtag

SEQ ID NO: 229921 - DNA, 1044 bp, Artificial Sequence
  derived and/or modified sequence
atgagcagctggtctagacagagacccaaatcccctggaggtattcaaccacatgtgagtcggaccctattcctgctcctgctgcttgctgccagtgcctggggtgttactctctcacctaaggattgccaagtcttccgctcagatcacggaagctctatttcatgccagccacctgcagaaatccccggatacttaccagccgacaccgttcatctcgccgtagagtttttcaacttgacacacttaccagcgaatctcctgcagggtgctagtaagttacaggaactccacctctctagcaatggactcgagtctctatcgcccgagttcctgcggccagtgccacaattgcgggtattagatctaacaagaaacgcattgacaggtctcccccccggtttgtttcaggcaagtgcgacactcgatactcttgttttgaaggaaaaccagctggaggtgctggaggtgagttggctgcacggactgaaagcactgggacacctggatttgtccggaaatagattaagaaagctcccacccggcctcctagctaatttcacattgctgagaaccctcgatctcggagaaaatcagttagaaacgctcccacctgacctgctgagaggaccactgcaattggagcgtctacacctcgagggcaataagttgcaggtgctaggaaaagacctgttacttcctcagccggatctccgttatctgtttctcaacggtaataagttagcacgggttgccgcaggtgcttttcagggtctcagacaactagacatgctggacctgtcaaacaactccttagcttctgttcctgaaggattatgggcctcccttgggcagcccaattgggatatgcgcgacggcttcgatattagcggaaacccttggatctgtgaccagaacttgagcgacttatatagatggctgcaggcacagaaagacaagatgttctcacaaaatgacacgaggtgcgcgggaccggaggccgttaaggggcagacactactcgctgtagccaagtctcagtag

SEQ ID NO: 229922 - DNA, 993 bp, Artificial Sequence
  derived and/or modified sequence
atgtcctcatggtcacgacagcgaccgaaatcaccgggggggattcagccacatgttagtcgcacactattcctacttctcctcctcgcagctagcgcctggggggtaactctttccccaaaagattgtcaagtgtttcgcagcgaccatggctcctctatatcctgccagccacctgcagagatccccggctacttacccgccgatactgttcatttggctgtggagttttttaatcttacccacttgcctgcaaatctgttacagggcgcctctaaactgcaggagctccacctaagcagcaatggcttggaatccctatcccctgaattcctccggccggtccctcagctgagagtgctagatcttactaggaatgccctcgttctcaaagaaaatcagctggaagtgctcgaagtctcatggttacacggactgaaagccctcgggcacctcgacctaagcggaaatcgtctgcgcaagctccctcctggtttacttgcaaactttactctgctgaggacgctggacttaggcgagaaccaactggagacactcccccctgacttgctacgtggaccgctacaattggaacgtctacatctggagggtaacaagcttcaggtcctcggcaaagaccttctgcttcctcaacctgatctccgctacttattcctaaatggcaacaagctcgcccgcgtggccgctggcgcatttcaaggactccggcagctggacatgctggacttgagtaacaatagtctcgcgagtgtaccagaaggactgtgggcttctttgggtcagccgaactgggacatgcgtgatggcttcgatatctccggcaatccatggatttgtgaccagaacctgagcgacctctatagatggctgcaggcccagaaagataagatgttctctcagaatgatacacggtgcgcaggacccgaagcggtcaaaggtcagactctcttggcagtggctaaaagtcagtag

SEQ ID NO: 229923 - DNA, 1265 bp, Artificial Sequence
  derived and/or modified sequence
agaagcaaaagagcagagctaccatgtcctcttggagcagacagcgaccaaaaagcccagggggcattcaaccccatgtttctagaactctgttcctgctgctgctgttggcagcctcagcctggggggtcaccctgagccccaaagactgccaggtgttccgctcagaccatggcagctccatctcctgtcaaccacctgccgaaatccccggctacctgccagccgacaccgtgcacctggccgtggaattcttcaacctgacccacctgccagccaacctcctccagggcgcctctaagctccaagaattgcacctctccagcaatgggctggaaagcctctcgcccgaattcctgcggccagtgccgcagctgagggtgctggatctaacccgaaacgccctggtattgaaagaaaaccagctggaggtcctggaggtctcgtggctacacggcctgaaagctctggggcatctggacctgtctgggaaccgcctccggaaactgccccccgggctgctggccaacttcaccctcctgcgcacccttgaccttggggagaaccagttggagaccttgccacctgacctcctgaggggtccgctgcaattagaacggctacatctagaaggcaacaaattgcaagtactgggaaaagatctcctcttgccgcagccggacctgcgctacctcttcctgaacggcaacaagctggccagggtggcagccggtgccttccagggcctgcggcagctggacatgctggacctctccaataactcactggccagcgtgcccgaggggctctgggcatccctagggcagccaaactgggacatgcgggatggcttcgacatctccggcaacccctggatctgtgaccagaacctgagcgacctctatcgttggcttcaggcccaaaaagacaagatgttttcccagaatgacacgcgctgtgctgggcctgaagccgtgaagggccagacgctcctggcagtggccaagtcccagtgagaccaggggcttgggttgagggtggggggtctggtagaacactgcaacccgcttaacaaataatcctgcctttggccgggtgcgggggctcacgcctgtaatcccagcactttgggaggcccaggtgggcggatcacgaggtcaggagatcgagaccatcttggctaacatggtgaaaccctgtctctactaaaaatataaaaaattagccaggcgtggtggtgggcacctgtagtcccagcaactcgg

SEQ ID NO: 229924 - DNA, 1044 bp, Artificial Sequence
  derived and/or modified sequence
atgagcagctggagcagacagagacccaagagccccggcggcatccagccccacgtgagcagaaccctgttcctgctgctgctgctggccgccagcgcctggggcgtgaccctgagccccaaggactgccaggtgttcagaagcgaccacggcagcagcatcagctgccagccccccgccgagatccccggctacctgcccgccgacaccgtgcacctggccgtggagttcttcaacctgacccacctgcccgccaacctgctgcagggcgccagcaagctgcaggagctgcacctgagcagcaacggcctggagagcctgagccccgagttcctgagacccgtgccccagctgagagtgctggacctgaccagaaacgccctgaccggcctgccccccggcctgttccaggccagcgccaccctggacaccctggtgctgaaggagaaccagctggaggtgctggaggtgagctggctgcacggcctgaaggccctgggccacctggacctgagcggcaacagactgagaaagctgccccccggcctgctggccaacttcaccctgctgagaaccctggacctgggcgagaaccagctggagaccctgccccccgacctgctgagaggccccctgcagctggagagactgcacctggagggcaacaagctgcaggtgctgggcaaggacctgctgctgccccagcccgacctgagatacctgttcctgaacggcaacaagctggccagagtggccgccggcgccttccagggcctgagacagctggacatgctggacctgagcaacaacagcctggccagcgtgcccgagggcctgtgggccagcctgggccagcccaactgggacatgagagacggcttcgacatcagcggcaacccctggatctgcgaccagaacctgagcgacctgtacagatggctgcaggcccagaaggacaagatgttcagccagaacgacaccagatgcgccggccccgaggccgtgaagggccagaccctgctggccgtggccaagagccagtag

SEQ ID NO: 229925 - DNA, 1780 bp, Artificial Sequence
  derived and/or modified sequence
gcagagctaccatgtcctcttggagcagacagcgaccaaaaagcccagggggcattcaaccccatgtttctagaactctgttcctgctgctgctgttggcagcctcagcctggggggtcaccctgagccccaaagactgccaggtgttccgctcagaccatggcagctccatctcctgtcaaccacctgccgaaatccccggctacctgccagccgacaccgtgcacctggccgtggaattcttcaacctgacccacctgccagccaacctcctccagggcgcctctaagctccaagaattgcacctctccagcaatgggctggaaagcctctcgcccgaattcctgcggccagtgccgcagctgagggtgctggatctaacccgaaacgccctgaccgggctgcccccgggcctcttccaggcctcagccaccctggacaccctggtattgaaagaaaaccagctggaggtcctggaggtctcgtggctacacggcctgaaagctctggggcatctggacctgtctgggaaccgcctccggaaactgccccccgggctgctggccaacttcaccctcctgcgcacccttgaccttggggagaaccagttggagaccttgccacctgacctcctgaggggtccgctgcaattagaacggctacatctagaaggcaacaaattgcaagtactgggaaaagatctcctcttgccgcagccggacctgcgctacctcttcctgaacggcaacaagctggccagggtggcagccggtgccttccagggcctgcggcagctggacatgctggacctctccaataactcactggccagcgtgcccgaggggctctgggcatccctagggcagccaaactgggacatgcgggatggcttcgacatctccggcaacccctggatctgtgaccagaacctgagcgacctctatcgttggcttcaggcccaaaaagacaagatgttttcccagaatgacacgcgctgtgctgggcctgaagccgtgaagggccagacgctcctggcagtggccaagtcccagtgagaccaggggcttgggttgagggtggggggtctggtagaacactgcaacccgcttaacaaataatcctgcctttggccgggtgcgggggctcacgcctgtaatcccagcactttgggaggcccaggtgggcggatcacgaggtcaggagatcgagaccatcttggctaacatggtgaaaccctgtctctactaaaaatataaaaaattagccaggcgtggtggtgggcacctgtagtcccagcaactcgggaggctgaggcaggagaatggcgtgaacttgggaggcggagcttgcggtgagccaagatcgtgccactgcactctagcctgggcgacagagcaagactgtctcaaaaaaattaaaattaaaattaaaaacaaataatcctgccttttacaggtgaaactcggggctgtccatagcggctgggaccccgtttcatccatccatgcttcctagaacacacgatgggctttccttacccatgcccaaggtgtgccctccgtctggaatgccgttccctgtttcccagatctcttgaactctgggttctcccagccccttgtccttccttccagctgagccctggccacactggggctgcctttctctgactctgtcttccccaagtcagggggctctctgagtgcagggtctgatgctgagtcccacttagcttggggtcagaaccaaggggtttaataaataacccttgaaaactgga

SEQ ID NO: 229926 - DNA, 993 bp, Artificial Sequence
  derived and/or modified sequence
atgagcagctggagcagacagagacccaagagccccggcggcatccagccccacgtgagcagaaccctgttcctgctgctgctgctggccgccagcgcctggggcgtgaccctgagccccaaggactgccaggtgttcagaagcgaccacggcagcagcatcagctgccagccccccgccgagatccccggctacctgcccgccgacaccgtgcacctggccgtggagttcttcaacctgacccacctgcccgccaacctgctgcagggcgccagcaagctgcaggagctgcacctgagcagcaacggcctggagagcctgagccccgagttcctgagacccgtgccccagctgagagtgctggacctgaccagaaacgccctggtgctgaaggagaaccagctggaggtgctggaggtgagctggctgcacggcctgaaggccctgggccacctggacctgagcggcaacagactgagaaagctgccccccggcctgctggccaacttcaccctgctgagaaccctggacctgggcgagaaccagctggagaccctgccccccgacctgctgagaggccccctgcagctggagagactgcacctggagggcaacaagctgcaggtgctgggcaaggacctgctgctgccccagcccgacctgagatacctgttcctgaacggcaacaagctggccagagtggccgccggcgccttccagggcctgagacagctggacatgctggacctgagcaacaacagcctggccagcgtgcccgagggcctgtgggccagcctgggccagcccaactgggacatgagagacggcttcgacatcagcggcaacccctggatctgcgaccagaacctgagcgacctgtacagatggctgcaggcccagaaggacaagatgttcagccagaacgacaccagatgcgccggccccgaggccgtgaagggccagaccctgctggccgtggccaagagccagtag

SEQ ID NO: 229927 - DNA, 1044 bp, Artificial Sequence
  derived and/or modified sequence
atgagtagttggtccaggcagaggccaaaatctcctggcggaatacagccccatgtgagtagaacccttttcctgctgctgctcctcgccgcctccgcctggggcgtcactttatctccaaaggactgccaggtatttaggtcagatcacggaagctctatttcctgccagccccccgccgaaatacctgggtatttgccagctgacacagtgcatttggcggttgagttctttaaccttacacacttgcccgcaaatttgttgcagggagcgtccaaacttcaggagctgcacctatccagcaacggattagaaagcctaagtccagagtttctgcggcctgttccccagttaagagtattggacttaactaggaatgctctgaccgggttaccaccggggttatttcaagccagtgcgacacttgacaccctggtcctgaaggagaatcagttggaggtgctggaggtgagttggcttcatggtctgaaagcattggggcatcttgacttaagcggcaaccggcttcgaaagttgccacccggactcctcgctaattttacattgctgcgcaccttagacctgggtgaaaaccagctggaaacacttccacccgacttgctccggggccccctacagctggagcgactgcacctcgagggcaataaactgcaggtattaggaaaagacctcctgctccctcagccggacttacggtacttattccttaacgggaacaaacttgcccgtgtggcggctggcgcgtttcagggcttgcggcagctcgatatgctggatctgtctaacaattctttggcctctgttcccgaggggctttgggcctccctgggacagccaaactgggacatgagggacgggttcgacatatctggtaacccttggatctgtgaccagaatctaagtgacctctacaggtggctgcaggcacagaaggacaaaatgtttagccagaacgacacccgttgtgccggccccgaggcagtgaaaggtcagacgctcctggccgtggcgaagtctcaatag

SEQ ID NO: 229928 - DNA, 993 bp, Artificial Sequence
  derived and/or modified sequence
atgtctagttggagcaggcagagaccaaaaagccccggcgggattcagccacacgtctcccggaccctcttcttgttgttactcttggccgccagcgcatggggtgtaaccctgtcaccaaaggattgtcaggtgttcaggtcagatcatgggtcctccatttcatgccaacctcccgctgagattccaggatacctgccggcagacactgttcatcttgccgtggagttctttaatctgactcacctcccagccaacctgctgcagggagcctcaaaattacaagagctgcatctctcaagcaatggattggaatctctttcacccgagtttttgcgtcctgtcccccaactgagagtcctcgacctcacgcgtaatgcacttgtgctgaaagagaaccagcttgaggtcttagaggtatcttggcttcacgggttgaaggctctgggtcatctggacctcagcggaaacagactgcgcaaacttcccccagggcttctcgccaattttacactcttgaggactctcgatttaggtgaaaaccagttggaaacactgccacctgaccttctgcgaggacccctgcagctggagcgactccacttagagggtaacaagctgcaggttctcggaaaggatctgctcctgccccagccggacctgcggtatctgtttctgaatggcaataaacttgcaagggtcgccgccggggccttccaaggcttgagacagcttgatatgctggacctatctaacaactctctggccagcgtgccggaagggctctgggccagcctaggccagcctaattgggacatgcgggatgggttcgacatctctggaaacccatggatctgcgaccaaaatctgtctgatttgtataggtggctgcaggctcaaaaagacaaaatgttctcacagaatgacactaggtgcgcagggccagaggccgtgaagggccagactctgttggcggtcgccaagtcgcagtag

SEQ ID NO: 229929 - DNA, 1044 bp, Artificial Sequence
  derived and/or modified sequence
atgagctcctggagccggcagaggcccaagagccctgggggcatccagccccacgtgtccaggaccctcttcctgctgctgctgctggccgccagcgcctggggcgtgaccctgagccccaaggactgccaggtgttcagaagtgaccacggcagcagcatcagctgccagcccccagctgagatccctggctacctgcctgctgacacagtgcacctggccgtggagttcttcaacctgacccacctgcctgccaacctgctgcagggcgccagcaagctgcaggagctgcacctgagcagcaatggcctggagagcctgagccctgagttcctgcggcctgtgccccagctgcgggtgctggacctgaccagaaatgccctgaccggcctgcccccaggcctcttccaggccagcgccaccctggacaccctggtgctgaaggagaaccagctggaggtgctggaggtgtcctggctgcacggcctgaaggccctgggccacctggacctgagcggcaaccggctgaggaagctgcccccaggcctgctggccaacttcaccctgctgcggaccctggacctgggggagaaccagctggagaccctgcccccagacctgctgcggggccccctgcagctggagcggctgcacctggagggcaacaagctgcaggtgctgggcaaggacctgctgctgccccagcctgacctgcgctacctgttcctgaatggaaacaagctggcccgggtggccgccggggccttccagggcctgcggcagctggacatgctggacctgagcaacaacagcctggcctctgtgcctgagggcctgtgggccagcctgggccagcccaactgggacatgagagatggctttgacatcagcggcaacccctggatctgtgaccagaacctgagtgacctgtaccgctggctgcaggcccagaaggacaagatgttcagccagaatgacacccgctgtgccggccctgaggccgtgaagggccagaccctgctggccgtggccaagagccagtag

SEQ ID NO: 229930 - DNA, 993 bp, Artificial Sequence
  derived and/or modified sequence
atgagctcctggagccggcagaggcccaagagccctgggggcatccagccccacgtgtccaggaccctcttcctgctgctgctgctggccgccagcgcctggggcgtgaccctgagccccaaggactgccaggtgttcagaagtgaccacggcagcagcatcagctgccagcccccagctgagatccctggctacctgcctgctgacacagtgcacctggccgtggagttcttcaacctgacccacctgcctgccaacctgctgcagggcgccagcaagctgcaggagctgcacctgagcagcaatggcctggagagcctgagccctgagttcctgcggcctgtgccccagctgcgggtgctggacctgaccagaaatgccctggtgctgaaggagaaccagctggaggtgctggaggtgtcctggctgcacggcctgaaggccctgggccacctggacctgagcggcaaccggctgaggaagctgcccccaggcctgctggccaacttcaccctgctgcggaccctggacctgggggagaaccagctggagaccctgcccccagacctgctgcggggccccctgcagctggagcggctgcacctggagggcaacaagctgcaggtgctgggcaaggacctgctgctgccccagcctgacctgcgctacctgttcctgaatggaaacaagctggcccgggtggccgccggggccttccagggcctgcggcagctggacatgctggacctgagcaacaacagcctggcctctgtgcctgagggcctgtgggccagcctgggccagcccaactgggacatgagagatggctttgacatcagcggcaacccctggatctgtgaccagaacctgagtgacctgtaccgctggctgcaggcccagaaggacaagatgttcagccagaatgacacccgctgtgccggccctgaggccgtgaagggccagaccctgctggccgtggccaagagccagtag

SEQ ID NO: 229931 - DNA, 1044 bp, Artificial Sequence
  derived and/or modified sequence
atgagcagctggagccggcagcggcccaagagccccggcggcatccagccacatgtttctagaaccttgttccttctgctgctgctggccgccagtgcatggggggtgactctgtcaccgaaggattgccaggttttccgatccgatcacgggagctcaatctcttgccagcctcctgcggaaattccaggctatcttcccgcagatactgtacacctcgctgtcgaatttttcaatctgactcacctgccagcaaacctgctgcagggggccagcaagcttcaggagcttcacctctcctctaacggcctggagtccttgagccctgagttcctacgaccagtcccacagctccgggtcctcgatctgaccaggaatgctttgaccggactaccaccaggcctcttccaggcttctgccaccttggatacacttgtgcttaaggagaatcaacttgaggtgttggaggtgtcttggctgcacggtcttaaggctttggggcacttggatcttagtggcaatcgccttaggaaactgccacctgggttactggcgaacttcaccctgctcaggactcttgacctcggcgaaaatcagctggagaccctgcctcctgatcttctcagagggcccttgcagttagagaggctgcacctggaaggaaataagttacaggtgcttggaaaggatctcctgctgcctcaaccagaccttagatacttgttcctgaacggaaataagcttgcgcgagttgctgccggcgcctttcaagggttgcgccaacttgatatgctggacctttctaataatagtctggcaagtgtgcccgaaggcctgtgggcgagcctgggccagccaaactgggatatgcgagacggatttgatatctccggcaacccatggatctgcgaccaaaatctttctgatctctaccgttggctccaggcccagaaggataagatgtttagccagaacgacacaaggtgcgcaggacccgaggccgtgaagggtcagaccctgctggctgtcgctaagtcccagtag

SEQ ID NO: 229932 - RNA, 1044 nt, Artificial Sequence
  derived and/or modified sequence
augaguaguuggucucgccagcgcccaaaaucccccggugggauccagccucacgugucucguacacuguuucugcugcuucugcuggcagccuccgccuggggcguaacauuaucaccaaaagauugccagguuuuuagaagugaucacgguuccucuaucaguugucagccaccugcugagauacccggguacuuaccugccgacaccguccaucuugccguugaauuuuuuaaccucacucacuuacccgcgaaccuccuccagggcgcaucuaagcugcaggagcuacaccugagcuccaauggacuggagagccuuagcccggaauuccugcgcccaguuccccaguugaggguccuggaccucacccguaacgcccugacuggccucccacccggacucuuccaggcuuccgcuacccuugacacccucguucugaaggagaaccaacuugaagugcucgaaguguccuggcugcacggacugaaggcacucgggcaccuggaccugagcggcaaccggcugagaaaguugccuccuggccugcuggcuaauuuuacacuacugagaacccuggacuuaggagaaaaccaacucgaaacauugccuccugaccuguuaagggggccuuugcagcuagagcgacuccaccuugaggggaacaagcuccaggugcuggguaaagaccuucuccuaccacagccggaccugcgauacuuguuucugaaugggaacaagcuugcuaggguagcagcuggcgcauuccagggcuuacgucagcuggacaugcuggacuuauccaacaauucgcuugcaagcgugccggagggccugugggccagucuuggacaaccaaauugggacaugcgugacggauucgauauuagcgguaacccuuggauuugugaccaaaacuuguccgauuuguaucgauggcugcaggcacaaaaggauaagauguuuucucagaacgauacccgaugcgcagggccugaggcgguuaaggggcaaaccuuacuugccgucgcuaaaucucaguag

SEQ ID NO: 229933 - RNA, 993 nt, Artificial Sequence
  derived and/or modified sequence
augaguuccuggucucggcagcgucccaaaucuccaggagggauacagccccacguuucucguacucuguuuuugcuuuuacuccuggcggcuagcgcaugggggguuacuuuaucaccuaaggacugucagguguuucgaagugaucauggaucaucuaucuccugccaaccacccgcagagauccccggcuaucuccccgccgacaccgugcaucuggccguagaauuuuucaaucucacacaccuaccugccaaucucuuacagggagcgucuaaauugcaggaauuacauuuaucuucaaacggcuuggagucccucucgccugaauuucugaggccaguaccacagcugcggguacuugaucugacccgcaaugccuugguucuuaaggagaaucaguuggaagugcuggaggugaguuggcugcacggccugaaagcccuagggcaccuagaucucaguggaaaccggcuccggaagcuaccccccggccugcuggcuaauuucacacuucugagaacccuggaucugggagaaaaucagcucgaaacccugccuccugacuuacugagaggaccucuucaacuggagcgccugcaccuggagggaaauaaacuccaaguccucggcaaagaucugcuccugccccagcccgaucugagauaccuguuccucaauggcaauaagcuggcacgcguggccgccggggcauuucagggacuuaggcagcuggacaugcuggaucucuccaacaacucgcucgcaucggugccagaagggcugugggcaucucugggccagccuaauugggauaugagggacggcuucgacaucuccggaaacccguggaucugugaucaaaaccugagugaucuguauagguggcuccaggcccagaaggacaaaauguucucccagaaugauacucguugugccggucccgaggcuguuaaaggacagacucugcucgccgucgccaagucccaguag

SEQ ID NO: 229934 - RNA, 1044 nt, Artificial Sequence
  derived and/or modified sequence
augagcagcuggucuagacagagacccaaauccccuggagguauucaaccacaugugagucggacccuauuccugcuccugcugcuugcugccagugccugggguguuacucucucaccuaaggauugccaagucuuccgcucagaucacggaagcucuauuucaugccagccaccugcagaaauccccggauacuuaccagccgacaccguucaucucgccguagaguuuuucaacuugacacacuuaccagcgaaucuccugcagggugcuaguaaguuacaggaacuccaccucucuagcaauggacucgagucucuaucgcccgaguuccugcggccagugccacaauugcggguauuagaucuaacaagaaacgcauugacaggucucccccccgguuuguuucaggcaagugcgacacucgauacucuuguuuugaaggaaaaccagcuggaggugcuggaggugaguuggcugcacggacugaaagcacugggacaccuggauuuguccggaaauagauuaagaaagcucccacccggccuccuagcuaauuucacauugcugagaacccucgaucucggagaaaaucaguuagaaacgcucccaccugaccugcugagaggaccacugcaauuggagcgucuacaccucgagggcaauaaguugcaggugcuaggaaaagaccuguuacuuccucagccggaucuccguuaucuguuucucaacgguaauaaguuagcacggguugccgcaggugcuuuucagggucucagacaacuagacaugcuggaccugucaaacaacuccuuagcuucuguuccugaaggauuaugggccucccuugggcagcccaauugggauaugcgcgacggcuucgauauuagcggaaacccuuggaucugugaccagaacuugagcgacuuauauagauggcugcaggcacagaaagacaagauguucucacaaaaugacacgaggugcgcgggaccggaggccguuaaggggcagacacuacucgcuguagccaagucucaguag

SEQ ID NO: 229935 - RNA, 993 nt, Artificial Sequence
  derived and/or modified sequence
auguccucauggucacgacagcgaccgaaaucaccgggggggauucagccacauguuagucgcacacuauuccuacuucuccuccucgcagcuagcgccugggggguaacucuuuccccaaaagauugucaaguguuucgcagcgaccauggcuccucuauauccugccagccaccugcagagauccccggcuacuuacccgccgauacuguucauuuggcuguggaguuuuuuaaucuuacccacuugccugcaaaucuguuacagggcgccucuaaacugcaggagcuccaccuaagcagcaauggcuuggaaucccuauccccugaauuccuccggccggucccucagcugagagugcuagaucuuacuaggaaugcccucguucucaaagaaaaucagcuggaagugcucgaagucucaugguuacacggacugaaagcccucgggcaccucgaccuaagcggaaaucgucugcgcaagcucccuccugguuuacuugcaaacuuuacucugcugaggacgcuggacuuaggcgagaaccaacuggagacacuccccccugacuugcuacguggaccgcuacaauuggaacgucuacaucuggaggguaacaagcuucagguccucggcaaagaccuucugcuuccucaaccugaucuccgcuacuuauuccuaaauggcaacaagcucgcccgcguggccgcuggcgcauuucaaggacuccggcagcuggacaugcuggacuugaguaacaauagucucgcgaguguaccagaaggacugugggcuucuuugggucagccgaacugggacaugcgugauggcuucgauaucuccggcaauccauggauuugugaccagaaccugagcgaccucuauagauggcugcaggcccagaaagauaagauguucucucagaaugauacacggugcgcaggacccgaagcggucaaaggucagacucucuuggcaguggcuaaaagucaguag

SEQ ID NO: 229936 - protein, 550 aa, Artificial Sequence
  derived and/or modified sequence
MEEMEEELKCPVCGSFYREPIILPCSHNLCQACARNILVQTPESESPQSHRAAGSGVSDYDYLDLDKMSLYSEADSGYGSYGGFASAPTTPCQKSPNGVRVFPPAMPPPATHLSPALAPVPRNSCITCPQCHRSLILDDRGLRGFPKNRVLEGVIDRYQQSKAAALKCQLCEKAPKEATVMCEQCDVFYCDPCRLRCHPPRGPLAKHRLVPPAQGRVSRRLSPRKVSTCTDHELENHSMYCVQCKMPVCYQCLEEGKHSSHEVKALGAMWKLHKSQLSQALNGLSDRAKEAKEFLVQLRNMVQQIQENSVEFEACLVAQCDALIDALNRRKAQLLARVNKEHEHKLKVVRDQISHCTVKLRQTTGLMEYCLEVIKENDPSGFLQISDALIRRVHLTEDQWGKGTLTPRMTTDFDLSLDNSPLLQSIHQLDFVQVKASSPVPATPILQLEECCTHNNSATLSWKQPPLSTVPADGYILELDDGNGGQFREVYVGKETMCTVDGLHFNSTYNARVKAFNKTGVSPYSKTLVLQTSEGKALQQYPSERELRGI

SEQ ID NO: 229937 - DNA, 1653 bp, Artificial Sequence
  derived and/or modified sequence
atggaggagatggaggaggagctgaagtgccccgtgtgcggcagcttctacagagagcccatcatcctgccctgcagccacaacctgtgccaggcctgcgccagaaacatcctggtgcagacccccgagagcgagagcccccagagccacagagccgccggcagcggcgtgagcgactacgactacctggacctggacaagatgagcctgtacagcgaggccgacagcggctacggcagctacggcggcttcgccagcgcccccaccaccccctgccagaagagccccaacggcgtgagagtgttcccccccgccatgcccccccccgccacccacctgagccccgccctggcccccgtgcccagaaacagctgcatcacctgcccccagtgccacagaagcctgatcctggacgacagaggcctgagaggcttccccaagaacagagtgctggagggcgtgatcgacagataccagcagagcaaggccgccgccctgaagtgccagctgtgcgagaaggcccccaaggaggccaccgtgatgtgcgagcagtgcgacgtgttctactgcgacccctgcagactgagatgccacccccccagaggccccctggccaagcacagactggtgccccccgcccagggcagagtgagcagaagactgagccccagaaaggtgagcacctgcaccgaccacgagctggagaaccacagcatgtactgcgtgcagtgcaagatgcccgtgtgctaccagtgcctggaggagggcaagcacagcagccacgaggtgaaggccctgggcgccatgtggaagctgcacaagagccagctgagccaggccctgaacggcctgagcgacagagccaaggaggccaaggagttcctggtgcagctgagaaacatggtgcagcagatccaggagaacagcgtggagttcgaggcctgcctggtggcccagtgcgacgccctgatcgacgccctgaacagaagaaaggcccagctgctggccagagtgaacaaggagcacgagcacaagctgaaggtggtgagagaccagatcagccactgcaccgtgaagctgagacagaccaccggcctgatggagtactgcctggaggtgatcaaggagaacgaccccagcggcttcctgcagatcagcgacgccctgatcagaagagtgcacctgaccgaggaccagtggggcaagggcaccctgacccccagaatgaccaccgacttcgacctgagcctggacaacagccccctgctgcagagcatccaccagctggacttcgtgcaggtgaaggccagcagccccgtgcccgccacccccatcctgcagctggaggagtgctgcacccacaacaacagcgccaccctgagctggaagcagccccccctgagcaccgtgcccgccgacggctacatcctggagctggacgacggcaacggcggccagttcagagaggtgtacgtgggcaaggagaccatgtgcaccgtggacggcctgcacttcaacagcacctacaacgccagagtgaaggccttcaacaagaccggcgtgagcccctacagcaagaccctggtgctgcagaccagcgagggcaaggccctgcagcagtaccccagcgagagagagctgagaggcatctag

SEQ ID NO: 229938 - DNA, 1653 bp, Artificial Sequence
  derived and/or modified sequence
atggaggagatggaagaagagctgaagtgtcctgtctgcggatccttctacagagaaccaattatcctgccatgctcccataacttgtgtcaggcctgtgcacggaacatattggttcagacccctgaatctgagtcaccccagagccaccgcgcagcaggaagcggggtgagcgactacgattatctcgacctggataagatgtcattgtactctgaggccgactccgggtacggatcctacggaggcttcgcttccgccccaaccacgccctgccagaaatcgccaaatggcgttcgagtgtttccccctgccatgcccccccccgccacacacctgtcaccagctttggcgcccgtgcctagaaacagttgtatcacctgtccacagtgccacaggtctctgattctggacgacaggggcttaaggggatttcctaagaacagagtcttggagggcgtcatcgaccgttatcaacaaagcaaagcggcggcattgaaatgtcagctctgcgagaaagcaccgaaagaggctaccgtgatgtgtgaacagtgcgacgtcttctactgtgacccctgtcggctccgatgtcacccaccccggggtcctttggccaaacacaggttagtgccccccgctcaggggcgagtttcccgacggctgagccctaggaaagtctccacatgtacagatcacgagctggagaatcactctatgtactgtgtacagtgtaagatgcccgtgtgttatcagtgcctggaagagggcaaacactccagccacgaggtgaaggccctgggagccatgtggaagctgcacaaaagccagctctctcaagccttgaatgggctgtccgatcgcgctaaggaagcgaaggaattcctcgtgcagcttaggaatatggtgcagcaaattcaagagaattccgtggaattcgaggcttgcctcgtggcccagtgtgatgccctgatcgacgccttaaatcgtcggaaagcccagttactggctcgggtgaataaagagcatgaacataagctcaaggtcgtcagggaccagatctctcactgcacggtcaaattacggcagacaaccggattaatggaatactgtttggaggtcatcaaagagaacgatccaagcggattcctgcaaatcagcgacgcattgattcggcgcgtgcatctgacagaagatcagtggggcaaaggcacgcttactccacgcatgacaacggactttgatctcagtttggataactcacccctgctgcagtccatacatcagctcgactttgtacaagtgaaggcttcttccccggtgcccgccacaccaattctgcagctcgaggagtgttgtacgcataataactccgccacactaagctggaagcagccgcctctttcaaccgtgcctgcggacggctacatcctcgaactcgatgatggtaacggcggtcagttcagggaggtctacgtggggaaggagactatgtgcaccgtcgacggacttcattttaatagcacttacaacgcaagggtgaaagctttcaacaaaacaggcgtgagtccatacagtaaaacgctcgttctgcagacttcagagggcaaagcgctacagcagtacccatctgagcgtgagttgcgcggcatctag

SEQ ID NO: 229939 - DNA, 1653 bp, Artificial Sequence
  derived and/or modified sequence
atggaggagatggaggaggagctgaagtgccctgtgtgtggcagcttctaccgggagcccatcatcctgccctgcagccacaacctgtgccaggcctgtgccaggaacatcctggtgcagaccccagagagcgagagcccccagagccacagagctgctggcagcggcgtgtctgactatgactacctggacctggacaagatgagcctgtacagcgaggccgacagcggctacggcagctatggaggctttgccagcgcccccaccaccccctgccagaagagccccaatggagtgcgggtcttccccccagccatgcctcctccagccacccacctgagccctgccctggcccctgtgcccaggaacagctgcatcacctgcccccagtgccacaggagcctcatcctggatgaccggggcctgcggggcttccccaagaacagagtgctggagggcgtgattgaccgctaccagcagagcaaggccgccgccctgaagtgccagctgtgtgagaaggcccccaaggaggccaccgtgatgtgtgagcagtgtgatgtgttctactgtgacccctgccgcctgcgctgccaccccccccggggccccctggccaagcaccggctggtgcccccagcccagggccgggtgtcccggcggctgagccccaggaaggtgtccacctgcacagaccacgagctggagaaccacagcatgtactgtgtgcagtgcaagatgcctgtgtgctaccagtgcctggaggagggcaagcacagcagccatgaggtgaaggccctgggcgccatgtggaagctgcacaagagccagctgagccaggccctgaatggcctgagtgaccgggccaaggaggccaaggagttcctggtgcagctgaggaacatggtgcagcagatccaggagaacagcgtggagtttgaggcctgcctggtggcccagtgtgatgccctgattgatgccctgaacagaaggaaggcccagctgctggcccgggtgaacaaggagcacgagcacaagctgaaggtggtgcgggaccagatcagccactgcaccgtgaagctgcggcagaccaccggcctgatggagtactgcctggaggtgatcaaggaaaatgaccccagcggcttcctgcagatcagtgatgccctgatcagaagagtgcacctgacagaggaccagtggggcaagggcaccctgacccccaggatgaccacagactttgacctgagcctggacaacagccccctgctgcagagcatccaccagctggactttgtgcaggtgaaggccagcagccctgtgcctgccacccccatcctgcagctggaggagtgctgcacccacaacaacagcgccaccctgtcctggaagcagccccccctgagcacagtgcctgcagatggctacatcctggagctggatgatggaaatggaggccagttccgggaggtgtatgtgggcaaggagaccatgtgcaccgtggatggcctgcacttcaacagcacctacaatgcccgggtgaaggccttcaacaagacaggagtgagcccctacagcaagaccctggtgctgcagaccagcgagggcaaggccctgcagcagtaccccagcgagcgggagctgcggggcatctag

SEQ ID NO: 229940 - DNA, 1653 bp, Artificial Sequence
  derived and/or modified sequence
atggaggagatggaggaggagctgaagtgccccgtgtgcggcagcttttatagagagcccataattctgccctgtagccataacctttgccaggcatgcgctagaaatatcttggtccaaactccagagtccgagagcccgcagtctcatcgcgcagcaggatccggcgtctcagactacgactacctggatcttgacaagatgtccctttacagcgaggctgattccgggtacggatcttacggtggcttcgccagtgccccgacaactccttgccaaaaatctcccaacggtgtaagggtgttcccacctgcaatgcctcctcctgctactcacctatcgcctgctctggcccccgtccccaggaactcatgtatcacctgcccgcagtgccaccgttcattgatattggatgatcgcggcttgagggggtttccaaaaaatagggtgttggagggcgtgattgatagatatcagcagtccaaggctgccgcccttaagtgccagttgtgcgaaaaggctccgaaggaggcaacggtgatgtgcgaacagtgtgatgtgttttactgcgacccctgccggctgagatgccacccaccaagggggccgctcgctaagcatcgcctcgttccgccagctcaggggagagtcagtaggaggctctccccaaggaaagtgtccacttgtaccgaccacgaactggagaatcactccatgtactgcgtccagtgcaaaatgccagtatgttaccagtgtctcgaagagggtaaacacagtagccacgaggtgaaggctctgggggctatgtggaaactccataagtcccagctcagccaggctctgaacggcctttctgatagagccaaagaagcaaaagagtttttagtgcagctcagaaacatggttcagcaaattcaggaaaatagcgtagagtttgaagcgtgtctggttgcgcagtgcgacgcactcatcgatgccttgaacaggcgtaaagcacaactcctcgcgagggtcaacaaggaacacgaacacaagttgaaggtggtgcgtgatcaaatttctcattgcaccgtcaaactcaggcaaaccaccggccttatggagtattgtctcgaggttatcaaggaaaatgatccttctgggtttttacaaatttccgacgccttgatccgccgcgtacacctcaccgaggaccagtggggaaagggaactctgacgccgagaatgaccacggactttgatctgtcgctggacaattcgccactgttgcagagcattcaccagctggatttcgtacaggtgaaggcgagtagtcctgtacccgccacccccatactacagcttgaagagtgctgtactcacaataactccgccacactcagctggaaacaaccaccactctctaccgtgcccgcagacgggtatattctggagctcgatgacggcaacggggggcagtttcgggaggtgtacgtggggaaagaaaccatgtgcaccgtggatggacttcactttaacagtacgtataatgctcgggttaaagcattcaacaaaactggagtgtcaccatattcgaaaaccttggtattgcaaacaagtgaaggaaaggccctccagcagtacccatccgagagagaactgcggggcatatag

SEQ ID NO: 229941 - DNA, 1653 bp, Artificial Sequence
  derived and/or modified sequence
atggaggaaatggaagaggaacttaagtgtccggtatgcggttctttttacagggaaccaatcattctgccctgttctcataatttgtgtcaggcttgcgcccgaaacatccttgtgcagacccctgaatcggagtctccacagtctcaccgcgcagcaggctccggcgtgtcagattacgactacttagatctcgataagatgtccttgtacagcgaagcagattcgggatacggaagctatggagggtttgcctctgcccctaccacgccttgccagaagtcacctaatggcgtacgtgtgtttccccctgctatgcctcctcctgcaacccatctgtcccccgcactggccccagtcccaagaaactcatgtattacttgcccacagtgccacaggtcactgatcctcgacgatcgcggattacggggtttccctaagaatcgggttcttgaaggggttatagaccgttatcagcagtcaaaagcagccgctcttaaatgccagctgtgtgagaaggcccctaaagaagcgactgtgatgtgcgagcagtgcgacgtcttctactgtgacccgtgtagactgcggtgtcacccacctcgtggacctctggccaaacaccgcctggtcccacccgcacagggccgagtctccaggcggttgagccctcgaaaggtctctacatgcactgatcacgaactagagaatcatagtatgtactgtgtacagtgcaagatgccagtgtgctaccagtgccttgaggagggcaagcactcatcccacgaagtaaaagcgctaggagctatgtggaagcttcataaatctcagctctcacaggcactcaatggactcagcgacagagctaaggaggctaaagagttccttgtccaactgcgtaacatggtccagcagatccaggaaaattctgtggaatttgaagcgtgtttggtcgcccagtgtgacgcgctcattgatgctctcaatcgcaggaaagcacagttactggctcgggtgaataaggaacatgagcacaaactgaaagttgtccgcgatcagataagccactgtaccgttaagctccgccaaactactggtctcatggagtattgcctggaagttataaaggagaatgacccctcagggtttttgcagatcagcgacgctctgattagaagggtgcacctaaccgaagatcaatggggaaagggaaccctcactccaagaatgactaccgacttcgatctgtcactggacaattcacccctgcttcaatccattcaccagctggactttgtccaggtgaaagcatccagtccggttccggcaacccccatcctgcaactggaagagtgctgtactcacaataattccgcaacactgtcatggaagcagccccctttaagcaccgtgccggcagatggatatatcctcgagttagacgatggcaatggcggacagtttcgagaggtgtacgtcggtaaggagacaatgtgtaccgtggacgggctgcatttcaactccacctataatgccagggtgaaagcattcaacaagaccggggtgtccccatactccaaaaccttggtgttacaaacaagcgagggtaaagcactccagcagtatccctctgaacgggagctgagaggaatttag

SEQ ID NO: 229942 - DNA, 3726 bp, Artificial Sequence
  derived and/or modified sequence
gccagtgctgcgcgggaaggcaccaccaccacagccgccgccgctggccagggtgctggacaagacgggcccgtcggccacctcgccagctcaggcacccgctgcagccgtcgctgtctcctcccagaccggtccccatggaggagatggaagaggagttgaaatgccccgtgtgcggctccttctatcgggagcccatcatcctgccctgctctcacaatttgtgtcaggcgtgcgcccgcaacatcctggtgcagaccccagagtctgaatccccccagagccatcgggccgcgggctccggggtctccgactatgactatctggacctggacaagatgagcctatacagcgaggcggacagcggctatggctcctacggggggttcgccagcgcccccactaccccgtgccagaagtcccccaacggcgtccgcgtgtttcccccggctatgccgccaccggccacccacttgtcaccggccctggccccggtgccccgcaactcctgtatcacctgcccccagtgtcaccgcagcctcatcctggatgaccgggggctccgcggcttccccaagaatcgcgtactggaaggggtaattgaccgctaccagcagagcaaagccgcggccctcaagtgccagctctgcgagaaggcgcccaaggaagccaccgtcatgtgcgaacagtgcgatgtcttctactgcgatccgtgccgcctgcgctgccacccgccccgggggcccctagccaagcaccgcctggtgcccccggcccagggtcgtgtgagccggaggctgagcccacgcaaggtctccacctgcacagaccacgagctggagaaccacagcatgtactgcgtgcaatgcaagatgcccgtgtgctaccagtgcttggaggagggcaaacactccagccacgaagtcaaggctctgggggccatgtggaaactacataagagccagctctcccaggcgctgaacggactgtcagacagggccaaagaagccaaggagtttctggtacagctgcgcaacatggtccagcagatccaggagaacagtgtggagtttgaagcctgtctggtggcccaatgtgatgccctcatcgatgccctcaacagaagaaaagcccagctgctggcccgcgtcaacaaggagcatgagcacaagctgaaggtggttcgagatcagatctctcactgcacagtgaaattgcgccagaccacaggtctcatggagtactgcttggaggtgattaaggaaaatgatcctagtggttttttgcagatttctgacgccctcataagaagagtgcacctgactgaggatcagtggggtaaaggcacactcactccaaggatgaccacggactttgacttgagtctggacaacagccctctgctgcaatccatccaccagctggatttcgtgcaagtgaaagcttcctctccagtcccagcaacccctatcctacagctggaggaatgttgtacccacaacaacagcgctacgttgtcctggaaacagccacctctgtccacggtgcccgccgatggatacattctggagctggatgatggcaacggtggtcaattccgggaggtgtatgtggggaaggagacaatgtgcactgtggatggtcttcacttcaacagcacatacaacgctcgggtcaaggccttcaacaaaacaggagtcagcccgtacagcaagaccctggtcctccaaacgtctgagggtaaggcccttcagcagtatccctcagagcgagaactgcgtggcatctaaagtggctggcaagcccggaggtaaccccaccactgcccacattcctgaagtgtttccatgacttgctctgcattctgcacagagccgctgttcctctcctgcctttagagagcctatggtatgtggatgtgatcaaaccaaagattccacatcggcagttccaatggcttgggccggcggcttcctttgataacaatctaaataagctgcagttgaagaagctgaaaaatgaaggcctgaatgtgcccctggtgtgtaagacaaatgtatctaggctctagagcaggctcccattctccaccgatacacatcatgtgccagttttgcccagatgattctaaattactctgtagtacttgcttgttctgagggtgggacctaggttctttccagtcgtggatttgtatgactgaatgtgtttcaaatgggtggtggggtgctagagctgtttagagagggcctgttggctgctcctggcttacccacttagactgcctccgtttcatacccaaagcggaggccgtcagcaccaggattgagacttcctgtgggcaccaaacaggaagagaccagcaacttcgcattacccgccattttcatctttgccagtcccttcagtcttggctaggctaccgagagccaccatacaaggttcatctctagagaatttttgcttcttagctatactttaaatattttggtcatcaaagacaagtaatgtgtctcagatgagaggcttgaatttgatggccagatataacctctgaggcttttaacattttcattttaagagtaagcaagacacatgaaattaaacctacaaggaggtatttgtggctggtgccaaagcattctgacactttggggtgtcattttaatcaaagaaatcacccccccacctcaccgggattctccataacttccctctgcagaactaattatgttgattttgttcaagttcaagatgttagctaaaagaactatggtggtgttttttttcccacttcccacaaacctcaacatgtgccagtcaccctaaaatgcttcacatggttaaaaacaagcacaattttgaatcctacagcaaggatgaaaggcccctagccgtgaaaacagtgctttggggagcagttgtcagtctaagtgatgctattccaagagaaggatatgctgagggaaaatgcccacatgacctgttcccatttggagtacagtgatgtggtagctacagcttcccccagaattatcattttagcaccttctctcagggatgacctatcagtttgagagcagttgcctcttttctcaaaataccatactaactgctaaagccctccaagagtctttcctagatgcaacgcagaaggcccttgctggtgatggcctcatttcccatgtgtgtacaaggtggtttgattgaagagtgaagtgcatgcctgcagagcagagagaaatttgtagcaatgttgctaatatgtgttatcagatctgcgggaaaactatttctattcataatacatcatgggaatcatactattctggtaaaaatcagttattagcataacagcctgagcacttatgtctctcgtttcatcctgcaggaggatgtagcgcctcagtttattttaatgttcataagattatggtgtctaatttaataaattacaggattggaactgcgatccttggtaccacagtcacagaactgggggtcattttctagatgaaacaaacggaacaagttctcttccaacaaagaaactgtactgtagaaattaatttcctccatgaattttatatattgtgtacaaatataaggtatgtatctgaatacaaagaaaagcctatcatcatatagatatcagtattctctgttactgcacagaagtaattttctcatgatgaaataaagttcacacacatactttctccataa

SEQ ID NO: 229943 - protein, 1292 aa, Artificial Sequence
  derived and/or modified sequence
MRAVLTWRDKAEHCINDIAFKPDGTQLILAAGSRLLVYDTSDGTLLQPLKGHKDTVYCVAYAKDGKRFASGSADKSVIIWTSKLEGILKYTSWSVMSSLHLHLPFLGLHKTVRVTATDKAPKGQGGRIDCLRPSVQNQPGQKHNDAIQCVSYNPITHQLASCSSSDFGLWSPEQKSVSKHKSSSKIICCSWTNDGQYLALGMFNGIISIRNKNGEEKVKIERPGGSLSPIWSICWNPSSRWESFWMNRENEDAEDVIVNRYIQEIPSTLKSAVYSSQGSEAEEEEPEEEDDSPRDDNLEERNDILAVADWGQKVSFYQLSGKQIGKDRALNFDPCCISYFTKGEYILLGGSDKQVSLFTKDGVRLGTVGEQNSWVWTCQAKPDSNYVVVGCQDGTISFYQLIFSTVHGLYKDRYAYRDSMTDVIVQHLITEQKVRIKCKELVKKIAIYRNRLAIQLPEKILIYELYSEDLSDMHYRVKEKIIKKFECNLLVVCANHIILCQEKRLQCLSFSGVKEREWQMESLIRYIKVIGGPPGREGLLVGLKNGQILKIFVDNLFAIVLLKQATAVRCLDMSASRKKLAVVDENDTCLVYDIDTKELLFQEPNANSVAWNTQCEDMLCFSGGGYLNIKASTFPVHRQKLQGFVVGYNGSKIFCLHVFSISAVEVPQSAPMYQYLDRKLFKEAYQIACLGVTDTDWRELAMEALEGLDFETAKKAFIRVQDLRYLELISSIEERKKRGETNNDLFLADVFSYQGKFHEAAKLYKRSGHENLALEMYTDLCMFEYAKDFLGSGDPKETKMLITKQADWARNIKEPKAAVEMYISAGEHVKAIEICGDHGWVDMLIDIARKLDKAEREPLLLCATYLKKLDSPGYAAETYLKMGDLKSLVQLHVETQRWDEAFALGEKHPEFKDDIYMPYAQWLAENDRFEEAQKAFHKAGRQREAVQVLEQLTNNAVAESRFNDAAYYYWMLSMQCLDIAQDPAQKDTMLGKFYHFQRLAELYHGYHAIHRHTEDPFSVHRPETLFNISRFLLHSLPKDTPSGISKVKILFTLAKQSKALGAYRLARHAYDKLRGLYIPARFQKSIELGTLTIRAKPFHDSEELVPLCYRCSTNNPLLNNLGNVCINCRQPFIFSASSYDVLHLVEFYLEEGITDEEAISLIDLEVLRPKRDDRQLEIANNSSQILRLVETKDSIGDEDPFTAKLSFEQGGSEFVPVVVSRLVLRSMSRRDVLIKRWPPPLRWQYFRSLLPDASITMCPSCFQMFHSEDYELLVLQHGCCPYCRRCKDDPGP

SEQ ID NO: 229944 - DNA, 3879 bp, Artificial Sequence
  derived and/or modified sequence
atgagggccgtgctcacttggagagacaaggccgaacattgcatcaatgatatcgcattcaaacctgacggcactcaactcatcttagccgccggatccagactgctagtatacgacacctcagacggaacattgctgcaaccacttaagggccataaggatacagtatattgtgtcgcatatgccaaagatggcaaacgcttcgcatccggcagcgcagacaagtccgttatcatctggacatcaaagcttgagggcatcctcaagtacacttcgtggtctgtgatgtcctcactgcaccttcatttaccatttttgggcctccacaaaactgttagagtgaccgccacggacaaagcccccaaaggacagggcggccgtatcgactgtctgaggcccagcgtgcagaaccagccaggtcagaagcataacgatgccattcagtgtgtatcctacaaccccattacgcaccaactggctagttgttctagcagcgacttcggactttggtcacccgagcaaaaatctgtgtctaagcataagtccagtagcaaaatcatttgctgtagttggacgaacgacgggcagtacctcgctctcggtatgtttaatggtataatatcaatccgtaacaaaaacggggaagagaaggtgaagatcgagcggcccggtggctcgctgtctcctatttggtctatatgttggaacccttctagtcgttgggagtccttttggatgaacagggaaaacgaggacgctgaagacgtgattgtgaatcgttacatccaggagattcctagtacgctcaagtcagctgtttactcgtcacaggggtccgaggctgaagaagaggaacctgaagaggaagatgactcccctcgcgacgacaacctggaagagcggaacgacatactggccgtggccgattgggggcagaaagtgtcattctatcagctgtcagggaaacagattggcaaagatagagccctgaattttgacccttgttgcattagctattttactaaaggggagtacatcctcctgggcggtagcgacaagcaggtgtccctgttcaccaaagacggcgttaggctcgggaccgtgggggagcaaaactcttgggtttggacctgtcaagctaaacccgattcaaactatgtcgtagtaggctgccaggacggtaccattagtttttatcagctgatcttcagtacggtgcatggtctgtataaggacagatatgcatatcgagattcaatgacggatgttatcgtccaacacctcataactgagcaaaaggtacgaataaagtgcaaagaactggtcaagaaaatcgcgatctaccgcaataggctggcaatacagctacccgagaaaattctaatctacgagctgtactccgaagacctgtccgacatgcattatcgcgtgaaagagaaaatcataaagaagtttgagtgtaacttgctcgtggtgtgtgccaatcacatcatcctctgtcaggaaaagaggctccaatgtctgagcttttcaggagtgaaggagcgcgagtggcaaatggaatcactcattagatacatcaaagtgattggtggaccccctggcagggagggtcttctggtaggtctgaaaaacgggcaaatcctgaagattttcgtggacaacctgttcgcaatcgtcttactgaagcaggctaccgccgtacgttgcctcgacatgtctgccagccggaagaagctggctgtggtcgacgagaacgacacttgcctggtgtacgacattgacaccaaagagctgctgttccaggagccgaacgccaactccgtcgcgtggaatacacagtgtgaggacatgttgtgtttctcaggcggcgggtacctgaacatcaaggcgagcactttccccgtccatcggcagaagttacagggcttcgtggtagggtataacggtagcaaaatcttctgtctccatgtcttctctatctcagccgtggaggtgcctcagagcgcacctatgtatcaatacctggatcgcaagctatttaaggaggcataccagattgcttgccttggagtcaccgacaccgactggagagagctggctatggaggcactagaagggttagactttgaaacagcgaaaaaggcctttattcgcgttcaggatctgcgatatctagaattgatcagctctattgaagaacgaaaaaagcgaggcgagactaacaatgacttgtttctggctgacgtgttcagttatcaggggaaatttcacgaggctgcaaagctttataagcggtcaggtcatgaaaacttggccctggagatgtacaccgacctgtgcatgtttgagtatgctaaagattttctagggagcggagatccaaaggaaacaaagatgctgattactaagcaggccgactgggccagaaacatcaaagaaccgaaagctgctgtcgagatgtacatctccgcaggcgagcatgtaaaggccatcgagatatgtggcgatcacggctgggtcgacatgttgatcgacatcgcccgtaaactggataaagctgaaagagaacctctgctgctctgcgcaacctatctgaagaagctcgactctcctggctacgctgctgagacctatctgaaaatgggtgatctgaaatccctggtccagctgcatgtagagacacaacgctgggacgaagcctttgcactgggcgagaagcacccggaatttaaggacgacatctacatgccctacgcccagtggctcgctgaaaatgaccgcttcgaagaagctcagaaagcttttcacaaagcgggacgccaaagagaggccgtgcaggtcctggagcaactgactaataacgccgtcgcagagtcccggttcaacgatgccgcctactattactggatgctgagcatgcagtgcctcgatatcgcacaggaccctgctcagaaagatactatgttaggtaaattttaccactttcagcggctagccgaactgtatcacggataccacgccattcatagacatactgaggatcccttcagtgtccatcgtccagaaacattgttcaatatcagtagattcctgttacactcccttcccaaagatactccatccggtatctcaaaggtgaaaatcctatttacgctcgcgaagcagagtaaagctctgggcgcctatcggctggccagacatgcttacgataaactaaggggcctgtacatacctgcccgcttccagaagtcaatagaacttggaacccttacaatcagggctaagcccttccatgatagcgaagagctcgttcctctctgctacaggtgcagtactaacaaccctttactcaacaacctgggtaatgtgtgtattaattgccggcaaccgttcatctttagtgcctcgagctacgacgttctgcatctggtcgagttttacctggaggagggaataaccgatgaagaagctatctcactgattgacctggaggtgctgcgtccgaagcgagatgatcggcagctggaaatcgcgaacaattcttctcagattcttcgattggttgagacaaaggattcaataggcgatgaggatcccttcactgcgaagctgagctttgaacagggcggctcagaattcgtcccagttgttgtgtcccgactggtacttcgctccatgtcccgcagagacgtcctgattaagagatggccacctccgttgcggtggcagtacttcaggagtctgcttcccgacgcctcaattacaatgtgtccatcatgcttccagatgtttcacagcgaggactacgagttgttggttcttcagcacggctgctgcccatattgcagacgctgcaaggacgatccagggccgtag

SEQ ID NO: 229945 - DNA, 4151 bp, Artificial Sequence
  derived and/or modified sequence
ttttctggctttccctttcggacatgcgcgctcggagcaaggcgccctcgcactcagcttaccgcgcatgtacgttgccaggggtaacgcaggtagccaaagtggcttgtggagtggcgaccgttagtgaggcggttgctgagacagacgctgaggcgggtaggaggagcccgagccgtaagggaagccgtgatgagggccgtgttgacgtggagagataaagccgagcactgtataaatgacatcgcatttaagcctgatggaactcaactgattttggctgccggaagcagattactggtttatgacacctctgatggcaccttacttcagcccctcaagggacacaaagacactgtgtactgtgtggcatatgcgaaggatggcaagcgctttgcttctggatcagctgacaaaagcgttattatctggacatcaaaactggaaggcattctgaagtacacatcttggtctgtgatgtcttcattgcacctccatcttccatttctgggcctccacaaaacagtaagagtaacagccacagataaagcacctaaaggccaaggtgggaggattgattgcttgaggccaagcgttcaaaaccaacctggccaaaagcacaatgatgctatacaatgtgtctcctacaatcctattactcatcaactggcatcttgttcctccagtgactttgggttgtggtctcctgaacagaagtctgtctccaaacacaaatcaagcagcaagatcatctgctgcagctggacaaatgatggtcagtacctggcgctggggatgttcaatgggatcatcagcatacggaacaaaaatggcgaggagaaagtaaagatcgagcggccggggggctccctctcgccaatatggtccatctgctggaacccttcaagccgatgggagagtttctggatgaacagagagaatgaggatgccgaggatgtcattgtcaacagatatattcaggaaatcccttccactctgaagtcagcagtgtacagtagtcagggtagtgaggcagaggaggaagaaccagaggaagaggacgacagtcccagggacgacaacttagaggaacgtaatgacatcctggctgtggctgactggggacagaaagtttccttctaccagctgagtggaaaacagattggaaaggatcgggcactgaactttgacccctgctgcatcagctactttactaaaggcgagtacattttgctggggggttcagacaagcaagtatctcttttcaccaaggatggagtgcggcttgggactgttggggagcagaactcctgggtgtggacgtgtcaagcgaaaccggattccaactatgtggtggtcggctgccaggacggcaccatttccttctaccagcttattttcagcacagtccatgggctttacaaggaccgctatgcctacagggatagcatgactgacgtcattgtgcagcacctgatcactgagcagaaagttcggattaaatgcaaagagcttgtcaagaagattgccatctacagaaatcgattggctatccaactgccagagaaaatcctcatctatgagttgtattcagaggacttatcagacatgcattaccgggtaaaggagaagattatcaagaagtttgagtgcaacctcctggtggtgtgtgccaatcacatcatcctgtgccaggagaaacggctgcagtgcctgtccttcagcggagtgaaggagcgggagtggcagatggagtctctcattcgttacatcaaggtgatcggtggccctcctggaagagaaggcctcttagtggggctgaagaatggacagatcctgaagatcttcgtggacaatctctttgctatcgtcctgctgaagcaggccacagctgtgcgctgcttggacatgagtgcctcccgtaagaagctggccgtggtagatgaaaatgacacttgcctggtgtatgacatcgacaccaaggagctgctttttcaggaaccaaacgccaacagtgtagcttggaacacccagtgtgaggacatgctctgcttctcgggaggaggctacctcaacatcaaagccagcaccttccctgtgcaccggcagaagctgcagggctttgtggtcggctacaatggctccaagatcttctgcctccatgtcttctccatttctgccgtggaggtgccgcagtccgctcccatgtaccagtacctggataggaaactgttcaaggaagcctaccagattgcttgcttgggtgtcacagacactgattggcgtgaactggccatggaagcgctagaaggtttagattttgaaacagcaaagaaggccttcatcagagtacaagacctccgatatttagagctcatcagcagcattgaggagaggaagaagcggggagagaccaacaatgacctgtttctggcagatgtgttttcctaccaggggaagttccatgaggccgccaaactgtacaagaggagtgggcacgagaacctcgcgcttgaaatgtacaccgacctctgcatgtttgagtatgccaaggatttccttggatctggagaccccaaagaaacaaagatgctaatcaccaaacaggctgactgggccagaaatatcaaggagcccaaagccgccgtggagatgtacatctcagcaggagagcacgtcaaggccatcgagatctgtggtgaccatggctgggttgacatgttgatcgacatcgcccgcaaactggacaaggctgagcgcgagcccctgctgctgtgcgctacctacctcaagaagctggacagccctggctatgctgctgagacctacctgaagatgggtgacctcaagtccctggtgcagctgcacgtggagacccagcgctgggatgaggcctttgctttgggtgagaagcatcctgagtttaaggatgacatctacatgccgtatgctcagtggctagcagagaacgatcgctttgaggaagcccagaaagcgttccacaaggctgggcgacagagagaagcggtccaggtgctggagcagctcacaaacaatgccgtggcggagagcaggtttaatgatgctgcctattattactggatgctgtccatgcagtgcctcgatatagctcaagatcctgcccagaaggacacaatgcttggcaagttctaccacttccagcgtttggcagagctgtaccatggttaccatgccatccatcgccacacggaagatccgttcagtgtccatcgtcctgaaactcttttcaacatctccaggttcctgctgcacagcctgcccaaggacaccccctcgggcatctctaaagtgaaaatactcttcaccttggccaagcagagcaaggccctcggtgcctacaggctggcccggcacgcctatgacaagctgcgtggcctgtacatccctgccagattccaaaagtccattgagctgggtaccctgaccatccgcgccaagcccttccacgacagtgaggagttggtgcccttgtgctaccgctgctccaccaacaacccgctgctcaacaacctgggcaacgtctgcatcaactgccgccagcccttcatcttctccgcctcttcctacgacgtgctacacctggttgagttctacctggaggaagggatcactgatgaagaagccatctccctcatcgacctggaggtgctgagacccaagcgggatgacagacagctagagattgcaaacaacagctcccagattctgcggctagtggagaccaaggactccatcggagatgaggacccgttcacagctaagctgagctttgagcaaggtggctcagagttcgtgccagtggtggtgagccggctggtgctgcgctccatgagccgccgggatgtcctcatcaagcgatggcccccacccctgaggtggcaatacttccgctcactgctgcctgacgcctccattaccatgtgcccctcctgcttccagatgttccattctgaggactatgagttgctggtgcttcagcatggctgctgcccctactgccgcaggtgcaaggatgaccctggcccatgaccagcatcctggggacggcctgcaccctctgcccgccttggggtctgctgggctgtgaaggagaataaagagttaaactg

SEQ ID NO: 229946 - DNA, 3879 bp, Artificial Sequence
  derived and/or modified sequence
atgagagctgtgctgacctggagggacaaggccgagcactgcatcaatgacatcgccttcaagccagatggcacccagctgatcctggccgccggcagccggctgctggtgtatgacaccagtgatggcaccctgctgcagcccctgaagggccacaaggacacagtgtactgtgtggcctatgccaaggatggcaagagatttgccagcggcagcgctgacaagagcgtcatcatctggaccagcaagctggagggcatcctgaagtacacctcctggagcgtgatgagcagcctgcacctgcacctgcccttcctgggcctgcacaagacagtgcgggtgacagccacagacaaggcccccaagggccagggcggcagaattgactgcctgcggcccagcgtgcagaaccagcccggccagaagcacaatgatgccatccagtgtgtgtcctacaaccccatcacccaccagctggccagctgcagcagcagtgactttggcctgtggagccctgagcagaagtctgtgtccaagcacaagagcagcagcaagatcatctgctgctcctggaccaatgatggccagtacctggccctgggcatgttcaacggcatcatcagcatccggaacaagaatggagaggagaaggtgaagattgaaagacctgggggcagcctgagccccatctggagcatctgctggaaccccagcagccgctgggagagcttctggatgaacagagaaaatgaagatgctgaagatgtgattgtgaaccgctacatccaggagatccccagcaccctgaagtctgctgtgtacagcagccagggcagcgaggccgaggaggaggagcctgaggaggaggatgacagccccagagatgacaacctggaggagagaaatgacatcctggccgtggccgactggggccagaaggtgtccttctaccagctgagcggcaagcagatcggcaaggaccgggccctgaactttgacccctgctgcatctcctacttcaccaagggggagtacatcctgctgggcggcagtgacaagcaggtgtccctcttcaccaaggatggagtgcggctgggcaccgtgggggagcagaacagctgggtgtggacctgccaggccaagccagacagcaactacgtggtggtgggctgccaggacggcaccatctccttctaccagctgatcttcagcacagtgcacggcctgtacaaggacagatatgcctacagagacagcatgacagatgtgattgtgcagcacctgatcacagagcagaaggtgcgcatcaagtgcaaggagctggtgaagaagatcgccatctacagaaaccggctggccatccagctgcctgagaagatcctgatctatgagctgtacagcgaggacctgagtgacatgcactacagagtgaaggagaagatcatcaagaagtttgagtgcaacctgctggtggtgtgtgccaaccacatcatcctgtgccaggagaagaggctgcagtgcctgtccttctctggagtgaaggagcgggagtggcagatggagagcctcatccgctacatcaaggtgattggaggccccccaggccgggagggcctgctggtgggcctgaagaatggccagatcctgaagatctttgtggacaacctgtttgccatcgtgctgctgaagcaggccacagctgtgcgctgcctggacatgtctgccagcaggaagaagctggccgtggtggatgaaaatgacacctgcctggtgtatgacatcgacaccaaggagctgctcttccaggagcccaatgccaacagcgtggcctggaacacccagtgtgaggacatgctgtgcttcagcggcggcggctacctgaacatcaaggccagcaccttccctgtgcaccggcagaagctgcagggctttgtggtgggctacaacggcagcaagatcttctgcctgcacgtgttcagcatctctgctgtggaggtgccccagagcgcccccatgtaccagtacctggacaggaagctgttcaaggaggcctaccagatcgcctgcctgggcgtgacagacacagactggagggagctggccatggaggccctggagggcctggactttgaaacagccaagaaggccttcatccgggtgcaggacctgcgctacctggagctgatcagcagcattgaggagaggaagaagagaggagagaccaacaatgacctcttcctggctgatgtgttctcctaccagggcaagttccacgaggccgccaagctgtacaagaggagcggccacgagaacctggccctggagatgtacacagacctgtgcatgtttgaatatgccaaggacttcctgggcagcggggaccccaaggagaccaagatgctgatcaccaagcaggccgactgggccaggaacatcaaggagcccaaggctgctgtggagatgtacatctctgctggggagcacgtgaaggccatcgagatctgtggggaccacggctgggtggacatgctgattgatattgccaggaagctggacaaggccgagcgggagcccctgctgctgtgtgccacctacctgaagaagctggacagccctggctatgctgctgagacctacctgaagatgggagacctgaagagcctggtgcagctgcacgtggagacccagcgctgggatgaggcctttgccctgggggagaagcaccctgagttcaaggatgacatctacatgccctatgcccagtggctggctgaaaatgacagatttgaggaggcccagaaggccttccacaaggccggccggcagcgggaggccgtgcaggtgctggagcagctgaccaacaatgctgtggccgagagccgcttcaatgatgctgcctactactactggatgctgtccatgcagtgcctggacatcgcccaggaccctgcccagaaggacaccatgctgggcaagttctaccacttccagaggctggccgagctgtaccacggctaccacgccatccaccgccacacagaggaccccttctctgtgcacaggcctgagaccctcttcaacatcagccgcttcctgctgcacagcctgcccaaggacacccccagcggcatcagcaaggtgaagatcctcttcaccctggccaagcagagcaaggccctgggcgcctaccgcctggcccggcatgcctatgacaagctgcggggcctgtacatcccagcccgcttccagaagagcattgagctgggcaccctgaccatccgggccaagcccttccatgattctgaggagctggtgcccctgtgctaccgctgcagcaccaacaaccccctgctgaacaacctgggcaatgtgtgcatcaactgccggcagcccttcatcttcagcgccagcagctatgatgtgctgcacctggtggagttctacctggaggagggcatcacagatgaggaggccatcagcctgattgacctggaggtgctgcggcccaagagagatgaccggcagctggagatcgccaacaacagcagccagatcctgcggctggtggagaccaaggacagcattggagatgaggaccccttcaccgccaagctgagctttgagcagggcggcagcgagtttgtgcctgtggtggtgtcccggctggtgctgcgctccatgagcagaagagatgtgctgatcaagcgctggcccccacccctgcgctggcagtacttccgcagcctgctgcctgatgccagcatcaccatgtgccccagctgcttccagatgttccacagcgaggactatgagctgctggtgctgcagcacggctgctgcccctactgccgccgctgcaaggatgaccccggcccctag

SEQ ID NO: 229947 - DNA, 3879 bp, Artificial Sequence
  derived and/or modified sequence
atgcgggccgtgctgacctggcgggacaaggccgagcactgcatcaacgatatcgcctttaagcccgatggcactcagctgattctggcagctgggtccaggttactggtgtacgatacctctgatggtaccctcctccaacctctgaaaggccataaagacaccgtgtattgcgtcgcgtacgccaaggatggcaagcggtttgcttccggctccgccgataaatcagtgatcatctggacttcaaaattggaaggtatccttaaatatacctcatggtccgtgatgagcagcctccatttgcaccttcctttcctgggcctgcacaaaacagtgcgagtaacggccacagataaggcccccaagggccagggggggcggattgactgtctcaggccaagtgtgcagaaccagccaggccagaagcacaatgatgccattcaatgcgtgagttataatcccattactcatcagctggcctcatgttctagttctgatttcggcctgtggtctcctgagcagaaatccgtgtcaaagcacaaatcaagttcaaagattatttgctgcagttggactaacgatggtcagtatctagcccttggtatgtttaacggaatcattagtatacgaaacaaaaacggcgaggagaaagttaagatcgaacggccaggcggttctctgtccccaatctggtctatatgttggaacccatcatctcgctgggaatccttctggatgaaccgcgaaaatgaagacgctgaagacgtgatcgtgaaccgttacattcaggagattccttctactctgaaaagcgctgtttatagtagtcagggcagcgaggctgaagaggaggaaccggaagaagaagacgatagtccaagagacgacaacttagaagagaggaacgacatactggcagtcgcggactggggacaaaaggtgagcttctaccagctgtccgggaagcagataggaaaggaccgcgccctaaacttcgacccgtgttgcatctcatacttcaccaaaggcgaatatatcctgcttggaggcagtgacaaacaagtgagcctatttaccaaggacggtgtgagactgggaactgtcggagagcaaaattcatgggtgtggacgtgccaggcgaagcctgactccaactacgtggtcgtcggatgtcaggatggaacaatatcattctatcagctcattttctcaacagtgcatggtctatacaaggacaggtatgcctatagggattctatgacagatgtgattgtccagcaccttattacagaacagaaggtgcggattaagtgcaaggaattggtgaagaaaatcgctatctaccgtaaccgcctcgcaatacagctgccggagaaaattttaatctacgaattatactccgaggatctgtccgatatgcattacagggtgaaggagaagatcattaaaaagtttgaatgtaaccttctagtggtttgcgctaatcacattattctgtgccaggaaaaacggctccagtgtctgagctttagtggtgtgaaagaacgggaatggcagatggaatcattaatccgctacattaaagtgatcggggggcccccaggccgggagggcctcttggtaggacttaagaacgggcagatcctcaagatcttcgtcgacaatctgttcgccatcgttctgctgaagcaagcaacagccgtgagatgtcttgatatgtccgcttctagaaagaagttagcggtggtggacgaaaacgatacatgcttggtttacgacatagacactaaggagttgctgttccaggagcctaatgcaaattctgttgcttggaacacccagtgcgaagacatgctgtgttttagtggcggcggatatctgaacattaaggcctccacttttcctgtgcaccggcaaaagctgcagggttttgtggtaggatacaatggcagcaagattttttgtctgcatgtattttccatctctgccgtggaagtgccccagagcgcacctatgtatcaatatctcgacaggaagctgttcaaggaggcgtatcaaatagcctgtctgggtgtgacggacactgattggcgggagttagctatggaagccttggagggattagacttcgagactgctaagaaagctttcattcgcgtccaggacctgcgctacttagagttgatctctagcattgaggagcggaaaaagcgtggcgagaccaacaatgatctgtttcttgctgacgtgttttcctatcaggggaaattccacgaagcggccaagctatacaagcgcagcgggcacgaaaatctggcgttggaaatgtataccgatctatgtatgttcgaatatgcgaaagatttccttgggtcaggggacccgaaagagaccaagatgctcataacaaaacaggcggactgggcccgcaatatcaaggagccgaaggccgccgtggagatgtatatcagcgccggtgagcatgtcaaagccatcgaaatttgtggagatcatggctgggtggacatgttgatcgatattgcccgaaagttggataaagccgaacgcgaaccattgctcctgtgtgctacatacctgaagaagctggacagcccagggtatgcagctgaaacctatctaaaaatgggtgacctcaaatctttggttcagctgcatgtggagactcagagatgggatgaggctttcgcattaggggagaaacaccccgaatttaaggacgacatttacatgccctacgcccagtggttagcagagaatgatagattcgaggaagcccaaaaggcatttcataaggccggccgtcagcgggaagctgtccaggtgctcgagcagttgactaacaacgccgttgcggaatccagattcaatgacgccgcctactattattggatgctttcaatgcagtgccttgacatagctcaagaccccgctcagaaagacacgatgctgggaaagttctaccattttcaacggttggcagagttatatcacggctatcacgccatccatcgacacacagaagatcccttcagtgttcaccggccagaaaccctatttaacattagtagatttttgctgcattctctgcccaaggatacaccctccggaatcagtaaggtgaaaatcctgtttaccctggccaagcagagcaaggccctcggtgcatatcgtctcgccaggcacgcctatgacaagttgagggggctgtacatcccagcccgtttccagaaatctatcgagttgggaactctgactatccgagcgaagccctttcatgactcagaggagctcgtgcctctgtgctatagatgttccacgaataaccctctgctgaacaacctgggcaatgtgtgtatcaactgccgtcagcctttcatattttccgcctcctcctacgacgtgctgcacttagtggagttctacttggaagaagggattactgatgaggaggccatatcactgatagatctcgaggtgcttcgtcccaagagagacgaccggcagttggagatcgctaataactcatcccagatcctccgtctggtggaaacaaaagatagcatcggtgatgaggatccgtttaccgcaaagctgtctttcgaacaaggtggaagcgaatttgtgcccgtggtggtatcaagactggtcctacggagtatgtcacgaagggacgtgctgatcaaaagatggccgccaccactgcgatggcaatatttccgcagcttattgcccgacgcatctatcacaatgtgtccttcctgttttcaaatgtttcatagcgaagattatgagctgctggtgctgcagcatggctgctgcccctactgtcgccgttgtaaggatgaccctggcccatag

SEQ ID NO: 229948 - DNA, 3879 bp, Artificial Sequence
  derived and/or modified sequence
atgcgggctgtgttgacatggcgggacaaagccgagcactgcatcaacgatatcgctttcaaaccagatggtacgcagttaattttggctgctgggagtcggctactagtgtatgacaccagcgatggaactctgttacaacctctcaaaggccacaaggacacggtctattgtgtggcctacgcgaaggatggaaagcggttcgcatccgggagcgccgataagagcgtcataatttggacatcaaagctggagggcattctaaagtataccagctggtcagttatgtccagcctacacctacacctgcctttcctggggctacacaagaccgtcagggtgaccgccacagataaagcccctaaaggacagggcggacgcattgattgtttgcgacctagtgtgcagaatcaaccaggccagaaacacaatgacgcaatccagtgcgtctcatataaccccattacacaccagctagcctcttgcagtagcagcgatttcggtctatggtcacctgaacagaaaagcgtgtctaaacataagtcctcttctaagataatatgctgtagttggactaatgacggacagtacctggcactgggaatgttcaatggcataattagtattcggaataagaacggggaggaaaaggtaaaaatagagcgtcccggaggatccctatcgccaatttggtccatctgttggaatcctagctccagatgggagagtttttggatgaacagggagaacgaggatgcggaggatgtgattgtgaatagatatatccaagaaatcccgtccaccctcaagtccgccgtgtactcatcccagggcagtgaggcggaagaagaggagcccgaagaagaagacgattcaccacgggatgacaacctagaggagcgtaacgatattcttgccgttgcagattggggacagaaagtgagtttctaccagcttagtggaaagcaaatcggtaaggaccgggctctcaacttcgacccatgttgcattagctattttacaaaaggagagtatattctcctgggcggaagtgataaacaggttagcctgttcacgaaagatggagtacgactggggacagtcggtgaacaaaattcctgggtgtggacctgtcaggcaaaacccgactctaattatgttgtcgtgggttgtcaggacggcaccatctccttctaccagttaatattttctacagtccacgggctgtacaaggacaggtacgcctatcgggacagtatgaccgacgtgatcgtccaacacttaatcactgaacagaaagtccggataaaatgtaaagagttggttaaaaaaatagccatttaccggaatcgcctggcaatccaactgcctgaaaaaatcctgatctacgaattgtactcagaagacttaagtgacatgcactaccgagttaaagagaagatcataaagaaattcgagtgcaaccttttggtagtctgtgccaatcatattattctgtgtcaagaaaagcgcctacagtgtctgagtttttccggcgtgaaggaacgcgagtggcaaatggagtccctgatacgatatattaaggttattggaggtccgccagggagggagggactgcttgtcggcttgaaaaatggccagatcttaaaaatattcgtagacaaccttttcgctatcgtgttgctcaaacaggctactgcagtgagatgcctggacatgagtgcctctcggaagaaattagccgtcgtggacgaaaacgatacatgcttggtttacgatattgatacaaaggagctgctgtttcaagagcccaacgccaactcagtggcatggaacactcaatgcgaagacatgctgtgttttagtgggggaggatacttgaacatcaaggcaagtactttccccgtccacaggcagaaattgcaggggttcgtagtgggctacaacggaagcaaaattttttgcctgcacgttttttcaataagcgccgtggaagtgccacagtcggccccaatgtatcagtacttggaccggaagttgtttaaagaagcctaccagattgcctgccttggggtgacagacactgactggcgcgagctcgccatggaggctctagaaggtctggacttcgagacagccaaaaaagccttcattcgagtccaggacttaagatacctggagctgatatcatctatagaggaacgtaaaaaaaggggcgaaaccaacaatgacctgttcctggctgacgtgttttcatatcaaggaaaattccacgaggccgctaagctgtataagaggtcagggcacgagaacctagcattagagatgtacacagacctgtgcatgtttgagtacgccaaagacttcctcggctctggtgacccaaaggagactaaaatgctgattactaaacaggctgactgggctagaaacataaaagagcctaaggccgctgtggagatgtatatctccgcaggtgagcatgttaaggccatcgagatatgcggggatcatggttgggttgacatgcttatagacattgctaggaagcttgacaaagcagagcgagaaccactcctcctttgtgcaacctacctgaagaaactcgattcccctggctacgcggctgagacctacttgaaaatgggcgacctcaagtcattagtgcagttgcacgtagaaacacagcggtgggacgaagcgttcgccttgggggaaaaacatccagagtttaaagacgacatttacatgccttacgcgcaatggctggcggagaacgataggtttgaggaggctcagaaagctttccataaggccggtcgacagcgggaagccgttcaggtgctcgaacagctgactaataatgccgtcgccgagtcacgttttaacgacgccgcttattattattggatgctgtccatgcagtgcttagacattgcccaggaccctgcgcaaaaggatacgatgcttggaaagttttatcattttcagcgactggctgagctgtaccacgggtaccacgcaattcacaggcacacggaggatccattctctgtccatcggccagagaccctgttcaacatctctagatttctcctgcacagtctccctaaggacactccgagcggcataagcaaagttaaaatcttatttaccctcgctaagcaaagcaaagccctcggcgcttacaggctggcgcgacatgcttatgataaacttagaggactgtacataccagcccgattccagaagagcattgagctcgggacactgaccattagagccaaaccattccatgactccgaggaactggtccctctgtgctacaggtgctcgacaaacaatcctctgctgaacaatctgggcaacgtgtgtatcaactgtcggcagccatttatcttcagcgccagctcatacgacgttttacatctggtagagttctacctcgaggaagggatcaccgatgaggaggccatctctctgattgatctggaggttctgcggccaaagcgggatgatcgccagctggagatcgcaaataattcgtctcagattctgcggctcgtcgagaccaaggactctatcggagacgaagacccctttacagccaaactttccttcgagcagggaggctcagagtttgtccccgtggtggttagtagactggtcctgaggtcaatgtctaggagggatgtgctgattaaaaggtggccacctccacttcgctggcagtacttccgcagcctccttcctgacgccagcataaccatgtgcccttcctgcttccagatgtttcactctgaagattatgagctactggtcctccagcatggatgctgtccctactgccggcgatgcaaagatgatcctggcccatag

SEQ ID NO: 229949 - DNA, 3879 bp, Artificial Sequence
  derived and/or modified sequence
atgagagccgtgctgacctggagagacaaggccgagcactgcatcaacgacatcgccttcaagcccgacggcacccagctgatcctggccgccggcagcagactgctggtgtacgacaccagcgacggcaccctgctgcagcccctgaagggccacaaggacaccgtgtactgcgtggcctacgccaaggacggcaagagattcgccagcggcagcgccgacaagagcgtgatcatctggaccagcaagctggagggcatcctgaagtacaccagctggagcgtgatgagcagcctgcacctgcacctgcccttcctgggcctgcacaagaccgtgagagtgaccgccaccgacaaggcccccaagggccagggcggcagaatcgactgcctgagacccagcgtgcagaaccagcccggccagaagcacaacgacgccatccagtgcgtgagctacaaccccatcacccaccagctggccagctgcagcagcagcgacttcggcctgtggagccccgagcagaagagcgtgagcaagcacaagagcagcagcaagatcatctgctgcagctggaccaacgacggccagtacctggccctgggcatgttcaacggcatcatcagcatcagaaacaagaacggcgaggagaaggtgaagatcgagagacccggcggcagcctgagccccatctggagcatctgctggaaccccagcagcagatgggagagcttctggatgaacagagagaacgaggacgccgaggacgtgatcgtgaacagatacatccaggagatccccagcaccctgaagagcgccgtgtacagcagccagggcagcgaggccgaggaggaggagcccgaggaggaggacgacagccccagagacgacaacctggaggagagaaacgacatcctggccgtggccgactggggccagaaggtgagcttctaccagctgagcggcaagcagatcggcaaggacagagccctgaacttcgacccctgctgcatcagctacttcaccaagggcgagtacatcctgctgggcggcagcgacaagcaggtgagcctgttcaccaaggacggcgtgagactgggcaccgtgggcgagcagaacagctgggtgtggacctgccaggccaagcccgacagcaactacgtggtggtgggctgccaggacggcaccatcagcttctaccagctgatcttcagcaccgtgcacggcctgtacaaggacagatacgcctacagagacagcatgaccgacgtgatcgtgcagcacctgatcaccgagcagaaggtgagaatcaagtgcaaggagctggtgaagaagatcgccatctacagaaacagactggccatccagctgcccgagaagatcctgatctacgagctgtacagcgaggacctgagcgacatgcactacagagtgaaggagaagatcatcaagaagttcgagtgcaacctgctggtggtgtgcgccaaccacatcatcctgtgccaggagaagagactgcagtgcctgagcttcagcggcgtgaaggagagagagtggcagatggagagcctgatcagatacatcaaggtgatcggcggcccccccggcagagagggcctgctggtgggcctgaagaacggccagatcctgaagatcttcgtggacaacctgttcgccatcgtgctgctgaagcaggccaccgccgtgagatgcctggacatgagcgccagcagaaagaagctggccgtggtggacgagaacgacacctgcctggtgtacgacatcgacaccaaggagctgctgttccaggagcccaacgccaacagcgtggcctggaacacccagtgcgaggacatgctgtgcttcagcggcggcggctacctgaacatcaaggccagcaccttccccgtgcacagacagaagctgcagggcttcgtggtgggctacaacggcagcaagatcttctgcctgcacgtgttcagcatcagcgccgtggaggtgccccagagcgcccccatgtaccagtacctggacagaaagctgttcaaggaggcctaccagatcgcctgcctgggcgtgaccgacaccgactggagagagctggccatggaggccctggagggcctggacttcgagaccgccaagaaggccttcatcagagtgcaggacctgagatacctggagctgatcagcagcatcgaggagagaaagaagagaggcgagaccaacaacgacctgttcctggccgacgtgttcagctaccagggcaagttccacgaggccgccaagctgtacaagagaagcggccacgagaacctggccctggagatgtacaccgacctgtgcatgttcgagtacgccaaggacttcctgggcagcggcgaccccaaggagaccaagatgctgatcaccaagcaggccgactgggccagaaacatcaaggagcccaaggccgccgtggagatgtacatcagcgccggcgagcacgtgaaggccatcgagatctgcggcgaccacggctgggtggacatgctgatcgacatcgccagaaagctggacaaggccgagagagagcccctgctgctgtgcgccacctacctgaagaagctggacagccccggctacgccgccgagacctacctgaagatgggcgacctgaagagcctggtgcagctgcacgtggagacccagagatgggacgaggccttcgccctgggcgagaagcaccccgagttcaaggacgacatctacatgccctacgcccagtggctggccgagaacgacagattcgaggaggcccagaaggccttccacaaggccggcagacagagagaggccgtgcaggtgctggagcagctgaccaacaacgccgtggccgagagcagattcaacgacgccgcctactactactggatgctgagcatgcagtgcctggacatcgcccaggaccccgcccagaaggacaccatgctgggcaagttctaccacttccagagactggccgagctgtaccacggctaccacgccatccacagacacaccgaggaccccttcagcgtgcacagacccgagaccctgttcaacatcagcagattcctgctgcacagcctgcccaaggacacccccagcggcatcagcaaggtgaagatcctgttcaccctggccaagcagagcaaggccctgggcgcctacagactggccagacacgcctacgacaagctgagaggcctgtacatccccgccagattccagaagagcatcgagctgggcaccctgaccatcagagccaagcccttccacgacagcgaggagctggtgcccctgtgctacagatgcagcaccaacaaccccctgctgaacaacctgggcaacgtgtgcatcaactgcagacagcccttcatcttcagcgccagcagctacgacgtgctgcacctggtggagttctacctggaggagggcatcaccgacgaggaggccatcagcctgatcgacctggaggtgctgagacccaagagagacgacagacagctggagatcgccaacaacagcagccagatcctgagactggtggagaccaaggacagcatcggcgacgaggaccccttcaccgccaagctgagcttcgagcagggcggcagcgagttcgtgcccgtggtggtgagcagactggtgctgagaagcatgagcagaagagacgtgctgatcaagagatggcccccccccctgagatggcagtacttcagaagcctgctgcccgacgccagcatcaccatgtgccccagctgcttccagatgttccacagcgaggactacgagctgctggtgctgcagcacggctgctgcccctactgcagaagatgcaaggacgaccccggcccctag

SEQ ID NO: 229950 - DNA, 819 bp, Artificial Sequence
  derived and/or modified sequence
atggacaaggaaaaggatggcatccccatctcctcactgagggaaatcacattgctgctgcgcttacgccacccaaacatcgtggaattgaaggaagtggtcgtgggcaaccacctcgaatctattttcctagttatgggatactgcgaacaagatctggccagtctgcttgaaaatatgccaaccccttttagcgaagcccaagtgaaatgcattgttctgcaagtgctgagaggactgcagtacttacatagaaactttatcattcatcgcgacctaaaggtgagcaacctgcttatgaccgacaagggctgtgtgaaaactgctgacttcggtctggcacgcgcctatggggttccagtgaagccaatgacaccgaaggtggttacactttggtaccgggcgccagagctactgctaggcactactacccagaccacatccattgatatgtgggcagtgggttgcattctggcggaactgctggcacataggcccttactgcctggcacctccgaaattcaccaaatcgacctgattgtgcaattgctggggaccccctccgaaaatatttggcctgggttttctaagctacccctcgtcggacagtatagcctaaggaaacagccttacaataatctgaagcacaagtttccttggctcagcgaggccggactgcgcctgctccatttcttgttcatgtacgaccccaagaaacgagcaacagccggagactgccttgagagttcatactttaaggagaaacccttgcgcttacctatctccggtgtctgtgagggctgtcgagaaccagggtag

SEQ ID NO: 229951 - DNA, 819 bp, Artificial Sequence
  derived and/or modified sequence
atggacaaggagaaggatggcatccccatcagcagcctgcgggagatcaccctgctgctgcggctgcggcaccccaacatcgtggagctgaaggaggtggtggtgggcaaccacctggagagcatcttcctggtgatgggctactgtgagcaggacctggccagcctgctggagaacatgcccacccccttcagcgaggcccaggtgaagtgcatcgtgctgcaggtgctgcggggcctgcagtacctgcacaggaacttcatcatccaccgggacctgaaggtgagcaacctgctgatgacagacaagggctgtgtgaagacagctgactttggcctggcccgggcctatggagtgcctgtgaagcccatgacccccaaggtggtgaccctgtggtaccgggcccctgagctgctgctgggcaccaccacccagaccaccagcattgacatgtgggccgtgggctgcatcctggccgagctgctggcccaccggcccctgctgcccggcaccagcgagatccaccagattgacctgattgtgcagctgctgggcacccccagcgagaacatctggccaggcttcagcaagctgcccctggtgggccagtacagcctgaggaagcagccctacaacaacctgaagcacaagttcccctggctgtctgaggccggcctgcggctgctgcacttcctgttcatgtatgaccccaagaagagggccacagctggggactgcctggagagcagctacttcaaggagaagcccctgcggctgcccatcagcggcgtgtgtgagggctgccgggagcctggatag

SEQ ID NO: 229952 - DNA, 819 bp, Artificial Sequence
  derived and/or modified sequence
atggacaaggagaaggacggcatccccatcagcagcctgcgggagatcactctgctgctgcggctgagacatccaaacatcgtcgaactcaaggaggttgttgtaggcaaccaccttgagtcaatctttctggtcatgggctactgcgaacaagatctcgctagtctgttagaaaatatgcctacaccgttcagtgaagctcaggtcaagtgcatagtgttgcaagtcctgcgggggctccagtatctgcacagaaactttatcatacatcgggacctgaaagtgtctaatcttctcatgactgataagggctgtgttaagaccgcagatttcggtctggcccgcgcttatggcgtacccgtgaagcccatgacgcccaaggtggtgaccctttggtacagagctcctgagctgctgctaggtacgaccacgcagacgacctcaattgacatgtgggcggtaggttgcatacttgccgagctcctggcccatagacctctgcttccgggtacctccgaaatccatcagatagaccttatcgtgcagctcctgggaacacccagtgaaaacatctggccaggtttctctaagctccctctggttggacagtactccctgcgcaaacaaccttacaataacctcaaacataagttcccgtggctctccgaggcggggctgagattgttgcacttcttgtttatgtatgatccaaaaaagcgagctaccgctggcgactgcctagagagctcatacttcaaggagaagcctttaagattacccattagtggcgtatgtgaaggctgtagggaacccggatag

SEQ ID NO: 229953 - DNA, 819 bp, Artificial Sequence
  derived and/or modified sequence
atggataaggaaaaggacggcatacccatctcttcactccgcgagatcacactcctccttagacttcggcaccccaatatagtcgaactcaaggaggtggtggtagggaatcacttggagagcattttcttggtgatgggttattgtgagcaagacctagccagcctactcgagaacatgccaacgccattttccgaagctcaagtgaagtgtatcgtgctgcaagtgctacgagggctgcagtaccttcaccgcaatttcatcatccatcgggatcttaaagtttcaaatctcttgatgacagacaagggttgtgtcaaaaccgctgacttcgggctggcacgcgcatatggagttcccgtaaagccaatgacgcccaaagtggtgactttatggtatcgcgctcccgagctcctgttggggacaacgacccagaccaccagcatcgatatgtgggctgtcggatgcattctcgccgagctgctggctcatcgcccattgctgccgggaacatcagaaattcaccagattgatctcattgtgcagctgctcggaacgcctagcgagaacatctggcccggattcagtaaactgcctttagtcggccaatactcacttcgcaaacagccctacaacaacctgaaacataaattcccctggctgtccgaggccggactccgcttattgcacttcctgttcatgtacgatcccaagaaacgagccaccgccggagattgcctggagtcctcttatttcaaagagaagcccctgcgacttccaatttccggagtgtgcgaaggttgtcgtgagcccggttag

SEQ ID NO: 229954 - DNA, 819 bp, Artificial Sequence
  derived and/or modified sequence
atggacaaggagaaggacggcatccccatcagcagcctgagagagatcaccctgctgctgagactgagacaccccaacatcgtggagctgaaggaggtggtggtgggcaaccacctggagagcatcttcctggtgatgggctactgcgagcaggacctggccagcctgctggagaacatgcccacccccttcagcgaggcccaggtgaagtgcatcgtgctgcaggtgctgagaggcctgcagtacctgcacagaaacttcatcatccacagagacctgaaggtgagcaacctgctgatgaccgacaagggctgcgtgaagaccgccgacttcggcctggccagagcctacggcgtgcccgtgaagcccatgacccccaaggtggtgaccctgtggtacagagcccccgagctgctgctgggcaccaccacccagaccaccagcatcgacatgtgggccgtgggctgcatcctggccgagctgctggcccacagacccctgctgcccggcaccagcgagatccaccagatcgacctgatcgtgcagctgctgggcacccccagcgagaacatctggcccggcttcagcaagctgcccctggtgggccagtacagcctgagaaagcagccctacaacaacctgaagcacaagttcccctggctgagcgaggccggcctgagactgctgcacttcctgttcatgtacgaccccaagaagagagccaccgccggcgactgcctggagagcagctacttcaaggagaagcccctgagactgcccatcagcggcgtgtgcgagggctgcagagagcccggctag

SEQ ID NO: 229955 - protein, 313 aa, Artificial Sequence
  derived and/or modified sequence
MEPMYQDRARDTQTDEIVALKKVRMDKEKDGIPISSLREITLLLRLRHPNIVELKEVVVGNHLESIFLVMGYCEQDLASLLENMPTPFSEAQVKCIVLQVLRGLQYLHRNFIIHRDLKVSNLLMTDKGCVKTADFGLARAYGVPVKPMTPKVVTLWYRAPELLLGTTTQTTSIDMWAVGCILAELLAHRPLLPGTSEIHQIDLIVQLLGTPSENIWPGFSKLPLVGQYSLRKQPYNNLKHKFPWLSEAGLRLLHFLFMYDPKKRATAGDCLESSYFKEKPLPCEPELMPTFPHHRNKRAAPATSEGQSKRCKP

SEQ ID NO: 229956 - protein, 360 aa, Artificial Sequence
  derived and/or modified sequence
MAEPDLECEQIRLKCIRKEGFFTVPPEHRLGRCRSVKEFEKLNRIGEGTYGIVYRARDTQTDEIVALKKVRMDKEKDGIPISSLREITLLLRLRHPNIVELKEVVVGNHLESIFLVMGYCEQDLASLLENMPTPFSEAQVKCIVLQVLRGLQYLHRNFIIHRDLKVSNLLMTDKGCVKTADFGLARAYGVPVKPMTPKVVTLWYRAPELLLGTTTQTTSIDMWAVGCILAELLAHRPLLPGTSEIHQIDLIVQLLGTPSENIWPGFSKLPLVGQYSLRKQPYNNLKHKFPWLSEAGLRLLHFLFMYDPKKRATAGDCLESSYFKEKPLPCEPELMPTFPHHRNKRAAPATSEGQSKRCKP

SEQ ID NO: 229957 - DNA, 942 bp, Artificial Sequence
  derived and/or modified sequence
atggaacccatgtaccaggacagagccagagatacccagactgacgagatcgtcgcattaaaaaaagtacgcatggataaagagaaagatggtattcccatcagtagtctgagggaaattacgctgctgttgcggcttcggcatcctaacattgtcgagttaaaagaagtggtggtgggcaatcacttggaatccatcttccttgttatgggctattgcgaacaagaccttgcctctctgctagagaatatgccaacaccctttagtgaagcacaggtcaagtgcattgtgcttcaagtgctgaggggcctgcagtacctccataggaactttattattcatagagacctgaaagtgagcaacttactaatgaccgacaaaggctgcgttaagaccgctgatttcgggctagcacgggcctatggggttccagtgaaaccgatgacccccaaagttgttaccctatggtacagggcccctgagctgctacttggcacgactacacagaccacctccattgatatgtgggctgtgggatgtatcctggccgagctcctggctcatcggcccttgctgcccggaacctccgagatccatcagatcgacctcattgtgcagctgcttgggaccccatctgagaatatctggccagggtttagcaagctccctctggtggggcagtatagtctccggaagcagccttacaacaatcttaagcataagttcccttggttgtctgaggccggcttgcggctcttacacttcctgtttatgtacgaccccaagaaacgggcgactgctggcgattgtctcgagtcaagctatttcaaagaaaagccactgccctgcgaacccgagttgatgcccacttttcctcatcaccggaataaaagggctgcccccgccacctcagaaggtcaatctaagagatgtaagccatag

SEQ ID NO: 229958 - DNA, 1083 bp, Artificial Sequence
  derived and/or modified sequence
atggccgaaccagacctggagtgtgagcagataaggcttaagtgcatccgaaaagaaggcttctttaccgtgccacccgagcaccgcctgggcaggtgtagatccgtcaaggagttcgagaagttgaataggattggggaagggacttacggtattgtctatcgcgccagagacactcagacagacgaaatagtggcattgaaaaaagtccgaatggacaaagagaaggacggcatcccaattagttcgctgcgcgagatcactctactactgaggctgaggcatccaaacattgtggagctaaaagaggtcgtagtcgggaatcatctcgagagtatcttcttggtgatggggtattgcgagcaggatctggctagtctcttagaaaacatgcctacacctttctctgaggcacaagtcaaatgtatagtgcttcaggtgctgagaggcttgcaatatttacatcggaacttcatcatccaccgtgacctcaaagtctccaatctactgatgaccgacaagggatgtgtaaagacagcggacttcggacttgcacgagcgtacggagtccccgtcaagcccatgactcctaaggtggtgaccctgtggtatagggctcctgaactgctgctgggcacaacaacacaaacaactagcatcgatatgtgggcagtagggtgcatactggccgaactgctcgctcaccgtcctctccttcctggtacatctgagattcaccagatcgatttaattgtacaattactgggcacaccaagcgagaatatctggcctggcttctccaagttgcctctcgtcggacagtactcactccgaaagcagccttataacaatcttaagcataagttcccctggctgagcgaggccggccttcggctccttcactttctcttcatgtacgaccctaagaaaagggccactgccggcgattgcttggaaagcagctatttcaaggaaaagccactcccttgcgagcctgagttaatgccgacattcccacatcaccggaataaaagagccgcaccggcaacctctgagggtcaaagcaagcggtgtaagccctag

SEQ ID NO: 229959 - DNA, 942 bp, Artificial Sequence
  derived and/or modified sequence
atggagcccatgtaccaggaccgggcccgggacacccagacagatgaaattgtggccctgaagaaggtgaggatggacaaggagaaggatggcatccccatcagcagcctgcgggagatcaccctgctgctgcggctgcggcaccccaacatcgtggagctgaaggaggtggtggtgggcaaccacctggagagcatcttcctggtgatgggctactgtgagcaggacctggccagcctgctggagaacatgcccacccccttcagcgaggcccaggtgaagtgcatcgtgctgcaggtgctgcggggcctgcagtacctgcacaggaacttcatcatccaccgggacctgaaggtgagcaacctgctgatgacagacaagggctgtgtgaagacagctgactttggcctggcccgggcctatggagtgcctgtgaagcccatgacccccaaggtggtgaccctgtggtaccgggcccctgagctgctgctgggcaccaccacccagaccaccagcattgacatgtgggccgtgggctgcatcctggccgagctgctggcccaccggcccctgctgcccggcaccagcgagatccaccagattgacctgattgtgcagctgctgggcacccccagcgagaacatctggccaggcttcagcaagctgcccctggtgggccagtacagcctgaggaagcagccctacaacaacctgaagcacaagttcccctggctgtctgaggccggcctgcggctgctgcacttcctgttcatgtatgaccccaagaagagggccacagctggggactgcctggagagcagctacttcaaggagaagcccctgccctgtgagcctgagctgatgcccaccttcccccaccacaggaacaagagagctgccccagccaccagcgagggccagagcaagcgctgcaagccctag

SEQ ID NO: 229960 - DNA, 1083 bp, Artificial Sequence
  derived and/or modified sequence
atggccgagccagacctggagtgtgagcagatccggctgaagtgcatcaggaaggagggcttcttcaccgtgcccccagagcaccggctgggccgctgccgctctgtgaaggagtttgagaagctgaacagaattggagagggcacctacggcatcgtgtaccgggcccgggacacccagacagatgagatcgtggccctgaagaaggtgaggatggacaaggagaaggatggcatccccatcagcagcctgcgggagatcaccctgctgctgcggctgcggcaccccaacatcgtggagctgaaggaggtggtggtgggcaaccacctggagagcatcttcctggtgatgggctactgtgagcaggacctggccagcctgctggagaacatgcccacccccttcagcgaggcccaggtgaagtgcatcgtgctgcaggtgctgcggggcctgcagtacctgcacaggaacttcatcatccaccgggacctgaaggtgagcaacctgctgatgacagacaagggctgtgtgaagacagctgactttggcctggcccgggcctacggcgtgcctgtgaagcccatgacccccaaggtggtgaccctgtggtaccgggcccctgagctgctgctgggcaccaccacccagaccaccagcattgacatgtgggccgtgggctgcatcctggccgagctgctggcccaccggcccctgctgcccggcaccagcgagatccaccagattgacctgattgtgcagctgctgggcaccccatctgagaacatctggccaggcttcagcaagctgcccctggtgggccagtacagcctgaggaagcagccctacaacaacctgaagcacaagttcccctggctgtctgaggccggcctgcggctgctgcacttcctgttcatgtatgaccccaagaagagggccacagctggggactgcctggagagcagctacttcaaggagaagcccctgccctgtgagcctgagctgatgcccaccttcccccaccacaggaacaagagagctgccccagccaccagcgagggccagagcaagcgctgcaagccctag

SEQ ID NO: 229961 - DNA, 942 bp, Artificial Sequence
  derived and/or modified sequence
atggagcccatgtaccaggaccgggcccgggacacccagaccgacgaaatagtggctctgaaaaaggtgcggatggataaggagaaagatgggattccaatctcctcattgagagaaatcacactgttactgcgccttaggcatccaaacatcgtggagctcaaggaagtggtggtgggaaatcatcttgaatccatattcctcgtcatgggctattgcgaacaagacttggcaagcctgcttgaaaatatgcccaccccttttagcgaagcacaggtaaagtgtattgtcctgcaggttctccgcggactgcaatatttacacaggaactttattattcaccgcgatctgaaggtgtccaatttgcttatgaccgataagggttgcgttaaaacggctgattttggcctagcacgcgcatatggcgtcccggtcaagcccatgacacccaaagttgtaacgctgtggtaccgtgctccggaactcctgttaggcactacaactcagaccaccagcatcgacatgtgggccgtgggatgcattctggccgagctgctggcccatcgtccactccttccaggcacttccgaaattcaccaaattgatctgatcgttcagctgttaggtaccccttctgaaaatatatggccaggctttagtaaactcccactcgtaggtcaatacagcttgagaaaacagccctataataatctgaagcataaatttccatggttgagtgaggcagggctgagactgttacactttttattcatgtacgacccaaaaaagcgcgctacagcaggagattgtttggaatcaagctatttcaaggaaaaacctctgccctgcgaacctgaattaatgcccactttccctcaccacagaaacaaacgggcagcgcctgccacctccgaaggtcaatctaagaggtgcaagccttag

SEQ ID NO: 229962 - DNA, 1083 bp, Artificial Sequence
  derived and/or modified sequence
atggccgagcccgacctggagtgcgagcagatccggctgaagtgcatccgcaaggagggattttttacggtgccccctgagcatcggctcggccgttgccggtccgtcaaggaattcgagaagctcaatcgcatcggcgagggcacttacgggatcgtgtacagggccagagacacacagaccgatgagattgtcgcgctgaagaaggttcgcatggataaggaaaaagatggtatacccatttcatccttgcgggaaattactctcctcctgaggctgagacacccaaacatcgtagagcttaaagaagtggtggttgggaaccaccttgagagtatcttcctggtgatggggtactgtgagcaggatctagcctcgcttcttgagaatatgcctacgccgttttctgaggcacaggtaaagtgcatcgttttgcaagtgttgcgaggactgcagtacttgcaccgtaacttcatcattcatagggatcttaaagtaagcaatcttctgatgaccgacaagggatgcgtcaaaaccgccgattttggcctggctcgggcttacggagtgcccgttaaacccatgactcccaaggtggtgaccctgtggtacagggccccagagctgctgctcggaacaacaacccagacaacatcaatagatatgtgggccgtgggatgtattttagccgaactcctggcccaccgacccctgctgcctggcactagcgaaatccaccagatcgatctcatcgtgcaattgctgggtacccccagtgagaacatctggcctggcttttctaagcttcctcttgtgggccagtactcattacgcaagcaaccttataacaacctgaagcacaagttcccttggctgagtgaagctggacttaggttacttcattttttattcatgtacgaccctaagaagcgagctacagccggcgactgcctagaatctagttactttaaagaaaagcctctcccctgtgagccggaactgatgcccacctttccccatcataggaataagagagccgccccagccacgtctgagggccagtccaagagatgcaaaccttag

SEQ ID NO: 229963 - DNA, 942 bp, Artificial Sequence
  derived and/or modified sequence
atggagccaatgtatcaggaccgggctcgcgatacgcaaacggatgagattgtggccttaaaaaaggtccggatggataaggagaaagacgggattccaatttcctccttaagggaaattaccctcctcctgcggttacggcacccaaacatcgtcgaactgaaggaggtggtagtgggtaaccatcttgaaagcatcttcctggttatgggctattgcgaacaggatctggcctctctcctggaaaacatgccaactcctttctctgaggcccaggtgaagtgcattgtattacaggtgttgcgcggtctccaatacctccatcgcaattttatcatccaccgggatctcaaggtgagcaatcttctgatgaccgataaaggttgcgtgaagactgccgattttggcctcgcgagagcctacggggtgcccgtaaaaccaatgacgcccaaggtggtgactctctggtatagggctcccgagttgctgctcggcactaccactcagacaacatccatcgatatgtgggctgtggggtgcatcttagccgagctgctggcccacaggccactgctgccaggaacttccgagatccatcaaattgatctcatagtccagttacttgggacacccagtgagaacatctggcctgggttcagcaagctcccactcgtgggacagtactctctgagaaagcaaccctataataatctcaagcataaattcccctggctctctgaagccggactcaggctccttcactttctgttcatgtacgaccctaaaaaacgcgcaacagccggagactgtctggaatccagctatttcaaggagaagcccctgccttgcgagccagaactaatgccaacctttccacaccaccggaataaacgggcagcccctgctactagcgagggccagagtaagcgttgtaaaccttag

SEQ ID NO: 229964 - DNA, 1083 bp, Artificial Sequence
  derived and/or modified sequence
atggcggaacccgatctcgagtgcgaacagatccggcttaaatgcatcagaaaagaaggattctttaccgtaccccctgagcacagattggggagatgcagaagcgttaaagaatttgagaaactgaatcgtattggagaaggaacttacgggatcgtttatagggcaagagatacccagactgacgagattgtggccctgaagaaggttcgcatggataaagaaaaagatggtatccccatctcctctctgagagagattactttactgctgcggctgcgccaccccaacattgtggaactgaaggaggtggttgtcggtaatcatctggagtctatcttcctggtgatgggttactgtgaacaggatctggctagcttgctagaaaacatgcctactccatttagtgaggcccaagtgaaatgcattgtgttacaagtgcttaggggactgcagtatctccaccgtaactttatcatacaccgagatcttaaggtgagtaatctgctaatgactgacaaaggctgtgttaagaccgctgacttcgggctcgctcgcgcttacggggtccccgtcaaaccaatgacacctaaagtggtgacactctggtatagagcccctgaactgctgctgggcacaaccacccagaccacaagtatcgacatgtgggccgtgggttgcatcctggccgagcttctggcccaccgccctctcttgccgggtacttcagagatccatcagatcgacctgatcgtccagcttcttggaactccctcggaaaacatctggcccggattcagcaagctgcccctggtcgggcagtattctctaaggaaacaaccttacaacaatctaaagcataagtttccatggctgtccgaggcgggactgaggctcctccattttctgttcatgtacgaccccaagaagagggccacggctggcgattgtctggagtcgagctacttcaaagagaaaccgctgccgtgcgaaccggagctgatgccaacattcccacaccaccgaaacaagagggccgctccagctacctcagagggccagtccaagcggtgtaagccttag

SEQ ID NO: 229965 - DNA, 3344 bp, Artificial Sequence
  derived and/or modified sequence
gttgtatgccacataagtaaccaaatttgcttgtcaattatgtcttttttttttcttttttctgagacagagtcttgctctgtggcccaggctggagtgcagtggtacagtcttggctcactgcaacctctgcctcccaggttcaagcgattctcatacctcagcctccagagtagctggactgcaggcgcatgctaccacggccagataatttttgtatttttaatagagacggggtttcttttttttttttttccctgacagagttttgcttttgttgcccaggcttggagtgcaatggcgcgatcttggctcactgcaacctccacttcctgggttcaagcaattcttctgcctcagcctcccaagtagctgggattacaggtgtacaccaccatgcctggctaattttgcatttttttagtagagacatggtttcaccatgttgatcagggtcgtctcaaactcctgacctcaagtgatccacccgcctcagtctcccaaagttttgggattataaatgtgcgccactgcacccggtcaagacagggttttgccatgttagccagggaggtctcaaactcctgacctcaagttatccgccctgcttggtctcccaaagtgctgggattgcacacatgagccactgtgcctggcctcaattatgtctttaactgtggctgttctaagacttttgtcatccacaattgttgttttacttttatcctttcacagagcagtttataatcagctatagaactctgaggtactcttcaatctaagtttctgatcacttttgagattgtgccattggaatagagcaaaaaacttccaagactctcattgagagctgctatattcatgaggattgttcatccaatattgggcaaaatgagagttaattttatggactaaactaatataagactgaaataatctttttatgtttttgcttaaaacattactgattctttctgttctttcagaaccaagaaaacttttttttttttttttttgagacagaatctcactctgtcgcccaggctggagtgcagtggcgccatctcggctcactgcaagctccgcctcccaggttcacaccattctcctgcttcagcctcccaagtagctgggactacaggcgcccaccaccgcgcccggctaattttttgtatttttagtagagacagggtttcaccgtgttagccaggatggtctcaatctcctgaccttgtgatccgcccacctcggcctcccagagtgctgggattacaggcgtgagccacggtgcccggctggtaacttttttaactttgagctatttgcagcttttagcaattgagtaaagtacactcctgtgaggaagatttggaacatatttctgttttcttttttgttttttatattttgcttgggtagcatatttctttctgatttctccaaaaattgggaactatctgtgagcactatttaaaaaaaaaaaaaaaacttttccctctcccttcccctatttgtattctaatgtcaatataatgatgtgtgcacgtgcagtaacaatctgttttctcttgtaataggacatagagacactgcatattttaccaaggctttgactggaatggcatgctttcaaatataaacagacggctttaaggaatcagagttgacctatagtgcccatcaaagcccttgggaaaactggcttcatactgtatccacccagtggattcttcttgcccagatggagcccatgtatcaagatcgggcccgggacacccagacagatgagattgtcgcactgaagaaggtgcggatggacaaggagaaggatggcatccccatcagcagcttgcgggagatcacgctgctgctccgcctgcgtcatccgaacatcgtggagctgaaggaggtggttgtggggaaccacctggagagcatcttcctggtgatgggttactgtgagcaggacctggccagcctcctggagaatatgccaacacccttctcggaggctcaggtcaagtgcatcgtgctgcaggtgctccggggcctccagtatctgcacaggaacttcattatccacagggacctgaaggtttccaacttgctcatgaccgacaagggttgtgtgaagacagcggatttcggcctggcccgggcctatggtgtcccagtaaagccaatgacccccaaggtggtcactctctggtaccgagcccctgaactgctgttgggaaccaccacgcagaccaccagcatcgacatgtgggctgtgggctgcatactggccgagctgctggcgcacaggcctcttctccccggcacttccgagatccaccagatcgacttgatcgtgcagctgctgggcacgcccagtgagaacatctggccgggcttttccaagctgccactggtcggccagtacagcctccggaagcagccctacaacaacctgaagcacaagttcccatggctgtcggaggccgggctgcgcctgctgcacttcctgttcatgtacgaccctaagaaaagggcgacggccggggactgcctggagagctcctatttcaaggagaagcccctaccctgtgagccggagctcatgccgacctttccccaccaccgcaacaagcgggccgccccagccacctccgagggccagagcaagcgctgtaaaccctgacggtgggcctggcacacgcctgtattcccacaccaggtcttccgatcagtggtgtctgtgaagggtgccgcgagccaggctgaccaggcgcccgggatccagctcatccccttggctgggaacatcctccactgacttcctcccactgtctgccctgaacccactgctgcccccagaaaaaggccgggtgacaccggggggctcccagcccgtgcaccctggaagggcaggtctggcggctccatccgtggctgcaggggtctcatgtggtcctcctcgctatgttggaaatgtgcaaccactgcttcttgggaggagtggtgggtgcagtccccccgctgtctttgagttgtggtggacgctggcctgggatgagagggcccagaagaccttcgtatcccctctcagtcgcccggggctgtcccgtgcatgggttggctgtggggaccccaggtgggcctggcaggactccagatgaggacaagagggacaaggtatggggtgggagccacaattgaggataccccgagactaccaggagagccctgggctggaggctgagctgcatccctgctccccacatggaggacccaacaggaggccgtggctctgatgctgagcgaagctataggctcttgttggataaaagcttttttaacag

SEQ ID NO: 229966 - DNA, 1780 bp, Artificial Sequence
  derived and/or modified sequence
aagagaggcggggccagcgctcggcatggcggagccagatctggagtgcgagcagatccgtctgaagtgtattcgtaaggagggcttcttcacggtgcctccggaacacaggctgggacgatgccggagtgtgaaggagtttgagaagctgaaccgcattggagagggtacctacggcattgtgtatcgggcccgggacacccagacagatgagattgtcgcactgaagaaggtgcggatggacaaggagaaggatggcatccccatcagcagcttgcgggagatcacgctgctgctccgcctgcgtcatccgaacatcgtggagctgaaggaggtggttgtggggaaccacctggagagcatcttcctggtgatgggttactgtgagcaggacctggccagcctcctggagaatatgccaacacccttctcggaggctcaggtcaagtgcatcgtgctgcaggtgctccggggcctccagtatctgcacaggaacttcattatccacagggacctgaaggtttccaacttgctcatgaccgacaagggttgtgtgaagacagcggatttcggcctggcccgggcctatggtgtcccagtaaagccaatgacccccaaggtggtcactctctggtaccgagcccctgaactgctgttgggaaccaccacgcagaccaccagcatcgacatgtgggctgtgggctgcatactggccgagctgctggcgcacaggcctcttctccccggcacttccgagatccaccagatcgacttgatcgtgcagctgctgggcacgcccagtgagaacatctggccgggcttttccaagctgccactggtcggccagtacagcctccggaagcagccctacaacaacctgaagcacaagttcccatggctgtcggaggccgggctgcgcctgctgcacttcctgttcatgtacgaccctaagaaaagggcgacggccggggactgcctggagagctcctatttcaaggagaagcccctaccctgtgagccggagctcatgccgacctttccccaccaccgcaacaagcgggccgccccagccacctccgagggccagagcaagcgctgtaaaccctgacggtgggcctggcacacgcctgtattcccacaccaggtcttccgatcagtggtgtctgtgaagggtgccgcgagccaggctgaccaggcgcccgggatccagctcatccccttggctgggaacatcctccactgacttcctcccactgtctgccctgaacccactgctgcccccagaaaaaggccgggtgacaccggggggctcccagcccgtgcaccctggaagggcaggtctggcggctccatccgtggctgcaggggtctcatgtggtcctcctcgctatgttggaaatgtgcaaccactgcttcttgggaggagtggtgggtgcagtccccccgctgtctttgagttgtggtggacgctggcctgggatgagagggcccagaagaccttcgtatcccctctcagtcgcccggggctgtcccgtgcatgggttggctgtggggaccccaggtgggcctggcaggactccagatgaggacaagagggacaaggtatggggtgggagccacaattgaggataccccgagactaccaggagagccctgggctggaggctgagctgcatccctgctccccacatggaggacccaacaggaggccgtggctctgatgctgagcgaagctataggctcttgttggataaaagcttttttaacagacatggtttca

SEQ ID NO: 229967 - DNA, 942 bp, Artificial Sequence
  derived and/or modified sequence
atggagcccatgtaccaggacagagccagagacacccagaccgacgagatcgtggccctgaagaaggtgagaatggacaaggagaaggacggcatccccatcagcagcctgagagagatcaccctgctgctgagactgagacaccccaacatcgtggagctgaaggaggtggtggtgggcaaccacctggagagcatcttcctggtgatgggctactgcgagcaggacctggccagcctgctggagaacatgcccacccccttcagcgaggcccaggtgaagtgcatcgtgctgcaggtgctgagaggcctgcagtacctgcacagaaacttcatcatccacagagacctgaaggtgagcaacctgctgatgaccgacaagggctgcgtgaagaccgccgacttcggcctggccagagcctacggcgtgcccgtgaagcccatgacccccaaggtggtgaccctgtggtacagagcccccgagctgctgctgggcaccaccacccagaccaccagcatcgacatgtgggccgtgggctgcatcctggccgagctgctggcccacagacccctgctgcccggcaccagcgagatccaccagatcgacctgatcgtgcagctgctgggcacccccagcgagaacatctggcccggcttcagcaagctgcccctggtgggccagtacagcctgagaaagcagccctacaacaacctgaagcacaagttcccctggctgagcgaggccggcctgagactgctgcacttcctgttcatgtacgaccccaagaagagagccaccgccggcgactgcctggagagcagctacttcaaggagaagcccctgccctgcgagcccgagctgatgcccaccttcccccaccacagaaacaagagagccgcccccgccaccagcgagggccagagcaagagatgcaagccctag

SEQ ID NO: 229968 - DNA, 1083 bp, Artificial Sequence
  derived and/or modified sequence
atggccgagcccgacctggagtgcgagcagatcagactgaagtgcatcagaaaggagggcttcttcaccgtgccccccgagcacagactgggcagatgcagaagcgtgaaggagttcgagaagctgaacagaatcggcgagggcacctacggcatcgtgtacagagccagagacacccagaccgacgagatcgtggccctgaagaaggtgagaatggacaaggagaaggacggcatccccatcagcagcctgagagagatcaccctgctgctgagactgagacaccccaacatcgtggagctgaaggaggtggtggtgggcaaccacctggagagcatcttcctggtgatgggctactgcgagcaggacctggccagcctgctggagaacatgcccacccccttcagcgaggcccaggtgaagtgcatcgtgctgcaggtgctgagaggcctgcagtacctgcacagaaacttcatcatccacagagacctgaaggtgagcaacctgctgatgaccgacaagggctgcgtgaagaccgccgacttcggcctggccagagcctacggcgtgcccgtgaagcccatgacccccaaggtggtgaccctgtggtacagagcccccgagctgctgctgggcaccaccacccagaccaccagcatcgacatgtgggccgtgggctgcatcctggccgagctgctggcccacagacccctgctgcccggcaccagcgagatccaccagatcgacctgatcgtgcagctgctgggcacccccagcgagaacatctggcccggcttcagcaagctgcccctggtgggccagtacagcctgagaaagcagccctacaacaacctgaagcacaagttcccctggctgagcgaggccggcctgagactgctgcacttcctgttcatgtacgaccccaagaagagagccaccgccggcgactgcctggagagcagctacttcaaggagaagcccctgccctgcgagcccgagctgatgcccaccttcccccaccacagaaacaagagagccgcccccgccaccagcgagggccagagcaagagatgcaagccctag

SEQ ID NO: 229969 - protein, 1241 aa, Artificial Sequence
  derived and/or modified sequence
MRAVLTWRDKAEHCINDIAFKPDGTQLILAAGSRLLVYDTSDGTLLQPLKGHKDTVYCVAYAKDGKRFASGSADKSVIIWTSKLEGILKYTHNDAIQCVSYNPITHQLASCSSSDFGLWSPEQKSVSKHKSSSKIICCSWTNDGQYLALGMFNGIISIRNKNGEEKVKIERPGGSLSPIWSICWNPSSRWESFWMNRENEDAEDVIVNRYIQEIPSTLKSAVYSSQGSEAEEEEPEEEDDSPRDDNLEERNDILAVADWGQKVSFYQLSGKQIGKDRALNFDPCCISYFTKGEYILLGGSDKQVSLFTKDGVRLGTVGEQNSWVWTCQAKPDSNYVVVGCQDGTISFYQLIFSTVHGLYKDRYAYRDSMTDVIVQHLITEQKVRIKCKELVKKIAIYRNRLAIQLPEKILIYELYSEDLSDMHYRVKEKIIKKFECNLLVVCANHIILCQEKRLQCLSFSGVKEREWQMESLIRYIKVIGGPPGREGLLVGLKNGQILKIFVDNLFAIVLLKQATAVRCLDMSASRKKLAVVDENDTCLVYDIDTKELLFQEPNANSVAWNTQCEDMLCFSGGGYLNIKASTFPVHRQKLQGFVVGYNGSKIFCLHVFSISAVEVPQSAPMYQYLDRKLFKEAYQIACLGVTDTDWRELAMEALEGLDFETAKKAFIRVQDLRYLELISSIEERKKRGETNNDLFLADVFSYQGKFHEAAKLYKRSGHENLALEMYTDLCMFEYAKDFLGSGDPKETKMLITKQADWARNIKEPKAAVEMYISAGEHVKAIEICGDHGWVDMLIDIARKLDKAEREPLLLCATYLKKLDSPGYAAETYLKMGDLKSLVQLHVETQRWDEAFALGEKHPEFKDDIYMPYAQWLAENDRFEEAQKAFHKAGRQREAVQVLEQLTNNAVAESRFNDAAYYYWMLSMQCLDIAQDPAQKDTMLGKFYHFQRLAELYHGYHAIHRHTEDPFSVHRPETLFNISRFLLHSLPKDTPSGISKVKILFTLAKQSKALGAYRLARHAYDKLRGLYIPARFQKSIELGTLTIRAKPFHDSEELVPLCYRCSTNNPLLNNLGNVCINCRQPFIFSASSYDVLHLVEFYLEEGITDEEAISLIDLEVLRPKRDDRQLEIANNSSQILRLVETKDSIGDEDPFTAKLSFEQGGSEFVPVVVSRLVLRSMSRRDVLIKRWPPPLRWQYFRSLLPDASITMCPSCFQMFHSEDYELLVLQHGCCPYCRRCKDDPGP

SEQ ID NO: 229970 - protein, 1091 aa, Artificial Sequence
  derived and/or modified sequence
MFNGIISIRNKNGEEKVKIERPGGSLSPIWSICWNPSSRWESFWMNRENEDAEDVIVNRYIQEIPSTLKSAVYSSQGSEAEEEEPEEEDDSPRDDNLEERNDILAVADWGQKVSFYQLSGKQIGKDRALNFDPCCISYFTKGEYILLGGSDKQVSLFTKDGVRLGTVGEQNSWVWTCQAKPDSNYVVVGCQDGTISFYQLIFSTVHGLYKDRYAYRDSMTDVIVQHLITEQKVRIKCKELVKKIAIYRNRLAIQLPEKILIYELYSEDLSDMHYRVKEKIIKKFECNLLVVCANHIILCQEKRLQCLSFSGVKEREWQMESLIRYIKVIGGPPGREGLLVGLKNGQILKIFVDNLFAIVLLKQATAVRCLDMSASRKKLAVVDENDTCLVYDIDTKELLFQEPNANSVAWNTQCEDMLCFSGGGYLNIKASTFPVHRQKLQGFVVGYNGSKIFCLHVFSISAVEVPQSAPMYQYLDRKLFKEAYQIACLGVTDTDWRELAMEALEGLDFETAKKAFIRVQDLRYLELISSIEERKKRGETNNDLFLADVFSYQGKFHEAAKLYKRSGHENLALEMYTDLCMFEYAKDFLGSGDPKETKMLITKQADWARNIKEPKAAVEMYISAGEHVKAIEICGDHGWVDMLIDIARKLDKAEREPLLLCATYLKKLDSPGYAAETYLKMGDLKSLVQLHVETQRWDEAFALGEKHPEFKDDIYMPYAQWLAENDRFEEAQKAFHKAGRQREAVQVLEQLTNNAVAESRFNDAAYYYWMLSMQCLDIAQDPAQKDTMLGKFYHFQRLAELYHGYHAIHRHTEDPFSVHRPETLFNISRFLLHSLPKDTPSGISKVKILFTLAKQSKALGAYRLARHAYDKLRGLYIPARFQKSIELGTLTIRAKPFHDSEELVPLCYRCSTNNPLLNNLGNVCINCRQPFIFSASSYDVLHLVEFYLEEGITDEEAISLIDLEVLRPKRDDRQLEIANNSSQILRLVETKDSIGDEDPFTAKLSFEQGGSEFVPVVVSRLVLRSMSRRDVLIKRWPPPLRWQYFRSLLPDASITMCPSCFQMFHSEDYELLVLQHGCCPYCRRCKDDPGP

SEQ ID NO: 229971 - DNA, 3726 bp, Artificial Sequence
  derived and/or modified sequence
atgagagccgtactgacctggagggacaaagctgagcattgtatcaacgatatcgcattcaagcctgatgggactcagctaattttggccgctgggtcccgtcttctggtatacgacacaagtgatggaactctgctccagcctctgaaaggacacaaagataccgtgtactgcgtggcgtacgcaaaggacggaaagcgcttcgcaagcggtagtgcagataagtcggtaattatctggacaagtaaacttgagggcattctcaaatatactcataacgatgcgattcagtgcgtgtcctacaatcctattacccaccagctggcaagctgttccagctcggatttcggcctttggagccccgaacaaaaatccgttagtaaacacaagtcctcttcaaagatcatatgttgctcttggactaatgatggccaatacctggccctgggcatgttcaatggcatcatcagtatccggaacaaaaatggcgaagaaaaagtgaagatcgaacgtccagggggctctcttagtcctatttggtcaatatgctggaatccttcaagccggtgggagtcattttggatgaaccgagaaaacgaagacgccgaggacgtcattgttaaccggtatatccaggagatcccatccaccctcaagtcggctgtgtattcatcccagggcagcgaagccgaggaagaggagccggaggaagaagacgacagcccaagagatgataacctggaagaaagaaacgatattcttgcagtcgccgactggggacaaaaagtgtctttctaccagctatccgggaagcaaattgggaaagaccgcgcactgaattttgacccatgctgcatatcatatttcacgaagggagaatatatattattgggcgggagcgataaacaggtcagtctattcacaaaggacggagtgaggcttggcaccgtcggggagcagaactcttgggtctggacatgccaagcgaaacccgattccaactatgtcgtggtgggctgccaggacggtacgatatctttctaccagctcattttcagcacggtgcacgggctgtacaaggaccggtatgcttaccgggattctatgaccgacgtgatcgtgcaacacttaattaccgagcagaaagtgcgaataaagtgtaaggagctggtgaaaaaaatagctatataccggaacaggcttgcaatccaactcccagagaagattttgatctatgaactttacagtgaggaccttagcgatatgcattatagagtgaaggaaaaaattattaaaaagttcgagtgcaacctcctcgttgtatgcgccaaccacattatcctgtgtcaggagaagagactgcaatgtttgtccttttctggagtaaaagaacgtgaatggcagatggagagcctgatcagatatatcaaagtgattggaggacctccgggccgggaaggcctcttggtcgggctgaaaaacggacagatcctgaagatatttgtagacaacttgtttgctattgtcctcctgaagcaggcaacagccgtgcgttgtcttgatatgagtgcctcccgcaaaaagttggcagtcgtcgacgaaaatgacacttgtcttgtgtacgatattgacactaaggagttattatttcaggagcccaatgccaactctgtcgcatggaacacacagtgcgaagatatgctgtgcttttctgggggcggttatctgaacattaaggcaagcacatttcccgttcacagacagaagctacagggctttgtggtgggctataacggaagcaaaatcttctgcctgcacgtgttcagcatcagcgccgtggaagtgccccagtcagctccgatgtatcagtacctagaccggaaactgtttaaggaggcataccagattgcctgcctgggcgtgacggacaccgattggagggaactcgccatggaggctctggagggacttgacttcgaaacggctaagaaggcttttattcgcgtgcaggacctgcgttacctcgagcttatctccagcatcgaggagaggaaaaaacgcggcgaaaccaacaatgatctgttcctcgctgacgtgttcagctaccagggcaagttccacgaagcggcaaagctctataagagatctggccatgagaaccttgctttggaaatgtacaccgatctctgtatgttcgaatatgcgaaagacttcctggggtccggtgaccccaaggagaccaaaatgttaatcacaaaacaagcagattgggctcgcaacataaaagagcccaaagctgcagtcgagatgtacatctccgccggcgaacacgttaaagctatcgagatctgtggtgaccatggctgggtagatatgttgatcgacattgccagaaaactggataaagcggagcgggagccactcttgctgtgtgccacctacctgaagaaattggattcccccggatacgcggccgaaacatacttaaaaatgggcgatctgaaatctctagtacaactgcatgtcgagactcaacgctgggacgaggctttcgcgctgggggagaagcatcctgagtttaaagacgacatttatatgccctatgctcagtggctggcggagaatgatcggtttgaggaagctcaaaaggcattccataaggctggtaggcagagagaggccgtgcaggtgctggagcagctgaccaataacgccgtcgctgaatcgcgattcaatgacgccgcatactactattggatgctgtccatgcagtgtcttgatatagctcaggatcctgcacagaaggacaccatgctgggcaaattttatcactttcaacgcctggcggaactgtatcacggatatcatgctatccacagacacaccgaagaccccttttccgtgcatagacccgagacgttattcaatattagtaggttcttactgcattccctgccaaaggatacccctagcgggatttcaaaagtgaagatcctattcactctggccaagcaatctaaagctctgggggcttataggcttgcccggcatgcgtacgataagctgcgggggctgtatattccagccagattccaaaaatccattgagttgggcaccttgacaatcagggctaagccgtttcatgactccgaggaactggtgccactgtgttatagatgttctaccaacaaccccttattgaacaacctgggtaacgtgtgcataaattgtaggcagccatttattttctctgcaagttcgtacgacgtgctacacctggttgagttctatctcgaggaaggtatcaccgatgaggaagccatcagcctcatcgacttggaagtcctcagacctaagcgagacgacaggcagctcgaaatcgccaacaactccagtcagatcctgaggctggtggagacgaaagattctatcggtgacgaagatccttttacagccaaacttagcttcgaacaaggtggctccgagtttgtgcccgtcgtggtcagccggctcgtgctaagatctatgtcccgcagggatgtgttaatcaaacgctggcctcctccacttagatggcagtactttcggtccttacttcccgatgcctccattaccatgtgcccgtcatgctttcagatgtttcattctgaagactacgagctccttgtactgcagcatgggtgctgtccgtactgtagacgttgtaaagacgaccctggaccgtag

SEQ ID NO: 229972 - DNA, 3276 bp, Artificial Sequence
  derived and/or modified sequence
atgttcaacgggataatatccatacgaaacaaaaatggagaagagaaggtcaaaattgaacgccctgggggcagcctgagccccatctggagtatctgttggaacccgtcttcccggtgggaatccttctggatgaatcgcgagaacgaggacgcagaggacgtgatcgtgaaccgatacattcaagaaattcccagcacgctgaaatctgccgtgtatagctctcagggctcagaagccgaggaagaggaacctgaagaggaagatgacagtcccagggacgataacctcgaagagcgcaacgatatcttggctgttgcagactggggacagaaggtgtctttctaccaactaagcgggaagcagatcggcaaggatcgggctctgaactttgatccctgttgcattagctattttaccaaaggagaatatattctgcttggaggcagtgataagcaggttagtctgttcaccaaggacggcgtgaggctcgggacagtgggcgagcaaaatagctgggtgtggacgtgtcaagcgaagcctgatagtaactacgtcgttgtgggctgccaggacggcaccatctccttctaccagctgatattcagcaccgtacacggcctctacaaagacagatacgcatatcgcgacagcatgaccgacgttattgtgcagcatctaattacggagcagaaggttagaattaagtgcaaggagctggttaaaaaaatcgcaatataccggaacagactagcaattcagcttccagagaaaatccttatctatgagctgtactcggaggacctatctgacatgcactatcgcgtgaaggaaaaaattatcaaaaaatttgaatgtaatctgttggtagtgtgcgcaaaccacatcattctttgtcaggagaagcgcttacagtgcctgtccttctccggcgtcaaggagcgcgaatggcagatggaatccctcatccggtatataaaggtcattgggggacctccaggacgggaagggctgctcgtaggccttaagaatggacagattcttaaaattttcgtagataacctttttgctatcgtcctgctcaaacaggctacagccgtgcgctgcctggacatgtctgctagccgaaaaaagctggccgttgtggacgaaaatgacacatgtctggtgtatgatatcgacaccaaagaactgctgttccaagaacccaacgcaaactctgtggcttggaatactcagtgtgaagatatgctgtgtttcagcggaggcggttacctgaacatcaaagcttccaccttcccagtgcatcgacagaaattgcagggcttcgtcgtgggatataatggctcaaagatcttctgtctgcacgtgttcagcatttccgcggtcgaagttcctcaatcggcccctatgtaccaatacctggatcgcaagctcttcaaagaggcgtaccagatagcttgtcttggggtgaccgacactgactggagggagctggcgatggaggccctcgagggcctggattttgagacggctaaaaaagcgtttattagggtccaggatctgcgctacctcgaattgattagctctatcgaggaaagaaaaaagagaggggagaccaataacgatctttttctggctgatgttttcagttatcaaggaaaatttcatgaggctgccaaactgtataaacgctccggccacgagaacctggccctggaaatgtacaccgatttgtgtatgttcgaatacgccaaggacttcctggggtcgggggatccgaaggagaccaaaatgctgatcacaaagcaggccgactgggccaggaacatcaaagaacctaaggcagccgtcgaaatgtatattagcgcaggggagcacgtcaaggcaatcgaaatttgcggggaccatggctgggtggacatgctgattgatattgctcgtaagctggacaaagctgagcgtgagccgctcctcctttgtgctacttacttaaagaaactggattccccaggctacgcagccgagacttatctcaagatgggagatttaaaaagtctggttcaactgcacgttgagacacagcgttgggatgaggctttcgctctgggcgaaaaacacccagagtttaaggatgacatttacatgccatatgcacagtggcttgctgagaacgaccgctttgaggaggcccagaaggctttccacaaggctggaaggcagagggaggctgtgcaagtgctggagcagctgactaataacgccgtcgctgagtcaagattcaacgacgccgcttactactattggatgctctccatgcagtgtcttgatatcgcgcaggatccggctcaaaaggacacaatgctgggtaagttctaccactttcagagactggccgaactataccatggctaccacgcgattcaccgacatacggaggatccattctcagtgcaccggccggaaactttgttcaacatcagcagatttttgcttcacagcttgccgaaggatacacctagcgggatctccaaagtcaagatcctctttactctggccaaacaatcaaaggctcttggggcatacagactggcccggcatgcatacgataagttaaggggactttatattccggccaggttccagaagtcaatcgagctcggcaccctgaccattcgggctaaaccttttcatgattctgaggagctcgtgcctctatgttaccgctgttctaccaacaatccgcttcttaataatctcggcaatgtgtgcattaactgtcgtcagccgttcatcttctctgcatcttcttacgatgtgctacacttggtggaattctatctagaggaaggtatcaccgacgaagaagcgatttctctcattgacttagaggtgctgaggccgaagcgtgacgaccgtcagctggaaatcgcgaataactcttcacagatcttgcggctggtggaaaccaaagatagtataggggacgaggatccttttactgcaaaattaagctttgagcaaggcgggagcgagttcgtcccggtggtcgtatctaggttggttctccgcagtatgagtagacgagatgttctgataaagcgctggccgccccctttaaggtggcagtactttcgtagtttgctgcccgacgcgagcataacaatgtgtccctcttgtttccagatgtttcattctgaagactatgagctgttggtgctccagcacggctgctgcccttactgccgccggtgcaaagacgacccaggaccttag

SEQ ID NO: 229973 - DNA, 3877 bp, Artificial Sequence
  derived and/or modified sequence
ggcgaccgttagtgaggcggttgctgagacagacgctgaggcgggtaggaggagcccgagccgtaagggaagccgtgatgagggccgtgttgacgtggagagataaagccgagcactgtataaatgacatcgcatttaagcctgatggaactcaactgattttggctgccggaagcagattactggtttatgacacctctgatggcaccttacttcagcccctcaagggacacaaagacactgtgtactgtgtggcatatgcgaaggatggcaagcgctttgcttctggatcagctgacaaaagcgttattatctggacatcaaaactggaaggcattctgaagtacacgcacaatgatgctatacaatgtgtctcctacaatcctattactcatcaactggcatcttgttcctccagtgactttgggttgtggtctcctgaacagaagtctgtctccaaacacaaatcaagcagcaagatcatctgctgcagctggacaaatgatggtcagtacctggcgctggggatgttcaatgggatcatcagcatacggaacaaaaatggcgaggagaaagtaaagatcgagcggccggggggctccctctcgccaatatggtccatctgctggaacccttcaagccgatgggagagtttctggatgaacagagagaatgaggatgccgaggatgtcattgtcaacagatatattcaggaaatcccttccactctgaagtcagcagtgtacagtagtcagggtagtgaggcagaggaggaagaaccagaggaagaggacgacagtcccagggacgacaacttagaggaacgtaatgacatcctggctgtggctgactggggacagaaagtttccttctaccagctgagtggaaaacagattggaaaggatcgggcactgaactttgacccctgctgcatcagctactttactaaaggcgagtacattttgctggggggttcagacaagcaagtatctcttttcaccaaggatggagtgcggcttgggactgttggggagcagaactcctgggtgtggacgtgtcaagcgaaaccggattccaactatgtggtggtcggctgccaggacggcaccatttccttctaccagcttattttcagcacagtccatgggctttacaaggaccgctatgcctacagggatagcatgactgacgtcattgtgcagcacctgatcactgagcagaaagttcggattaaatgcaaagagcttgtcaagaagattgccatctacagaaatcgattggctatccaactgccagagaaaatcctcatctatgagttgtattcagaggacttatcagacatgcattaccgggtaaaggagaagattatcaagaagtttgagtgcaacctcctggtggtgtgtgccaatcacatcatcctgtgccaggagaaacggctgcagtgcctgtccttcagcggagtgaaggagcgggagtggcagatggagtctctcattcgttacatcaaggtgatcggtggccctcctggaagagaaggcctcttagtggggctgaagaatggacagatcctgaagatcttcgtggacaatctctttgctatcgtcctgctgaagcaggccacagctgtgcgctgcttggacatgagtgcctcccgtaagaagctggccgtggtagatgaaaatgacacttgcctggtgtatgacatcgacaccaaggagctgctttttcaggaaccaaacgccaacagtgtagcttggaacacccagtgtgaggacatgctctgcttctcgggaggaggctacctcaacatcaaagccagcaccttccctgtgcaccggcagaagctgcagggctttgtggtcggctacaatggctccaagatcttctgcctccatgtcttctccatttctgccgtggaggtgccgcagtccgctcccatgtaccagtacctggataggaaactgttcaaggaagcctaccagattgcttgcttgggtgtcacagacactgattggcgtgaactggccatggaagcgctagaaggtttagattttgaaacagcaaagaaggccttcatcagagtacaagacctccgatatttagagctcatcagcagcattgaggagaggaagaagcggggagagaccaacaatgacctgtttctggcagatgtgttttcctaccaggggaagttccatgaggccgccaaactgtacaagaggagtgggcacgagaacctcgcgcttgaaatgtacaccgacctctgcatgtttgagtatgccaaggatttccttggatctggagaccccaaagaaacaaagatgctaatcaccaaacaggctgactgggccagaaatatcaaggagcccaaagccgccgtggagatgtacatctcagcaggagagcacgtcaaggccatcgagatctgtggtgaccatggctgggttgacatgttgatcgacatcgcccgcaaactggacaaggctgagcgcgagcccctgctgctgtgcgctacctacctcaagaagctggacagccctggctatgctgctgagacctacctgaagatgggtgacctcaagtccctggtgcagctgcacgtggagacccagcgctgggatgaggcctttgctttgggtgagaagcatcctgagtttaaggatgacatctacatgccgtatgctcagtggctagcagagaacgatcgctttgaggaagcccagaaagcgttccacaaggctgggcgacagagagaagcggtccaggtgctggagcagctcacaaacaatgccgtggcggagagcaggtttaatgatgctgcctattattactggatgctgtccatgcagtgcctcgatatagctcaagatcctgcccagaaggacacaatgcttggcaagttctaccacttccagcgtttggcagagctgtaccatggttaccatgccatccatcgccacacggaagatccgttcagtgtccatcgtcctgaaactcttttcaacatctccaggttcctgctgcacagcctgcccaaggacaccccctcgggcatctctaaagtgaaaatactcttcaccttggccaagcagagcaaggccctcggtgcctacaggctggcccggcacgcctatgacaagctgcgtggcctgtacatccctgccagattccaaaagtccattgagctgggtaccctgaccatccgcgccaagcccttccacgacagtgaggagttggtgcccttgtgctaccgctgctccaccaacaacccgctgctcaacaacctgggcaacgtctgcatcaactgccgccagcccttcatcttctccgcctcttcctacgacgtgctacacctggttgagttctacctggaggaagggatcactgatgaagaagccatctccctcatcgacctggaggtgctgagacccaagcgggatgacagacagctagagattgcaaacaacagctcccagattctgcggctagtggagaccaaggactccatcggagatgaggacccgttcacagctaagctgagctttgagcaaggtggctcagagttcgtgccagtggtggtgagccggctggtgctgcgctccatgagccgccgggatgtcctcatcaagcgatggcccccacccctgaggtggcaatacttccgctcactgctgcctgacgcctccattaccatgtgcccctcctgcttccagatgttccattctgaggactatgagttgctggtgcttcagcatggctgctgcccctactgccgcaggtgcaaggatgaccctggcccatgaccagcatcctggggacggcctgcaccctctgcccgccttggggtctgctgggctgtgaaggagaataaagagtt

SEQ ID NO: 229974 - DNA, 4057 bp, Artificial Sequence
  derived and/or modified sequence
agccaaagtggcttgtggagtggcgaccgttagtgaggcggttgctgagacagacgctgaggcgggtaggaggagcccgagccgtaagggaagccgtgatgagggccgtgttgacgtggagagataaagccgagcactgtataaatgacatcgcatttaagcctgatggaactcaactgattttggctgccggaagcagattactggtttatgacacctctgatggcaccttacttcagcccctcaagggacacaaagacactgtgtactgtgtggcatatgcgaaggatggaaatgaaagctcttcagtagcttgtttgggtcatgcagctggtcagtgagatctctaggaattctgacccagagactctgagcccaaagcttatgcttttcatcaccatcacctgctacctaccaggatgagggaggagtgatggaaatagcaagcgctttgcttctggatcagctgacaaaagcgttattatctggacatcaaaactggaaggcattctgaagtacacgcacaatgatgctatacaatgtgtctcctacaatcctattactcatcaactggcatcttgttcctccagtgactttgggttgtggtctcctgaacagaagtctgtctccaaacacaaatcaagcagcaagatcatctgctgcagctggacaaatgatggtcagtacctggcgctggggatgttcaatgggatcatcagcatacggaacaaaaatggcgaggagaaagtaaagatcgagcggccggggggctccctctcgccaatatggtccatctgctggaacccttcaagccgatgggagagtttctggatgaacagagagaatgaggatgccgaggatgtcattgtcaacagatatattcaggaaatcccttccactctgaagtcagcagtgtacagtagtcagggtagtgaggcagaggaggaagaaccagaggaagaggacgacagtcccagggacgacaacttagaggaacgtaatgacatcctggctgtggctgactggggacagaaagtttccttctaccagctgagtggaaaacagattggaaaggatcgggcactgaactttgacccctgctgcatcagctactttactaaaggcgagtacattttgctggggggttcagacaagcaagtatctcttttcaccaaggatggagtgcggcttgggactgttggggagcagaactcctgggtgtggacgtgtcaagcgaaaccggattccaactatgtggtggtcggctgccaggacggcaccatttccttctaccagcttattttcagcacagtccatgggctttacaaggaccgctatgcctacagggatagcatgactgacgtcattgtgcagcacctgatcactgagcagaaagttcggattaaatgcaaagagcttgtcaagaagattgccatctacagaaatcgattggctatccaactgccagagaaaatcctcatctatgagttgtattcagaggacttatcagacatgcattaccgggtaaaggagaagattatcaagaagtttgagtgcaacctcctggtggtgtgtgccaatcacatcatcctgtgccaggagaaacggctgcagtgcctgtccttcagcggagtgaaggagcgggagtggcagatggagtctctcattcgttacatcaaggtgatcggtggccctcctggaagagaaggcctcttagtggggctgaagaatggacagatcctgaagatcttcgtggacaatctctttgctatcgtcctgctgaagcaggccacagctgtgcgctgcttggacatgagtgcctcccgtaagaagctggccgtggtagatgaaaatgacacttgcctggtgtatgacatcgacaccaaggagctgctttttcaggaaccaaacgccaacagtgtagcttggaacacccagtgtgaggacatgctctgcttctcgggaggaggctacctcaacatcaaagccagcaccttccctgtgcaccggcagaagctgcagggctttgtggtcggctacaatggctccaagatcttctgcctccatgtcttctccatttctgccgtggaggtgccgcagtccgctcccatgtaccagtacctggataggaaactgttcaaggaagcctaccagattgcttgcttgggtgtcacagacactgattggcgtgaactggccatggaagcgctagaaggtttagattttgaaacagcaaagaaggccttcatcagagtacaagacctccgatatttagagctcatcagcagcattgaggagaggaagaagcggggagagaccaacaatgacctgtttctggcagatgtgttttcctaccaggggaagttccatgaggccgccaaactgtacaagaggagtgggcacgagaacctcgcgcttgaaatgtacaccgacctctgcatgtttgagtatgccaaggatttccttggatctggagaccccaaagaaacaaagatgctaatcaccaaacaggctgactgggccagaaatatcaaggagcccaaagccgccgtggagatgtacatctcagcaggagagcacgtcaaggccatcgagatctgtggtgaccatggctgggttgacatgttgatcgacatcgcccgcaaactggacaaggctgagcgcgagcccctgctgctgtgcgctacctacctcaagaagctggacagccctggctatgctgctgagacctacctgaagatgggtgacctcaagtccctggtgcagctgcacgtggagacccagcgctgggatgaggcctttgctttgggtgagaagcatcctgagtttaaggatgacatctacatgccgtatgctcagtggctagcagagaacgatcgctttgaggaagcccagaaagcgttccacaaggctgggcgacagagagaagcggtccaggtgctggagcagctcacaaacaatgccgtggcggagagcaggtttaatgatgctgcctattattactggatgctgtccatgcagtgcctcgatatagctcaagatcctgcccagaaggacacaatgcttggcaagttctaccacttccagcgtttggcagagctgtaccatggttaccatgccatccatcgccacacggaagatccgttcagtgtccatcgtcctgaaactcttttcaacatctccaggttcctgctgcacagcctgcccaaggacaccccctcgggcatctctaaagtgaaaatactcttcaccttggccaagcagagcaaggccctcggtgcctacaggctggcccggcacgcctatgacaagctgcgtggcctgtacatccctgccagattccaaaagtccattgagctgggtaccctgaccatccgcgccaagcccttccacgacagtgaggagttggtgcccttgtgctaccgctgctccaccaacaacccgctgctcaacaacctgggcaacgtctgcatcaactgccgccagcccttcatcttctccgcctcttcctacgacgtgctacacctggttgagttctacctggaggaagggatcactgatgaagaagccatctccctcatcgacctggaggtgctgagacccaagcgggatgacagacagctagagattgcaaacaacagctcccagattctgcggctagtggagaccaaggactccatcggagatgaggacccgttcacagctaagctgagctttgagcaaggtggctcagagttcgtgccagtggtggtgagccggctggtgctgcgctccatgagccgccgggatgtcctcatcaagcgatggcccccacccctgaggtggcaatacttccgctcactgctgcctgacgcctccattaccatgtgcccctcctgcttccagatgttccattctgaggactatgagttgctggtgcttcagcatggctgctgcccctactgccgcaggtgcaaggatgaccctggcccatgaccagcatcctggggacggcctgcaccctctgcccgccttggggtctgctgggctgtgaaggagaataaagagttaaactgtc

SEQ ID NO: 229975 - DNA, 3726 bp, Artificial Sequence
  derived and/or modified sequence
atgagagctgtgctgacctggagggacaaggccgagcactgcatcaatgacatcgccttcaagccagatggcacccagctgatcctggccgccggcagccggctgctggtgtatgacaccagtgatggcaccctgctgcagcccctgaagggccacaaggacacagtgtactgtgtggcctatgccaaggatggcaagagatttgccagcggcagcgctgacaagagcgtcatcatctggaccagcaagctggagggcatcctgaagtacacccacaatgatgccatccagtgtgtgtcctacaaccccatcacccaccagctggccagctgcagcagcagtgactttggcctgtggagccctgagcagaagtctgtgtccaagcacaagagcagcagcaagatcatctgctgctcctggaccaatgatggccagtacctggccctgggcatgtttaatggcatcatcagcatccggaacaagaatggagaggagaaggtgaagattgaaagacctgggggcagcctgagccccatctggagcatctgctggaaccccagcagccgctgggagagcttctggatgaaccgggagaatgaagatgctgaagatgtgattgtgaaccgctacatccaggagatccccagcaccctgaagtctgctgtgtacagcagccagggcagcgaggccgaggaggaggagcctgaggaggaggatgacagccccagagatgacaacctggaggagagaaatgacatcctggccgtggccgactggggccagaaggtgtccttctaccagctgagcggcaagcagatcggcaaggaccgggccctgaactttgacccctgctgcatctcctacttcaccaagggggagtacatcctgctgggcggcagtgacaagcaggtgtccctcttcaccaaggatggagtgcggctgggcaccgtgggggagcagaacagctgggtgtggacctgccaggccaagccagacagcaactacgtggtggtgggctgccaggacggcaccatctccttctaccagctgatcttcagcacagtgcacggcctgtacaaggacagatatgcctacagagacagcatgacagatgtgattgtgcagcacctgatcacagagcagaaggtgcgcatcaagtgcaaggagctggtgaagaagatcgccatctacagaaaccggctggccatccagctgcctgagaagatcctgatctatgagctgtacagcgaggacctgagtgacatgcactacagagtgaaggagaagatcatcaagaagtttgagtgcaacctgctggtggtgtgtgccaaccacatcatcctgtgccaggagaagaggctgcagtgcctgtccttcagcggcgtgaaggagcgggagtggcagatggagagcctcatccgctacatcaaggtgattggaggccccccaggccgggagggcctgctggtgggcctgaagaatggccagatcctgaagatctttgtggacaacctgtttgccatcgtgctgctgaagcaggccacagctgtgcgctgcctggacatgtctgccagcaggaagaagctggccgtggtggatgaaaatgacacctgcctggtgtatgacatcgacaccaaggagctgctcttccaggagcccaatgccaacagcgtggcctggaacacccagtgtgaggacatgctgtgcttcagcggcggcggctacctgaacatcaaggccagcaccttccctgtgcaccggcagaagctgcagggctttgtggtgggctacaacggcagcaagatcttctgcctgcacgtgttcagcatctctgctgtggaggtgccccagagcgcccccatgtaccagtacctggacaggaagctgttcaaggaggcctaccagatcgcctgcctgggcgtgacagacacagactggagggagctggccatggaggccctggagggcctggactttgaaacagccaagaaggccttcatccgggtgcaggacctgcgctacctggagctgatcagcagcattgaggagaggaagaagagaggagagaccaacaatgacctcttcctggctgatgtgttctcctaccagggcaagttccatgaagctgccaagctgtacaagaggagcggccacgagaacctggccctggagatgtacacagacctgtgcatgtttgaatatgccaaggacttcctgggcagcggggaccccaaggagaccaagatgctgatcaccaagcaggccgactgggccaggaacatcaaggagcccaaggctgctgtggagatgtacatctctgctggggagcacgtgaaggccatcgagatctgtggggaccacggctgggtggacatgctgattgacatcgccaggaagctggacaaggccgagcgggagcccctgctgctgtgtgccacctacctgaagaagctggacagccctggctacgccgctgagacctacctgaagatgggagacctgaagagcctggtgcagctgcacgtggagacccagcgctgggatgaggcctttgccctgggggagaagcaccctgagttcaaggatgacatctacatgccctatgcccagtggctggccgagaatgacagatttgaggaggcccagaaggccttccacaaggccggccggcagcgggaggccgtgcaggtgctggagcagctgaccaacaatgctgtggccgagagccgcttcaatgatgctgcctactactactggatgctgtccatgcagtgcctggacatcgcccaggaccctgcccagaaggacaccatgctgggcaagttctaccacttccagaggctggccgagctgtaccacggctaccacgccatccaccgccacacagaggaccccttctctgtgcacaggcctgagaccctcttcaacatcagccgcttcctgctgcacagcctgcccaaggacaccccatctggcatcagcaaggtgaagatcctcttcaccctggccaagcagagcaaggccctgggcgcctaccgcctggcccggcatgcctatgacaagctgcggggcctgtacatcccagcccgcttccagaagagcattgagctgggcaccctgaccatccgggccaagcccttccatgacagcgaggagctggtgcccctgtgctaccgctgcagcaccaacaaccccctgctgaacaacctgggcaatgtgtgcatcaactgccggcagcccttcatcttcagcgccagcagctatgatgtgctgcacctggtggagttctacctggaggagggcatcacagatgaggaggccatcagcctgattgacctggaggtgctgcggcccaagagagatgaccggcagctggagatcgccaacaacagcagccagatcctgcggctggtggagaccaaggacagcattggagatgaggaccccttcaccgccaagctgagctttgagcagggcggcagcgagtttgtgcctgtggtggtgtcccggctggtgctgcgctccatgagcagaagagatgtgctgatcaagcgctggcccccacccctgcgctggcagtacttccgcagcctgctgcctgatgccagcatcaccatgtgccccagctgcttccagatgttccacagtgaagattatgagctgctggtgctgcagcacggctgctgcccctactgccgccgctgcaaggatgatcctggcccctag

SEQ ID NO: 229976 - DNA, 3276 bp, Artificial Sequence
  derived and/or modified sequence
atgtttaatggcatcatcagcatccggaacaagaatggagaggagaaggtgaagattgaaagacctgggggcagcctgagccccatctggagcatctgctggaaccccagcagccgctgggagagcttctggatgaaccgggagaatgaagatgctgaagatgtgattgtgaaccgctacatccaggagatccccagcaccctgaagtctgctgtgtacagcagccagggcagcgaggccgaggaggaggagcctgaggaggaggatgacagccccagagatgacaacctggaggagagaaatgacatcctggccgtggccgactggggccagaaggtgtccttctaccagctgagcggcaagcagatcggcaaggaccgggccctgaactttgacccctgctgcatctcctacttcaccaagggggagtacatcctgctgggcggcagtgacaagcaggtgtccctcttcaccaaggatggagtgcggctgggcaccgtgggggagcagaacagctgggtgtggacctgccaggccaagccagacagcaactacgtggtggtgggctgccaggacggcaccatctccttctaccagctgatcttcagcacagtgcacggcctgtacaaggacagatatgcctacagagacagcatgacagatgtgattgtgcagcacctgatcacagagcagaaggtgcgcatcaagtgcaaggagctggtgaagaagatcgccatctacagaaaccggctggccatccagctgcctgagaagatcctgatctatgagctgtacagcgaggacctgagtgacatgcactacagagtgaaggagaagatcatcaagaagtttgagtgcaacctgctggtggtgtgtgccaaccacatcatcctgtgccaggagaagaggctgcagtgcctgtccttcagcggcgtgaaggagcgggagtggcagatggagagcctcatccgctacatcaaggtgattggaggccccccaggccgggagggcctgctggtgggcctgaagaatggccagatcctgaagatctttgtggacaacctgtttgccatcgtgctgctgaagcaggccacagctgtgcgctgcctggacatgtctgccagcaggaagaagctggccgtggtggatgaaaatgacacctgcctggtgtatgacatcgacaccaaggagctgctcttccaggagcccaatgccaacagcgtggcctggaacacccagtgtgaggacatgctgtgcttcagcggcggcggctacctgaacatcaaggccagcaccttccctgtgcaccggcagaagctgcagggctttgtggtgggctacaacggcagcaagatcttctgcctgcacgtgttcagcatctctgctgtggaggtgccccagagcgcccccatgtaccagtacctggacaggaagctgttcaaggaggcctaccagatcgcctgcctgggcgtgacagacacagactggagggagctggccatggaggccctggagggcctggactttgaaacagccaagaaggccttcatccgggtgcaggacctgcgctacctggagctgatcagcagcattgaggagaggaagaagagaggagagaccaacaatgacctcttcctggctgatgtgttctcctaccagggcaagttccatgaagctgccaagctgtacaagaggagcggccacgagaacctggccctggagatgtacacagacctgtgcatgtttgaatatgccaaggacttcctgggcagcggggaccccaaggagaccaagatgctgatcaccaagcaggccgactgggccaggaacatcaaggagcccaaggctgctgtggagatgtacatctctgctggggagcacgtgaaggccatcgagatctgtggggaccacggctgggtggacatgctgattgacatcgccaggaagctggacaaggccgagcgggagcccctgctgctgtgtgccacctacctgaagaagctggacagccctggctacgccgctgagacctacctgaagatgggagacctgaagagcctggtgcagctgcacgtggagacccagcgctgggatgaggcctttgccctgggggagaagcaccctgagttcaaggatgacatctacatgccctatgcccagtggctggccgagaatgacagatttgaggaggcccagaaggccttccacaaggccggccggcagcgggaggccgtgcaggtgctggagcagctgaccaacaatgctgtggccgagagccgcttcaatgatgctgcctactactactggatgctgtccatgcagtgcctggacatcgcccaggaccctgcccagaaggacaccatgctgggcaagttctaccacttccagaggctggccgagctgtaccacggctaccacgccatccaccgccacacagaggaccccttctctgtgcacaggcctgagaccctcttcaacatcagccgcttcctgctgcacagcctgcccaaggacaccccatctggcatcagcaaggtgaagatcctcttcaccctggccaagcagagcaaggccctgggcgcctaccgcctggcccggcatgcctatgacaagctgcggggcctgtacatcccagcccgcttccagaagagcattgagctgggcaccctgaccatccgggccaagcccttccatgacagcgaggagctggtgcccctgtgctaccgctgcagcaccaacaaccccctgctgaacaacctgggcaatgtgtgcatcaactgccggcagcccttcatcttcagcgccagcagctatgatgtgctgcacctggtggagttctacctggaggagggcatcacagatgaggaggccatcagcctgattgacctggaggtgctgcggcccaagagagatgaccggcagctggagatcgccaacaacagcagccagatcctgcggctggtggagaccaaggacagcattggagatgaggaccccttcaccgccaagctgagctttgagcagggcggcagcgagtttgtgcctgtggtggtgtcccggctggtgctgcgctccatgagcagaagagatgtgctgatcaagcgctggcccccacccctgcgctggcagtacttccgcagcctgctgcctgatgccagcatcaccatgtgccccagctgcttccagatgttccacagtgaagattatgagctgctggtgctgcagcacggctgctgcccctactgccgccgctgcaaggatgatcctggcccctag

SEQ ID NO: 229977 - DNA, 3726 bp, Artificial Sequence
  derived and/or modified sequence
atgcgggccgtgctgacctggcgggacaaggccgagcactgcatcaacgacatcgcctttaaaccggatggaacacagctaatacttgcagcaggaagccgactgcttgtgtacgacacctccgacgggacccttttgcagcccctgaagggacacaaggatacggtgtattgcgtggcatacgccaaggacggtaagcggtttgcctcaggtagtgctgataagagcgtgattatatggacttcaaaactagagggaatcctgaagtacacacacaacgatgccatccagtgtgtgtcctacaaccctatcacacaccaactggcctcttgctcctcctccgatttcgggttatggtcgccagagcaaaaaagcgtctctaaacacaagtcatccagcaaaatcatttgttgcagctggaccaacgacggtcaatatctcgccctgggcatgttcaacggcatcattagcatcaggaacaaaaacggagaggagaaggtcaagattgaaagaccaggcggttctctgtctcccatttggagcatctgctggaatccatcatctagatgggagagcttctggatgaatagggaaaacgaggatgccgaggatgtcattgttaatcggtacatacaggagattccaagcacactaaagagcgctgtgtattcctctcagggcagcgaagcggaggaggaagaacccgaagaagaggatgacagtcccagagatgataacctggaagagcggaacgatatcctggccgttgccgattgggggcagaaagtgtccttctaccagcttagtgggaaacagattggcaaggacagggctttgaactttgacccgtgttgtatatcttacttcaccaagggcgagtatatcctactgggaggctctgacaaacaggttagcctctttacaaaagacggcgtgagacttggcactgtcggcgagcagaattcgtgggtctggacatgtcaggccaagcccgattcaaactatgtggttgtcggttgccaagatgggacgatttccttttaccagctgatattctcaactgttcatggactatataaagacagatatgcgtacagggatagcatgaccgatgtgatagtccagcaccttatcactgaacagaaagtgcgaatcaagtgcaaggagcttgtcaagaagatcgccatatacagaaatcgactagctatccagttacctgaaaagatcctcatctatgagctatactcagaagacttaagtgacatgcactatcgagtcaaagaaaaaattattaagaagtttgaatgcaacctcctcgtagtatgtgcaaaccacatcattctgtgtcaggagaaacggctgcaatgcttatcattcagcggagtgaaagaacgagaatggcagatggagagccttatccggtacatcaaggtaatcgggggccctcctggtagagagggactgcttgtaggtttaaagaacggacagatcctcaagatctttgttgataatctgtttgccatagttctgctgaaacaggcaaccgcagtccgttgcctggatatgtccgcatcacgcaaaaagttggccgttgtggacgaaaatgatacttgtctggtgtacgacattgataccaaagaattgctattccaggaaccgaatgcaaactccgtcgcgtggaacacccagtgcgaagacatgctgtgctttagcggcgggggctatctgaacatcaaggcctcaactttcccagtccatcggcaaaaactccaaggtttcgtggtgggatacaacggatcgaaaattttctgtctgcatgtgttctcaatctccgccgtagaggtaccccaatcggcccctatgtaccagtatctagatagaaaattattcaaggaagcgtatcagatcgcttgtctcggtgtgacggatacggactggagggaactggctatggaggccctcgaagggttggattttgaaactgctaaaaaggcctttattcgtgttcaagacctgcgatacctggagctgatctccagcatcgaggagcgcaaaaaaaggggggagaccaacaatgacttgtttctcgccgacgtcttcagctaccaaggcaaattccatgaagccgctaaactgtataagaggagtgggcacgaaaacctcgctctcgagatgtataccgacttgtgcatgtttgagtacgctaaggactttctcggatctggagacccaaaggagacaaagatgttgattactaaacaggcagattgggctagaaacatcaaggaacctaaggcagcggttgagatgtacatctccgccggcgaacacgtaaaggccattgagatttgcggggatcacggctgggtcgacatgctgatcgatattgccaggaagctagacaaagccgagagggagccactgctgctgtgcgctacttatctgaagaaactagactctcctggctacgctgccgagacttacctgaaaatgggggatctcaaatctctagttcaattacatgtcgagacacagagatgggacgaagcgttcgcattgggagaaaaacacccagagtttaaggacgacatctatatgccatatgcacaatggctggccgagaatgacaggtttgaagaggctcagaaggcattccacaaggcggggcggcagagggaggccgtacaggtcctggagcagctgactaataacgctgtcgcagaaagtcgctttaacgatgcagcatattactattggatgctgagcatgcaatgtctggatatagcacaggatccagctcagaaagataccatgctgggcaaattctaccatttccagcgactcgccgaactctatcatggctaccacgcaatccatcgtcacaccgaggatccctttagcgtacatcgccctgagacactgttcaacatttcacgctttttgctgcattcactaccaaaggacacacctagtggcatcagcaaggtcaaaattcttttcactcttgccaaacagtctaaggccttaggagcgtacagactggcgaggcacgcttatgacaagcttcgaggtctgtatatccctgcccgcttccaaaagagcatcgaacttggcacccttacgatccgggctaagcctttccacgacagcgaggaactggtccctctgtgctatagatgctctactaacaatccactgttgaataatttggggaatgtgtgcattaactgccggcagccatttatattcagcgcgtctagttatgacgttctgcatctggtcgaattttatctggaagaaggcattaccgatgaggaggccatttctctcatagatcttgaggtcctgcgccctaaaagagacgacagacagcttgagatcgcaaacaatagctctcagattctgagattagtggagaccaaggattccattggcgacgaggatcctttcactgcgaaactctcgttcgagcagggaggatcggagttcgttccagtggtggtgagccggctcgtactacgcagcatgtcacgaagagatgtattaattaaaagatggccgcccccactccgttggcagtacttccgctcattgctacccgacgcatcaataaccatgtgtcctagctgctttcagatgttccactctgaagattacgagttgcttgtgctccaacatggatgttgtccctactgccgcaggtgcaaggatgatccaggcccgtag

SEQ ID NO: 229978 - DNA, 3276 bp, Artificial Sequence
  derived and/or modified sequence
atgttcaacggcatcatcagcatccggaacaagaacggcgaggagaaggtgaagattgagagacccgggggaagcctctcaccgatttggtccatttgttggaacccctccagcagatgggaatctttctggatgaaccgcgagaatgaggatgcagaggacgtgatcgtgaatagatatatccaggagatccccagcaccttgaaatctgcagtgtacagcagccaaggctcagaagccgaagaggaggaacctgaggaagaggatgattcgccgagggatgacaacttagaggagcgcaatgatatcctagcagtggccgattggggacagaaagtgtccttttaccaactgtcaggtaagcaaattggcaaagatagagctttaaatttcgacccttgctgcataagttatttcaccaaaggcgaatacatccttctcggggggtccgataagcaagtgagcctgtttactaaggacggggtgaggctcgggacagtgggggaacaaaacagctgggtgtggacatgccaggccaaacctgactccaactatgttgtggttgggtgtcaggatggcacaatcagcttttaccagctgattttctccacagtgcacggcctgtacaaggatcgctacgcttacagagactctatgactgatgttatcgtccagcacctgattacagagcagaaggtaaggattaagtgcaaagagctcgtaaagaagattgctatctatcgaaatcgactcgcaattcagctgcccgaaaagattttaatctatgaactgtatagtgaagacctgagtgacatgcattacagagtgaaggaaaagatcataaagaagtttgagtgcaacttactggtggtttgtgccaatcacattatcctgtgtcaagagaagagattgcagtgtctttcattttccggtgtgaaagaacgggagtggcagatggagagcctgatcagatacattaaagtgatcggggggccccctgggcgtgagggccttttagtcgggctgaagaatggccagattcttaagatcttcgtggacaatttgtttgcaatcgtcctcctgaagcaagccactgccgtgcggtgtttagatatgagcgctagtaggaagaaactggccgttgtggatgagaacgacacatgcctggtttacgacatcgataccaaggaactcctgttccaggagcctaacgctaatagcgttgcttggaacactcaatgtgaggacatgctctgtttttcggggggcggatacctgaatataaaggccagtaccttccctgtacacagacagaagctgcaaggctttgttgtgggctataacggtagtaaaattttttgtctccatgtcttctctatttctgccgtcgaggtgccacagtcagcacctatgtaccagtatctggatcgcaaactcttcaaggaggcctatcaaatagcctgcctgggcgtgactgataccgattggcgtgagctggctatggaggcactggaaggactcgacttcgagacggccaaaaaggcattcatcagggtacaggacctcaggtatctggaactgatctccagcatcgaggaaaggaaaaaaagaggagaaaccaacaacgacctctttctcgccgatgtgtttagttatcagggaaagttccatgaggctgccaaactgtataagcggagtggccatgagaatctagccctggaaatgtacacagatctgtgtatgtttgaatatgcgaaggattttctgggatctggcgaccctaaggagacaaagatgctgattacaaagcaggccgattgggcacgtaacatcaaggaaccaaaagcggccgtggagatgtatatatctgccggggagcatgtaaaagctatcgagatctgcggcgatcatggatgggtggatatgctgattgatatcgctaggaagctggacaaagcggagcgtgagcccttattgctgtgcgctacgtacttgaagaaactggacagcccaggatacgctgccgagacgtatctcaagatgggagatctgaagtctttagttcagctgcacgtcgaaacacagcgctgggatgaagcatttgctctcggcgagaaacaccccgaatttaaggacgatatttacatgccttatgcacagtggctggccgaaaacgatcgattcgaagaagctcaaaaagcctttcacaaagcaggtcgccaacgagaagctgtacaggtgctcgaacagctaactaacaacgcagttgctgaatctcggtttaatgatgcagcatactattactggatgctcagcatgcagtgcttggacatcgcacaggacccggcacagaaggacactatgctcggcaagttctatcactttcaacggctggcagaactttaccatggctatcatgctattcaccgtcacactgaggatccgttttctgtgcacaggcctgagaccttgtttaacattagtagatttttgctgcacagcctaccgaaggacacgccgtcaggtataagcaaggtgaagatcctgtttacattagccaaacagtcaaaagctctgggcgcctaccgcctggcccgccacgcctacgataagctgagaggactctatatcccagcccgatttcagaagtctatcgagttgggaacactcacaatcagggccaagccatttcacgatagtgaagagctggtcccactctgctatcgctgtagcaccaataaccccctcttaaacaatctgggaaacgtctgtatcaattgcagacagccattcatcttttccgctagctcgtacgacgtactgcacttggttgagttctacctggaggagggcataacggacgaagaagctatctcattgattgatctggaggttttgcgaccaaaaagagatgacagacaactggagatagccaacaatagctcccagatcctcagactggtggagacaaaggattcaattggggacgaggaccccttcaccgctaagctgtcttttgagcagggaggatccgagttcgtccccgtggtggtgtccagactggtgctccggagtatgtcaagaagggatgtactgattaagagatggccaccccctttacggtggcagtactttcgctccctcctgccagacgcaagcatcacaatgtgtccatcctgttttcagatgtttcactcagaagactacgaactgcttgttctgcaacatgggtgttgtccatactgcaggcgatgtaaggacgacccaggaccctag

SEQ ID NO: 229979 - DNA, 3726 bp, Artificial Sequence
  derived and/or modified sequence
atgcgcgctgtactgacttggcgggataaagccgaacactgcatcaacgacatcgcctttaaacccgacggaacccagctcatcctcgctgctgggtccagacttctggtttatgacacctcggacggaacactccttcagcccttaaagggccataaagacaccgtctattgtgtagcatatgcaaaagatggaaagcgcttcgcatccggtagcgcggataagtcggtgattatctggacaagcaaactcgaaggaattctgaaatatacacacaacgatgcaatacagtgtgttagttacaaccccattacacaccagctcgcatcctgttcatcaagtgactttgggctctggtcacccgagcagaagtccgtgtccaagcacaaatcttcaagcaagattatctgctgttcctggacaaatgatggtcagtacctggcgttaggcatgtttaacggtataatatctattcgcaacaagaacggcgaggagaaagttaagattgagagaccgggtgggtctttgtcccctatttggagcatctgttggaacccctcatctcggtgggagtctttttggatgaatcgcgagaacgaggacgccgaagatgtgatagttaacagatatattcaggagattccttctacactcaaatctgccgtttattcctctcagggctctgaagccgaagaggaggagcctgaagaggaagatgactctccacgggacgataatctcgaggaaagaaatgatatcttggccgttgccgactggggccaaaaggtaagcttctatcagctttccggcaagcagattggaaaagaccgagcattgaatttcgacccctgctgcatctcgtatttcactaagggtgagtacatcctcctcgggggatcagacaagcaggtcagcttgtttactaaggacggtgttcgactgggcacggtgggcgaacaaaattcttgggtgtggacctgtcaggctaagcccgacagcaactatgtggtcgtcggttgtcaagacggaactatttctttttatcagctcattttttctacagtccatggactttacaaggatcgctacgcgtaccgcgattccatgactgacgtgattgtgcagcacctgatcacagaacagaaggtccgcatcaaatgtaaggagttggtcaagaagatagctatttatcggaaccgcctggcaattcagctgcctgagaaaattctcatctatgagctgtatagcgaggacctttccgatatgcattaccgagttaaagaaaaaataatcaaaaaatttgagtgtaatcttttagtcgtttgcgcaaatcacatcatcctgtgtcaggagaaaagattgcagtgtctcagcttctctggcgtaaaagaaagggaatggcagatggaatcactgattcgatacatcaaggttatagggggacctcctggacgcgaggggcttctagtgggcctgaagaatgggcagatcctcaagatttttgtggacaacctatttgccatcgtgttgctcaaacaagctaccgccgtgagatgtctggacatgagtgcaagtaggaaaaaacttgccgtagtagatgagaatgacacctgcctcgtgtacgacatcgataccaaggagctgttgttccaggagcccaatgcaaatagcgtcgcatggaacacacagtgtgaagacatgctgtgtttctctggtggcggttatctcaacatcaaagcatccaccttccctgtgcaccgccagaaactgcaagggttcgtcgtcggctacaatggtagtaagatcttttgtttgcacgtgttttctattagtgcagtcgaggtgcctcagagcgcgccaatgtaccagtatctcgaccggaaactgtttaaggaagcataccaaatcgcctgcttaggcgtcacagatacagattggagggagctggccatggaagctctagaggggctggactttgagaccgcgaaaaaggcctttattcgtgttcaagatctaagatacctggaactgatatcttccatcgaggagaggaaaaagcggggagaaaccaataacgacctgttcctagccgatgttttttcctaccagggcaagtttcacgaggctgctaaactgtacaaacgttcaggtcacgagaacctcgctttggagatgtatacagacctgtgtatgtttgaatatgccaaggactttctcggcagcggggatcctaaggagacaaagatgcttatcaccaagcaggcagattgggcgagaaatatcaaggagcccaaggccgctgtcgagatgtacatcagtgctggggagcatgtcaaagcgatcgagatatgtggcgaccacggttgggtggatatgctgattgacatcgctaggaaactcgacaaggccgagagggagcccctgctgctttgtgcaacttacctgaagaaactcgattccccgggatacgcagctgagacttacctcaaaatgggggatctgaaaagtctggtgcagttacacgtcgaaactcagagatgggatgaggcctttgcattaggagagaagcatccagagttcaaggatgacatctacatgccctatgcccagtggctggcggaaaatgacagatttgaggaggcccaaaaggctttccacaaagccggtcggcagagggaggccgtccaagtgctggaacagctgaccaacaatgcggtcgctgaaagccgctttaatgacgccgcttactactactggatgcttagtatgcaatgcctggacatcgcacaggatcccgcacaaaaggacactatgctcggcaagttctaccacttccaacgcctggctgagctgtatcacggctaccatgctatccaccgacacaccgaggaccctttcagtgtacaccgccctgagaccctcttcaacatctcccggtttctgttacactccctgcctaaagacactcctagcggcatcagcaaagtgaaaatcttgtttacccttgctaaacaatcgaaggccctgggcgcatacagactagcccgacatgcttacgacaagttgaggggactttatatccccgcacgcttccagaagagcatcgagctgggtacccttacgataagggcaaaacctttccatgatagtgaagagctggtgccactgtgttaccgatgtagcactaacaacccacttctgaataacttgggcaatgtgtgcatcaactgtagacaaccatttatatttagtgcctcaagctatgacgtcctccacctggtggaattctaccttgaggaaggcataaccgatgaagaggctataagtcttatcgatctagaggtcctccggcctaagcgggatgacaggcaacttgagatcgcaaacaattcaagtcagattttgaggctggttgagacaaaggattctatcggagacgaggatccctttacagcgaagctctcctttgaacagggaggcagtgagttcgtgccagtcgtggtctccagactggtgctcaggagtatgagcagaagggatgtgcttatcaaaaggtggcctcctccgcttcggtggcaatacttcaggagcctgctgcctgacgcgagtataacaatgtgcccatcttgctttcagatgtttcattcagaggattatgaattgctggtcctccagcacggatgctgtccctattgtaggcggtgcaaagacgaccctggaccctag

SEQ ID NO: 229980 - DNA, 3276 bp, Artificial Sequence
  derived and/or modified sequence
atgtttaatgggataatctccattagaaacaaaaatggggaagaaaaagttaaaatcgagcggcctggcggttccttaagtcctatatggagtatatgctggaatccgagcagcaggtgggaatcattctggatgaatcgcgagaacgaagatgcagaagatgtcatcgttaacaggtatatccaagagatcccaagcaccctcaaatctgctgtctattcctcacagggtagtgaagcagaagaagaagagcctgaagaagaggatgatagtccaagagatgacaatctggaagaaagaaacgatattctagctgtggcagattggggacagaaggtctccttttatcaactcagtgggaagcagatcggcaaggacagggccctcaacttcgacccctgttgcatctcctattttacgaaaggggaatacattctacttggcggaagcgacaagcaggtgtctctcttcactaaagacggggtgagactaggcacggtgggggagcagaatagttgggtgtggacttgtcaggcaaagccagactccaattatgtggtggtgggttgccaagacggcaccatctccttctaccaactgatcttttccaccgtacacggcttgtataaagatagatacgcttatcgcgacagtatgacagacgtgatcgtgcagcatcttattacagaacagaaagttcgaatcaagtgtaaggagctggttaagaaaatcgctatctaccggaacagactggctattcaactccctgagaaaatccttatatatgagttgtattcagaggatctctcagatatgcactatcgcgtcaaggagaagatcatcaagaagttcgagtgtaatctcctggtggtatgtgccaatcatattatcctttgtcaggaaaagagactccagtgcctatctttttctggtgtaaaagagcgggaatggcagatggagtcattgattcggtatattaaagtaatcggaggccctccagggcgagagggacttttagttgggctaaagaatggccagattctgaaaatctttgtcgataacctgttcgctatcgtgctgctgaagcaggccaccgctgtgcgttgcttggatatgtctgcgtcaagaaaaaagctcgctgtcgtcgatgaaaatgacacatgtctggtctacgacatcgatacaaaagaactcctttttcaagaaccaaatgcgaatagcgtggcttggaacacacagtgcgaagacatgctgtgtttttctggcggagggtacctgaacattaaagctagtaccttccccgtacacaggcaaaagctgcaagggttcgtcgtgggttacaacggatctaaaattttctgcctgcatgtgtttagcatatccgcagtggaagtgccccagagcgctccaatgtaccaatacctagaccggaagttatttaaggaggcgtaccagatcgcctgcctgggcgtcacagacacagactggcgggaactcgcgatggaagcattagaaggtttagatttcgagacagctaagaaggccttcattcgggtgcaggatcttcggtacctcgaactgatcagctcaatcgaggaacgcaagaagaggggggagacaaacaacgacctgtttctcgccgacgttttttcttatcagggcaagttccatgaagcggctaagctttataaacgctcgggccatgagaatcttgccctggaaatgtacactgatttgtgcatgttcgagtacgcaaaggacttcctcggcagcggagatccgaaggaaaccaagatgttaataactaaacaggcagattgggcccgtaacatcaaggaacctaaagccgctgtagagatgtacatctctgccggtgagcacgtgaaagcaattgagatttgtggagaccatggatgggtcgacatgttaatagatatcgcgagaaaacttgacaaagcggaacgggagcctctgctgttgtgcgcgacctacctcaaaaaactggactccccaggatatgcagcagagacctatctgaagatgggagatttaaagagcctggtgcagctgcatgtggagacccagagatgggatgaggcctttgcgctgggcgaaaaacaccccgagttcaaggatgacatctatatgccctatgcccagtggctggctgaaaatgaccgatttgaagaggcgcagaaagcatttcataaggcaggcagacaaagggaagcggtccaggtccttgagcagctgaccaataacgcagtcgcagaatcacggtttaacgacgccgcttattactactggatgctgtcaatgcagtgtctcgatatcgctcaagaccctgcgcagaaagataccatgctgggtaaattttaccacttccagcggttggctgaactgtaccatggataccacgctatccacaggcacactgaagatcctttttccgtgcaccggccagagacgctatttaatattagccgtttcctgcttcacagcctgccaaaggatactccctctggtattagtaaagtgaagatcctcttcacacttgcgaaacaatccaaggcgctgggcgcttacagactggcgaggcatgcctacgacaagctgaggggtctgtatattcctgctaggtttcagaaatcgattgaattgggcactctaaccattagggccaaaccctttcacgatagtgaagaactggttcccttgtgttacagatgtagcaccaataatcctctgctgaataacctgggcaatgtttgcattaattgtaggcaaccatttatatttagcgcaagcagctatgatgtcctgcacctagttgaattctatcttgaggagggaattactgacgaggaggccatatctctcatagatcttgaagtactgaggccgaagagagacgacagacagctagaaatcgccaacaactcttctcagatcctgcgattggtggagactaaggactcaattggggacgaggatccattcacggcaaaactgtcgtttgaacaggggggtagcgagttcgtccccgtcgtagtgtctcgtttagtactgaggtcaatgtctagacgagacgttctgattaaaagatggcccccacccctgcggtggcagtactttaggtcactcttaccggatgccagcataacaatgtgcccttcgtgtttccaaatgtttcatagtgaggattacgaattactggtattgcagcacgggtgctgcccgtactgtcggcgttgtaaggatgatcctgggccttag

SEQ ID NO: 229981 - DNA, 3726 bp, Artificial Sequence
  derived and/or modified sequence
atgagagccgtgctgacctggagagacaaggccgagcactgcatcaacgacatcgccttcaagcccgacggcacccagctgatcctggccgccggcagcagactgctggtgtacgacaccagcgacggcaccctgctgcagcccctgaagggccacaaggacaccgtgtactgcgtggcctacgccaaggacggcaagagattcgccagcggcagcgccgacaagagcgtgatcatctggaccagcaagctggagggcatcctgaagtacacccacaacgacgccatccagtgcgtgagctacaaccccatcacccaccagctggccagctgcagcagcagcgacttcggcctgtggagccccgagcagaagagcgtgagcaagcacaagagcagcagcaagatcatctgctgcagctggaccaacgacggccagtacctggccctgggcatgttcaacggcatcatcagcatcagaaacaagaacggcgaggagaaggtgaagatcgagagacccggcggcagcctgagccccatctggagcatctgctggaaccccagcagcagatgggagagcttctggatgaacagagagaacgaggacgccgaggacgtgatcgtgaacagatacatccaggagatccccagcaccctgaagagcgccgtgtacagcagccagggcagcgaggccgaggaggaggagcccgaggaggaggacgacagccccagagacgacaacctggaggagagaaacgacatcctggccgtggccgactggggccagaaggtgagcttctaccagctgagcggcaagcagatcggcaaggacagagccctgaacttcgacccctgctgcatcagctacttcaccaagggcgagtacatcctgctgggcggcagcgacaagcaggtgagcctgttcaccaaggacggcgtgagactgggcaccgtgggcgagcagaacagctgggtgtggacctgccaggccaagcccgacagcaactacgtggtggtgggctgccaggacggcaccatcagcttctaccagctgatcttcagcaccgtgcacggcctgtacaaggacagatacgcctacagagacagcatgaccgacgtgatcgtgcagcacctgatcaccgagcagaaggtgagaatcaagtgcaaggagctggtgaagaagatcgccatctacagaaacagactggccatccagctgcccgagaagatcctgatctacgagctgtacagcgaggacctgagcgacatgcactacagagtgaaggagaagatcatcaagaagttcgagtgcaacctgctggtggtgtgcgccaaccacatcatcctgtgccaggagaagagactgcagtgcctgagcttcagcggcgtgaaggagagagagtggcagatggagagcctgatcagatacatcaaggtgatcggcggcccccccggcagagagggcctgctggtgggcctgaagaacggccagatcctgaagatcttcgtggacaacctgttcgccatcgtgctgctgaagcaggccaccgccgtgagatgcctggacatgagcgccagcagaaagaagctggccgtggtggacgagaacgacacctgcctggtgtacgacatcgacaccaaggagctgctgttccaggagcccaacgccaacagcgtggcctggaacacccagtgcgaggacatgctgtgcttcagcggcggcggctacctgaacatcaaggccagcaccttccccgtgcacagacagaagctgcagggcttcgtggtgggctacaacggcagcaagatcttctgcctgcacgtgttcagcatcagcgccgtggaggtgccccagagcgcccccatgtaccagtacctggacagaaagctgttcaaggaggcctaccagatcgcctgcctgggcgtgaccgacaccgactggagagagctggccatggaggccctggagggcctggacttcgagaccgccaagaaggccttcatcagagtgcaggacctgagatacctggagctgatcagcagcatcgaggagagaaagaagagaggcgagaccaacaacgacctgttcctggccgacgtgttcagctaccagggcaagttccacgaggccgccaagctgtacaagagaagcggccacgagaacctggccctggagatgtacaccgacctgtgcatgttcgagtacgccaaggacttcctgggcagcggcgaccccaaggagaccaagatgctgatcaccaagcaggccgactgggccagaaacatcaaggagcccaaggccgccgtggagatgtacatcagcgccggcgagcacgtgaaggccatcgagatctgcggcgaccacggctgggtggacatgctgatcgacatcgccagaaagctggacaaggccgagagagagcccctgctgctgtgcgccacctacctgaagaagctggacagccccggctacgccgccgagacctacctgaagatgggcgacctgaagagcctggtgcagctgcacgtggagacccagagatgggacgaggccttcgccctgggcgagaagcaccccgagttcaaggacgacatctacatgccctacgcccagtggctggccgagaacgacagattcgaggaggcccagaaggccttccacaaggccggcagacagagagaggccgtgcaggtgctggagcagctgaccaacaacgccgtggccgagagcagattcaacgacgccgcctactactactggatgctgagcatgcagtgcctggacatcgcccaggaccccgcccagaaggacaccatgctgggcaagttctaccacttccagagactggccgagctgtaccacggctaccacgccatccacagacacaccgaggaccccttcagcgtgcacagacccgagaccctgttcaacatcagcagattcctgctgcacagcctgcccaaggacacccccagcggcatcagcaaggtgaagatcctgttcaccctggccaagcagagcaaggccctgggcgcctacagactggccagacacgcctacgacaagctgagaggcctgtacatccccgccagattccagaagagcatcgagctgggcaccctgaccatcagagccaagcccttccacgacagcgaggagctggtgcccctgtgctacagatgcagcaccaacaaccccctgctgaacaacctgggcaacgtgtgcatcaactgcagacagcccttcatcttcagcgccagcagctacgacgtgctgcacctggtggagttctacctggaggagggcatcaccgacgaggaggccatcagcctgatcgacctggaggtgctgagacccaagagagacgacagacagctggagatcgccaacaacagcagccagatcctgagactggtggagaccaaggacagcatcggcgacgaggaccccttcaccgccaagctgagcttcgagcagggcggcagcgagttcgtgcccgtggtggtgagcagactggtgctgagaagcatgagcagaagagacgtgctgatcaagagatggcccccccccctgagatggcagtacttcagaagcctgctgcccgacgccagcatcaccatgtgccccagctgcttccagatgttccacagcgaggactacgagctgctggtgctgcagcacggctgctgcccctactgcagaagatgcaaggacgaccccggcccctag

SEQ ID NO: 229982 - DNA, 3276 bp, Artificial Sequence
  derived and/or modified sequence
atgttcaacggcatcatcagcatcagaaacaagaacggcgaggagaaggtgaagatcgagagacccggcggcagcctgagccccatctggagcatctgctggaaccccagcagcagatgggagagcttctggatgaacagagagaacgaggacgccgaggacgtgatcgtgaacagatacatccaggagatccccagcaccctgaagagcgccgtgtacagcagccagggcagcgaggccgaggaggaggagcccgaggaggaggacgacagccccagagacgacaacctggaggagagaaacgacatcctggccgtggccgactggggccagaaggtgagcttctaccagctgagcggcaagcagatcggcaaggacagagccctgaacttcgacccctgctgcatcagctacttcaccaagggcgagtacatcctgctgggcggcagcgacaagcaggtgagcctgttcaccaaggacggcgtgagactgggcaccgtgggcgagcagaacagctgggtgtggacctgccaggccaagcccgacagcaactacgtggtggtgggctgccaggacggcaccatcagcttctaccagctgatcttcagcaccgtgcacggcctgtacaaggacagatacgcctacagagacagcatgaccgacgtgatcgtgcagcacctgatcaccgagcagaaggtgagaatcaagtgcaaggagctggtgaagaagatcgccatctacagaaacagactggccatccagctgcccgagaagatcctgatctacgagctgtacagcgaggacctgagcgacatgcactacagagtgaaggagaagatcatcaagaagttcgagtgcaacctgctggtggtgtgcgccaaccacatcatcctgtgccaggagaagagactgcagtgcctgagcttcagcggcgtgaaggagagagagtggcagatggagagcctgatcagatacatcaaggtgatcggcggcccccccggcagagagggcctgctggtgggcctgaagaacggccagatcctgaagatcttcgtggacaacctgttcgccatcgtgctgctgaagcaggccaccgccgtgagatgcctggacatgagcgccagcagaaagaagctggccgtggtggacgagaacgacacctgcctggtgtacgacatcgacaccaaggagctgctgttccaggagcccaacgccaacagcgtggcctggaacacccagtgcgaggacatgctgtgcttcagcggcggcggctacctgaacatcaaggccagcaccttccccgtgcacagacagaagctgcagggcttcgtggtgggctacaacggcagcaagatcttctgcctgcacgtgttcagcatcagcgccgtggaggtgccccagagcgcccccatgtaccagtacctggacagaaagctgttcaaggaggcctaccagatcgcctgcctgggcgtgaccgacaccgactggagagagctggccatggaggccctggagggcctggacttcgagaccgccaagaaggccttcatcagagtgcaggacctgagatacctggagctgatcagcagcatcgaggagagaaagaagagaggcgagaccaacaacgacctgttcctggccgacgtgttcagctaccagggcaagttccacgaggccgccaagctgtacaagagaagcggccacgagaacctggccctggagatgtacaccgacctgtgcatgttcgagtacgccaaggacttcctgggcagcggcgaccccaaggagaccaagatgctgatcaccaagcaggccgactgggccagaaacatcaaggagcccaaggccgccgtggagatgtacatcagcgccggcgagcacgtgaaggccatcgagatctgcggcgaccacggctgggtggacatgctgatcgacatcgccagaaagctggacaaggccgagagagagcccctgctgctgtgcgccacctacctgaagaagctggacagccccggctacgccgccgagacctacctgaagatgggcgacctgaagagcctggtgcagctgcacgtggagacccagagatgggacgaggccttcgccctgggcgagaagcaccccgagttcaaggacgacatctacatgccctacgcccagtggctggccgagaacgacagattcgaggaggcccagaaggccttccacaaggccggcagacagagagaggccgtgcaggtgctggagcagctgaccaacaacgccgtggccgagagcagattcaacgacgccgcctactactactggatgctgagcatgcagtgcctggacatcgcccaggaccccgcccagaaggacaccatgctgggcaagttctaccacttccagagactggccgagctgtaccacggctaccacgccatccacagacacaccgaggaccccttcagcgtgcacagacccgagaccctgttcaacatcagcagattcctgctgcacagcctgcccaaggacacccccagcggcatcagcaaggtgaagatcctgttcaccctggccaagcagagcaaggccctgggcgcctacagactggccagacacgcctacgacaagctgagaggcctgtacatccccgccagattccagaagagcatcgagctgggcaccctgaccatcagagccaagcccttccacgacagcgaggagctggtgcccctgtgctacagatgcagcaccaacaaccccctgctgaacaacctgggcaacgtgtgcatcaactgcagacagcccttcatcttcagcgccagcagctacgacgtgctgcacctggtggagttctacctggaggagggcatcaccgacgaggaggccatcagcctgatcgacctggaggtgctgagacccaagagagacgacagacagctggagatcgccaacaacagcagccagatcctgagactggtggagaccaaggacagcatcggcgacgaggaccccttcaccgccaagctgagcttcgagcagggcggcagcgagttcgtgcccgtggtggtgagcagactggtgctgagaagcatgagcagaagagacgtgctgatcaagagatggcccccccccctgagatggcagtacttcagaagcctgctgcccgacgccagcatcaccatgtgccccagctgcttccagatgttccacagcgaggactacgagctgctggtgctgcagcacggctgctgcccctactgcagaagatgcaaggacgaccccggcccctag

SEQ ID NO: 229983 - protein, 1131 aa, Artificial Sequence
  derived and/or modified sequence
MRAVLTWRDKAEHCINDIAFKPDGTQLILAAGSRLLVYDTSDGTLLQPLKGHKDTVYCVAYAKDGLWSPEQKSVSKHKSSSKIICCSWTNDGQYLALGMFNGIISIRNKNGEEKVKIERPGGSLSPIWSICWNPSREERNDILAVADWGQKVSFYQLSGKQIGKDRALNFDPCCISYFTKGEYILLGGSDKQVSLFTKDGVRLGTVGEQNSWVWTCQAKPDSNYVVVGCQDGTISFYQLIFSTVHGLYKDRYAYRDSMTDVIVQHLITEQKVRIKCKELVKKIAIYRNRLAIQLPEKILIYELYSEDLSDMHYRVKEKIIKKFECNLLVVCANHIILCQEKRLQCLSFSGVKEREWQMESLIRYIKVIGGPPGREGLLVGLKNGQILKIFVDNLFAIVLLKQATAVRCLDMSASRKKLAVVDENDTCLVYDIDTKELLFQEPNANSVAWNTQCEDMLCFSGGGYLNIKASTFPVHRQKLQGFVVGYNGSKIFCLHVFSISAVEVPQSAPMYQYLDRKLFKEAYQIACLGVTDTDWRELAMEALEGLDFETAKKAFIRVQDLRYLELISSIEERKKRGETNNDLFLADVFSYQGKFHEAAKLYKRSGHENLALEMYTDLCMFEYAKDFLGSGDPKETKMLITKQADWARNIKEPKAAVEMYISAGEHVKAIEICGDHGWVDMLIDIARKLDKAEREPLLLCATYLKKLDSPGYAAETYLKMGDLKSLVQLHVETQRWDEAFALGEKHPEFKDDIYMPYAQWLAENDRFEEAQKAFHKAGRQREAVQVLEQLTNNAVAESRFNDAAYYYWMLSMQCLDIAQADPAQKDTMLGKFYHFQRLAELYHGYHAIHRHTEDPFSVHRPETLFNISRFLLHSLPKDTPSGISKVKILFTLAKQSKALGAYRLARHAYDKLRGLYIPARFQKSIELGTLTIRAKPFHDSEELVPLCYRCSTNNPLLNNLGNVCINCRQPFIFSASSYDVLHLVEFYLEEGITDEEAISLIDLEVLRPKRDDRQLEIANNSSQILRLVETKDSIGDEDPFTAKLSFEQGGSEFVPVVVSRLVLRSMSRRDVLIKRWPPPLRWQYFRSLLPDASITMCPSCFQMFHSEDYELLVLQHGCCPYCRRCKDDPGP

SEQ ID NO: 229984 - protein, 1083 aa, Artificial Sequence
  derived and/or modified sequence
MRAVLTWRDKAEHCINDIAFKPDGTQLILAAGSRLLVYDTSDGTLLQPLKGHKDTVYCVAYAKDGLWSPEQKSVSKHKSSSKIICCREERNDILAVADWGQKVSFYQLSGKQIGKDRALNFDPCCISYFTKGEYILLGGSDKQVSLFTKDGVRLGTVGEQNSWVWTCQAKPDSNYVVVGCQDGTISFYQLIFSTVHGLYKDRYAYRDSMTDVIVQHLITEQKVRIKCKELVKKIAIYRNRLAIQLPEKILIYELYSEDLSDMHYRVKEKIIKKFECNLLVVCANHIILCQEKRLQCLSFSGVKEREWQMESLIRYIKVIGGPPGREGLLVGLKNGQILKIFVDNLFAIVLLKQATAVRCLDMSASRKKLAVVDENDTCLVYDIDTKELLFQEPNANSVAWNTQCEDMLCFSGGGYLNIKASTFPVHRQKLQGFVVGYNGSKIFCLHVFSISAVEVPQSAPMYQYLDRKLFKEAYQIACLGVTDTDWRELAMEALEGLDFETAKKAFIRVQDLRYLELISSIEERKKRGETNNDLFLADVFSYQGKFHEAAKLYKRSGHENLALEMYTDLCMFEYAKDFLGSGDPKETKMLITKQADWARNIKEPKAAVEMYISAGEHVKAIEICGDHGWVDMLIDIARKLDKAEREPLLLCATYLKKLDSPGYAAETYLKMGDLKSLVQLHVETQRWDEAFALGEKHPEFKDDIYMPYAQWLAENDRFEEAQKAFHKAGRQREAVQVLEQLTNNAVAESRFNDAAYYYWMLSMQCLDIAQADPAQKDTMLGKFYHFQRLAELYHGYHAIHRHTEDPFSVHRPETLFNISRFLLHSLPKDTPSGISKVRKILFTLAKQSKALGAYRLARHAYDKLRGLYIPARFQKSIELGTLTIRAKPFHDSEELVPLCYRCSTNNPLLNNLGNVCINCRQPFIFSASSYDVLHLVEFYLEEGITDEEAISLIDLEVLRPKRDDRQLEIANNSSQILRLVETKDSIGDEDPFTAKLSFEQGGSEFVPVVVSRLVLRSMSRRDVLIKRWPPPLRWQYFRSLLPDASITMCPSCFQMFHSEDYELLVLQHGCCPYCRRCKDDPGP

SEQ ID NO: 229985 - protein, 1118 aa, Artificial Sequence
  derived and/or modified sequence
MRAVLTWRDKAEHCINDIAFKPDGTQLILAAGSRLLVYDTSDGTLLQPLKGHKDTVYCVAYAKDVLCIEGLWSPEQKSVSKHKSSSKIICCSWTNDGQYLALGMFNGIISIRNKNGEEKVKIERPGGSLSPIWSICWNPSREERNDILAVADWGQKVSFYQLSGKQIGKDRALNFDPCCISYFTKGEYILLGGSDKQVSLFTKDGVRLGTVGEQNSWVWTCQAKPDSNYVVVGCQDGTISFYQLIFSTVHGLYKDRYAYRDSMTDVIVQHLITEQKVRIKCKELVKKIAIYRNRLAIQLPEKILIYELYSEDLSDMHYRVKEKIIKKFECNLLVVCANHIILCQEKRLQCLSFSGVKEREWQMESLIRYIKVIGGPPGREGLLVGLKNGQILKIFVDNLFAIVLLKQATAVRCLDMSASRKKLAVVDENDTCLVYDIDTKELLFQEPNANSVAWNTQCEDMLCFSGGGYLNIKASTFPVHRQKLQGFVVGYNGSKIFCLHVFSISAVEVPQSAPMYQYLDRKLFKEAYQIACLGVTDTDWRELAMEALEGLDFETAKKERKKRGETNNDLFLADVFSYQGKFHEAAKLYKRSGHENLALEMYTDLCMFEYAKDFLGSGDPKETKMLITKQADWARNIKEPKAAVEMYISAGEHVKAIEICGDHGWVDMLIDIARKLDKAEREPLLLCATYLKKLDSPGYAAETYLKMGDLKSLVQLHVETQRWDEAFALGEKHPEFKDDIYMPYAQWLAENDRFEEAQKAFHKAGRQREAVQVLEQLTNNAVAESRFNDAAYYYWMLSMQCLDIAQADPAQKDTMLGKFYHFQRLAELYHGYHAIHRHTEDPFSVHRPETLFNISRFLLHSLPKDTPSGISKVKILFTLAKQSKALGAYRLARHAYDKLRGLYIPARFQKSIELGTLTIRAKPFHDSEELVPLCYRCSTNNPLLNNLGNVCINCRQPFIFSASSYDVLHLVEFYLEEGITDEEAISLIDLEVLRPKRDDRQLEIANNSSQILRLVETKDSIGDEDPFTAKLSFEQGGSEFVPVVVSRLVLRSMSRRDVLIKRWPPPLRWQYFRSLLPDASITMCPSCFQMFHSEDYELLVLQHGCCPYCRRCKDDPGP

SEQ ID NO: 229986 - DNA, 3396 bp, Artificial Sequence
  derived and/or modified sequence
atgcgagctgtattgacctggcgagataaggccgagcactgcatcaacgacatcgcatttaaacccgacgggacccaactgattctggccgctggatccagactgctcgtctatgatacatctgacgggaccctcttgcagccactgaaaggccacaaggacacggtgtattgcgtggcctatgctaaagacggactgtggtctcccgagcagaaatctgtttctaaacataagagcagctccaagatcatttgttgctcatggacgaacgatggacagtacttagccctcgggatgttcaacggaattatttccataagaaacaagaacggtgaagagaaggtcaagatcgaaaggccaggggggagcctgtccccgatatggtccatctgctggaacccctccagagaggagcggaatgatattcttgccgtggccgactggggccagaaggtgagcttttatcagcttagcgggaaacagatcggtaaggatcgcgccctgaacttcgatccctgttgtatcagctactttacaaaaggcgagtatatacttcttgggggctctgacaaacaggtatccctcttcacaaaagacggtgttcggctcggaaccgtcggagaacagaacagctgggtttggacctgccaggctaaaccagacagcaattacgttgttgtcggatgtcaggatggaaccatcagcttttaccagttgattttctctactgttcacggactttataaagaccgctacgcctacagggattctatgacggacgtcattgtgcagcacctgatcacagagcaaaaggtgcggattaagtgtaaggagctggttaagaagatcgcaatctacagaaacagattggctattcagctccccgagaagattctaatttatgagctatactctgaagatctgagtgatatgcactatcgcgttaaggagaaaatcataaaaaagtttgagtgcaatctgctcgtggtgtgtgccaatcacatcatcctgtgccaggagaagagactgcagtgcctgtctttctccggtgtcaaggaaagggagtggcaaatggagagcctcatccgctacatcaaggtcatcggcggtccaccagggagagagggtctgctcgtaggactcaagaatgggcagatactaaagattttcgtagacaacctttttgcaattgttctcctgaaacaggcaaccgcggtccgctgcctcgacatgagcgccagtaggaagaaactggctgtcgttgatgagaacgacacatgtttggtgtatgatatcgacacaaaggaactcttgtttcaggagcctaacgcgaattctgtggcgtggaatactcagtgtgaggatatgctgtgcttctctggtgggggctacctgaacattaaggcgagcacctttccggttcatagacagaaactgcaggggtttgtggttgggtacaatggatcaaaaatcttctgtctgcatgtcttttcgattagcgccgtggaggtgccccagtccgcccccatgtaccagtatctcgatagaaaactgtttaaggaagcctaccagattgcctgcctgggtgtgacagacacagactggagagaactggcaatggaagctctggagggcctggatttcgaaaccgcaaaaaaggcctttattcgcgtgcaggacctgagatatttagagcttatcagcagcattgaggagcgcaaaaaaaggggggagactaataacgacctgtttcttgccgatgtgttctcatatcagggaaaattccatgaggccgcaaagttgtacaagcggagtgggcacgagaacctggcccttgagatgtataccgatctgtgcatgttcgaatatgctaaggattttttagggtcgggcgatccaaaggagaccaagatgctcatcaccaagcaggcagactgggctcggaatatcaaggagccaaaagccgctgtagagatgtacatcagtgccggagaacatgtgaaggcaatcgagatttgtggagaccacgggtgggtcgacatgctaattgacatcgcacgcaagttggataaggcggaacgagaaccgctgctcctctgtgctacatatctcaagaagttggactccccaggctacgcagctgaaacgtatctgaagatgggcgatctgaaaagtctggtccagctccatgttgaaactcagcgttgggacgaagctttcgccttgggggagaagcacccagagtttaaggatgacatctacatgccatatgcccaatggctggccgagaacgatcgcttcgaagaagctcagaaagcttttcacaaggctggcagacagagggaagccgtgcaggtcttggaacagttgacaaataatgcagtggctgagagccgattcaatgatgcggcgtattactattggatgttgtccatgcagtgcctggacattgcgcaagccgatccagctcaaaaggacaccatgctcgggaagttttatcatttccagagactcgccgagttataccacgggtaccacgccattcaccggcacaccgaagacccattttcagtgcatcggcccgagaccctctttaatatctctaggttcctgcttcattctctgccaaaagacacacctagtgggatttccaaggtgaaaattctatttaccctggctaagcagtccaaagctcttggcgcctataggctcgcaagacacgcctacgataaactgcggggcctctatatcccagcccgcttccagaagtcaattgaactcggcacattaacaatccgcgccaagcccttccacgattcggaggaactcgtgccactgtgctatcgctgttcgactaataacccattgcttaataacctcggcaatgtgtgtataaactgccggcaacctttcatcttttctgcgagttcatatgatgtgttacacctggtggagttctacctggaggagggcattaccgacgaggaggcgatcagcctcatcgatctggaagtgctccgccccaaaagagacgataggcagctggaaattgcaaacaattcttctcaaatccttagactggtggagaccaaagatagcatcggtgacgaagaccctttcaccgctaaactaagtttcgaacagggtggctcagagttcgtccctgtcgtggtgagcaggctcgttctgcggtccatgtcacgtcgggatgtcctgatcaagaggtggcctccccctctgaggtggcagtatttccgttcacttctgccagacgcttctatcactatgtgcccatcctgttttcagatgtttcactccgaggactatgaactcctggtgctgcagcacggatgctgcccatactgtcgcagatgcaaggacgacccaggtccatag

SEQ ID NO: 229987 - DNA, 3252 bp, Artificial Sequence
  derived and/or modified sequence
atgcgagctgtcttaacatggcgcgacaaagcagagcactgtatcaacgacatcgcttttaaaccagatggcacacagctgattttagccgccggatcccgtctgctggtctatgacacgagcgatgggacacttctgcagccattgaaaggacataaggacaccgtgtactgtgtcgcatacgcaaaggacggactctggagccccgagcagaagtcggtgagcaaacacaagtcttcatccaaaatcatctgctgccgggaggaacgaaacgatattctggctgtcgccgactgggggcagaaagtcagcttttaccagctgtcaggaaaacagattggcaaagatcgcgccttgaatttcgatccatgctgtattagttactttaccaagggcgagtatatcttgttgggaggatcagacaagcaggtgtctttattcaccaaggatggcgtcaggctgggcaccgttggcgaacagaatagctgggtctggacttgtcaggccaagcccgatagcaattatgtcgtcgtgggatgtcaggacggtactatctccttctatcaactgatcttttcaacagtgcacggactgtacaaagatagatatgcatacagagacagtatgacggatgtgatcgtacagcatctgatcactgaacagaaagtccgcattaagtgcaaagagcttgttaagaagattgcaatatataggaaccgcttagcaatccagctgcccgagaaaatcctcatatacgagctctacagcgaggacctgagtgacatgcactacagagtgaaggaaaaaattattaagaagttcgagtgtaatctcctggttgtttgcgctaaccacatcatcctgtgtcaagaaaagaggctgcagtgcctgtctttttctggcgttaaggagagggaatggcaaatggagtccctgattcggtatatcaaggttatcggaggaccgcccggcagagagggacttttggtgggtctgaagaacggccaaattctgaagatctttgtggacaaccttttcgcaattgtgctactgaagcaggcgaccgccgtgcggtgtctggatatgagtgcatctagaaagaaactggctgtggttgatgagaatgatacctgtctggtgtatgacattgataccaaggagttgttgttccaggaaccaaatgcaaactcagtggcttggaatacacagtgtgaggatatgctctgcttctcaggagggggatatctgaatattaaggcctctacttttcctgtccatcgtcaaaaactacagggctttgtggtcgggtacaatggctcgaagatattctgtctgcacgtgttcagtatttccgccgtcgaggtgccgcagagcgcccctatgtaccaatacctggacaggaaactgttcaaggaggcctaccaaatcgcctgtcttggagtcacggatactgattggcgggagttggcaatggaggcattggagggcttagactttgagaccgcgaaaaaggcattcatccgcgtgcaggacctgagatacctggagctgatttcctcaatcgaagagcgaaagaaaagaggggagactaacaacgacctgttcttggccgacgtcttttcttaccaaggcaaatttcatgaggctgccaagctctataagcggagtggtcacgaaaatttggcattggaaatgtataccgacctctgtatgttcgagtacgccaaggatttccttgggtcaggcgacccgaaagagaccaagatgttgatcaccaaacaggcggactgggccaggaatatcaaagaacctaaggccgccgtcgaaatgtatatctccgctggggagcacgtgaaggcaattgaaatctgcggcgatcacggctgggttgatatgctgatcgatatagccagaaaactcgacaaggcagaaagagagcccctcctcctgtgcgctacctatctgaagaagcttgatagcccaggatatgccgccgaaacctacttgaaaatgggtgacctcaaatcactggtccagctacacgttgagacacagaggtgggatgaggcttttgcactgggcgagaagcatccagagtttaaagacgatatttacatgccgtacgctcaatggcttgccgagaacgatagattcgaggaggcacaaaaagccttccacaaggccggccgacagcgcgaggcagtgcaagtcctagaacaactgactaacaatgcagtggccgaatctcggttcaatgacgccgcgtactactactggatgttgtccatgcagtgcctagatatcgctcaggctgatcctgcccagaaagacaccatgctcgggaaattttaccacttccagcggctcgccgaactgtatcacggttatcacgctatccataggcacacggaagatccattcagcgtgcacaggccagaaaccctgttcaatatttcccgtttcttgctgcactcgctcccaaaggatacgccctctggaatctctaaagtgaggaagattctgtttaccctagctaagcaatcgaaagctctcggagcataccggctggcgagacacgcctacgacaaactgaggggtctctatataccggcgagatttcagaagtccattgagttgggtacactgaccatacgcgcaaagcctttccatgactctgaagagttggtgcctctatgttaccgttgctcgacgaataacccgctgctcaataatctgggtaatgtgtgcattaattgccggcagccctttattttttccgcctccagttatgatgtgcttcatctcgtggagttctacctggaggaaggcatcacagatgaagaagcaattagtctcatcgacctggaggttctgcgacccaaaagggatgacagacaattggaaatcgccaacaattcctctcaaatactgaggctggtggaaaccaaggactcaatcggggatgaggacccctttactgccaagttgagctttgagcagggggggtccgaatttgtccctgttgtggtgagcaggctggtgctgaggtccatgtcacggcgcgatgtcctgatcaaaagatggcctcccccactccgatggcagtactttaggagtttgctccctgacgcttccattactatgtgccccagctgtttccagatgtttcacagcgaagattatgagttgcttgtcttgcagcacggctgttgcccctattgcaggaggtgcaaggacgaccccggaccctag

SEQ ID NO: 229988 - DNA, 3357 bp, Artificial Sequence
  derived and/or modified sequence
atgcgcgctgtgctgacttggcgtgataaagctgaacactgcatcaacgatatcgccttcaagcccgatggaacccaactgattctggccgctggctctagactgctggtttatgacacctcggacggaacactcctgcagcctctgaagggacacaaagacactgtttactgtgttgcctatgcaaaggacgtgctttgcattgagggcctgtggtccccagagcaaaagtctgttagtaagcataaatcgtcatctaaaatcatatgctgcagctggactaatgatgggcaatacctggccctgggtatgttcaatggcatcatttctatccggaacaaaaacggagaagagaaggtcaagattgagcggcctggcgggtccctctcacccatttggtcgatatgttggaatccttcccgagaagagcgcaatgatatattagccgttgcagattggggccagaaggttagcttctaccagctgtcaggaaaacagataggtaaggacagggccctgaatttcgatccttgctgcataagttactttaccaaaggagagtacatcttgctgggcgggtcagataagcaggtcagcctgttcacaaaggatggagtgcgtctggggacagtgggggagcagaattcatgggtgtggacctgccaggccaaacccgactcaaattatgtggtagtgggttgtcaggatggcaccatatccttctaccaactcatctttagtaccgttcacggtctgtacaaagatagatacgcctacagggattccatgactgatgtgattgttcaacacttgatcacagagcaaaaggtccggattaaatgcaaagaactagtgaagaagattgccatttatcggaacagactagcgatccaattgcctgagaagatactcatatacgaactgtattccgaagatctgtccgacatgcactatcgagtgaaggaaaagattatcaagaagtttgagtgcaaccttctggttgtctgtgccaaccacattatcctttgtcaggaaaagcgactccagtgtctgtctttctcgggagtcaaagagagggaatggcagatggagtctctgattcgatacattaaggtcattggggggcccccggggcgggaagggctcctggtgggattaaaaaacgggcagatactaaagatattcgtggacaatctttttgcaatcgtgttactgaaacaggcaaccgcagtgcggtgtctggatatgtccgcctctagaaagaaacttgcggtggtggatgagaatgacacatgcttggtgtacgacattgataccaaagagctgctgtttcaggaaccaaacgctaatagtgtagcatggaatactcaatgtgaagacatgctctgctttagcggagggggatatctcaatatcaaggcttctaccttccctgtccaccgtcagaagctgcagggatttgttgtcgggtacaacgggtccaaaatcttttgtttacacgttttctctatatctgctgttgaggtgccacaaagtgctcccatgtatcagtatctggatcggaaactgtttaaagaggcctatcaaattgcttgtctcggtgtgacagacaccgactggcgggagttggcaatggaagcgctggagggcctcgatttcgagactgccaagaaggaacgaaagaaaaggggcgagactaataatgacctgtttcttgccgacgtgttttcctaccaaggcaagttccatgaagccgccaagctgtataagaggagcggacatgagaatcttgcgctggagatgtacaccgacctctgtatgtttgaatacgcaaaggattttttgggatcaggagatcctaaggaaactaaaatgctcataaccaagcaggccgattgggcacggaatattaaagaacccaaagccgctgttgagatgtacatttcggccggagagcacgtgaaagctattgaaatttgtggcgatcatggctgggtagatatgttaatcgatatcgccaggaaacttgacaaggcagagcgggagcctttgttgttatgtgccacatatttgaagaaactggatagtccgggctatgctgcggaaacatacctgaagatgggcgatctcaaatcgctcgtgcagttgcacgtggaaacccagagatgggacgaggcgtttgccctgggcgaaaagcaccccgaattcaaggacgacatctatatgccttacgctcagtggctggccgagaatgataggtttgaggaggcgcaaaaggcatttcacaaagccggcaggcagcgcgaggcagtgcaggtgctagagcagctgacaaacaatgccgtggctgagagccgttttaacgatgcggcctactactactggatgctctccatgcagtgcctggacatcgcccaggcggatcccgcccaaaaagatactatgctcggaaaattctaccatttccagcgactggccgagctgtaccatggataccacgcaattcatcgccacactgaggacccgttttccgttcacagaccagaaaccctcttcaatatctctagattcctgctgcactcactcccgaaagatacacctagcggcatatcaaaggttaaaatcctgtttacgctcgcgaagcagtctaaagctcttggcgcatatcggcttgcccgtcatgcttacgataaactgagagggctctatatccccgctagatttcaaaagagcatcgaactcggtacactgactatcagagccaaaccttttcacgactcggaagagctagtgccactctgttataggtgcagcaccaataaccccctgcttaacaacctaggtaacgtgtgtataaattgtcgtcagccttttatcttttctgcaagcagctacgatgtccttcacctggtggaattctacctagaggagggaataacggatgaggaggccatttcactaattgatcttgaggttctgcgccccaaacgggacgaccgtcagctggagattgcaaataactcgtcacagatactgcgtctagtggagactaaagactcgatcggggacgaagatccatttacagctaagctctctttcgaacaagggggttcggagtttgtccccgtggtggtgtctcgcctagtactgaggtcgatgtcacgacgagatgtacttattaagcgctggccacccccactgcgttggcagtacttccggagtctccttccagatgcttccattactatgtgtccgtcgtgcttccaaatgttccactctgaagattatgaactcctcgtcctccagcacggttgttgtccttactgccgccgttgtaaggacgatcccggtccttag

SEQ ID NO: 229989 - DNA, 3569 bp, Artificial Sequence
  derived and/or modified sequence
cttgtggagtggcgaccgttagtgaggcggttgctgagacagacgctgaggcgggtaggaggagcccgagccgtaagggaagccgtgatgagggccgtgttgacgtggagagataaagccgagcactgtataaatgacatcgcatttaagcctgatggaactcaactgattttggctgccggaagcagattactggtttatgacacctctgatggcaccttacttcagcccctcaagggacacaaagacactgtgtactgtgtggcatatgcgaaggatgggttgtggtctcctgaacagaagtctgtctccaaacacaaatcaagcagcaagatcatctgctgcagctggacaaatgatggtcagtacctggcgctggggatgttcaatgggatcatcagcatacggaacaaaaatggcgaggagaaagtaaagatcgagcggccggggggctccctctcgccaatatggtccatctgctggaacccttcaagagaggaacgtaatgacatcctggctgtggctgactggggacagaaagtttccttctaccagctgagtggaaaacagattggaaaggatcgggcactgaactttgacccctgctgcatcagctactttactaaaggcgagtacattttgctggggggttcagacaagcaagtatctcttttcaccaaggatggagtgcggcttgggactgttggggagcagaactcctgggtgtggacgtgtcaagcgaaaccggattccaactatgtggtggtcggctgccaggacggcaccatttccttctaccagcttattttcagcacagtccatgggctttacaaggaccgctatgcctacagggatagcatgactgacgtcattgtgcagcacctgatcactgagcagaaagttcggattaaatgcaaagagcttgtcaagaagattgccatctacagaaatcgattggctatccaactgccagagaaaatcctcatctatgagttgtattcagaggacttatcagacatgcattaccgggtaaaggagaagattatcaagaagtttgagtgcaacctcctggtggtgtgtgccaatcacatcatcctgtgccaggagaaacggctgcagtgcctgtccttcagcggagtgaaggagcgggagtggcagatggagtctctcattcgttacatcaaggtgatcggtggccctcctggaagagaaggcctcttagtggggctgaagaatggacagatcctgaagatcttcgtggacaatctctttgctatcgtcctgctgaagcaggccacagctgtgcgctgcttggacatgagtgcctcccgtaagaagctggccgtggtagatgaaaatgacacttgcctggtgtatgacatcgacaccaaggagctgctttttcaggaaccaaacgccaacagtgtagcttggaacacccagtgtgaggacatgctctgcttctcgggaggaggctacctcaacatcaaagccagcaccttccctgtgcaccggcagaagctgcagggctttgtggtcggctacaatggctccaagatcttctgcctccatgtcttctccatttctgccgtggaggtgccgcagtccgctcccatgtaccagtacctggataggaaactgttcaaggaagcctaccagattgcttgcttgggtgtcacagacactgattggcgtgaactggccatggaagcgctagaaggtttagattttgaaacagcaaagaaggccttcatcagagtacaagacctccgatatttagagctcatcagcagcattgaggagaggaagaagcggggagagaccaacaatgacctgtttctggcagatgtgttttcctaccaggggaagttccatgaggccgccaaactgtacaagaggagtgggcacgagaacctcgcgcttgaaatgtacaccgacctctgcatgtttgagtatgccaaggatttccttggatctggagaccccaaagaaacaaagatgctaatcaccaaacaggctgactgggccagaaatatcaaggagcccaaagccgccgtggagatgtacatctcagcaggagagcacgtcaaggccatcgagatctgtggtgaccatggctgggttgacatgttgatcgacatcgcccgcaaactggacaaggctgagcgcgagcccctgctgctgtgcgctacctacctcaagaagctggacagccctggctatgctgctgagacctacctgaagatgggtgacctcaagtccctggtgcagctgcacgtggagacccagcgctgggatgaggcctttgctttgggtgagaagcatcctgagtttaaggatgacatctacatgccgtatgctcagtggctagcagagaacgatcgctttgaggaagcccagaaagcgttccacaaggctgggcgacagagagaagcggtccaggtgctggagcagctcacaaacaatgccgtggcggagagcaggtttaatgatgctgcctattattactggatgctgtccatgcagtgcctcgatatagctcaagcagatcctgcccagaaggacacaatgcttggcaagttctaccacttccagcgtttggcagagctgtaccatggttaccatgccatccatcgccacacggaagatccgttcagtgtccatcgtcctgaaactcttttcaacatctccaggttcctgctgcacagcctgcccaaggacaccccctcgggcatctctaaagtgaaaatactcttcaccttggccaagcagagcaaggccctcggtgcctacaggctggcccggcacgcctatgacaagctgcgtggcctgtacatccctgccagattccaaaagtccattgagctgggtaccctgaccatccgcgccaagcccttccacgacagtgaggagttggtgcccttgtgctaccgctgctccaccaacaacccgctgctcaacaacctgggcaacgtctgcatcaactgccgccagcccttcatcttctccgcctcttcctacgacgtgctacacctggttgagttctacctggaggaagggatcactgatgaagaagccatctccctcatcgacctggaggtgctgagacccaagcgggatgacagacagctagagattgcaaacaacagctcccagattctgcggctagtggagaccaaggactccatcggagatgaggacccgttcacagctaagctgagctttgagcaaggtggctcagagttcgtgccagtggtggtgagccggctggtgctgcgctccatgagccgccgggatgtcctcatcaagcgatggcccccacccctgaggtggcaatacttccgctcactgctgcctgacgcctccattaccatgtgcccctcctgcttccagatgttccattctgaggactatgagttgctggtgcttcagcatggctgctgcccctactgccgcaggtgcaaggatgaccctggcccatgaccagcatcctggggacggcctgcaccctctgcccgccttggggtctgctgggctgtgaaggagaataaagagttaaactgtcagaa

SEQ ID NO: 229990 - DNA, 3361 bp, Artificial Sequence
  derived and/or modified sequence
agccgtaagggaagccgtgatgagggccgtgttgacgtggagagataaagccgagcactgtataaatgacatcgcatttaagcctgatggaactcaactgattttggctgccggaagcagattactggtttatgacacctctgatggcaccttacttcagcccctcaagggacacaaagacactgtgtactgtgtggcatatgcgaaggatgggttgtggtctcctgaacagaagtctgtctccaaacacaaatcaagcagcaagatcatctgctgcagagaggaacgtaatgacatcctggctgtggctgactggggacagaaagtttccttctaccagctgagtggaaaacagattggaaaggatcgggcactgaactttgacccctgctgcatcagctactttactaaaggcgagtacattttgctggggggttcagacaagcaagtatctcttttcaccaaggatggagtgcggcttgggactgttggggagcagaactcctgggtgtggacgtgtcaagcgaaaccggattccaactatgtggtggtcggctgccaggacggcaccatttccttctaccagcttattttcagcacagtccatgggctttacaaggaccgctatgcctacagggatagcatgactgacgtcattgtgcagcacctgatcactgagcagaaagttcggattaaatgcaaagagcttgtcaagaagattgccatctacagaaatcgattggctatccaactgccagagaaaatcctcatctatgagttgtattcagaggacttatcagacatgcattaccgggtaaaggagaagattatcaagaagtttgagtgcaacctcctggtggtgtgtgccaatcacatcatcctgtgccaggagaaacggctgcagtgcctgtccttcagcggagtgaaggagcgggagtggcagatggagtctctcattcgttacatcaaggtgatcggtggccctcctggaagagaaggcctcttagtggggctgaagaatggacagatcctgaagatcttcgtggacaatctctttgctatcgtcctgctgaagcaggccacagctgtgcgctgcttggacatgagtgcctcccgtaagaagctggccgtggtagatgaaaatgacacttgcctggtgtatgacatcgacaccaaggagctgctttttcaggaaccaaacgccaacagtgtagcttggaacacccagtgtgaggacatgctctgcttctcgggaggaggctacctcaacatcaaagccagcaccttccctgtgcaccggcagaagctgcagggctttgtggtcggctacaatggctccaagatcttctgcctccatgtcttctccatttctgccgtggaggtgccgcagtccgctcccatgtaccagtacctggataggaaactgttcaaggaagcctaccagattgcttgcttgggtgtcacagacactgattggcgtgaactggccatggaagcgctagaaggtttagattttgaaacagcaaagaaggccttcatcagagtacaagacctccgatatttagagctcatcagcagcattgaggagaggaagaagcggggagagaccaacaatgacctgtttctggcagatgtgttttcctaccaggggaagttccatgaggccgccaaactgtacaagaggagtgggcacgagaacctcgcgcttgaaatgtacaccgacctctgcatgtttgagtatgccaaggatttccttggatctggagaccccaaagaaacaaagatgctaatcaccaaacaggctgactgggccagaaatatcaaggagcccaaagccgccgtggagatgtacatctcagcaggagagcacgtcaaggccatcgagatctgtggtgaccatggctgggttgacatgttgatcgacatcgcccgcaaactggacaaggctgagcgcgagcccctgctgctgtgcgctacctacctcaagaagctggacagccctggctatgctgctgagacctacctgaagatgggtgacctcaagtccctggtgcagctgcacgtggagacccagcgctgggatgaggcctttgctttgggtgagaagcatcctgagtttaaggatgacatctacatgccgtatgctcagtggctagcagagaacgatcgctttgaggaagcccagaaagcgttccacaaggctgggcgacagagagaagcggtccaggtgctggagcagctcacaaacaatgccgtggcggagagcaggtttaatgatgctgcctattattactggatgctgtccatgcagtgcctcgatatagctcaagcagatcctgcccagaaggacacaatgcttggcaagttctaccacttccagcgtttggcagagctgtaccatggttaccatgccatccatcgccacacggaagatccgttcagtgtccatcgtcctgaaactcttttcaacatctccaggttcctgctgcacagcctgcccaaggacaccccctcgggcatctctaaagtcaggaaaatactcttcaccttggccaagcagagcaaggccctcggtgcctacaggctggcccggcacgcctatgacaagctgcgtggcctgtacatccctgccagattccaaaagtccattgagctgggtaccctgaccatccgcgccaagcccttccacgacagtgaggagttggtgcccttgtgctaccgctgctccaccaacaacccgctgctcaacaacctgggcaacgtctgcatcaactgccgccagcccttcatcttctccgcctcttcctacgacgtgctacacctggttgagttctacctggaggaagggatcactgatgaagaagccatctccctcatcgacctggaggtgctgagacccaagcgggatgacagacagctagagattgcaaacaacagctcccagattctgcggctagtggagaccaaggactccatcggagatgaggacccgttcacagctaagctgagctttgagcaaggtggctcagagttcgtgccagtggtggtgagccggctggtgctgcgctccatgagccgccgggatgtcctcatcaagcgatggcccccacccctgaggtggcaatacttccgctcactgctgcctgacgcctccattaccatgtgcccctcctgcttccagatgttccattctgaggactatgagttgctggtgcttcagcatggctgctgcccctactgccgcaggtgcaaggatgaccctggcccatgaccagcatcctggggacggcctgcaccctctgcccgccttggggtctgctgggctgtgaaggagaataaagagttaaactgtcagaatgtg

SEQ ID NO: 229991 - DNA, 3541 bp, Artificial Sequence
  derived and/or modified sequence
aaagtggcttgtggagtggcgaccgttagtgaggcggttgctgagacagacgctgaggcgggtaggaggagcccgagccgtaagggaagccgtgatgagggccgtgttgacgtggagagataaagccgagcactgtataaatgacatcgcatttaagcctgatggaactcaactgattttggctgccggaagcagattactggtttatgacacctctgatggcaccttacttcagcccctcaagggacacaaagacactgtgtactgtgtggcatatgcgaaggatgtattgtgcattgaagggttgtggtctcctgaacagaagtctgtctccaaacacaaatcaagcagcaagatcatctgctgcagctggacaaatgatggtcagtacctggcgctggggatgttcaatgggatcatcagcatacggaacaaaaatggcgaggagaaagtaaagatcgagcggccggggggctccctctcgccaatatggtccatctgctggaacccttcaagagaggaacgtaatgacatcctggctgtggctgactggggacagaaagtttccttctaccagctgagtggaaaacagattggaaaggatcgggcactgaactttgacccctgctgcatcagctactttactaaaggcgagtacattttgctggggggttcagacaagcaagtatctcttttcaccaaggatggagtgcggcttgggactgttggggagcagaactcctgggtgtggacgtgtcaagcgaaaccggattccaactatgtggtggtcggctgccaggacggcaccatttccttctaccagcttattttcagcacagtccatgggctttacaaggaccgctatgcctacagggatagcatgactgacgtcattgtgcagcacctgatcactgagcagaaagttcggattaaatgcaaagagcttgtcaagaagattgccatctacagaaatcgattggctatccaactgccagagaaaatcctcatctatgagttgtattcagaggacttatcagacatgcattaccgggtaaaggagaagattatcaagaagtttgagtgcaacctcctggtggtgtgtgccaatcacatcatcctgtgccaggagaaacggctgcagtgcctgtccttcagcggagtgaaggagcgggagtggcagatggagtctctcattcgttacatcaaggtgatcggtggccctcctggaagagaaggcctcttagtggggctgaagaatggacagatcctgaagatcttcgtggacaatctctttgctatcgtcctgctgaagcaggccacagctgtgcgctgcttggacatgagtgcctcccgtaagaagctggccgtggtagatgaaaatgacacttgcctggtgtatgacatcgacaccaaggagctgctttttcaggaaccaaacgccaacagtgtagcttggaacacccagtgtgaggacatgctctgcttctcgggaggaggctacctcaacatcaaagccagcaccttccctgtgcaccggcagaagctgcagggctttgtggtcggctacaatggctccaagatcttctgcctccatgtcttctccatttctgccgtggaggtgccgcagtccgctcccatgtaccagtacctggataggaaactgttcaaggaagcctaccagattgcttgcttgggtgtcacagacactgattggcgtgaactggccatggaagcgctagaaggtttagattttgaaacagcaaagaaggagaggaagaagcggggagagaccaacaatgacctgtttctggcagatgtgttttcctaccaggggaagttccatgaggccgccaaactgtacaagaggagtgggcacgagaacctcgcgcttgaaatgtacaccgacctctgcatgtttgagtatgccaaggatttccttggatctggagaccccaaagaaacaaagatgctaatcaccaaacaggctgactgggccagaaatatcaaggagcccaaagccgccgtggagatgtacatctcagcaggagagcacgtcaaggccatcgagatctgtggtgaccatggctgggttgacatgttgatcgacatcgcccgcaaactggacaaggctgagcgcgagcccctgctgctgtgcgctacctacctcaagaagctggacagccctggctatgctgctgagacctacctgaagatgggtgacctcaagtccctggtgcagctgcacgtggagacccagcgctgggatgaggcctttgctttgggtgagaagcatcctgagtttaaggatgacatctacatgccgtatgctcagtggctagcagagaacgatcgctttgaggaagcccagaaagcgttccacaaggctgggcgacagagagaagcggtccaggtgctggagcagctcacaaacaatgccgtggcggagagcaggtttaatgatgctgcctattattactggatgctgtccatgcagtgcctcgatatagctcaagcagatcctgcccagaaggacacaatgcttggcaagttctaccacttccagcgtttggcagagctgtaccatggttaccatgccatccatcgccacacggaagatccgttcagtgtccatcgtcctgaaactcttttcaacatctccaggttcctgctgcacagcctgcccaaggacaccccctcgggcatctctaaagtgaaaatactcttcaccttggccaagcagagcaaggccctcggtgcctacaggctggcccggcacgcctatgacaagctgcgtggcctgtacatccctgccagattccaaaagtccattgagctgggtaccctgaccatccgcgccaagcccttccacgacagtgaggagttggtgcccttgtgctaccgctgctccaccaacaacccgctgctcaacaacctgggcaacgtctgcatcaactgccgccagcccttcatcttctccgcctcttcctacgacgtgctacacctggttgagttctacctggaggaagggatcactgatgaagaagccatctccctcatcgacctggaggtgctgagacccaagcgggatgacagacagctagagattgcaaacaacagctcccagattctgcggctagtggagaccaaggactccatcggagatgaggacccgttcacagctaagctgagctttgagcaaggtggctcagagttcgtgccagtggtggtgagccggctggtgctgcgctccatgagccgccgggatgtcctcatcaagcgatggcccccacccctgaggtggcaatacttccgctcactgctgcctgacgcctccattaccatgtgcccctcctgcttccagatgttccattctgaggactatgagttgctggtgcttcagcatggctgctgcccctactgccgcaggtgcaaggatgaccctggcccatgaccagcatcctggggacggcctgcaccctctgcccgccttggggtctgctgggctgtgaaggagaataaagagttaaactgtcagaatgtg

SEQ ID NO: 229992 - DNA, 3396 bp, Artificial Sequence
  derived and/or modified sequence
atgagagctgtgctgacctggagggacaaggccgagcactgcatcaatgacatcgccttcaagccagatggcacccagctgatcctggccgccggcagccggctgctggtgtatgacaccagtgatggcaccctgctgcagcccctgaagggccacaaggacacagtgtactgtgtggcctatgccaaggatggcctgtggagccctgagcagaagtctgtgtccaagcacaagagcagcagcaagatcatctgctgctcctggaccaatgatggccagtacctggccctgggcatgtttaatggcatcatcagcatccggaacaagaatggagaggagaaggtgaagattgaaagacctgggggcagcctgagccccatctggagcatctgctggaaccccagccgggaggagagaaatgacatcctggccgtggccgactggggccagaaggtgtccttctaccagctgagcggcaagcagatcggcaaggaccgggccctgaactttgacccctgctgcatctcctacttcaccaagggggagtacatcctgctgggcggcagtgacaagcaggtgtccctcttcaccaaggatggagtgcggctgggcaccgtgggggagcagaacagctgggtgtggacctgccaggccaagccagacagcaactacgtggtggtgggctgccaggacggcaccatctccttctaccagctgatcttcagcacagtgcacggcctgtacaaggacagatatgcctacagagacagcatgacagatgtgattgtgcagcacctgatcacagagcagaaggtgcgcatcaagtgcaaggagctggtgaagaagatcgccatctacagaaaccggctggccatccagctgcctgagaagatcctgatctatgagctgtacagcgaggacctgagtgacatgcactacagagtgaaggagaagatcatcaagaagtttgagtgcaacctgctggtggtgtgtgccaaccacatcatcctgtgccaggagaagaggctgcagtgcctgtccttctctggagtgaaggagcgggagtggcagatggagagcctcatccgctacatcaaggtgattggaggccccccaggccgggagggcctgctggtgggcctgaagaatggccagatcctgaagatctttgtggacaacctgtttgccatcgtgctgctgaagcaggccacagctgtgcgctgcctggacatgtctgccagcaggaagaagctggccgtggtggatgaaaatgacacctgcctggtgtatgacatcgacaccaaggagctgctcttccaggagcccaatgccaacagcgtggcctggaacacccagtgtgaggacatgctgtgcttcagcggcggcggctacctgaacatcaaggccagcaccttccctgtgcaccggcagaagctgcagggctttgtggtgggctacaacggcagcaagatcttctgcctgcacgtgttcagcatctctgctgtggaggtgccccagagcgcccccatgtaccagtacctggacaggaagctgttcaaggaggcctaccagatcgcctgcctgggcgtgacagacacagactggagggagctggccatggaggccctggagggcctggactttgaaacagccaagaaggccttcatccgggtgcaggacctgcgctacctggagctgatcagcagcattgaggagaggaagaagagaggagagaccaacaatgacctcttcctggctgatgtgttctcctaccagggcaagttccacgaggccgccaagctgtacaagaggagcggccacgagaacctggccctggagatgtacacagacctgtgcatgtttgaatatgccaaggacttcctgggcagcggggaccccaaggagaccaagatgctgatcaccaagcaggccgactgggccaggaacatcaaggagcccaaggctgctgtggagatgtacatctctgctggggagcacgtgaaggccatcgagatctgtggggaccacggctgggtggacatgctgattgatattgccaggaagctggacaaggccgagcgggagcccctgctgctgtgtgccacctacctgaagaagctggacagccctggctatgctgctgagacctacctgaagatgggagacctgaagagcctggtgcagctgcacgtggagacccagcgctgggatgaggcctttgccctgggggagaagcaccctgagttcaaggatgacatctacatgccctatgcccagtggctggctgaaaatgacagatttgaggaggcccagaaggccttccacaaggccggccggcagcgggaggccgtgcaggtgctggagcagctgaccaacaatgctgtggccgagagccgcttcaatgatgctgcctactactactggatgctgtccatgcagtgcctggacatcgcccaggccgaccctgcccagaaggacaccatgctgggcaagttctaccacttccagaggctggccgagctgtaccacggctaccacgccatccaccgccacacagaggaccccttctctgtgcacaggcctgagaccctcttcaacatcagccgcttcctgctgcacagcctgcccaaggacaccccatctggcatcagcaaggtgaagatcctcttcaccctggccaagcagagcaaggccctgggcgcctaccgcctggcccggcatgcctatgacaagctgcggggcctgtacatcccagcccgcttccagaagagcattgagctgggcaccctgaccatccgggccaagcccttccatgacagcgaggagctggtgcccctgtgctaccgctgcagcaccaacaaccccctgctgaacaacctgggcaatgtgtgcatcaactgccggcagcccttcatcttcagcgccagcagctatgatgtgctgcacctggtggagttctacctggaggagggcatcacagatgaggaggccatcagcctgattgacctggaggtgctgcggcccaagagagatgaccggcagctggagatcgccaacaacagcagccagatcctgcggctggtggagaccaaggacagcattggagatgaggaccccttcaccgccaagctgagctttgagcagggcggcagcgagtttgtgcctgtggtggtgtcccggctggtgctgcgctccatgagcagaagagatgtgctgatcaagcgctggcccccacccctgcgctggcagtacttccgcagcctgctgcctgatgccagcatcaccatgtgccccagctgcttccagatgttccacagtgaagattatgagctgctggtgctgcagcacggctgctgcccctactgccgccgctgcaaggatgatcctggcccctag

SEQ ID NO: 229993 - DNA, 3252 bp, Artificial Sequence
  derived and/or modified sequence
atgagagctgtgctgacctggagggacaaggccgagcactgcatcaatgacatcgccttcaagccagatggcacccagctgatcctggccgccggcagccggctgctggtgtatgacaccagtgatggcaccctgctgcagcccctgaagggccacaaggacacagtgtactgtgtggcctatgccaaggatggcctgtggagccctgagcagaagtctgtgtccaagcacaagagcagcagcaagatcatctgctgccgggaggagagaaatgacatcctggccgtggccgactggggccagaaggtgtccttctaccagctgagcggcaagcagatcggcaaggaccgggccctgaactttgacccctgctgcatctcctacttcaccaagggggagtacatcctgctgggcggcagtgacaagcaggtgtccctcttcaccaaggatggagtgcggctgggcaccgtgggggagcagaacagctgggtgtggacctgccaggccaagccagacagcaactacgtggtggtgggctgccaggacggcaccatctccttctaccagctgatcttcagcacagtgcacggcctgtacaaggacagatatgcctacagagacagcatgacagatgtgattgtgcagcacctgatcacagagcagaaggtgcgcatcaagtgcaaggagctggtgaagaagatcgccatctacagaaaccggctggccatccagctgcctgagaagatcctgatctatgagctgtacagcgaggacctgagtgacatgcactacagagtgaaggagaagatcatcaagaagtttgagtgcaacctgctggtggtgtgtgccaaccacatcatcctgtgccaggagaagaggctgcagtgcctgtccttcagcggcgtgaaggagcgggagtggcagatggagagcctcatccgctacatcaaggtgattggaggccccccaggccgggagggcctgctggtgggcctgaagaatggccagatcctgaagatctttgtggacaacctgtttgccatcgtgctgctgaagcaggccacagctgtgcgctgcctggacatgtctgccagcaggaagaagctggccgtggtggatgaaaatgacacctgcctggtgtatgacatcgacaccaaggagctgctcttccaggagcccaatgccaacagcgtggcctggaacacccagtgtgaggacatgctgtgcttcagcggcggcggctacctgaacatcaaggccagcaccttccctgtgcaccggcagaagctgcagggctttgtggtgggctacaacggcagcaagatcttctgcctgcacgtgttcagcatctctgctgtggaggtgccccagagcgcccccatgtaccagtacctggacaggaagctgttcaaggaggcctaccagatcgcctgcctgggcgtgacagacacagactggagggagctggccatggaggccctggagggcctggactttgaaacagccaagaaggccttcatccgggtgcaggacctgcgctacctggagctgatcagcagcattgaggagaggaagaagagaggagagaccaacaatgacctcttcctggctgatgtgttctcctaccagggcaagttccatgaagctgccaagctgtacaagaggagcggccacgagaacctggccctggagatgtacacagacctgtgcatgtttgaatatgccaaggacttcctgggcagcggggaccccaaggagaccaagatgctgatcaccaagcaggccgactgggccaggaacatcaaggagcccaaggctgctgtggagatgtacatctctgctggggagcacgtgaaggccatcgagatctgtggggaccacggctgggtggacatgctgattgacatcgccaggaagctggacaaggccgagcgggagcccctgctgctgtgtgccacctacctgaagaagctggacagccctggctacgccgctgagacctacctgaagatgggagacctgaagagcctggtgcagctgcacgtggagacccagcgctgggatgaggcctttgccctgggggagaagcaccctgagttcaaggatgacatctacatgccctatgcccagtggctggccgagaatgacagatttgaggaggcccagaaggccttccacaaggccggccggcagcgggaggccgtgcaggtgctggagcagctgaccaacaatgctgtggccgagagccgcttcaatgatgctgcctactactactggatgctgtccatgcagtgcctggacatcgcccaggccgaccctgcccagaaggacaccatgctgggcaagttctaccacttccagaggctggccgagctgtaccacggctaccacgccatccaccgccacacagaggaccccttctctgtgcacaggcctgagaccctcttcaacatcagccgcttcctgctgcacagcctgcccaaggacacccccagcggcatcagcaaggtgaggaagatcctcttcaccctggccaagcagagcaaggccctgggcgcctaccgcctggcccggcatgcctatgacaagctgcggggcctgtacatcccagcccgcttccagaagagcattgagctgggcaccctgaccatccgggccaagcccttccatgacagcgaggagctggtgcccctgtgctaccgctgcagcaccaacaaccccctgctgaacaacctgggcaatgtgtgcatcaactgccggcagcccttcatcttcagcgccagcagctatgatgtgctgcacctggtggagttctacctggaggagggcatcacagatgaggaggccatcagcctgattgacctggaggtgctgcggcccaagagagatgaccggcagctggagatcgccaacaacagcagccagatcctgcggctggtggagaccaaggacagcattggagatgaggaccccttcaccgccaagctgagctttgagcagggcggcagcgagtttgtgcctgtggtggtgtcccggctggtgctgcgctccatgagcagaagagatgtgctgatcaagcgctggcccccacccctgcgctggcagtacttccgcagcctgctgcctgatgccagcatcaccatgtgccccagctgcttccagatgttccacagtgaagattatgagctgctggtgctgcagcacggctgctgcccctactgccgccgctgcaaggatgatcctggcccctag

SEQ ID NO: 229994 - DNA, 3357 bp, Artificial Sequence
  derived and/or modified sequence
atgagagctgtgctgacctggagggacaaggccgagcactgcatcaatgacatcgccttcaagccagatggcacccagctgatcctggccgccggcagccggctgctggtgtatgacaccagtgatggcaccctgctgcagcccctgaagggccacaaggacacagtgtactgtgtggcctatgccaaggatgtgctgtgcatcgagggcctgtggagccctgagcagaagtctgtgtccaagcacaagagcagcagcaagatcatctgctgctcctggaccaatgatggccagtacctggccctgggcatgttcaacggcatcatcagcatccggaacaagaatggagaggagaaggtgaagattgaaagacctgggggcagcctgagccccatctggagcatctgctggaaccccagccgggaggagagaaatgacatcctggccgtggccgactggggccagaaggtgtccttctaccagctgagcggcaagcagatcggcaaggaccgggccctgaactttgacccctgctgcatctcctacttcaccaagggggagtacatcctgctgggcggcagtgacaagcaggtgtccctcttcaccaaggatggagtgcggctgggcaccgtgggggagcagaacagctgggtgtggacctgccaggccaagccagacagcaactacgtggtggtgggctgccaggacggcaccatctccttctaccagctgatcttcagcacagtgcacggcctgtacaaggacagatatgcctacagagacagcatgacagatgtgattgtgcagcacctgatcacagagcagaaggtgcgcatcaagtgcaaggagctggtgaagaagatcgccatctacagaaaccggctggccatccagctgcctgagaagatcctgatctatgagctgtacagcgaggacctgagtgacatgcactacagagtgaaggagaagatcatcaagaagtttgagtgcaacctgctggtggtgtgtgccaaccacatcatcctgtgccaggagaagaggctgcagtgcctgtccttcagcggcgtgaaggagcgggagtggcagatggagagcctcatccgctacatcaaggtgattggaggccccccaggccgggagggcctgctggtgggcctgaagaatggccagatcctgaagatctttgtggacaacctgtttgccatcgtgctgctgaagcaggccacagctgtgcgctgcctggacatgtctgccagcaggaagaagctggccgtggtggatgaaaatgacacctgcctggtgtatgacatcgacaccaaggagctgctcttccaggagcccaatgccaacagcgtggcctggaacacccagtgtgaggacatgctgtgcttcagcggcggcggctacctgaacatcaaggccagcaccttccctgtgcaccggcagaagctgcagggctttgtggtgggctacaacggcagcaagatcttctgcctgcacgtgttcagcatctctgctgtggaggtgccccagagcgcccccatgtaccagtacctggacaggaagctgttcaaggaggcctaccagatcgcctgcctgggcgtgacagacacagactggagggagctggccatggaggccctggagggcctggactttgaaacagccaagaaggagaggaagaagagaggagagaccaacaatgacctcttcctggctgatgtgttctcctaccagggcaagttccatgaagctgccaagctgtacaagaggagcggccacgagaacctggccctggagatgtacacagacctgtgcatgtttgaatatgccaaggacttcctgggcagcggggaccccaaggagaccaagatgctgatcaccaagcaggccgactgggccaggaacatcaaggagcccaaggctgctgtggagatgtacatctctgctggggagcacgtgaaggccatcgagatctgtggggaccacggctgggtggacatgctgattgacatcgccaggaagctggacaaggccgagcgggagcccctgctgctgtgtgccacctacctgaagaagctggacagccctggctacgccgctgagacctacctgaagatgggagacctgaagagcctggtgcagctgcacgtggagacccagcgctgggatgaggcctttgccctgggggagaagcaccctgagttcaaggatgacatctacatgccctatgcccagtggctggccgagaatgacagatttgaggaggcccagaaggccttccacaaggccggccggcagcgggaggccgtgcaggtgctggagcagctgaccaacaatgctgtggccgagagccgcttcaatgatgctgcctactactactggatgctgtccatgcagtgcctggacatcgcccaggccgaccctgcccagaaggacaccatgctgggcaagttctaccacttccagaggctggccgagctgtaccacggctaccacgccatccaccgccacacagaggaccccttctctgtgcacaggcctgagaccctcttcaacatcagccgcttcctgctgcacagcctgcccaaggacacccccagcggcatcagcaaggtgaagatcctcttcaccctggccaagcagagcaaggccctgggcgcctaccgcctggcccggcatgcctatgacaagctgcggggcctgtacatcccagcccgcttccagaagagcattgagctgggcaccctgaccatccgggccaagcccttccatgattctgaggagctggtgcccctgtgctaccgctgcagcaccaacaaccccctgctgaacaacctgggcaatgtgtgcatcaactgccggcagcccttcatcttcagcgccagcagctatgatgtgctgcacctggtggagttctacctggaggagggcatcacagatgaggaggccatcagcctgattgacctggaggtgctgcggcccaagagagatgaccggcagctggagatcgccaacaacagcagccagatcctgcggctggtggagaccaaggacagcattggagatgaggaccccttcaccgccaagctgagctttgagcagggcggcagcgagtttgtgcctgtggtggtgtcccggctggtgctgcgctccatgagcagaagagatgtgctgatcaagcgctggcccccacccctgcgctggcagtacttccgcagcctgctgcctgatgccagcatcaccatgtgccccagctgcttccagatgttccacagcgaggactatgagctgctggtgctgcagcacggctgctgcccctactgccgccgctgcaaggatgaccccggcccctag

SEQ ID NO: 229995 - DNA, 3396 bp, Artificial Sequence
  derived and/or modified sequence
atgcgggccgtgctgacctggcgggacaaggccgagcactgcatcaatgatattgcattcaaacccgacggaacccaactcattctggccgcaggtagcagactcctcgtctacgatacttccgatggaaccctacttcagcctctgaagggacacaaagacactgtttattgcgttgcatacgcaaaggatgggctctggtcgcctgaacaaaagtccgtgtccaagcacaagtcctcttccaaaataatttgctgctcttggacgaacgacggtcagtaccttgctcttggaatgttcaacggtattatcagcatcaggaacaaaaacggggaggagaaggtgaagattgagagaccgggtggcagtctgagtccaatctggtccatctgctggaatccatcgcgcgaagagcggaacgatatcctggctgtcgccgactgggggcaaaaagtctccttttatcagctctccggaaagcagatcggtaaggacagggcactgaactttgatccctgttgtatctcatacttcaccaagggtgaatacatcctactgggaggctctgacaagcaggtatccttgtttaccaaggatggggtacgactcggcaccgttggcgaacaaaatagttgggtttggacttgccaagccaagcccgatagcaattacgtggtggtgggatgccaggacgggacgatcagtttctatcaactgattttcagcaccgtccatggactttataaagaccgctatgcttatcgcgattcaatgacagacgttattgtgcagcatctgattacagaacagaaggttcgaattaagtgtaaagaactggtcaagaagatagcaatctaccggaaccgattagcaatccaattgcccgagaaaatcctcatctacgaattatacagtgaagatctatcagatatgcactacagggtcaaggaaaaaattatcaaaaaattcgagtgtaaccttctagtcgtttgcgccaatcatataattctgtgccaggaaaagagacttcagtgcctgtctttttccggcgtgaaagaacgagaatggcaaatggagtcactgattcgctacattaaagtcattggcggcccacccggcagagaagggctgctcgttggactgaaaaacggccaaatcctcaaaatctttgtcgataacctgtttgcgattgtgctactgaaacaggccactgctgtccgttgcttggacatgtccgcttcacgaaaaaagctggccgttgtcgacgaaaatgacacctgtctggtttacgacattgatacaaaggagctgctgtttcaggagcctaacgcaaactctgtggcatggaatactcagtgtgaggatatgctgtgtttctcagggggcggatacctcaatattaaagcatccacgttccctgttcatcggcaaaagttgcaggggtttgtggtgggttacaacggatccaagatattctgtcttcacgtatttagcatcagcgcagtggaggtgccacagagtgctcccatgtatcagtacttagataggaagctcttcaaggaggcttaccagatcgcctgtttgggagtaacagacacagactggagggagttagccatggaagcgttagaggggctcgatttcgagacagctaagaaagcttttatacgggtgcaggacttgagatacctcgagttgataagcagcattgaagagaggaagaaacggggtgaaactaacaacgacttgtttctggccgatgtgttctcctatcagggaaaattccacgaggcggcgaagctctataagaggagtggccacgagaatctggctctggagatgtataccgacttatgcatgtttgagtacgccaaggactttctgggctcaggcgacccaaaagaaaccaagatgctgattactaagcaagccgattgggctaggaatattaaggagcccaaagcagctgtcgaaatgtatattagtgctggagagcatgtcaaagccatcgaaatttgtggagatcatggatgggtggacatgcttattgatatcgcccgcaaactggataaagccgagcgcgagcctctgctcttatgcgcaacttacttgaaaaagcttgattcacctgggtacgcagccgaaacttatctaaaaatgggcgacctcaagagcttggtgcagttgcatgtggagacgcagcgctgggatgaggctttcgccttgggtgagaaacaccccgaattcaaagatgacatctatatgccttatgctcagtggctcgcagagaatgataggttcgaggaggctcagaaggctttccacaaggcaggcagacagcgcgaggccgttcaggtcttggagcagctgaccaataatgccgtggccgaaagccggttcaacgatgccgcttactactactggatgttaagcatgcagtgccttgacatcgctcaggccgaccctgctcagaaggatacaatgctgggcaaattttaccactttcagaggttggcggaactctaccacggttaccacgccatccaccggcacacagaagatccattttctgttcaccgtcccgaaacactattcaatatcagccgcttccttctgcatagtttgccaaaggatacaccaagtgggatatctaaagttaagatcctgtttaccctggccaagcagtccaaggccctgggggcctacaggctggctcgccatgcttatgataaactgagaggcctgtacatccccgctcgatttcagaaatccattgaactgggcacattgacaatccgggcgaagccctttcacgactctgaggagctcgtccccctgtgctatcggtgtagcacaaacaatcccctccttaacaacctgggaaacgtctgcataaattgtcgacaaccattcattttctctgcctctagctacgacgtattgcacctggttgagttttacttggaagaaggtatcaccgatgaggaagctattagccttattgatttggaggtgttaagacccaaaagggacgacaggcagcttgagatagccaataattcaagccagatcctgaggttggtggaaactaaggattcgataggcgatgaggatccttttaccgctaaactaagttttgagcagggcggcagtgagtttgtacccgtcgtcgtgtcccggctagtcctacggtctatgtctcgccgggacgtcctcatcaagagatggccacccccactgcgatggcaatattttcggtcactgctacctgacgcttcaataaccatgtgtccttcctgtttccagatgttccattctgaggattatgaacttctggttttacagcatggttgttgcccgtattgtcgcaggtgcaaggacgatcccgggccttag

SEQ ID NO: 229996 - DNA, 3252 bp, Artificial Sequence
  derived and/or modified sequence
atgcgggccgtgctgacctggcgggacaaggccgagcactgcatcaacgacatcgctttcaagcctgacggtacccagttaattttagccgcaggatcacggctgcttgtctacgatacctcggatggcaccctacttcaacccctgaaagggcacaaggacacagtctactgcgttgcttacgcaaaggatggattgtggtcaccagagcagaaatctgtgtcaaagcacaaaagttcctccaagataatatgttgcagggaggaaaggaatgatattttggcggtggctgactgggggcaaaaagtgtcattctaccaactttccggtaagcagattggcaaggaccgcgcactgaacttcgatccatgctgtatctcttatttcacaaagggcgagtacatcctgctggggggttctgacaaacaagttagcctgtttacgaaagacggcgttcggctcggcactgtgggcgaacagaattcctgggtttggacctgccaggcaaaacctgactcgaattacgtcgtggtgggctgccaggacgggaccatcagcttctaccagttaatcttcagtaccgtgcacgggttatataaggatcgttatgcctatcgggacagtatgaccgacgtgatcgtgcagcacctcatcaccgaacagaaagtaaggattaagtgcaaggagcttgtgaagaagattgctatctaccgtaaccgcttggcaatccaactccctgagaagatcttgatatatgaactgtactctgaagatctgagcgatatgcactatcgagtgaaggagaagattatcaagaaattcgaatgcaatttactcgtcgtgtgtgccaatcacataattttgtgtcaagagaaacgtctgcagtgtctgtcttttagtggtgtcaaagagcgcgaatggcagatggagtcccttatcagatatattaaagtcatcggtgggcctcccggccgggagggcctccttgttggcttgaagaacggccagatattgaagatcttcgtggacaacctgtttgccatagttctgctcaaacaggccactgccgtcaggtgcctagacatgtccgccagtagaaaaaagctcgcagtggttgatgagaacgacacctgtctggtgtacgacattgacaccaaagaactactgttccaggagccaaacgctaatagcgtggcttggaacacacaatgcgaggatatgctgtgcttttcggggggaggctatctgaacatcaaagctagtacatttccggttcaccgccaaaagctgcaggggtttgtggttggctataatggatcaaagatcttttgcctgcacgttttctccatttcagctgtcgaggtaccacagtccgcaccaatgtaccagtacttggatcgaaaacttttcaaggaggcttatcagatcgcttgcctgggcgtaacagatactgactggagggaactggctatggaagctctggaaggactcgacttcgagaccgctaagaaggcgttcatcagggtccaagatttgcggtacctcgagctcatcagttccatcgaagagcggaaaaagcgaggcgaaaccaacaatgatctttttctcgctgacgtgtttagctaccaaggcaagttccacgaggcggccaagttgtacaaaaggtcaggtcatgaaaacttagccctcgagatgtacacggacctctgcatgttcgagtacgccaaagacttcttaggctcgggagatcctaaggagaccaaaatgttgattactaagcaagctgattgggcccggaacattaaggaacctaaggccgctgtggagatgtacatctccgccggggagcacgtcaaggcgatagaaatctgtggggaccacggctgggtggatatgctgatcgatatcgctcgtaagctcgataaagctgagcgcgagcccctactgctctgcgccacatacctgaagaagctggattcacccggctacgcagccgaaacataccttaaaatgggggatctcaagagtttagttcagctgcacgtggaaactcagagatgggacgaggcgtttgccctgggggagaagcacccagagtttaaggatgacatctatatgccctatgcacaatggctggccgaaaatgatcgatttgaagaggctcaaaaggcctttcacaaggcaggtcggcaaagggaggccgtgcaggttctggaacaactcaccaataacgcggtggctgagagtagatttaacgacgcagcttattactactggatgctttccatgcagtgtctcgacatcgctcaggccgatcccgcccaaaaagataccatgctagggaagttttatcattttcagaggctggccgaactgtaccatggatatcatgctatccaccgccacacagaagatcctttctccgtgcacagaccagaaactctctttaatatttcccgatttttactgcacagcctgcctaaggacacgccatcagggatctcaaaggtgaggaaaatcttattcactctcgccaagcagagcaaggcccttggggcatacagacttgcgaggcacgcctatgacaaactgcgcggcttgtacattccagccagatttcagaagagcatcgagctggggacattgaccatccgggccaagccattccacgactccgaggagctggtcccgctttgctacaggtgctctaccaacaatcctctgctgaataatctaggaaatgtgtgtatcaattgtcgccagccattcatcttttctgccagctcatacgacgtgctgcatctggtggaattctatctggaggagggcatcacagacgaggaggctatctcattaatcgacctggaggtgctgaggccaaaacgtgatgacaggcagcttgagatcgctaataattcttctcagatcctgcgcctggtggaaaccaaagactctatcggagacgaagacccttttaccgcgaagctcagtttcgaacagggcggtagcgagtttgtgccagttgtggtgtcccggcttgtactgcgctccatgtccaggcgcgatgtcctcattaaaaggtggcctccccctctgcggtggcagtactttcgctccctcctcccagacgcttcaataaccatgtgcccatcctgtttccaaatgtttcattcagaggactatgagctgctcgtgttacagcacggctgttgcccttattgccggcgatgcaaggacgatccaggaccttag

SEQ ID NO: 229997 - DNA, 3357 bp, Artificial Sequence
  derived and/or modified sequence
atgcgggccgtgctgacctggcgggacaaggccgagcactgcatcaatgacatagccttcaaacctgatgggacccagctgatcttagccgctggctctcgactcctagtttatgatacaagtgacggaacactattgcagcccctcaaaggacacaaggataccgtctactgtgtcgcttacgctaaggatgtgctctgcatcgaaggcctttggtctccggaacagaagtcagtcagtaagcacaaaagttcttccaaaatcatctgttgcagttggacaaatgatggccaatacctggccctcggtatgtttaatggaatcatttccatccgcaataagaatggggaagaaaaagtgaagattgaacggcccggtggctctctgagcccgatctggtcaatatgttggaatccctcaagagaagagcgcaacgatattctcgccgtggccgactgggggcaaaaggtaagcttctatcagttgtcaggcaaacaaatcggaaaggaccgggccctgaacttcgacccctgctgcatatcttatttcaccaagggcgaatacattctcctgggtgggagcgataagcaagtttccctgttcactaaagacggtgtacggcttgggactgtcggtgaacagaactcgtgggtatggacatgtcaggcgaagccagacagtaattatgtggtggttggttgtcaggatggtacaatctccttttatcagctaattttttctaccgtgcacggactgtataaggatcggtacgcctacagggattctatgacggacgtcatagttcaacatctgataaccgaacaaaaggtgagaattaaatgtaaagagctggtcaaaaagatcgcaatttacagaaatcggttagccatacagttgcctgaaaagattctgatctacgaactgtactctgaggaccttagcgacatgcattatcgtgtaaaggaaaagatcattaagaaattcgagtgcaatctgctggtggtgtgcgctaatcatattatcctttgccaagagaaaagactccagtgcctttcgttttcaggcgtcaaggaaagggaatggcaaatggagagtctgatccggtatatcaaagtcattgggggccctcctgggcgggaggggctgctggtggggttgaaaaatggccagatcctgaaaatatttgtcgacaacctgtttgcaatagtgcttctaaaacaggcaacagcagtacgctgcttagatatgagtgcatctcgcaagaagcttgcagttgtagatgagaacgacacttgtctggtttacgacatagatacaaaggagctcctgttccaagagccgaacgctaacagtgtagcatggaatacacagtgtgaggatatgctgtgcttcagcggaggtggttatttaaatattaaagcctcgactttcccagtccacagacagaagctgcaaggattcgtggtgggttacaacggctccaagatcttttgtctccatgtgttttccattagtgctgtggaggtcccacaaagtgctcctatgtaccagtatctcgaccgaaaactctttaaagaggcctaccagattgcgtgtttaggggtcacggacaccgattggcgggaacttgccatggaagcccttgagggacttgattttgaaaccgccaaaaaggagcggaagaaaagaggcgagaccaacaatgatctgttcctggccgatgtgttctcctaccaggggaaattccatgaggccgcaaagttgtataagcgcagtggtcacgaaaatctggccctcgagatgtacaccgatctctgcatgttcgaatacgccaaagacttccttggatcaggagacccaaaagagacaaagatgttgatcacgaagcaagcggactgggcccgcaatatcaaggaaccaaaggccgccgtcgaaatgtatatttcagcaggagaacacgtaaaagcaattgaaatatgtggagatcatggctgggtggacatgcttatcgacattgcaagaaaattagacaaagctgagagggagccattgctcctctgtgcgacatatctgaaaaaactggactcccctggctatgccgctgaaacataccttaagatgggtgatttgaagagcttggtccagttgcatgtcgagacacaacgatgggatgaggcatttgccctcggtgagaagcaccctgaatttaaagatgacatctacatgccatacgctcagtggctagcggagaatgataggttcgaggaagctcagaaggcttttcacaaagcgggccgtcaacgggaggctgtgcaggtactggagcagctgaccaacaatgctgtggcagagagtcgctttaacgacgctgcttattactattggatgctgtcgatgcagtgtctggatatcgcccaggcagatcctgcccaaaaggacacaatgctggggaagttctaccacttccagcgtttggccgaactgtaccacggctaccatgcgatccaccgacataccgaggatccttttagtgtgcatcggcctgagacattgttcaacatcagtaggttccttctgcactcactgcccaaagatacaccttccggtatcagcaaggtgaagatcctcttcactctggcgaagcagtctaaagccttgggggcgtacagactggctaggcatgcctatgacaagttacggggtctgtatatccccgcaaggtttcagaaatccatagagctgggcaccctgacgatccgcgccaagccattccacgacagtgaagagttggttcccctctgttaccgttgttcgaccaacaatccactcctgaacaatctgggcaacgtttgcataaactgtaggcagccattcatcttctccgctagtagctatgacgtgctacatctggtggaattttatcttgaggagggtatcaccgacgaggaggcaatttccctcatcgatctcgaggttctgaggcccaagagggacgataggcagctggaaatcgcgaataactcaagccagatattaagactggtcgaaaccaaggactcaattggagatgaagatcctttcacagcaaagctatcattcgagcaggggggctcagaattcgtccccgtcgtagtgtcgaggctcgtcctccggtccatgagtcgtagagatgtgcttatcaagcgatggccaccaccactacgctggcagtacttccggtctttgttacctgatgcctccatcaccatgtgtccctcctgtttccaaatgtttcactcagaagattacgaactgttggttctccaacatgggtgctgcccttactgtcggcgctgcaaagacgaccctggcccatag

SEQ ID NO: 229998 - DNA, 3396 bp, Artificial Sequence
  derived and/or modified sequence
atgcgcgcagtgctgacatggagagataaagctgaacattgtatcaatgacatagccttcaagcccgacgggacccaactaattcttgccgcaggaagcaggctgcttgtttatgatacatctgatggcacattactacagcctctgaaaggtcacaaagacactgtttactgtgtcgcttacgcaaaggacgggctctggtcccccgagcagaaaagtgtgtcaaaacacaaaagctccagcaaaataatctgctgtagctggacaaacgatggtcagtacctggcattgggtatgtttaatgggatcataagcatccggaataaaaacggggaggagaaagtgaaaatagagagacccggtggctcccttagcccaatctggagcatttgctggaatccgtctcgggaggaacggaatgacatcctcgctgtcgcagattggggccagaaagtgagtttttaccagctgtctggtaagcagatcgggaaagacagagctctgaacttcgacccctgctgcatcagctattttactaaaggagaatacatactgttggggggttctgataagcaggtttcactatttaccaaagacggggtgcgcttggggaccgttggcgagcagaactcatgggtttggacgtgccaggcaaagccagatagtaattacgtggtggtcggctgccaagatggtactatctctttttatcagttaatattctccactgtccacgggctttataaagatagatatgcataccgggacagcatgaccgacgtcatagtacagcaccttatcactgagcagaaagttcgcattaagtgcaaggagttagtgaaaaagattgcaatatacagaaataggctcgctatccaattgccagaaaagatcctcatttacgagctgtatagcgaggacttgagcgacatgcattaccgggtaaaggagaagatcatcaagaagtttgagtgtaatttactggtggtgtgcgcaaatcacatcatcctgtgccaagaaaagcggctgcaatgtctttcttttagtggggtaaaggaaagggaatggcagatggagagcctgattaggtacattaaggtgatagggggtcccccagggcgagaaggcctgctggtgggtctgaagaatggtcaaatcctcaagattttcgtcgataacctctttgcaattgtgctgctgaaacaggccacggctgtcaggtgcttggacatgagcgcctcccggaagaaattggcagtagtggatgaaaatgacacttgtctcgtctacgatatcgataccaaagagctcctctttcaggaacctaatgccaatagcgtggcctggaacactcagtgtgaggatatgttgtgtttctctggaggcggatatctgaacatcaaagcgagtaccttccctgtgcaccgccaaaaactgcaggggttcgtggtgggctacaacggatccaagatattctgtctgcacgtgttcagcattagcgccgttgaggttccacaaagcgcgccaatgtatcagtatttggatagaaagctgttcaaagaagcctaccagattgcatgcctgggtgtgaccgacacagattggagggaactggccatggaggctcttgaaggactggatttcgagacagctaagaaggctttcattagagtccaagacttacggtacctggagctgatctcttccatcgaagagaggaagaagaggggagaaacaaataacgatctgtttctggcagatgtgttttcctatcagggcaaattccacgaagccgctaagctatacaaaagaagcggacatgagaacctagcccttgaaatgtatacagacctatgtatgttcgagtatgcaaaagacttcctggggtccggagaccccaaggagacaaagatgctgataaccaagcaggccgattgggcgagaaatatcaaagagcccaaggcagccgtggagatgtacattagtgctggagagcatgtgaaggctatcgagatctgcggggaccacgggtgggtagacatgcttattgatatcgccaggaaactagataaggcggagcgggaacccctgcttctgtgtgcgacttacctcaaaaagctggacagccccggatatgctgctgaaacctatctgaagatgggcgatttaaaatcccttgtgcaactccatgtggagacccagcgctgggatgaagcttttgctttgggggagaaacatcccgaattcaaggatgacatttatatgccatacgcgcagtggctcgcagaaaatgacagattcgaggaggcgcagaaagctttccacaaagcaggccgtcagcgcgaagcagtgcaggtgctcgaacagctgaccaacaacgcggtggcagagtcaaggttcaacgacgccgcttactattactggatgctatccatgcagtgcttagatatcgcccaggcagatccagcccagaaggatacaatgttggggaagttctaccactttcaaaggttagcggagctttaccacggatatcacgccattcataggcatactgaagacccgttttctgttcaccgcccagagaccctgtttaatatctccagattcttgctgcactccctaccgaaggacactcccagcggaatctcaaaggtgaagattctgttcaccttagcaaaacagagcaaggccctgggtgcatatcggcttgcacgccatgcatacgacaagctgagagggctgtacatccccgcacggttccagaagtccatcgaacttggaaccctaactatcagagcaaagccatttcacgattccgaggaacttgttcccctgtgctaccgatgctctacaaacaacccactactgaacaatttgggaaatgtctgcattaactgccggcagccgttcattttctccgcttcctcttacgacgtgctgcacctcgtagagttctacctcgaggagggtatcactgacgaagaagcgatttctctaatcgacttagaagtgctgagacccaaacgcgacgacaggcagctcgaaatcgcgaataatagcagtcagattcttcgtctcgtcgagacaaaggactcgattggcgatgaggaccccttcacagccaagctgtcctttgagcaaggcggttcagagttcgtgccagtggtcgtatctcgcttagtattacgttcaatgagccgaagagatgtgctcatcaagcgatggccacccccactacggtggcagtatttcaggtcgctcctgccagacgcctcaataacaatgtgtccatcttgctttcagatgttccattcagaggactatgaacttctagttttgcaacatggctgctgtccctactgtcgacggtgcaaagatgatcctggtccctag

SEQ ID NO: 229999 - DNA, 3252 bp, Artificial Sequence
  derived and/or modified sequence
atgcgggcagtgctgacgtggagagataaggccgagcattgtattaatgacattgccttcaagccagatggcacccagctgatactagccgctggatccaggctgctggtatacgataccagtgacgggacactgctccagccacttaagggccacaaggatacggtgtactgcgtggcctacgccaaggacggcctttggtcacctgagcagaagtctgtctctaaacacaagtctagctctaagataatctgctgcagggaggagaggaacgacattctggctgttgcagactggggccaaaaggtgtcgttttatcagctctccggaaagcaaatcggaaaggaccgcgctctgaattttgacccctgctgtatctcctattttacaaaaggagaatacatcctgttgggcggatctgacaagcaggtgtctctgttcaccaaggacggtgtccgactggggaccgtgggagaacagaactcctgggtgtggacttgtcaggcgaaacccgatagtaattacgtggtggtaggctgtcaggacggcaccatctctttctaccaactgatcttcagtaccgtccatggtctatacaaagatagatacgcataccgagacagcatgactgacgtgatcgtccagcacctcatcactgagcaaaaggtgcgcattaagtgtaaggaactggtgaagaaaatcgccatatatcggaatcggttagcaatccaacttcctgagaaaattcttatatacgaattgtattccgaggacctgagcgacatgcattacagagtgaaagaaaagatcattaagaaattcgagtgcaatcttctggtggtctgcgctaatcacatcatcctctgccaggagaaacgattgcagtgtctgtcatttagcggcgtaaaggagcgcgaatggcagatggaatctctcatccggtacataaaagtgatcgggggaccccctggtagagaaggtctgctagtaggactgaaaaatggacagattctgaagattttcgtcgataacctttttgccatcgtcctactcaagcaagcaaccgctgttagatgcttggacatgtcagcaagtcgcaagaagctggccgttgtggacgaaaatgatacctgcctcgtgtatgacattgacaccaaggagctcctatttcaagaacccaacgcaaacagcgttgcttggaatacacagtgcgaagacatgctttgtttctctggtggaggttacctgaatattaaggcctcaactttccccgttcaccggcagaagttacagggcttcgtggtggggtacaacggctcaaagatcttctgcctgcacgtgtttagcatcagcgctgtggaggtgccccagtccgctcccatgtatcagtatctcgatcgcaagctcttcaaggaggcctaccagatcgcgtgtttaggggtcaccgataccgactggcgggagttggcaatggaggcccttgaaggcttggactttgagaccgccaaaaaagcctttatacgagtgcaggatcttcgttatttggaactgattagttccatcgaagaacggaaaaagaggggcgaaacaaataatgacctgtttctggcagatgtgttctcctaccaggggaagtttcacgaggcggcaaagctgtacaagagatctggccacgaaaacctcgccctggagatgtacacagacctatgtatgtttgagtatgcaaaagatttcctgggctcaggcgatccaaaggagaccaagatgctgattactaagcaggcagactgggccaggaacatcaaagagcctaaggccgcagtggaaatgtacattagtgccggtgaacacgtgaaagccatcgagatttgcggcgatcatggctgggtggacatgctaatcgacatagctcggaaattagataaagccgagcgagagccgctgttactgtgcgctacctacctcaagaaactggattctcccggttacgcggcagagacttatctgaagatgggagatctgaagtcactcgtgcaactgcatgtggagactcaacgttgggacgaagcgttcgccctcggagagaaacatccagagtttaaggatgacatatacatgccctacgcccagtggttggccgagaacgatcggtttgaagaggctcagaaagccttccacaaggccggtcggcaacgggaagccgttcaggttctggagcagctgacgaacaatgcagtggctgagtctcgcttcaatgacgcggcttattattactggatgctcagtatgcagtgcttggatatcgcccaggccgatcctgcccagaaagatacgatgttgggcaagttttaccactttcagaggctcgccgagctttatcatgggtaccacgccatccaccgtcacacggaggacccattctccgtccatagacctgagacactcttcaatatctcccggtttttattgcacagtctccccaaagatacccctagcgggataagcaaagtgaggaagattctctttactctggccaaacaatccaaagccctcggcgcatatcgactcgcaaggcatgcttatgacaaattacgcggtctctacataccagcgaggtttcagaaatccattgagctggggacgttgaccattagagccaaaccatttcacgacagtgaggagctcgtgcctctctgttaccggtgttcaactaataaccccttactgaataatctcggcaatgtctgcatcaattgtaggcagccctttatcttcagtgctagctcttacgacgtcctacaccttgtggagttttatctggaggagggaatcaccgacgaagaggcaatctcccttattgatctcgaagtactccggcctaagcgggacgatcgtcaactggagatcgcaaataactcgagtcagattctaagactcgtggagactaaagattctatcggcgacgaagacccattcacggcaaagctgtcatttgagcaaggcggatcagaattcgtcccggttgtggttagccgcctcgtgctccggagtatgtcacgccgagacgtgctcataaaacgatggcctccaccgctaaggtggcagtactttcgtagcctgctccctgacgcttctattactatgtgccccagctgtttccagatgtttcattcagaggactatgaactgttagtacttcagcacggttgctgcccttattgtaggagatgcaaggatgatcctggtccgtag

SEQ ID NO: 230000 - DNA, 3357 bp, Artificial Sequence
  derived and/or modified sequence
atgcgcgctgttttaacttggagagacaaggccgagcactgtataaatgacattgctttcaaacctgacggaacacagctcatcctcgccgctgggagtcgactactggtctatgatacctctgatggaactctcctgcaaccattaaaggggcacaaagatacggtttactgcgtggcctacgctaaagatgttctatgtatcgaagggctctggagccctgagcagaagagcgttagcaagcataagtcaagctcaaaaatcatatgctgcagttggacgaatgatggccagtacctggccctcggcatgtttaatggtataatatctattcgcaataagaacggagaagagaaagttaagatagagcgtcctggcggtagtctgtcacctatatggagtatctgctggaatcccagtcgtgaggaacggaatgatatcctggcggtggccgactggggccagaaagtctctttttaccagctgtccggtaaacaaatcggaaaagaccgggcactgaacttcgacccctgttgtatctcatatttcacaaagggtgaatacattctgttgggcggtagtgacaagcaggtgagtctcttcactaaggacggagttaggttgggcacagtgggcgagcagaattcctgggtgtggacgtgccaggccaagcctgattctaactatgtagtggtgggatgtcaggacggaactatttcattctaccagctaatcttcagcacagttcacggcctctataaggatagatacgcctatagggacagcatgactgatgtcatagtgcagcatcttatcacagagcagaaggtccgcatcaaatgtaaagagctggtaaagaagattgccatctacaggaacaggctggccatacaactcccagaaaaaatcttaatctacgagctttactctgaagatctcagcgacatgcactatagggtgaaagagaagattataaagaaatttgagtgtaatctgcttgtggtctgcgccaaccacataatcctgtgtcaggagaaaagactgcagtgcctctcattttccggagtcaaggagcgagagtggcagatggagtctctaatccgatacattaaggtcatcggtgggcctcctggaagagaaggcctgctcgtgggacttaaaaacggccagatactcaaaatcttcgtggataatttattcgctatcgtgctcctgaaacaggcaactgctgtgaggtgcttggacatgtcagcctccagaaaaaagctggctgtagtggatgagaacgatacgtgcttggtttatgacatcgacacaaaggaattactatttcaagaacccaatgccaactcggtggcttggaacactcagtgcgaagacatgctctgcttttctggcggtggttatcttaatattaaggctagtacattcccagtacacagacaaaagttgcaaggatttgtggttggatataatggaagtaagatcttctgcctgcatgtattttctatctctgctgtggaggtgccacagtcagcccctatgtatcagtaccttgataggaaactctttaaggaggcctatcagatcgcctgtctgggggttacagatacagactggagggagctcgccatggaagccctcgagggtctggacttcgaaaccgcaaaaaaagagcggaaaaagcgcggtgagacgaacaacgatctctttttggcagacgtgttctcgtatcagggtaaattccacgaggcggctaaactgtacaaacgctcgggtcacgagaacctcgctttagagatgtacactgatctgtgcatgtttgagtacgctaaagactttttggggagcggtgatccgaaggagacaaagatgttgatcaccaagcaggccgattgggcgaggaacatcaaagagccaaaggcggcagtggaaatgtacatctccgctggggagcatgtaaaggcaatcgagatatgcggagaccacgggtgggtggatatgctgattgatatcgccaggaagctcgataaagctgagcgcgagcctctccttctgtgtgcgacatacttgaagaagctggacagtcctggatacgccgcagagacatacctgaagatgggagacctgaagagcctcgtccagcttcacgtggagacccagcggtgggatgaagccttcgcgctaggagagaagcaccctgagttcaaagatgacatatatatgccctacgcacagtggctggccgaaaatgatcggtttgaggaagctcagaaggctttccacaaggccggtcggcagcgggaggctgtgcaggtgctggaacagctgacaaacaatgctgtggcagaaagccgctttaacgatgcagcctactactactggatgttatcgatgcagtgtctcgatatagcccaggccgatccggcacagaaggacacaatgctgggtaagttttaccatttccagaggttggcggagctttaccacggataccatgcaatccaccgccacacagaagatcccttctctgtccaccgaccggaaactctgtttaacatctctcgattcctgctgcattccctgcccaaggacaccccgtcgggaattagcaaagtgaagattctttttaccctggctaagcaatcaaaggccttaggagcttacaggctcgcacgccacgcatacgataaactgcgtggtctgtatatccctgccaggtttcaaaagtcgattgaactgggtacattgaccattagggccaagcctttccacgatagcgaggaattggttccgctgtgctaccgttgcagtacgaataatccgttacttaataatctgggcaacgtgtgtattaactgtaggcaaccttttatcttctccgctagctcgtacgacgtgttacatctagtggagttctatcttgaagagggaattactgacgaagaggccatcagtctcatagatttggaagttctccgaccgaagcgcgatgaccgccagctcgagatcgccaataatagtagccaaattctgcgccttgtcgagactaaagatagtatcggagacgaggatccgttcaccgcgaagctgagtttcgagcaaggagggagcgagtttgtgccagtggtggtgagccgcctcgttctcaggtcgatgtccaggagggacgtgctaatcaagcgctggccgccacctttgcggtggcagtatttcaggagcttgctgcccgacgccagcattacgatgtgtccaagctgtttccagatgtttcattccgaagattacgaacttttagtgctgcagcacggctgctgtccttactgcagaagatgcaaggacgatccaggcccttag

SEQ ID NO: 230001 - DNA, 3396 bp, Artificial Sequence
  derived and/or modified sequence
atgagagccgtgctgacctggagagacaaggccgagcactgcatcaacgacatcgccttcaagcccgacggcacccagctgatcctggccgccggcagcagactgctggtgtacgacaccagcgacggcaccctgctgcagcccctgaagggccacaaggacaccgtgtactgcgtggcctacgccaaggacggcctgtggagccccgagcagaagagcgtgagcaagcacaagagcagcagcaagatcatctgctgcagctggaccaacgacggccagtacctggccctgggcatgttcaacggcatcatcagcatcagaaacaagaacggcgaggagaaggtgaagatcgagagacccggcggcagcctgagccccatctggagcatctgctggaaccccagcagagaggagagaaacgacatcctggccgtggccgactggggccagaaggtgagcttctaccagctgagcggcaagcagatcggcaaggacagagccctgaacttcgacccctgctgcatcagctacttcaccaagggcgagtacatcctgctgggcggcagcgacaagcaggtgagcctgttcaccaaggacggcgtgagactgggcaccgtgggcgagcagaacagctgggtgtggacctgccaggccaagcccgacagcaactacgtggtggtgggctgccaggacggcaccatcagcttctaccagctgatcttcagcaccgtgcacggcctgtacaaggacagatacgcctacagagacagcatgaccgacgtgatcgtgcagcacctgatcaccgagcagaaggtgagaatcaagtgcaaggagctggtgaagaagatcgccatctacagaaacagactggccatccagctgcccgagaagatcctgatctacgagctgtacagcgaggacctgagcgacatgcactacagagtgaaggagaagatcatcaagaagttcgagtgcaacctgctggtggtgtgcgccaaccacatcatcctgtgccaggagaagagactgcagtgcctgagcttcagcggcgtgaaggagagagagtggcagatggagagcctgatcagatacatcaaggtgatcggcggcccccccggcagagagggcctgctggtgggcctgaagaacggccagatcctgaagatcttcgtggacaacctgttcgccatcgtgctgctgaagcaggccaccgccgtgagatgcctggacatgagcgccagcagaaagaagctggccgtggtggacgagaacgacacctgcctggtgtacgacatcgacaccaaggagctgctgttccaggagcccaacgccaacagcgtggcctggaacacccagtgcgaggacatgctgtgcttcagcggcggcggctacctgaacatcaaggccagcaccttccccgtgcacagacagaagctgcagggcttcgtggtgggctacaacggcagcaagatcttctgcctgcacgtgttcagcatcagcgccgtggaggtgccccagagcgcccccatgtaccagtacctggacagaaagctgttcaaggaggcctaccagatcgcctgcctgggcgtgaccgacaccgactggagagagctggccatggaggccctggagggcctggacttcgagaccgccaagaaggccttcatcagagtgcaggacctgagatacctggagctgatcagcagcatcgaggagagaaagaagagaggcgagaccaacaacgacctgttcctggccgacgtgttcagctaccagggcaagttccacgaggccgccaagctgtacaagagaagcggccacgagaacctggccctggagatgtacaccgacctgtgcatgttcgagtacgccaaggacttcctgggcagcggcgaccccaaggagaccaagatgctgatcaccaagcaggccgactgggccagaaacatcaaggagcccaaggccgccgtggagatgtacatcagcgccggcgagcacgtgaaggccatcgagatctgcggcgaccacggctgggtggacatgctgatcgacatcgccagaaagctggacaaggccgagagagagcccctgctgctgtgcgccacctacctgaagaagctggacagccccggctacgccgccgagacctacctgaagatgggcgacctgaagagcctggtgcagctgcacgtggagacccagagatgggacgaggccttcgccctgggcgagaagcaccccgagttcaaggacgacatctacatgccctacgcccagtggctggccgagaacgacagattcgaggaggcccagaaggccttccacaaggccggcagacagagagaggccgtgcaggtgctggagcagctgaccaacaacgccgtggccgagagcagattcaacgacgccgcctactactactggatgctgagcatgcagtgcctggacatcgcccaggccgaccccgcccagaaggacaccatgctgggcaagttctaccacttccagagactggccgagctgtaccacggctaccacgccatccacagacacaccgaggaccccttcagcgtgcacagacccgagaccctgttcaacatcagcagattcctgctgcacagcctgcccaaggacacccccagcggcatcagcaaggtgaagatcctgttcaccctggccaagcagagcaaggccctgggcgcctacagactggccagacacgcctacgacaagctgagaggcctgtacatccccgccagattccagaagagcatcgagctgggcaccctgaccatcagagccaagcccttccacgacagcgaggagctggtgcccctgtgctacagatgcagcaccaacaaccccctgctgaacaacctgggcaacgtgtgcatcaactgcagacagcccttcatcttcagcgccagcagctacgacgtgctgcacctggtggagttctacctggaggagggcatcaccgacgaggaggccatcagcctgatcgacctggaggtgctgagacccaagagagacgacagacagctggagatcgccaacaacagcagccagatcctgagactggtggagaccaaggacagcatcggcgacgaggaccccttcaccgccaagctgagcttcgagcagggcggcagcgagttcgtgcccgtggtggtgagcagactggtgctgagaagcatgagcagaagagacgtgctgatcaagagatggcccccccccctgagatggcagtacttcagaagcctgctgcccgacgccagcatcaccatgtgccccagctgcttccagatgttccacagcgaggactacgagctgctggtgctgcagcacggctgctgcccctactgcagaagatgcaaggacgaccccggcccctag

SEQ ID NO: 230002 - DNA, 3252 bp, Artificial Sequence
  derived and/or modified sequence
atgagagccgtgctgacctggagagacaaggccgagcactgcatcaacgacatcgccttcaagcccgacggcacccagctgatcctggccgccggcagcagactgctggtgtacgacaccagcgacggcaccctgctgcagcccctgaagggccacaaggacaccgtgtactgcgtggcctacgccaaggacggcctgtggagccccgagcagaagagcgtgagcaagcacaagagcagcagcaagatcatctgctgcagagaggagagaaacgacatcctggccgtggccgactggggccagaaggtgagcttctaccagctgagcggcaagcagatcggcaaggacagagccctgaacttcgacccctgctgcatcagctacttcaccaagggcgagtacatcctgctgggcggcagcgacaagcaggtgagcctgttcaccaaggacggcgtgagactgggcaccgtgggcgagcagaacagctgggtgtggacctgccaggccaagcccgacagcaactacgtggtggtgggctgccaggacggcaccatcagcttctaccagctgatcttcagcaccgtgcacggcctgtacaaggacagatacgcctacagagacagcatgaccgacgtgatcgtgcagcacctgatcaccgagcagaaggtgagaatcaagtgcaaggagctggtgaagaagatcgccatctacagaaacagactggccatccagctgcccgagaagatcctgatctacgagctgtacagcgaggacctgagcgacatgcactacagagtgaaggagaagatcatcaagaagttcgagtgcaacctgctggtggtgtgcgccaaccacatcatcctgtgccaggagaagagactgcagtgcctgagcttcagcggcgtgaaggagagagagtggcagatggagagcctgatcagatacatcaaggtgatcggcggcccccccggcagagagggcctgctggtgggcctgaagaacggccagatcctgaagatcttcgtggacaacctgttcgccatcgtgctgctgaagcaggccaccgccgtgagatgcctggacatgagcgccagcagaaagaagctggccgtggtggacgagaacgacacctgcctggtgtacgacatcgacaccaaggagctgctgttccaggagcccaacgccaacagcgtggcctggaacacccagtgcgaggacatgctgtgcttcagcggcggcggctacctgaacatcaaggccagcaccttccccgtgcacagacagaagctgcagggcttcgtggtgggctacaacggcagcaagatcttctgcctgcacgtgttcagcatcagcgccgtggaggtgccccagagcgcccccatgtaccagtacctggacagaaagctgttcaaggaggcctaccagatcgcctgcctgggcgtgaccgacaccgactggagagagctggccatggaggccctggagggcctggacttcgagaccgccaagaaggccttcatcagagtgcaggacctgagatacctggagctgatcagcagcatcgaggagagaaagaagagaggcgagaccaacaacgacctgttcctggccgacgtgttcagctaccagggcaagttccacgaggccgccaagctgtacaagagaagcggccacgagaacctggccctggagatgtacaccgacctgtgcatgttcgagtacgccaaggacttcctgggcagcggcgaccccaaggagaccaagatgctgatcaccaagcaggccgactgggccagaaacatcaaggagcccaaggccgccgtggagatgtacatcagcgccggcgagcacgtgaaggccatcgagatctgcggcgaccacggctgggtggacatgctgatcgacatcgccagaaagctggacaaggccgagagagagcccctgctgctgtgcgccacctacctgaagaagctggacagccccggctacgccgccgagacctacctgaagatgggcgacctgaagagcctggtgcagctgcacgtggagacccagagatgggacgaggccttcgccctgggcgagaagcaccccgagttcaaggacgacatctacatgccctacgcccagtggctggccgagaacgacagattcgaggaggcccagaaggccttccacaaggccggcagacagagagaggccgtgcaggtgctggagcagctgaccaacaacgccgtggccgagagcagattcaacgacgccgcctactactactggatgctgagcatgcagtgcctggacatcgcccaggccgaccccgcccagaaggacaccatgctgggcaagttctaccacttccagagactggccgagctgtaccacggctaccacgccatccacagacacaccgaggaccccttcagcgtgcacagacccgagaccctgttcaacatcagcagattcctgctgcacagcctgcccaaggacacccccagcggcatcagcaaggtgagaaagatcctgttcaccctggccaagcagagcaaggccctgggcgcctacagactggccagacacgcctacgacaagctgagaggcctgtacatccccgccagattccagaagagcatcgagctgggcaccctgaccatcagagccaagcccttccacgacagcgaggagctggtgcccctgtgctacagatgcagcaccaacaaccccctgctgaacaacctgggcaacgtgtgcatcaactgcagacagcccttcatcttcagcgccagcagctacgacgtgctgcacctggtggagttctacctggaggagggcatcaccgacgaggaggccatcagcctgatcgacctggaggtgctgagacccaagagagacgacagacagctggagatcgccaacaacagcagccagatcctgagactggtggagaccaaggacagcatcggcgacgaggaccccttcaccgccaagctgagcttcgagcagggcggcagcgagttcgtgcccgtggtggtgagcagactggtgctgagaagcatgagcagaagagacgtgctgatcaagagatggcccccccccctgagatggcagtacttcagaagcctgctgcccgacgccagcatcaccatgtgccccagctgcttccagatgttccacagcgaggactacgagctgctggtgctgcagcacggctgctgcccctactgcagaagatgcaaggacgaccccggcccctag

SEQ ID NO: 230003 - DNA, 3357 bp, Artificial Sequence
  derived and/or modified sequence
atgagagccgtgctgacctggagagacaaggccgagcactgcatcaacgacatcgccttcaagcccgacggcacccagctgatcctggccgccggcagcagactgctggtgtacgacaccagcgacggcaccctgctgcagcccctgaagggccacaaggacaccgtgtactgcgtggcctacgccaaggacgtgctgtgcatcgagggcctgtggagccccgagcagaagagcgtgagcaagcacaagagcagcagcaagatcatctgctgcagctggaccaacgacggccagtacctggccctgggcatgttcaacggcatcatcagcatcagaaacaagaacggcgaggagaaggtgaagatcgagagacccggcggcagcctgagccccatctggagcatctgctggaaccccagcagagaggagagaaacgacatcctggccgtggccgactggggccagaaggtgagcttctaccagctgagcggcaagcagatcggcaaggacagagccctgaacttcgacccctgctgcatcagctacttcaccaagggcgagtacatcctgctgggcggcagcgacaagcaggtgagcctgttcaccaaggacggcgtgagactgggcaccgtgggcgagcagaacagctgggtgtggacctgccaggccaagcccgacagcaactacgtggtggtgggctgccaggacggcaccatcagcttctaccagctgatcttcagcaccgtgcacggcctgtacaaggacagatacgcctacagagacagcatgaccgacgtgatcgtgcagcacctgatcaccgagcagaaggtgagaatcaagtgcaaggagctggtgaagaagatcgccatctacagaaacagactggccatccagctgcccgagaagatcctgatctacgagctgtacagcgaggacctgagcgacatgcactacagagtgaaggagaagatcatcaagaagttcgagtgcaacctgctggtggtgtgcgccaaccacatcatcctgtgccaggagaagagactgcagtgcctgagcttcagcggcgtgaaggagagagagtggcagatggagagcctgatcagatacatcaaggtgatcggcggcccccccggcagagagggcctgctggtgggcctgaagaacggccagatcctgaagatcttcgtggacaacctgttcgccatcgtgctgctgaagcaggccaccgccgtgagatgcctggacatgagcgccagcagaaagaagctggccgtggtggacgagaacgacacctgcctggtgtacgacatcgacaccaaggagctgctgttccaggagcccaacgccaacagcgtggcctggaacacccagtgcgaggacatgctgtgcttcagcggcggcggctacctgaacatcaaggccagcaccttccccgtgcacagacagaagctgcagggcttcgtggtgggctacaacggcagcaagatcttctgcctgcacgtgttcagcatcagcgccgtggaggtgccccagagcgcccccatgtaccagtacctggacagaaagctgttcaaggaggcctaccagatcgcctgcctgggcgtgaccgacaccgactggagagagctggccatggaggccctggagggcctggacttcgagaccgccaagaaggagagaaagaagagaggcgagaccaacaacgacctgttcctggccgacgtgttcagctaccagggcaagttccacgaggccgccaagctgtacaagagaagcggccacgagaacctggccctggagatgtacaccgacctgtgcatgttcgagtacgccaaggacttcctgggcagcggcgaccccaaggagaccaagatgctgatcaccaagcaggccgactgggccagaaacatcaaggagcccaaggccgccgtggagatgtacatcagcgccggcgagcacgtgaaggccatcgagatctgcggcgaccacggctgggtggacatgctgatcgacatcgccagaaagctggacaaggccgagagagagcccctgctgctgtgcgccacctacctgaagaagctggacagccccggctacgccgccgagacctacctgaagatgggcgacctgaagagcctggtgcagctgcacgtggagacccagagatgggacgaggccttcgccctgggcgagaagcaccccgagttcaaggacgacatctacatgccctacgcccagtggctggccgagaacgacagattcgaggaggcccagaaggccttccacaaggccggcagacagagagaggccgtgcaggtgctggagcagctgaccaacaacgccgtggccgagagcagattcaacgacgccgcctactactactggatgctgagcatgcagtgcctggacatcgcccaggccgaccccgcccagaaggacaccatgctgggcaagttctaccacttccagagactggccgagctgtaccacggctaccacgccatccacagacacaccgaggaccccttcagcgtgcacagacccgagaccctgttcaacatcagcagattcctgctgcacagcctgcccaaggacacccccagcggcatcagcaaggtgaagatcctgttcaccctggccaagcagagcaaggccctgggcgcctacagactggccagacacgcctacgacaagctgagaggcctgtacatccccgccagattccagaagagcatcgagctgggcaccctgaccatcagagccaagcccttccacgacagcgaggagctggtgcccctgtgctacagatgcagcaccaacaaccccctgctgaacaacctgggcaacgtgtgcatcaactgcagacagcccttcatcttcagcgccagcagctacgacgtgctgcacctggtggagttctacctggaggagggcatcaccgacgaggaggccatcagcctgatcgacctggaggtgctgagacccaagagagacgacagacagctggagatcgccaacaacagcagccagatcctgagactggtggagaccaaggacagcatcggcgacgaggaccccttcaccgccaagctgagcttcgagcagggcggcagcgagttcgtgcccgtggtggtgagcagactggtgctgagaagcatgagcagaagagacgtgctgatcaagagatggcccccccccctgagatggcagtacttcagaagcctgctgcccgacgccagcatcaccatgtgccccagctgcttccagatgttccacagcgaggactacgagctgctggtgctgcagcacggctgctgcccctactgcagaagatgcaaggacgaccccggcccctag

SEQ ID NO: 230004 - protein, 120 aa, Artificial Sequence
  derived and/or modified sequence
MQALQQQPVFPDLLKAIPVSIHVNVILFSAILIVLTMVGTAFFMYNAFGKPFETLHGPLGLYLLSFISGSCGCLVMILFASEVKIHHLSEKIANYKEGTYVYKTQSEKYTTSFWLTKGHS

SEQ ID NO: 230005 - protein, 115 aa, Artificial Sequence
  derived and/or modified sequence
MQALQQQPVFPDLLKAIPVSIHVNVILFSAILIVLTMVGTAFFMYNAFGKPFETLHGPLGLYLLSFISGSCGCLVMILFASEVKIHHLSEKIANYKEGTYVYKTQSEKYTTSFWV

SEQ ID NO: 230006 - DNA, 363 bp, Artificial Sequence
  derived and/or modified sequence
atgcaggctctacagcagcagccggtcttccctgatctcctgaaagcaatccctgtcagtatacatgttaatgtgatcctgttctccgccatcttgattgtgctgactatggtggggactgctttctttatgtacaacgcattcggaaagccttttgagacgctgcatggtcccctgggcttataccttttgagcttcatctcagggtcctgtggatgcctcgtcatgatcctctttgcttccgaggtcaagattcatcatctctctgagaaaattgccaactataaagagggtacttatgtctataagacacagtcagagaaatacaccacttccttttggctgaccaaaggccatagttag

SEQ ID NO: 230007 - DNA, 348 bp, Artificial Sequence
  derived and/or modified sequence
atgcaggcattgcagcagcagcccgtcttccccgatcttttgaaggccatccccgtgagcatccatgtgaatgtgatactcttcagcgctattctgatcgtcctgactatggtggggacggctttcttcatgtataacgcctttggaaaaccgtttgagactttacatggacccctggggctgtacttgctatcttttatttcgggctcctgcggctgtctcgtaatgatcctgttcgcatcggaagtgaagatccaccatctttcagaaaaaatcgctaactataaggaggggacctatgtctataaaacacaatcggaaaagtatacaaccagcttctgggtctag

SEQ ID NO: 230008 - DNA, 363 bp, Artificial Sequence
  derived and/or modified sequence
atgcaggccctgcagcagcagcccgtcttcccagacctgctgaaggccatccctgtgtccatccacgtgaatgtcatcctcttcagcgccatcctgattgtgctgaccatggtgggcacagccttcttcatgtacaatgccttcggcaagccctttgagaccctgcacggccccctgggcctgtacctgctgtccttcatcagcggcagctgtggctgcctggtgatgatcctgtttgccagcgaggtgaagatccaccacctgtctgagaagatcgccaactacaaggagggcacctacgtgtacaagacccagagcgagaagtacaccaccagcttctggctgaccaagggccacagctag

SEQ ID NO: 230009 - DNA, 348 bp, Artificial Sequence
  derived and/or modified sequence
atgcaggccctgcagcagcagcccgtcttcccagacctgctgaaggccatccctgtgtccatccacgtgaatgtcatcctcttcagcgccatcctgattgtgctgaccatggtgggcacagccttcttcatgtacaatgccttcggcaagccctttgagaccctgcacggccccctgggcctgtacctgctgtccttcatcagcggcagctgtggctgcctggtgatgatcctgtttgccagcgaggtgaagatccaccacctgtctgagaagatcgccaactacaaggagggcacctacgtgtacaagacccagagcgagaagtacaccaccagcttctgggtgtag

SEQ ID NO: 230010 - DNA, 363 bp, Artificial Sequence
  derived and/or modified sequence
atgcaggccctgcagcagcagcccgtgttccccgacctgctgaaggccattcctgtaagtatccacgttaacgtcatactctttagtgcaatcttaattgttttgaccatggtggggacagcctttttcatgtacaacgcattcggcaagcctttcgagactcttcatggacctctaggactatatttgctgtcttttatcagtggatcctgcggctgcctagttatgattttgttcgccagcgaagtgaagatccaccatctctctgagaagatcgccaattacaaagagggaacttacgtgtacaagacacagtcagaaaaatataccacgtcattttggctaactaaaggccattcctag

SEQ ID NO: 230011 - DNA, 348 bp, Artificial Sequence
  derived and/or modified sequence
atgcaggccctgcagcagcagcccgtgttccccgacctgctgaaggcaatccctgtgagtatacacgttaacgtgattctgttttcagctatcctcatcgtccttacaatggtggggactgcgttcttcatgtataatgccttcggcaagcctttcgaaactttgcatggcccgcttggtctgtacctgctcagtttcatatcaggcagctgtggctgtctggtgatgatcttattcgcaagcgaggtgaaaatccaccacctgtctgagaaaattgcaaactataaggaaggtacttacgtgtataaaacccaaagcgagaaatataccacctcattctgggtttag

SEQ ID NO: 230012 - DNA, 363 bp, Artificial Sequence
  derived and/or modified sequence
atgcaggccctgcagcagcagccggtttttcccgatttgcttaaagcgatccccgtcagcatccacgtgaatgtcatactgtttagcgccatactgattgttctgaccatggttggaacagccttcttcatgtacaacgccttcggaaaaccctttgagactctgcacgggcctctcggattgtacctcctctccttcatcagtgggagctgcgggtgtcttgtgatgatcctatttgctagtgaggtgaagatccaccatctaagcgagaagatcgccaattataaagagggaacatacgtatacaagacccagtctgagaaatacactacatccttctggttgacaaaaggacacagttag

SEQ ID NO: 230013 - DNA, 348 bp, Artificial Sequence
  derived and/or modified sequence
atgcaagcgctgcagcagcagccggtgttccctgaccttcttaaagccatccctgtttccattcatgtaaacgttatactcttcagtgccattctaatcgtactcactatggtgggaacggctttttttatgtataatgccttcggtaaaccgttcgagacactacatggcccacttggtctatacttgctctcgttcattagcgggtcctgcgggtgcttggtcatgatattgttcgcctcagaggtgaaaatccatcatctaagcgagaaaattgccaactacaaggagggtacctatgtgtacaaaacacagtctgagaagtacactacatctttctgggtctag

SEQ ID NO: 230014 - DNA, 1444 bp, Artificial Sequence
  derived and/or modified sequence
tgcctccccaccattcaccaggctccactgcactggctcattcctgcctcagttgtgcttcttttccctggaaagttctttctgtagatctttaaagggtgatttccttctcaacattcaggtgtcagctcgtttcactttcctgaccatgcccatccactcagagatcactcaaaatcccattaccctattttatttctccatcatatgtatcactatctgaaactatcttgttgttgatgcaggctattttcttgaccccttcatgggactcccaacaggggtaccccatttactcagcctgccctgctcaacctcttgcaggagggagcacacgagtgaacgagtgcaggaaccagctggctgctttagtgctgtgaggagtaaactccatgcaggccctgcagcagcaaccagtttttccagatttgctcaaagcaatcccagtgagcatccacgtcaatgtcattctcttctctgccatccttattgtgttaaccatggtggggacagccttcttcatgtacaatgcttttggaaaaccttttgaaactctgcatggtcccctagggctgtaccttttgagcttcatttcaggctcctgtggctgtcttgtcatgatattgtttgcctctgaagtgaaaatccatcacctctcagaaaaaattgcaaattataaagaagggacttatgtctacaaaacgcaaagtgaaaaatataccacctcattctggctgactaaaggccacagctgagcctggaactgacccttccttcatcctcaacctgctgtcctccagaaagcaccaaggaaaaagcagagaatgacagcaaacagatcactaggcctctgaccacaggtgctgagtactcagcagccctcatataataggtttgaaagtactccttaaaataaaacactgtttccctttggaactatttacaaggatgaaacaaccgtatacctgagaaataacttgctctggtgtcaattcgctattcgccagcagacatcagaacacaccgagtttccagatgctggtttttccccttaaatcaggaaatacacctggacaatttctagaagactacaattcagtctagccacaaaggggattttttttttttggtaacaggctagagcccggttctgtaagtctttagctgaaatggtccagtacaaaagcactggaaatgagtgggctaggaggacaaggaccgtctcctgcgtgaggagttggttggaggtccccaaggccaggtaccccctgcactcttattggattcctctctgtcttcttggagttttgaaaaactccttcgaacaccaggcttttttctttagaaaacaagtctccaatcgttctctgttccgtagaaagagaaagaaaacctggagcagctgctgaaaaatctaatgaggaactaagaggcaaacccacca

SEQ ID NO: 230015 - DNA, 363 bp, Artificial Sequence
  derived and/or modified sequence
atgcaggccctgcagcagcagcccgtgttccccgacctgctgaaggccatccccgtgagcatccacgtgaacgtgatcctgttcagcgccatcctgatcgtgctgaccatggtgggcaccgccttcttcatgtacaacgccttcggcaagcccttcgagaccctgcacggccccctgggcctgtacctgctgagcttcatcagcggcagctgcggctgcctggtgatgatcctgttcgccagcgaggtgaagatccaccacctgagcgagaagatcgccaactacaaggagggcacctacgtgtacaagacccagagcgagaagtacaccaccagcttctggctgaccaagggccacagctag

SEQ ID NO: 230016 - DNA, 348 bp, Artificial Sequence
  derived and/or modified sequence
atgcaggccctgcagcagcagcccgtgttccccgacctgctgaaggccatccccgtgagcatccacgtgaacgtgatcctgttcagcgccatcctgatcgtgctgaccatggtgggcaccgccttcttcatgtacaacgccttcggcaagcccttcgagaccctgcacggccccctgggcctgtacctgctgagcttcatcagcggcagctgcggctgcctggtgatgatcctgttcgccagcgaggtgaagatccaccacctgagcgagaagatcgccaactacaaggagggcacctacgtgtacaagacccagagcgagaagtacaccaccagcttctgggtgtag

SEQ ID NO: 230017 - protein, 1341 aa, Artificial Sequence
  derived and/or modified sequence
MTKRKKTINLNIQDAQKRTALHWACVNGHEEVVTFLVDRKCQLDVLDGEHRTPLMKALQCHQEACANILIDSGADINLVDVYGNTALHYAVYSEILSVVAKLLSHGAVIEVHNKASLTPLLLSITKRSEQIVEFLLIKNANANAVNKYKCTALMLAVCHGSSEIVGMLLQQNVDVFAADICGVTAEHYAVTCGFHHIHEQIMEYIRKLSKNHQNTNPEGTSAGTPDEAAPLAERTPDTAESLVEKTPDEAAPLVERTPDTAESLVEKTPDEAASLVEGTSDKIQCLEKATSGKFEQSAEETPREITSPAKETSEKFTWPAKGRPRKIAWEKKEDTPREIMSPAKETSEKFTWAAKGRPRKIAWEKKETPVKTGCVARVTSNKTKVLEKGRSKMIACPTKESSTKASANDQRFPSESKQEEDEEYSCDSRSLFESSAKIQVCIPESIYQKVMEINREVEEPPKKPSAFKPAIEMQNSVPNKAFELKNEQTLRADPMFPPESKQKDYEENSWDSESLCETVSQKDVCLPKATHQKEIDKINGKLEESPNKDGLLKATCGMKVSIPTKALELKDMQTFKAEPPGKPSAFEPATEMQKSVPNKALELKNEQTLRADEILPSESKQKDYEENSWDTESLCETVSQKDVCLPKAAHQKEIDKINGKLEGSPVKDGLLKANCGMKVSIPTKALELMDMQTFKAEPPEKPSAFEPAIEMQKSVPNKALELKNEQTLRADEILPSESKQKDYEESSWDSESLCETVSQKDVCLPKATHQKEIDKINGKLEESPDNDGFLKAPCRMKVSIPTKALELMDMQTFKAEPPEKPSAFEPAIEMQKSVPNKALELKNEQTLRADQMFPSESKQKKVEENSWDSESLRETVSQKDVCVPKATHQKEMDKISGKLEDSTSLSKILDTVHSCERARELQKDHCEQRTGKMEQMKKKFCVLKKKLSEAKEIKSQLENQKVKWEQELCSVRLTLNQEEEKRRNADILNEKIREELGRIEEQHRKELEVKQQLEQALRIQDIELKSVESNLNQVSHTHENENYLLHENCMLKKEIAMLKLEIATLKHQYQEKENKYFEDIKILKEKNAELQMTLKLKEESLTKRASQYSGQLKVLIAENTMLTSKLKEKQDKEILEAEIESHHPRLASAVQDHDQIVTSRKSQEPAFHIAGDACLQRKMNVDVSSTIYNNEVLHQPLSEAQRKSKSLKINLNYAGDALRENTLVSEHAQRDQRETQCQMKEAEHMYQNEQDNVNKHTEQQESLDQKLFQLQSKNMWLQQQLVHAHKKADNKSKITIDIHFLERKMQHHLLKEKNEEIFNYNNHLKNRIYQYEKEKAETENS

SEQ ID NO: 230018 - DNA, 4026 bp, Artificial Sequence
  derived and/or modified sequence
atgaccaagcgcaagaagacgataaacttgaacattcaggatgcacagaagcgaaccgccttgcattgggcctgtgtcaatgggcacgaggaagtagtgaccttcctggtagaccggaagtgccaactagatgtgcttgacggcgagcaccgcacaccgctgatgaaggcactgcagtgccaccaggaagcctgtgcaaacatactcatagacagcggagccgacataaacctcgtggatgtttatgggaacacggccctccattacgccgtgtactcggagattctttccgtggttgccaagctgctttcacacggggccgtaatcgaagtccacaataaggccagtttgacacctctccttcttagcatcacgaagaggagcgagcagatcgtcgagttcctcctgattaaaaatgccaatgctaacgcagtgaacaaatataaatgtaccgccctgatgctggctgtatgccatgggtcctctgagatcgtggggatgctcctgcaacagaatgtggacgtcttcgccgcagacatatgcggggtgactgccgaacattatgcagtgacatgcgggttccaccacattcacgagcaaatcatggaatacatccggaagcttagcaaaaaccatcagaacacgaaccccgagggaacttctgcaggcaccccagatgaagccgcccccctcgccgagaggactcctgatacagctgaatcactggtggagaagacacccgatgaagccgcaccgctcgtggagcgtaccccagatactgcagagtctctcgttgaaaagacgccagatgaagccgcatcactcgtcgagggaacgagtgataaaattcagtgcttggagaaggcgacaagcggtaagttcgagcaatccgccgaggaaacccctcgtgagataacaagtccagctaaggagacgagcgaaaagtttacctggcccgcgaaagggcgcccacggaagatcgcttgggagaaaaaagaggatacacctcgagaaatcatgtcacccgctaaggagactagcgagaagttcacatgggccgccaagggtagacccaggaaaattgcttgggagaaaaaggaaacgccagtaaagacaggctgtgttgccagagtcacgagtaacaaaacgaaagtgctggaaaagggcaggagcaaaatgatcgcatgtcccaccaaggagtccagtactaaggcatccgctaacgatcagaggttcccctcagaaagcaagcaggaggaggatgaggaatattcctgcgattcccgctcattattcgagtccagtgcgaaaatccaggtctgcatacccgagagcatttatcagaaggtgatggaaattaatagggaggtggaagaacctcccaagaagccctccgccttcaaaccagctattgagatgcaaaacagcgttccaaacaaagcctttgaactgaaaaacgagcagacacttagagccgacccaatgtttccaccagagtccaaacagaaggattacgaagaaaattcatgggactcagaaagtctgtgcgagacagtatcacagaaagacgtttgccttcctaaggctacacaccagaaggaaatcgacaagataaatggcaaactcgaggaaagcccgaacaaggacggcctcctcaaagccacctgcggtatgaaagttagcatcccaactaaagcccttgaactcaaagatatgcagacgttcaaggcagaaccacctggcaaaccttcagcgtttgaacccgccacagaaatgcagaagagtgtgccgaacaaagcactggaactgaaaaatgagcagactctgcgcgctgacgagatcctaccttctgagtctaaacaaaaggactacgaagagaacagctgggataccgaatctctctgtgaaacagtctcccagaaagacgtgtgcctgccaaaggcggcccaccaaaaagaaattgataaaattaatggaaagctggagggctcccccgtgaaggacgggttgctgaaggcgaattgtggaatgaaggtctcaattccaaccaaggcactggaactgatggacatgcagaccttcaaggcggagcccccagagaagccttccgcctttgaacccgccatagaaatgcagaaaagcgtcccgaacaaggctctcgaactcaaaaacgagcagacccttcgggcggacgagattctgccctccgaatcaaaacaaaaggactatgaggagtcctcttgggactctgagagtctgtgcgagaccgtgagtcagaaagatgtttgtctcccaaaggcgactcaccaaaaagaaattgataagattaacggaaagctggaggaatcacctgataatgacgggttcctgaaggcaccatgccgaatgaaggtgtccattccaacgaaagcattggaactgatggacatgcagacttttaaagccgagcccccggaaaaaccatccgcatttgagccggcaatcgagatgcagaaaagcgtgcctaacaaggcccttgaactgaagaacgaacagacactgagggccgaccaaatgtttccaagcgagtctaaacaaaagaaggtggaggaaaactcctgggacagcgagtccttgagggaaaccgtgagtcagaaggatgtctgtgtgcccaaagcgactcaccagaaggagatggataagattagtgggaaactggaagactcaacaagtctatcgaaaatactcgatactgtgcatagctgtgagcgcgcccgggaactgcaaaaggaccactgtgagcagcgaaccgggaaaatggaacagatgaagaagaaattttgcgtgctcaaaaaaaagctgagtgaagcaaaggagatcaaaagccaactggagaaccagaaagtgaagtgggagcaagaactgtgttccgtgagactgacgttaaatcaggaagaagagaaaaggagaaacgccgatatattgaatgagaagatccgcgaggagttgggtcggattgaggagcagcacagaaaggaattggaagtgaagcaacagctcgaacaagctctcaggattcaagacattgaactgaaaagcgttgaatccaatcttaatcaggttagccatacccatgagaatgagaactacttactgcacgagaactgtatgcttaaaaaagaaatcgctatgctcaaactggagatcgccaccctcaaacaccagtaccaggagaaagaaaataagtacttcgaggatataaaaatactcaaggagaaaaacgcagagctccaaatgacactgaagcttaaagaggaaagtttgacaaaacgggcctcgcagtacagtggccagctcaaagtccttatcgcggaaaatacaatgctcacctccaagctgaaggaaaagcaagacaaagagatcttagaggcggagatcgaatcacaccatcccaggttagccagtgccgtgcaggatcatgaccagattgtcacttctagaaaaagccaggagcctgcctttcacattgccggcgatgcttgcttgcagcgcaaaatgaacgtcgacgtttccagtaccatatataacaacgaggtcctccaccagccacttagtgaggctcagcggaagtcgaagtccctgaaaatcaatctgaactacgccggagacgccctcagggagaacacgctggtgagcgaacacgctcagagagaccagagagagacgcagtgtcaaatgaaagaggccgagcatatgtatcagaatgagcaggacaacgtcaacaaacataccgagcaacaggaaagtcttgaccagaagctgttccagctgcaaagtaagaacatgtggctccagcagcagctagtgcacgcccataagaaggccgacaataagagcaaaattacgatagatatacactttctggagcgtaagatgcagcatcatctcctgaaagaaaagaatgaggagatcttcaactacaataatcaccttaagaacaggatctaccagtacgaaaaggaaaaagctgaaacagagaattcttag

SEQ ID NO: 230019 - DNA, 4026 bp, Artificial Sequence
  derived and/or modified sequence
atgaccaagaggaagaagaccatcaacctgaacatccaggatgcccagaagaggacagccctgcactgggcctgtgtgaatggacatgaggaggtggtgaccttcctggtggacaggaagtgccagctggatgtgctggatggagagcacaggacccccctgatgaaggccctgcagtgccaccaggaggcctgtgccaacatcctgattgacagcggggctgacatcaacctggtggatgtgtatggcaacacagccctgcactatgctgtgtacagcgagatcctgtctgtggtggccaagctgctgagccatggagctgtgattgaggtgcacaacaaggccagcctgacccccctgctgctgagcatcaccaagaggtctgagcagatcgtggagttcctgctgatcaagaatgccaatgccaatgctgtgaacaagtacaagtgcacagccctgatgctggccgtgtgccacggcagcagcgagatcgtgggcatgctgctgcagcagaatgtggatgtgtttgctgctgacatctgtggggtgacagctgagcactatgctgtgacctgtggcttccaccacatccacgagcagatcatggagtacatcaggaagctgagcaagaaccaccagaacaccaaccctgagggcaccagcgctggcaccccagatgaggccgcccccctggccgagaggaccccagacacagctgagagcctggtggagaagaccccagatgaggccgcccccctggtggagaggaccccagacacagctgagagcctggtggagaagaccccagatgaggccgccagcctggtggagggcaccagtgacaagatccagtgcctggagaaggccaccagcggcaagtttgagcagagcgctgaggagaccccccgggagatcaccagccctgccaaggagaccagcgagaagttcacctggccagccaagggccggcccaggaagatcgcctgggagaagaaggaggacaccccccgggagatcatgagccctgccaaggagaccagcgagaagttcacctgggccgccaagggccggcccaggaagatcgcctgggagaagaaggagacccctgtgaagacaggctgtgtggcccgggtgaccagcaacaagaccaaggtgctggagaagggccgcagcaagatgattgcctgccccaccaaggagagcagcaccaaggccagcgccaatgaccagcgcttccccagcgagagcaagcaggaggaggatgaggagtacagctgtgacagccgcagcctgtttgagagcagcgccaagatccaggtgtgcatccctgagagcatctaccagaaggtgatggagatcaaccgggaggtggaggagccccccaagaagcccagcgccttcaagccagccatcgagatgcagaacagcgtgcccaacaaggcctttgagctgaagaatgagcagaccctgcgggctgaccccatgtttcctcctgagagcaagcagaaggactatgaagaaaattcctgggacagcgagagcctgtgtgagaccgtgtcccagaaggatgtgtgcctgcccaaggccacccaccagaaggagattgacaagatcaatggcaagctggaggagagccccaacaaggatggcctgctgaaggccacctgtggcatgaaggtgtccatccccaccaaggccctggagctgaaggacatgcagaccttcaaggccgagcccccaggcaagcccagcgcctttgagcccgccacagagatgcagaagtctgtgcccaacaaggccctggagctgaagaatgagcagaccctgcgggcagatgagatcctgcccagcgagagcaagcagaaggactatgaggagaacagctgggacacagagagcctgtgtgaaacagtgtcccagaaggatgtgtgcctgcccaaggccgcccaccagaaggagattgacaagatcaacgggaagctggagggcagccctgtgaaggatggcctgctgaaggccaactgtggcatgaaggtgtccatccccaccaaggccctggagctgatggacatgcagaccttcaaggccgagcccccagagaagcccagcgcctttgagcccgccatcgagatgcagaagtctgtgcccaacaaggccctggagctgaagaatgagcagaccctgcgggcagatgagatcctgcccagcgagagcaagcagaaggactatgaggagagctcctgggacagcgagagcctgtgtgagaccgtgtcccagaaggatgtgtgcctgcccaaggccacccaccagaaggagattgacaagatcaatggcaagctggaggagagcccagacaatgatggcttcctgaaggccccctgcaggatgaaggtgtccatccccaccaaggccctggagctgatggacatgcagaccttcaaggccgagcccccagagaagcccagcgcctttgagcccgccatcgagatgcagaagtctgtgcccaacaaggccctggagctgaagaatgagcagaccctgcgggctgaccagatgttccccagcgagagcaagcagaagaaggtggaggagaacagctgggacagcgagagcctgcgggagaccgtgtcccagaaggatgtgtgtgtgcccaaggccacccaccagaaggagatggacaagatcagcggcaagctggaggacagcaccagcctgagcaagatcctggacacagtgcacagctgtgagcgggcccgggagctgcagaaggaccactgtgagcagaggacaggcaagatggagcagatgaagaagaagttctgtgtgctgaagaagaagctgtctgaggccaaggagatcaagagccagctggagaaccagaaggtgaagtgggagcaggagctgtgcagcgtgcggctgaccctgaaccaggaggaggagaagagaagaaatgctgacatcctgaatgagaagatccgggaggagctgggcagaattgaggagcagcacaggaaggagctggaggtgaagcagcagctggagcaggccctgcgcatccaggacatcgagctgaagtctgtggagagcaacctgaaccaggtgagccacacccatgaaaatgaaaactacctgctgcacgagaactgcatgctgaagaaggagatcgccatgctgaagctggagatcgccaccctgaagcaccagtaccaggagaaggagaacaagtactttgaggacatcaagatcctgaaggagaagaatgctgagctgcagatgaccctgaagctgaaggaggagagcctgaccaagagggccagccagtacagcggccagctgaaggtgctgattgctgagaacaccatgctgaccagcaagctgaaggagaagcaggacaaggagatcctggaggccgagattgagagccaccacccccggctggccagcgctgtgcaggaccatgaccagatcgtgaccagcaggaagagccaggagcccgccttccacatcgctggagatgcctgcctgcagaggaagatgaatgtggatgtgagcagcaccatctacaacaatgaggtgctgcaccagcccctgtctgaggcccagaggaagagcaagagcctgaagatcaacctgaactatgctggagatgccctgcgggagaacaccctggtgtctgaacatgcccagagggaccagcgggagacccagtgccagatgaaggaggccgagcacatgtaccagaatgagcaggacaacgtgaacaagcacacagagcagcaggagagcctggaccagaagctgttccagctgcagagcaagaacatgtggctgcagcagcagctggtgcacgcccacaagaaggctgacaacaagagcaagatcaccatcgacatccacttcctggagaggaagatgcagcaccacctgctgaaggagaagaatgaggagatcttcaactacaacaaccacctgaagaaccgcatctaccagtatgagaaggagaaggccgagacagagaacagctag

SEQ ID NO: 230020 - DNA, 4026 bp, Artificial Sequence
  derived and/or modified sequence
atgaccaagcggaagaagaccatcaacctgaacatccaggacgcccaaaaaagaaccgctttgcattgggcctgcgttaacggccacgaagaggttgtgaccttcctagtagacagaaagtgtcagctcgacgtcctagacggagaacataggaccccccttatgaaggcacttcagtgccatcaagaggcctgtgccaacattctgatcgatagcggcgcagatattaacctggtagacgtgtacggtaacactgctctgcactatgccgtgtactccgagatactcagtgtggtggctaagctgttgagccacggcgcggtcattgaggttcataacaaagccagcctcacccctctgctgctgagcatcaccaaaagatctgaacagatcgtggagtttctgctgatcaagaacgccaacgccaatgccgtgaataagtacaaatgcacagccctcatgctggccgtatgtcatggtagctccgaaattgttggtatgctattgcagcagaacgtggatgtcttcgccgcagacatctgcggggtgactgcagagcattacgctgtcacttgtggttttcaccatatccatgagcaaattatggaatacatcagaaagctctcaaaaaaccatcagaataccaatcctgaggggactagcgccgggaccccggatgaggccgcccccctggccgaacgcacccccgataccgcggagtccctcgtggagaagacacctgatgaagccgctccgctggttgaaagaacgccggatacagccgaatcactcgtggagaagacgccagatgaagcggcctctctggtagagggcacaagtgacaagattcaatgcctcgaaaaagccacaagcggcaagtttgaacagagcgctgaggagaccccccgtgaaattacctcgccagccaaagagacgagtgagaaatttacttggcccgccaaaggccgacccagaaagatagcatgggagaaaaaagaggatactcctcgggagatcatgtcgcctgcaaaggagacgtctgagaaatttacctgggctgcaaaggggagacccaggaagatcgcttgggaaaagaaagagactcccgttaaaaccggttgtgttgctcgggtgacaagcaacaaaactaaagtgctggagaaaggccggagtaagatgatcgcttgtccaaccaaagaatccagtacgaaagcgtccgcaaacgaccagagattccctagcgaatccaaacaggaggaagatgaggagtatagttgcgattcccgatccctcttcgaatcctcagccaaaatacaggtctgcattcccgagagcatctaccaaaaagttatggagatcaaccgcgaggtcgaggaaccgcccaagaaaccatccgctttcaagcccgccatagaaatgcagaacagcgtacctaataaggcctttgaactgaagaacgagcagacattacgagcggaccccatgttccctcccgagtctaagcagaaagactacgaagaaaacagctgggacagtgagagtctgtgcgaaaccgtgtctcagaaggacgtttgtctgccaaaggctacccatcagaaggagatcgataagattaacggtaaactcgaggagtcaccgaacaaagacgggctgctgaaggctacttgcggcatgaaggtctctatccctacgaaagccctggaacttaaggacatgcagacctttaaggcagagcctcctgggaaacccagtgccttcgagccagctaccgagatgcagaagtccgtacccaacaaggcacttgagttgaagaatgaacaaacactacgcgctgacgagatccttccaagtgaaagtaagcaaaaagattacgaggagaattcttgggatactgaaagtttatgtgaaaccgtgtcccagaaggatgtgtgtctcccgaaggctgcacaccagaaagaaatcgacaagattaatgggaagctcgaaggcagtcctgtaaaggatggattacttaaggccaactgcgggatgaaagtttccatccctaccaaggcactggagcttatggacatgcagacctttaaggctgaacctccggaaaaaccctcagccttcgagcctgctattgagatgcagaagtccgttcccaataaagcattagaattgaaaaatgagcagactttacgggctgatgaaatacttccaagcgagagcaagcagaaagactacgaagaaagctcgtgggattctgagtccctgtgcgaaaccgtctcacagaaggacgtctgccttcccaaggctacacaccagaaggaaatcgacaagattaacggcaagctcgaggagtcaccagacaatgatgggtttcttaaggctccatgccgcatgaaagtcagcattccaacaaaagctttggagctgatggatatgcagacttttaaggccgaacccccagaaaaaccctccgcattcgaaccggccatcgagatgcaaaagtccgtgccaaataaggccctcgaactgaagaatgaacagacactgcgtgctgatcagatgtttccaagcgagtcaaaacagaagaaagtggaggaaaacagttgggactccgaatctctgcgtgaaaccgtctcacagaaagacgtgtgcgtccccaaagctactcatcagaaggaaatggacaaaatcagtgggaaactagaagacagcacgagcttatccaagatcttggacacagtgcactcttgcgagagggcaagagaacttcagaaggatcattgcgagcaaagaaccggtaaaatggagcaaatgaagaagaagttctgcgttctgaaaaagaagttaagtgaagccaaggagattaagtcacaattggaaaaccaaaaagtcaagtgggaacaggagctgtgctccgtgcggctgacgctgaaccaggaagaagaaaaaagaaggaatgcagatatcctcaacgagaagatccgcgaagagctgggcagaattgaagaacagcaccgaaaggagctcgaggtgaaacagcagctggaacaagccttaagaatccaagacattgagctgaaaagcgttgagtcaaatctgaaccaggtctctcatacacacgagaacgagaactatttgttacatgaaaactgcatgttgaaaaaggagatcgcaatgctgaagctagagatcgccactctaaaacatcagtatcaggaaaaggaaaacaaatacttcgaagatattaagatcctcaaggagaaaaatgcagagctgcagatgaccttaaaattgaaagaagaaagcctgacaaaaagagcttctcagtattccggtcagttaaaagtgctgattgcagaaaataccatgctgacgagtaagctcaaggagaaacaggacaaggaaattctggaggccgaaatcgagtcacatcaccctagactggcctctgctgtgcaagaccatgaccagatagttacaagtcggaagtctcaagagccagcgttccacatagcaggcgacgcttgcttgcagagaaagatgaacgtggatgtgtcaagtactatatacaacaatgaggtgttgcaccagcccctcagcgaagcacagcgcaagtccaaatcattgaagatcaacttgaactacgccggtgatgcattgcgtgagaacacccttgtgagtgaacatgcacaaagagatcaaagagaaacccaatgccaaatgaaagaagccgagcatatgtaccagaacgaacaggacaatgtgaacaaacatacagagcagcaggaaagcctggatcagaagcttttccagctacagtctaaaaatatgtggctgcagcagcagctggttcacgctcataaaaaagcagacaacaagagcaaaatcacaatcgatatacacttcctcgaaagaaagatgcagcaccacctgctgaaggagaaaaatgaggagatcttcaactataataaccatttgaagaatcgtatttaccagtatgagaaggagaaggccgaaacagaaaacagctag

SEQ ID NO: 230021 - DNA, 4405 bp, Artificial Sequence
  derived and/or modified sequence
ctagtctataccagcaacgactcctacatcgtccactctggggatcttagaaagatccataaagctgcctcccggggacaagtccggaagctggagaagatgacaaagaggaagaagaccatcaaccttaatatacaagacgcccagaagaggactgctctacactgggcctgtgtcaatggccatgaggaagtagtaacatttctggtagacagaaagtgccagcttgacgtccttgatggcgaacacaggacacctctgatgaaggctctacaatgccatcaggaggcttgtgcaaatattctgatagattctggtgccgatataaatctcgtagatgtgtatggcaacacggctctccattatgctgtttatagtgagattttgtcagtggtggcaaaactgctgtcccatggtgcagtcatcgaagtgcacaacaaggctagcctcacaccacttttactatccataacgaaaagaagtgagcaaattgtggaatttttgctgataaaaaatgcaaatgcgaatgcagttaataagtataaatgcacagccctcatgcttgctgtatgtcatggatcatcagagatagttggcatgcttcttcagcaaaatgttgacgtctttgctgcagatatatgtggagtaactgcagaacattatgctgttacttgtggatttcatcacattcatgaacaaattatggaatatatacgaaaattatctaaaaatcatcaaaataccaatccagaaggaacatctgcaggaacacctgatgaggctgcacccttggcggaaagaacacctgacacagctgaaagcttggtggaaaaaacacctgatgaggctgcacccttggtggaaagaacacctgacacggctgaaagcttggtggaaaaaacacctgatgaggctgcatccttggtggagggaacatctgacaaaattcaatgtttggagaaagcgacatctggaaagttcgaacagtcagcagaagaaacacctagggaaattacgagtcctgcaaaagaaacatctgagaaatttacgtggccagcaaaaggaagacctaggaagatcgcatgggagaaaaaagaagacacacctagggaaattatgagtcccgcaaaagaaacatctgagaaatttacgtgggcagcaaaaggaagacctaggaagatcgcatgggagaaaaaagaaacacctgtaaagactggatgcgtggcaagagtaacatctaataaaactaaagttttggaaaaaggaagatctaagatgattgcatgtcctacaaaagaatcatctacaaaagcaagtgccaatgatcagaggttcccatcagaatccaaacaagaggaagatgaagaatattcttgtgattctcggagtctctttgagagttctgcaaagattcaagtgtgtatacctgagtctatatatcaaaaagtaatggagataaatagagaagtagaagagcctcctaagaagccatctgccttcaagcctgccattgaaatgcaaaactctgttccaaataaagcctttgaattgaagaatgaacaaacattgagagcagatccgatgttcccaccagaatccaaacaaaaggactatgaagaaaattcttgggattctgagagtctctgtgagactgtttcacagaaggatgtgtgtttacccaaggctacacatcaaaaagaaatagataaaataaatggaaaattagaagagtctcctaataaagatggtcttctgaaggctacctgcggaatgaaagtttctattccaactaaagccttagaattgaaggacatgcaaactttcaaagcagagcctccggggaagccatctgccttcgagcctgccactgaaatgcaaaagtctgtcccaaataaagccttggaattgaaaaatgaacaaacattgagagcagatgagatactcccatcagaatccaaacaaaaggactatgaagaaaattcttgggatactgagagtctctgtgagactgtttcacagaaggatgtgtgtttacccaaggctgcgcatcaaaaagaaatagataaaataaatggaaaattagaagggtctcctgttaaagatggtcttctgaaggctaactgcggaatgaaagtttctattccaactaaagccttagaattgatggacatgcaaactttcaaagcagagcctcccgagaagccatctgccttcgagcctgccattgaaatgcaaaagtctgttccaaataaagccttggaattgaagaatgaacaaacattgagagcagatgagatactcccatcagaatccaaacaaaaggactatgaagaaagttcttgggattctgagagtctctgtgagactgtttcacagaaggatgtgtgtttacccaaggctacgcatcaaaaagaaatagataaaataaatggaaaattagaagagtctcctgataatgatggttttctgaaggctccctgcagaatgaaagtttctattccaactaaagccttagaattgatggacatgcaaactttcaaagcagagcctcccgagaagccatctgccttcgagcctgccattgaaatgcaaaagtctgttccaaataaagccttggaattgaagaatgaacaaacattgagagcagatcagatgttcccttcagaatcaaaacaaaagaaggttgaagaaaattcttgggattctgagagtctccgtgagactgtttcacagaaggatgtgtgtgtacccaaggctacacatcaaaaagaaatggataaaataagtggaaaattagaagattcaactagcctatcaaaaatcttggatacagttcattcttgtgaaagagcaagggaacttcaaaaagatcactgtgaacaacgtacaggaaaaatggaacaaatgaaaaagaagttttgtgtactgaaaaagaaactgtcagaagcaaaagaaataaaatcacagttagagaaccaaaaagttaaatgggaacaagagctctgcagtgtgagattgactttaaaccaagaagaagagaagagaagaaatgccgatatattaaatgaaaaaattagggaagaattaggaagaatcgaagagcagcataggaaagagttagaagtgaaacaacaacttgaacaggctctcagaatacaagatatagaattgaagagtgtagaaagtaatttgaatcaggtttctcacactcatgaaaatgaaaattatctcttacatgaaaattgcatgttgaaaaaggaaattgccatgctaaaactggaaatagccacactgaaacaccaataccaggaaaaggaaaataaatactttgaggacattaagattttaaaagaaaagaatgctgaacttcagatgaccctaaaactgaaagaggaatcattaactaaaagggcatctcaatatagtgggcagcttaaagttctgatagctgagaacacaatgctcacttctaaattgaaggaaaaacaagacaaagaaatactagaggcagaaattgaatcacaccatcctagactggcttctgctgtacaagaccatgatcaaattgtgacatcaagaaaaagtcaagaacctgctttccacattgcaggagatgcttgtttgcaaagaaaaatgaatgttgatgtgagtagtacgatatataacaatgaggtgctccatcaaccactttctgaagctcaaaggaaatccaaaagcctaaaaattaatctcaattatgcaggagatgctctaagagaaaatacattggtttcagaacatgcacaaagagaccaacgtgaaacacagtgtcaaatgaaggaagctgaacacatgtatcaaaacgaacaagataatgtgaacaaacacactgaacagcaggagtctctagatcagaaattatttcaactacaaagcaaaaatatgtggcttcaacagcaattagttcatgcacataagaaagctgacaacaaaagcaagataacaattgatattcattttcttgagaggaaaatgcaacatcatctcctaaaagagaaaaatgaggagatatttaattacaataaccatttaaaaaaccgtatatatcaatatgaaaaagagaaagcagaaacagaaaactcatgagagacaagcagtaagaaacttcttttggagaaacaacagaccagatctttactcacaactcatgctaggaggccagtcctagcatcaccttatgttgaaaatcttaccaatagtctgtgtcaacagaatacttattttagaagaaaaattcatgatttcttcctgaagcctacagacataaaataacagtgtgaagaattacttgttcacgaattgcataaagctgcacaggattcccatctaccctgatgatgcagcagacatcattcaatccaaccag

SEQ ID NO: 230022 - DNA, 4026 bp, Artificial Sequence
  derived and/or modified sequence
atgactaagcggaagaagacgattaatttgaacattcaggacgcccaaaagcggacagccctgcattgggcatgcgtcaatggacatgaggaagttgtgacatttttagtcgacaggaaatgtcaactcgacgtcctggatggcgagcaccgcacccccttaatgaaagcccttcagtgccatcaagaagcgtgtgccaatatccttatcgacagtggggcagatatcaacctggtggatgtctacgggaatacagcactgcactatgccgtttattctgaaatccttagtgtggtggctaagctgctgtctcatggggcagtgattgaggtgcataacaaggcttctctcacaccgctcctcctgagcataacaaaacggtcagagcaaattgtggaattcctcttaatcaagaatgcaaatgccaatgctgtcaacaaatataagtgcacagcactgatgctggccgtctgtcatggctcatcagagattgtgggcatgcttctgcaacagaacgtggatgtttttgctgccgatatctgcggcgtaaccgcagagcactatgccgtgacttgtggtttccatcatattcacgaacagattatggaatatatacgcaaactgtctaaaaaccatcagaatacaaacccagagggaacctcagctggtacccccgatgaagcggctcccttagccgaacgcactccggataccgctgagtcgctggttgagaaaacccccgacgaagcagcgcctctggtggaacgtacgcccgatacggcagaaagcctcgtggagaaaacacctgatgaggcagcgagcctcgtggaagggacatctgacaaaatccaatgcctggagaaggctaccagcggcaaattcgaacagtcagcagaggagactcccagagagattaccagtccagcaaaggagacctcggagaaattcacctggcctgccaagggcagaccccgtaagatagcatgggaaaagaaggaggacaccccacgcgaaatcatgagtccagccaaggagacttcggagaagtttacctgggcagccaaaggcagacccagaaaaatcgcatgggaaaaaaaggaaaccccggtgaaaacagggtgtgtggcaagagtgaccagtaataagacaaaggtgctggagaaggggagatcaaagatgatagcttgccccactaaagagtcaagcacaaaagcttcagccaacgatcagcggttcccgagcgaatcgaagcaggaagaggacgaggagtacagctgtgattcccggagtctgtttgaaagctctgccaagattcaggtgtgcatccctgaatcaatctatcaaaaggtgatggagattaaccgtgaggtggaagagccacctaagaagccctccgcttttaagcccgcaatagagatgcaaaactcagtacctaacaaagcgttcgaactgaagaacgaacagactctgcgtgctgatccaatgttcccacccgaatctaagcagaaggattatgaggaaaatagctgggattccgagagcctgtgcgagaccgtatcacagaaagatgtctgcctgcccaaggccacacaccagaaagaaatcgacaaaattaatggtaagttggaagagtcaccaaataaggacggcctgttaaaggctacatgcggtatgaaagtgagtattccaacaaaggcactcgaactcaaggatatgcagacattcaaagccgagccaccgggaaaaccctccgcttttgagcccgcaactgagatgcagaagtctgtacctaacaaggccctggaactgaaaaatgaacagacactgcgggctgacgagattctcccttcagagagcaagcagaaggattacgaagaaaattcttgggacacagagtccctgtgtgaaaccgtgagccagaaggacgtctgcctccctaaggcggcacaccaaaaagaaatcgataagataaacggtaagctggaggggtcccccgtaaaggatgggttgctgaaggccaattgtggcatgaaggtgagcatccctacaaaggccctggagctcatggacatgcagacattcaaggcagagcctcctgagaaaccgtccgccttcgaacctgctatcgaaatgcagaaatccgtgccaaacaaagccctcgaactgaagaacgaacaaaccctgcgagcagacgagattctgccttctgaaagcaagcagaaagactatgaggagtcctcgtgggactcagagtccctttgcgagaccgtctctcagaaggacgtctgcctgccaaaggccacccaccaaaaagagatcgacaaaattaacgggaagctcgaggaatctcccgataacgacgggtttctaaaggctccctgtaggatgaaagtgtctatacccacgaaagcccttgagctcatggacatgcagacatttaaggctgagcctcctgaaaaacccagcgctttcgaaccggctatcgaaatgcagaagagcgttccaaacaaggccctggagctaaaaaatgaacagactctgagggccgatcaaatgtttccctccgaatccaagcagaaaaaggtggaggaaaattcttgggatagcgagtccctgcgtgagacggtcagccagaaagatgtatgcgttcccaaggctacacatcagaaggagatggacaaaatatccggaaagctggaggacagtacctctctgagcaaaatcctagatacagtgcacagttgtgaaagggccagagagctccagaaagaccattgtgagcaaagaacagggaaaatggaacaaatgaaaaaaaaattttgtgttttaaaaaagaagctcagcgaggcaaaagagatcaagagtcagcttgaaaatcagaaggtcaagtgggagcaggaactctgttcggtcaggcttaccctcaatcaggaagaggagaaaagaagaaacgctgacattttgaacgagaagatcagagaagagcttggcaggattgaggagcagcatcggaaagagctggaggtcaagcagcaattagagcaggctctccgcatccaggatatcgagctcaagagcgtcgaatctaatttaaaccaggtgagccatactcatgagaacgagaattatctcctacatgagaattgcatgctcaaaaaagagattgccatgctgaaactggaaatagctactttgaaacaccagtaccaagaaaaagagaataagtacttcgaggacattaagatcctcaaagaaaagaacgccgagttgcaaatgactctaaaactgaaagaggaatctttgacgaagcgggcatcccagtacagcggccagctgaaggtcttgatcgccgagaacactatgttaacctctaaactcaaggagaaacaagacaaggaaattctggaagccgagatcgaatcccaccacccaaggctggcatctgcggtacaagaccacgaccagatcgtcacctcccgtaagagtcaggagcctgcgttccatatcgccggagacgcgtgcttacagagaaagatgaacgttgacgtgtcatcaaccatctacaacaacgaggtgctgcatcagcctctgagcgaggcccagcgcaagtctaagagtctcaaaattaacctgaattatgcaggcgatgcactgcgtgaaaacacactcgtcagcgagcacgcacagcgtgaccagcgcgaaacccagtgccagatgaaagaggccgagcacatgtaccagaacgagcaggacaatgtgaacaagcatactgagcagcaggagtcactggaccagaaactgttccagcttcagtccaaaaatatgtggctgcaacaacaactcgttcacgcgcacaaaaaagccgacaacaagtccaaaattacaattgacatccatttcctggaaagaaaaatgcagcatcacctgctgaaggagaaaaatgaggagatttttaactacaacaaccacttaaaaaaccgaatctaccagtacgagaaagagaaggcagagactgaaaactcatag

SEQ ID NO: 230023 - DNA, 4026 bp, Artificial Sequence
  derived and/or modified sequence
atgaccaagagaaagaagaccatcaacctgaacatccaggacgcccagaagagaaccgccctgcactgggcctgcgtgaacggccacgaggaggtggtgaccttcctggtggacagaaagtgccagctggacgtgctggacggcgagcacagaacccccctgatgaaggccctgcagtgccaccaggaggcctgcgccaacatcctgatcgacagcggcgccgacatcaacctggtggacgtgtacggcaacaccgccctgcactacgccgtgtacagcgagatcctgagcgtggtggccaagctgctgagccacggcgccgtgatcgaggtgcacaacaaggccagcctgacccccctgctgctgagcatcaccaagagaagcgagcagatcgtggagttcctgctgatcaagaacgccaacgccaacgccgtgaacaagtacaagtgcaccgccctgatgctggccgtgtgccacggcagcagcgagatcgtgggcatgctgctgcagcagaacgtggacgtgttcgccgccgacatctgcggcgtgaccgccgagcactacgccgtgacctgcggcttccaccacatccacgagcagatcatggagtacatcagaaagctgagcaagaaccaccagaacaccaaccccgagggcaccagcgccggcacccccgacgaggccgcccccctggccgagagaacccccgacaccgccgagagcctggtggagaagacccccgacgaggccgcccccctggtggagagaacccccgacaccgccgagagcctggtggagaagacccccgacgaggccgccagcctggtggagggcaccagcgacaagatccagtgcctggagaaggccaccagcggcaagttcgagcagagcgccgaggagacccccagagagatcaccagccccgccaaggagaccagcgagaagttcacctggcccgccaagggcagacccagaaagatcgcctgggagaagaaggaggacacccccagagagatcatgagccccgccaaggagaccagcgagaagttcacctgggccgccaagggcagacccagaaagatcgcctgggagaagaaggagacccccgtgaagaccggctgcgtggccagagtgaccagcaacaagaccaaggtgctggagaagggcagaagcaagatgatcgcctgccccaccaaggagagcagcaccaaggccagcgccaacgaccagagattccccagcgagagcaagcaggaggaggacgaggagtacagctgcgacagcagaagcctgttcgagagcagcgccaagatccaggtgtgcatccccgagagcatctaccagaaggtgatggagatcaacagagaggtggaggagccccccaagaagcccagcgccttcaagcccgccatcgagatgcagaacagcgtgcccaacaaggccttcgagctgaagaacgagcagaccctgagagccgaccccatgttcccccccgagagcaagcagaaggactacgaggagaacagctgggacagcgagagcctgtgcgagaccgtgagccagaaggacgtgtgcctgcccaaggccacccaccagaaggagatcgacaagatcaacggcaagctggaggagagccccaacaaggacggcctgctgaaggccacctgcggcatgaaggtgagcatccccaccaaggccctggagctgaaggacatgcagaccttcaaggccgagccccccggcaagcccagcgccttcgagcccgccaccgagatgcagaagagcgtgcccaacaaggccctggagctgaagaacgagcagaccctgagagccgacgagatcctgcccagcgagagcaagcagaaggactacgaggagaacagctgggacaccgagagcctgtgcgagaccgtgagccagaaggacgtgtgcctgcccaaggccgcccaccagaaggagatcgacaagatcaacggcaagctggagggcagccccgtgaaggacggcctgctgaaggccaactgcggcatgaaggtgagcatccccaccaaggccctggagctgatggacatgcagaccttcaaggccgagccccccgagaagcccagcgccttcgagcccgccatcgagatgcagaagagcgtgcccaacaaggccctggagctgaagaacgagcagaccctgagagccgacgagatcctgcccagcgagagcaagcagaaggactacgaggagagcagctgggacagcgagagcctgtgcgagaccgtgagccagaaggacgtgtgcctgcccaaggccacccaccagaaggagatcgacaagatcaacggcaagctggaggagagccccgacaacgacggcttcctgaaggccccctgcagaatgaaggtgagcatccccaccaaggccctggagctgatggacatgcagaccttcaaggccgagccccccgagaagcccagcgccttcgagcccgccatcgagatgcagaagagcgtgcccaacaaggccctggagctgaagaacgagcagaccctgagagccgaccagatgttccccagcgagagcaagcagaagaaggtggaggagaacagctgggacagcgagagcctgagagagaccgtgagccagaaggacgtgtgcgtgcccaaggccacccaccagaaggagatggacaagatcagcggcaagctggaggacagcaccagcctgagcaagatcctggacaccgtgcacagctgcgagagagccagagagctgcagaaggaccactgcgagcagagaaccggcaagatggagcagatgaagaagaagttctgcgtgctgaagaagaagctgagcgaggccaaggagatcaagagccagctggagaaccagaaggtgaagtgggagcaggagctgtgcagcgtgagactgaccctgaaccaggaggaggagaagagaagaaacgccgacatcctgaacgagaagatcagagaggagctgggcagaatcgaggagcagcacagaaaggagctggaggtgaagcagcagctggagcaggccctgagaatccaggacatcgagctgaagagcgtggagagcaacctgaaccaggtgagccacacccacgagaacgagaactacctgctgcacgagaactgcatgctgaagaaggagatcgccatgctgaagctggagatcgccaccctgaagcaccagtaccaggagaaggagaacaagtacttcgaggacatcaagatcctgaaggagaagaacgccgagctgcagatgaccctgaagctgaaggaggagagcctgaccaagagagccagccagtacagcggccagctgaaggtgctgatcgccgagaacaccatgctgaccagcaagctgaaggagaagcaggacaaggagatcctggaggccgagatcgagagccaccaccccagactggccagcgccgtgcaggaccacgaccagatcgtgaccagcagaaagagccaggagcccgccttccacatcgccggcgacgcctgcctgcagagaaagatgaacgtggacgtgagcagcaccatctacaacaacgaggtgctgcaccagcccctgagcgaggcccagagaaagagcaagagcctgaagatcaacctgaactacgccggcgacgccctgagagagaacaccctggtgagcgagcacgcccagagagaccagagagagacccagtgccagatgaaggaggccgagcacatgtaccagaacgagcaggacaacgtgaacaagcacaccgagcagcaggagagcctggaccagaagctgttccagctgcagagcaagaacatgtggctgcagcagcagctggtgcacgcccacaagaaggccgacaacaagagcaagatcaccatcgacatccacttcctggagagaaagatgcagcaccacctgctgaaggagaagaacgaggagatcttcaactacaacaaccacctgaagaacagaatctaccagtacgagaaggagaaggccgagaccgagaacagctag

SEQ ID NO: 230024 - protein, 213 aa, Artificial Sequence
  derived and/or modified sequence
MGSKALPAPIPLHPSLQLTNYSFLQAVNTFPATVDHLQGLYGLSAVQTMHMNHWTLGYPNVHEITRSTITEMAAAQGLVDARFPFPALPFTTHLFHPKQGAIAHVLPALHKDRPRFDFANLAVAATQEDPPKMGDLSKLSPGLGSPISGLSKLTPDRKPSRGRLPSKTKKEFICKFCGRHFTKSYNLLIHERTHTDERPYTCDICHKAFRRQD

SEQ ID NO: 230025 - DNA, 831 bp, Artificial Sequence
  derived and/or modified sequence
atgggtagtaaggccttgccagccccgatcccgttgcaccccagtcttcagcttaccaattatagtttcctccaggccgtcaatacattccctgccactgttgaccatttacaggggttgtatggactatcggccgtgcagaccatgcacatgaaccactggaccctgggatatccaaacgtgcacgaaataacccgctcaacaattaccgaaatggccgctgctcaaggactggtcgatgcccgcttcccatttcctgccttgccatttaccacccatttgttccaccccaagcagggggctatagctcacgtgttgcctgcattgcataaagacagaccgcggttcgatttcgcaaatctggctgtggctgcaactcaggaagatcccccgaaaatgggggatctgtcaaaacttagtcctggactgggttcccccatcagcgggctgtcgaaacttacaccagataggaagccttctcgaggccgtctgccaagtaaaactaaaaaagaatttatctgtaaattttgcggcaggcatttcaccaagagttataatctgttgatccatgaaagaacccacacggatgagcgcccttacacctgtgacatatgccacaaggctttcaggaggcaggatcacctgagggatcatagatacatacatagcaaggaaaagccgttcaaatgtcaagagtgtgggaaaggcttctgtcagagtcgaactctggctgtccataagactttgcacatgcaaacctcttcgcccaccgccgccagcagcgctgcaaagtgcagcggggaaacggtgatctgcgggggaactgcctag

SEQ ID NO: 230026 - DNA, 642 bp, Artificial Sequence
  derived and/or modified sequence
atgggcagcaaagccctgcccgcccccatccctctgcacccgtctctgcagctgacaaactactcctttttgcaagctgtcaacactttcccagccacagtcgaccacctccagggactgtatggcctgtccgccgtccagactatgcatatgaatcactggactctgggatatcctaacgtacatgaaattactcgcagtaccattacagagatggccgccgcccagggtctggtcgacgcaagattcccttttcctgccctgcctttcacgactcaccttttccaccccaaacagggcgcaatcgcccatgtgcttcctgctttacacaaggacagacctagatttgattttgctaacctggccgtggccgctactcaggaggatcccccaaagatgggagatctcagcaaactgtcccccggactgggatctccaatatccggcctctcaaagcttaccccagatcgcaaaccatctcgcgggcggctcccttcgaagaccaagaaagaatttatttgcaagttctgtggaagacactttactaaaagttataacctcctaattcacgaaaggacccacacagatgaaaggccttatacatgcgacatatgtcacaaggcctttcgaaggcaggactag

SEQ ID NO: 230027 - DNA, 831 bp, Artificial Sequence
  derived and/or modified sequence
atgggcagcaaggccctgcctgcccccatccccctgcaccccagcctgcagctgaccaactacagcttcctgcaggccgtgaacaccttccctgccaccgtggaccacctgcagggcctgtatggcctgtctgctgtgcagaccatgcacatgaaccactggaccctgggctaccccaacgtgcatgagatcaccaggagcaccatcacagagatggccgccgcccagggcctggtggatgcccgcttccccttccctgccctgcccttcaccacccacctgttccaccccaagcagggcgccatcgcccacgtgctgcctgccctgcacaaggaccggcccaggtttgattttgccaacctggccgtggccgccacccaggaggacccccccaagatgggagacctgagcaagctgagccctggcctgggcagccccatcagcggcctgagcaagctgaccccagacaggaagcccagccggggccgcctgcccagcaagaccaagaaggagttcatctgcaagttctgtggccgccacttcaccaagagctacaacctgctgatccacgagaggacccacacagatgagcggccctacacctgtgacatctgccacaaggccttccggcggcaggaccacctgcgggaccaccgctacatccacagcaaggagaagcccttcaagtgccaggagtgtgggaagggcttctgccagagcaggaccctggccgtgcacaagaccctgcacatgcagaccagcagccccacagctgccagcagcgctgccaagtgcagcggggagaccgtcatctgtggcggcacagcctag

SEQ ID NO: 230028 - DNA, 642 bp, Artificial Sequence
  derived and/or modified sequence
atgggcagcaaggccctgcctgcccccatccccctgcaccccagcctgcagctgaccaactacagcttcctgcaggccgtgaacaccttccctgccaccgtggaccacctgcagggcctgtatggcctgtctgctgtgcagaccatgcacatgaaccactggaccctgggctaccccaacgtgcatgagatcaccaggagcaccatcacagagatggccgccgcccagggcctggtggatgcccgcttccccttccctgccctgcccttcaccacccacctgttccaccccaagcagggcgccatcgcccacgtgctgcctgccctgcacaaggaccggcccaggtttgattttgccaacctggccgtggccgccacccaggaggacccccccaagatgggagacctgagcaagctgagccctggcctgggcagccccatcagcggcctgagcaagctgaccccagacaggaagcccagccggggccgcctgcccagcaagaccaagaaggagttcatctgcaagttctgtggccgccacttcaccaagagctacaacctgctgatccacgagaggacccacacagatgagcggccctacacctgtgacatctgccacaaggccttccggcggcaggactag

SEQ ID NO: 230029 - DNA, 831 bp, Artificial Sequence
  derived and/or modified sequence
atgggcagcaaggccctgcccgcccccatccccctgcaccccagcctgcagctgactaattacagtttcctccaagctgtcaatacgttccccgctacagttgaccacctgcagggcctgtacggcctgtctgctgtgcaaaccatgcatatgaaccactggacgttaggatatcccaacgtgcatgagataacaaggtcaaccatcacagagatggcagctgcacaaggactggttgatgctcgcttccctttcccagccctgccttttaccactcacctcttccaccctaagcagggggcaattgcccacgttctccctgcactccacaaagataggccccgatttgatttcgccaatctcgcagtcgctgcaacgcaggaagatccacccaagatgggcgatctcagcaagctctcccctggactggggtcaccaatttccggcctttcgaagcttacccctgatcgaaaaccttcccggggaagattgccgtccaagactaagaaggagtttatctgtaagttctgtggacgtcactttactaagtcatataacctcctgatccatgagagaacccatacagacgagagaccctatacctgtgatatatgccacaaagcttttagaagacaggatcatttgcgcgatcacaggtatatccactccaaggaaaaacccttcaagtgtcaggaatgtggaaaaggcttctgccagtctcggacactggcagtgcataagactcttcacatgcagacgtcgagcccgaccgccgcctccagcgcggcaaagtgtagtggtgaaaccgtgatttgcggcggtacagcctag

SEQ ID NO: 230030 - DNA, 642 bp, Artificial Sequence
  derived and/or modified sequence
atgggcagcaaggccctgcccgcccccatccccctgcaccccagcctgcagctgaccaattatagtttcctccaggctgtgaacacctttccggctacagttgaccatcttcaaggattgtacggcctcagcgctgtccagaccatgcatatgaaccactggacactgggttaccccaatgtgcatgaaattacccgtagtacgataacggaaatggccgcagcgcaagggctcgtcgatgcgcgattccccttcccggctcttccatttaccacacacttattccatcccaaacaaggcgccatagcccacgtgctgcctgcgctccacaaggatcgcccgagatttgacttcgcaaatctggccgtggctgccacacaggaagacccacccaagatgggggatctctcaaaactgtctcctgggttgggaagtccaatatcaggcctctctaagctcacgccggatcggaagccttcccgtgggaggctgccatccaagacgaagaaggagtttatttgcaagttctgcggccgtcatttcaccaaaagctataatctcctgatacacgagcgcacgcacactgacgaaagaccatacacttgcgacatttgtcacaaggccttccgcagacaagattag

SEQ ID NO: 230031 - DNA, 831 bp, Artificial Sequence
  derived and/or modified sequence
atgggttctaaagccctgccagccccaatccctctccatccatctctgcagctgactaactattcatttctgcaggccgtcaatacttttccggcaaccgtggaccacctccaagggctttatgggttaagtgccgtccaaacgatgcacatgaaccattggaccctgggctatcccaatgtacatgagattactcgaagtactattactgaaatggctgcggcacaaggcctcgtcgatgcacgctttcctttccccgctcttccctttaccacacacttgttccatcccaagcagggtgcaattgcacatgtgctcccagcacttcacaaggatcgtcctaggtttgactttgccaatcttgctgtagccgctactcaggaggacccccctaaaatgggcgatctatccaagctttcccccggacttgggtcaccaataagcggtttgagcaagttgactccagacaggaaaccgagtcgcggtcgcctgcccagcaaaacaaaaaaagagtttatctgcaaattttgtgggagacacttcactaagagctacaatctattgattcacgagagaacccacaccgatgagaggccatatacatgcgacatatgccacaaagccttccgaaggcaagaccacctgagagaccatcgttacattcattccaaggagaaaccatttaagtgtcaagagtgcggcaagggcttctgccagagccgtactttggccgtgcataaaacactccatatgcaaaccagctcccccaccgccgctagtagcgcagcaaagtgctctggggaaacggttatttgtggcggtactgcctag

SEQ ID NO: 230032 - DNA, 642 bp, Artificial Sequence
  derived and/or modified sequence
atgggctccaaagctctgccagccccaataccgctccacccctctctacagctaactaactactcgtttctgcaagctgttaacacattccctgcgacagtggaccatcttcagggtctgtatgggctttccgccgtgcagacaatgcatatgaaccattggaccctgggttaccctaatgtgcacgaaatcacgcggagcaccatcacagagatggctgccgctcagggcctcgtcgatgccagattcccattccctgccctgccatttactacgcatctcttccatcctaagcagggtgctattgctcacgtattgccggctctacataaggaccggcctcgattcgatttcgccaacctggctgtggccgctacacaggaagaccctcctaaaatgggagacctgagcaagttgagtcctggattgggaagccccatctctgggctatctaagttaacaccggatcgcaagcccagtcggggacggctgcctagcaaaacaaagaaagaatttatttgcaaattttgcggcagacacttcacaaaatcctacaacctactgatccacgagagaacccacacagatgagcggccatatacttgtgatatttgccataaggcttttcgcagacaggactag

SEQ ID NO: 230033 - DNA, 831 bp, Artificial Sequence
  derived and/or modified sequence
atgggcagcaaggccctgcccgcccccatccccctgcaccccagcctgcagctgaccaactacagcttcctgcaggccgtgaacaccttccccgccaccgtggaccacctgcagggcctgtacggcctgagcgccgtgcagaccatgcacatgaaccactggaccctgggctaccccaacgtgcacgagatcaccagaagcaccatcaccgagatggccgccgcccagggcctggtggacgccagattccccttccccgccctgcccttcaccacccacctgttccaccccaagcagggcgccatcgcccacgtgctgcccgccctgcacaaggacagacccagattcgacttcgccaacctggccgtggccgccacccaggaggacccccccaagatgggcgacctgagcaagctgagccccggcctgggcagccccatcagcggcctgagcaagctgacccccgacagaaagcccagcagaggcagactgcccagcaagaccaagaaggagttcatctgcaagttctgcggcagacacttcaccaagagctacaacctgctgatccacgagagaacccacaccgacgagagaccctacacctgcgacatctgccacaaggccttcagaagacaggaccacctgagagaccacagatacatccacagcaaggagaagcccttcaagtgccaggagtgcggcaagggcttctgccagagcagaaccctggccgtgcacaagaccctgcacatgcagaccagcagccccaccgccgccagcagcgccgccaagtgcagcggcgagaccgtgatctgcggcggcaccgcctag

SEQ ID NO: 230034 - DNA, 642 bp, Artificial Sequence
  derived and/or modified sequence
atgggcagcaaggccctgcccgcccccatccccctgcaccccagcctgcagctgaccaactacagcttcctgcaggccgtgaacaccttccccgccaccgtggaccacctgcagggcctgtacggcctgagcgccgtgcagaccatgcacatgaaccactggaccctgggctaccccaacgtgcacgagatcaccagaagcaccatcaccgagatggccgccgcccagggcctggtggacgccagattccccttccccgccctgcccttcaccacccacctgttccaccccaagcagggcgccatcgcccacgtgctgcccgccctgcacaaggacagacccagattcgacttcgccaacctggccgtggccgccacccaggaggacccccccaagatgggcgacctgagcaagctgagccccggcctgggcagccccatcagcggcctgagcaagctgacccccgacagaaagcccagcagaggcagactgcccagcaagaccaagaaggagttcatctgcaagttctgcggcagacacttcaccaagagctacaacctgctgatccacgagagaacccacaccgacgagagaccctacacctgcgacatctgccacaaggccttcagaagacaggactag

SEQ ID NO: 230035 - protein, 2145 aa, Artificial Sequence
  derived and/or modified sequence
MAAFGLLSYEQRPLKRPRLGPPDVYPQDPKQKEDELTAVNVKQGFNNQPAFTGDEHGSARNIVINPSKIGAYFSSILAEKLKLNTFQDTGKKKPQVNAKDNYWLVTARSQSAIHSWFSDLAGNKPLSILAKKVPILSKKEDVFAYLAKYSVPMVRATWLIKMTCAYYSAISEAKIKKRQAPDPNLEWTQISTRYLREQLAKISDFYHMASSTGDGPVPVPPEVEQAMKQWEYNEKLAFHMFQEGMLEKHEYLTWILDVLEKIRPMDDDLLKLLLPLMLQYSDEFVQSAYLSRRLAYFCARRLSLLLSDSPNLLAAHSPHMMIGPNNSSIGAPSPGPPGPGMSPVQLAFSDFLSCAQHGPLVYGLSCMLQTVTLCCPSALVWNYSTNENKSANPGSPLDLLQVAPSSLPMPGGNTAFNQQVRARIYEVEQQIKQRGRAVEVRWSFDKCQESTAGVTISRVLHTLEVLDRHCFDRTDSSNSMETLYHKIFWANQNKDNQEVAPNDEAVVTLLCEWAVSCKRSGKHRAMAVAKLLEKRQAEIEAERCGESEVLDEKESISSSSLAGSSLPVFQNVLLRFLDTQAPSLSDPNSECEKVEFVNLVLLFCEFIRHDVFSHDAYMCTLISRGDLSVTASTRPRSPVGENADEHYSKDHDVKMEIFSPMPGESCENANTSLGRRMSVNCEKLVKREKPRELIFPSNYDLLRHLQYATHFPIPLDESSSHECNQRTILLYGVGKERDEARHQLKKITKDILKILNKKSTTETGVGDEGQKARKNKQETFPTLETVFTKLQLLSYFDQHQVTSQISNNVLEQITSFASGTSYHLPLAHHIQLIFDLMEPALNINGLIDFAIQLLNELSVVEAELLLKSSSLAGSYTTGLCVCIVAVLRRYHSCLILNPDQTAQVFEGLCGVVKHVVNPSECSSPERCILAYLYDLYVSCSHLRSKFGDLFSSACSKVKQTIYNNVMPANSNLRWDPDFMMDFIENPSARSINYSMLGKILSDNAANRYSFVCNTLMNVCMGHQDAGRINDIANFSSELTACCTVLSSEWLGVLKALCCSSNHVWGFNDVLCTVDVSDLSFHDSLATFIAILIARQCFSLEDVVQHVALPSLLAAACGDADAEPGARMTCRLLLHLFRAPQACFLPQATGKPFPGIRSSCDRHLLAAAHNSIEVGAVFAVLKAIMMLGDAKIGNNSVSSLKNDDFTMRGLRCDGNADDIWTASQNPKSCGKSISIETANLREYARYVLRTICQQEWVGEHCLKEPERLCTDKELILDPVLSNMQAQKLLQLICYPHGIKECTEGDNLQRQHIKRILQNLEQWTLRQSWLELQLMIKQCLKDPGSGSVAEMNNLLDNIAKATIEVFQQSADLNNSSNSGMSLFNPNSIGSADTSSTRQNGIKTFLSSSERRGVWLVAPLIARLPTSVQGRVLKAAGEELEKGQHLGSSSKKERDRQKQKSMSLLSQQPFLSLVLTCLKGQDEQREGLLTSLQNQVNQILSNWREERYQDDIKARQMMHEALQLRLNLVGGMFDTVQRSTQWTTDWALLLLQIITSGTVDMHTNNELFTTVLDMLGVLINGTLASDLSNASPGGSEENKRAYMNLVKKLKKELGDKRSESIDKVRQLLPLPKQTCDVITCEPMGSLIDTKGNKIAGFDSIDKKQGLQVSTKQKVSPWDLFEGQKNPAPLSWAWFGTVRVDRRVIKYEEQHHLLLYHTHPMPKPRSYYLQPLPLPPEEEEEEPTSPVSQEPERKSAELSDQGKTTTDEEKKTKGRKRKTKSSSRVDEYPQSNIYRVPPNYSPISSQMMHHPQSTLWGYNLVGQPQQPGFFLQNQSLTPGGSRLDPAGSFVPTNTKQALSNMLQRRSGAMMQPPSLHAITSQQQLIQMKLLQQQQQQRLLRQAQTRPFQQGQPGDQAALFAAQARPSPQLPQYPGLQQAQTMPQGYTMYGTQMPLQQTSQQQAGSVVLSPSYNSRAYPAAHSNPVLMERLRQIQQQPSGYVQQQASPYLQPLTGSQRLNHQALQQSPLVGGGIDAVLTSAHPNLPSVPLPQDPMRPRQPQVRQQQRLLQMQQPQQPQPQQPPQPQQSSQSQSQTLGLQAMQPQQPLFPRQGLQQTQQQQQTAALVRQLQKQLSSNQPQQGVTPYGHPSHF

SEQ ID NO: 230036 - DNA, 2166 bp, Artificial Sequence
  derived and/or modified sequence
atggcggcctttggattgctcagctacgagcagaggcctttaaagcgcccacgtcttgggcccccagacgtgtatccccaggatcccaaacagaaggaggatgaactgaccgcagtaaatgtcaagcagggctttaataaccaacccgcatttaccggcgacgaacacggcagcgccagaaatatagttatcaaccccagcaaaatcggagcttacttctcctcaatactggccgagaagctgaaactgaacaccttccaggacacgggcaaaaagaagccacaggtgaacgccaaggacaactactggctcgtcaccgccaggagtcaaagcgcgatacatagctggttctcggaccttgccggcaataaacctttgtctatccttgcaaagaaggtgcccattctttccaagaaggaagacgtattcgcatacttggccaagtactcggtgcccatggttagagccacctggcttattaagatgacctgcgcctattactcggcgatttccgaggcaaaaattaagaagcggcaagctccggatcctaatctagagtggactcagatctctacgcgctacctgagggagcagttagccaagatttccgacttctaccacatggcgtcctctacaggggacggtccagtccccgtgccccctgaggtagaacaagccatgaagcaatgggagtacaatgaaaagctggcattccatatgttccaggagggcatgttagagaaacatgagtacctcacctggattctggatgtcttggaaaagatccgcccaatggatgatgatctcctgaagttgctattgccccttatgttgcaatacagcgatgagtttgtgcaatctgcctacctctcacgcaggctcgcctatttttgtgccaggcgactgtcccttctgctgtcagattcccctaacctgctggcagcccattcccctcacatgatgatcggacctaataacagttcaattggcgctcccagccccggtcctcccggtcccggtatgtcccccgtccagctggccttcagcgactttcttagttgcgctcagcacggtcccctggtgtacggtctgtcttgcatgttgcagaccgtgaccctctgctgcccgtctgcattagtctggaactattcaaccaatgaaaacaaatcagcgaaccccggatctcccctagaccttctgcaagtggcaccaagcagtcttcctatgccgggggggaatacagccttcaaccagcaggttagggccaggatctatgaagtcgagcaacaaattaagcagaggggaagagcagtggaggtgcgctggtcctttgataagtgccaggagagtaccgctggggtcactatcagccgcgtgcttcacaccctggaggtcctggacaggcattgctttgaccgaactgacagttcaaactctatggaaaccttataccataagatcttctgggcaaaccagaataaagacaaccaggaagtcgcccctaatgacgaggccgttgttactctgctgtgcgagtgggccgtgtcatgcaagcggtctggtaaacaccgcgcgatggccgtggctaaacttctggagaagcgccaagcggagatcgaggcagaaaggtgcggcgagtcggaggttctagatgaaaaggaatccatatcgtctagttccctcgccggttccagtctgcccgtctttcagaacgtgctgctcagattcctcgatactcaagcaccttcactctccgaccccaattctgaatgtgaaaaggttgagtttgttaacctcgtgttacttttctgtgagttcatcaggcatgatgtgttttcccacgacgcatacatgtgcacacttatttctagaggtgacttgagcgtaactgcgtctacaaggcccaggtcgcccgttggagaaaacgccgatgagcattatagcaaagaccatgatgtgaagatggaaattttctctcctatgccaggagaatcctgcgaaaatgctaatacaagcctgggccgcagaatgtccgtgaactgtgaaaagttggttaagcgagaaaagccgcgcgagttaatttttccgtccaactatgacctgctgagacacctgcagtatgccacccacttcccgatccctctggtgagccactgcttcagctag

SEQ ID NO: 230037 - DNA, 6438 bp, Artificial Sequence
  derived and/or modified sequence
atggctgcatttggattactgtcttacgaacagcggcccctgaagcgtcctagactgggacccccagatgtgtacccacaagacccgaagcaaaaggaggacgagctcactgcagtaaacgtcaagcagggctttaataaccaacctgcttttaccggcgatgagcacgggtcagcacggaatatcgttatcaacccctccaaaatcggcgcctatttcagcagtatcctcgccgagaaattaaaactgaataccttccaagatactgggaagaaaaagccacaggtcaatgctaaagacaactattggctcgtcaccgcccggagccagtctgctatccactcctggttttctgacttggcggggaataaacctctgtctatcctggcaaaaaaggtgcccattctgtcaaagaaagaagatgtgtttgcctatctggctaagtacagcgtgcctatggttcgcgccacttggctcatcaaaatgacttgcgcatactacagtgccatttctgaggcgaagatcaagaagagacaggcacccgacccaaatttggagtggactcaaatttccacacggtatctcagggagcagctggccaaaatctcagacttctatcacatggcgagctcaacaggagatggcccagtgcccgtgccacctgaggtggagcaggccatgaagcagtgggagtacaacgaaaagcttgcttttcatatgtttcaagagggaatgctcgagaagcatgagtacctgacatggatactcgacgttctagagaagatcaggcctatggatgatgacctcctgaaattgctgctcccgctgatgttgcaatactccgacgaattcgtgcagagtgcttacctgtcccgccgtctggcgtacttttgcgctagacgcctgtccctgcttctctccgattcaccaaaccttctagctgcccatagtccacacatgatgatcggtcctaataactcttctatcggagctcctagcccaggtccaccaggtcccgggatgagtcccgttcagctggcattctccgattttctgtcatgtgcccagcacggacccttggtctacggcctgtcatgtatgcttcagacagtcaccttgtgttgtcccagtgccctggtgtggaactattccacaaatgagaacaaaagcgccaatcccggctctccactggatctgttacaggtcgctccatcttctctacccatgcccggtgggaatactgcttttaaccaacaagtacgggcacgcatctacgaggtcgagcagcagatcaaacaaaggggacgcgctgtggaagtgcggtggtccttcgataaatgccaggaatccacagctggggtgacaatttcaagggtactgcacaccctcgaggtactggatcgacattgcttcgacaggacagactcatctaattccatggagacgctctatcataaaattttctgggcaaatcagaacaaggacaaccaagaagtggcccccaatgatgaggccgtggttactctgctctgcgagtgggcagtgtcctgcaagagatccggcaaacaccgggcgatggctgtggcgaaactgctcgaaaaacgccaggctgagatcgaggccgagaggtgcggagagtccgaggtgctagacgagaaagaatccatatcctcctctagccttgccggatcctcattaccggtctttcagaatgttctgttgagatttctggacactcaggctccctccctgtctgatccaaatagtgaatgtgagaaggttgagtttgtcaatttggtcctgttattctgtgaattcattagacacgatgtattcagccacgatgcttacatgtgtactctgattagtagaggggacctgtcggttacagcctctacccgtccaagaagccccgtgggcgagaacgccgacgagcactacagcaaggaccatgatgtgaagatggagatttttagccctatgcctggcgaaagttgtgagaatgccaacacctcgttggggagacgaatgagtgtaaattgcgaaaagctggtcaaaagagagaagccgagggagctgatcttcccctccaattacgacctgttgcgacatctgcagtacgcaacccacttcccaattccattggatgagtccagtagtcatgagtgcaatcaacgcactatcctgctttatggtgtgggcaaggaacgcgatgaagcaagacatcagctgaaaaaaatcaccaaagatatccttaagattctcaataaaaaatcaactacggagacgggcgtcggagacgaggggcagaaagcacgcaaaaacaagcaggagacttttcccactcttgagacagttttcacaaagctccaactgctctcatatttcgatcagcaccaggtgacgtcccaaatcagtaacaacgtgttggaacaaatcacaagcttcgcctcaggcacgagttatcacttaccactggctcatcacatccagctgatattcgacttaatggaaccagccctaaatatcaatggtttgatagacttcgctattcagttgttaaacgagctgtcagtcgtcgaggcagagttactgctgaagtcatcatccctggctggttcatacacaactggactatgcgtctgcatcgtcgccgttctgcggcggtaccacagttgtttgatcttgaatcctgatcagacagcccaggtcttcgaagggctgtgcggtgtggtgaaacacgtggtaaacccaagtgaatgctcttcccccgaacgatgcatcctggcttacttgtatgatctgtatgtgtcttgttcccatctgcgatcaaagtttggagatttatttagctccgcctgtagtaaggtgaagcaaactatttataacaacgtaatgcccgccaacagtaacctgcggtgggaccccgatttcatgatggatttcatagaaaatccgtccgccaggtctatcaattatagtatgttggggaaaatcctgtccgataacgccgccaaccgctacagctttgtttgcaatacgctgatgaatgtgtgcatgggtcaccaggatgcggggcgcatcaacgacatcgcaaatttcagctctgaattgaccgcatgttgcactgtgctcagttctgagtggctgggggtgctcaaggcactgtgttgctcatctaaccacgtctggggtttcaatgatgtcttatgtacagtcgacgtatctgatcttagttttcacgactctcttgctaccttcatagcgatccttatcgctcggcagtgtttttcattagaagacgttgtgcagcacgtggcactgccaagtctcctggccgcagcgtgcggagacgccgacgcagagccaggcgctcgaatgacatgtcgactgctgctccaccttttcagggcgccccaggcatgctttctgccccaggcgacaggaaagcctttcccaggcataagaagcagctgcgatcggcacctgttagcggcagcacataacagtatcgaagtgggggcagtcttcgcagttctaaaagcgatcatgatgctgggggatgctaagatcggtaataattccgtgtcatctctgaaaaacgacgactttactatgagaggcctgagatgcgacggcaacgcagacgatatttggactgccagccagaatcctaagagctgcgggaaaagcatctcaattgagaccgcaaatcttcgcgagtatgcaaggtacgtcctgcgcacaatatgccagcaggagtgggttggcgagcactgcctcaaagagccggagagactttgtacagataaagagcttatcctggatcccgttttgtccaatatgcaagcccagaaactcctgcagctgatctgttacccacacggcattaaagaatgtacagaaggtgataacctgcaaagacagcatattaaacgcattctgcagaacttggagcaatggacattacgacagagctggctggaactgcagttgatgataaaacagtgtctgaaggatcccgggagcggttctgttgctgaaatgaacaatctcctggataacatcgccaaggctaccatcgaggtattccagcaatctgcagacctgaacaacagcagcaacagcgggatgtcactcttcaatcctaactcaattggaagcgccgacacttcctctacccgacaaaacggcattaagacattcctgagttcctctgaacgtcgaggagtctggctggtggcccccttgatagctagactgccaacatctgtacaaggccgggtcctaaaagccgcaggcgaagaactggaaaaagggcagcacttaggatctagctcaaagaaagagcgcgaccggcaaaagcagaagagcatgtccctgctctcccagcaaccgttcctgtccttggtcctaacgtgcctgaagggacaggatgaacaaagggaggggcttctgaccagtcttcagaatcaggtgaaccaaatccttagcaactggagagaagaaaggtatcaggatgacattaaggcacgtcagatgatgcacgaagccctgcagctccggcttaatttggtggggggcatgttcgacactgtgcagagaagtacacaatggactacggattgggctctcttgctcctccagatcataacaagcggaacagttgacatgcacaccaacaacgagctgttcacaacagtgctggatatgttgggagtgctgatcaacggcaccctcgcctcagacctctctaacgcttcccccggaggaagtgaggaaaacaagcgcgcttatatgaacctcgtgaaaaagctgaaaaaagaactcggtgacaaacgcagcgaatccattgacaaggtgagacagctcctccccctccctaagcagacctgcgacgtaatcacttgtgagcctatgggctctctgattgacaccaagggaaataagatcgctggttttgatagtattgacaagaaacaggggctgcaggtatcaactaaacagaaggtgtccccgtgggatctttttgaggggcagaagaaccctgcacctctcagctgggcatggttcgggacagttcgcgtcgaccggcgggtgattaaatatgaggagcagcaccacttactactctaccacactcatcccatgcctaaacctagaagttactacctgcagccacttccactgcctcccgaggaagaagaagaggagcctacttccccagtttcacaggagcccgagaggaagtctgccgagctctccgatcaggggaagactacaacggatgaagaaaagaagactaagggccgcaaaaggaagaccaaatcatcctcaagggtagatgagtacccccagagcaacatctaccgggtccctccgaattactctccaatatccagccagatgatgcaccacccacagtccaccctttggggatataatctggtgggtcaacctcagcaacctggcttttttttgcaaaaccagagcctaacccccggaggatctagactagatcctgctggaagcttcgttcccactaacacgaaacaagccctgagcaacatgctacaacggagatccggggccatgatgcagccaccttccctccatgccattacatcacaacagcagttgatccagatgaagttgcttcaacagcagcagcaacagaggctgttacgccaggcccagacacgcccctttcagcagggccagcccggcgaccaggccgcactctttgcggctcaggcacgaccatcacctcagctgcctcagtacccaggtctgcaacaggcacagacaatgcctcaagggtatacgatgtatggtactcagatgcctctgcagcaaacaagccaacagcaggctgggtccgtcgtcctgtccccttcgtacaacagtcgcgcctatcccgcggcccatagcaatccggtgctgatggagcgactgaggcaaattcagcagcagccgagtggctacgtccagcagcaggcctccccctatttgcagcctttaaccggttcacagaggctcaatcatcaagccttgcagcagtctcccctggttggtggaggcatcgatgccgttttgaccagtgcacatcctaatcttccttccgtcccactcccacaggacccaatgcggccacggcagccccaggtgagacagcagcagcgcttgttgcaaatgcagcaaccgcagcaaccgcagccccagcagcccccccagccccaacaatccagccagtcacagagccagacccttggactacaggctatgcagcctcagcagcccttgttcccaagacagggtcttcaacaaacacagcagcagcagcagactgccgcccttgtgagacagttgcaaaagcagctgtcatccaaccagccgcagcaaggggtgaccccttatggacatccgtcgcatttttag

SEQ ID NO: 230038 - DNA, 2166 bp, Artificial Sequence
  derived and/or modified sequence
atggccgccttcggcctgctgtcctatgagcagaggcccctgaagaggccccggctgggccccccagatgtgtacccccaggaccccaagcagaaggaggatgagctgacagctgtgaatgtgaagcagggcttcaacaaccagcctgccttcaccggagatgagcacggcagcgccaggaacatcgtcatcaaccccagcaagattggagcctacttcagcagcatcctggccgagaagctgaagctgaacaccttccaggacaccgggaagaagaagccccaggtgaatgccaaggacaactactggctggtgacagcccggagccagagcgccatccacagctggttcagtgacctggccggcaacaagcccctgagcatcctggccaagaaggtgcccatcctgagcaagaaggaggatgtgtttgcctacctggccaagtacagcgtgcccatggtgcgggccacctggctgatcaagatgacctgtgcctactacagcgccatcagcgaggccaagatcaagaagaggcaggccccagaccccaacctggagtggacccagatcagcacccgctacctgcgggagcagctggccaagatcagtgacttctaccacatggccagcagcactggagatggccctgtgcctgtgcccccagaggtggagcaggccatgaagcagtgggagtacaatgagaagctggccttccacatgttccaggagggcatgctggagaagcatgagtacctgacctggatcctggatgtgctggagaagatccggcccatggatgatgacctgctgaagctgctgctgcccctgatgctgcagtacagtgatgaatttgtgcagagcgcctacctgagccggcggctggcctacttctgtgcccggcggctgagcctgctgctgagtgacagccccaacctgctggccgcccacagcccccacatgatgattggccccaacaacagcagcattggagcccccagccctggccccccaggccctggcatgagccctgtgcagctggccttcagtgacttcctgagctgtgcccagcacggccccctggtgtatggcctgagctgcatgctgcagacagtgaccctgtgctgccccagcgccctggtgtggaactacagcaccaatgaaaacaagagcgccaaccctggcagccccctggacctgctgcaggtggcccccagcagcctgcccatgcctgggggcaacacagccttcaaccagcaggtgcgggcccgcatctatgaggtggagcagcagatcaagcagaggggccgggctgtggaggtgcgctggagctttgacaagtgccaggagagcacagctggggtgaccatcagccgggtgctgcacaccctggaggtgctggacagacactgctttgacagaacagacagcagcaacagcatggagaccctgtaccacaagatcttctgggccaaccagaacaaggacaaccaggaggtggccccaaatgatgaagctgtggtgaccctgctgtgtgagtgggccgtgtcctgcaagaggtctgggaagcaccgggccatggctgtggccaagctgctggagaagaggcaggccgagattgaagctgagcgctgtggggagagcgaggtgctggatgagaaggagagcatcagcagcagcagcctggccggcagcagcctgcctgtgttccagaatgtgctgctgcgcttcctggacacccaggcccccagcctgagtgaccccaacagtgaatgtgagaaggtggagtttgtgaacctggtgctgctcttctgtgagttcatcagacatgatgtgttcagccatgatgcctacatgtgcaccctcatcagcagaggagacctgtctgtgacagccagcacccggcccaggagccctgtgggagaaaatgctgatgagcactacagcaaggaccatgatgtgaagatggagatcttcagccccatgcctggagagagctgtgaaaatgccaacaccagcctgggccgcaggatgtctgtgaactgtgagaagctggtgaagcgggagaagccccgggagctgatcttccccagcaactatgacctgctgcggcacctgcagtatgccacccacttccccatccccctggtgagccactgcttctcctag

SEQ ID NO: 230039 - DNA, 6438 bp, Artificial Sequence
  derived and/or modified sequence
atggccgccttcggcctgctgtcctatgagcagaggcccctgaagaggccccggctgggccccccagatgtgtacccccaggaccccaagcagaaggaggatgagctgacagctgtgaatgtgaagcagggcttcaacaaccagcctgccttcaccggagatgagcacggcagcgccaggaacatcgtcatcaaccccagcaagattggagcctacttcagcagcatcctggccgagaagctgaagctgaacaccttccaggacaccgggaagaagaagccccaggtgaatgccaaggacaactactggctggtgacagcccggagccagagcgccatccacagctggttcagtgacctggccggcaacaagcccctgagcatcctggccaagaaggtgcccatcctgagcaagaaggaggatgtgtttgcctacctggccaagtacagcgtgcccatggtgcgggccacctggctgatcaagatgacctgtgcctactacagcgccatcagcgaggccaagatcaagaagaggcaggccccagaccccaacctggagtggacccagatcagcacccgctacctgcgggagcagctggccaagatcagtgacttctaccacatggccagcagcactggagatggccctgtgcctgtgcccccagaggtggagcaggccatgaagcagtgggagtacaatgagaagctggccttccacatgttccaggagggcatgctggagaagcatgagtacctgacctggatcctggatgtgctggagaagatccggcccatggatgatgacctgctgaagctgctgctgcccctgatgctgcagtacagtgatgaatttgtgcagagcgcctacctgagccggcggctggcctacttctgtgcccggcggctgagcctgctgctgagtgacagccccaacctgctggccgcccacagcccccacatgatgattggccccaacaacagcagcattggagcccccagccctggccccccaggccctggcatgagccctgtgcagctggccttcagtgacttcctgagctgtgcccagcacggccccctggtgtatggcctgagctgcatgctgcagacagtgaccctgtgctgccccagcgccctggtgtggaactacagcaccaatgaaaacaagagcgccaaccctggcagccccctggacctgctgcaggtggcccccagcagcctgcccatgcctgggggcaacacagccttcaaccagcaggtgcgggcccgcatctatgaggtggagcagcagatcaagcagaggggccgggctgtggaggtgcgctggagctttgacaagtgccaggagagcacagctggggtgaccatcagccgggtgctgcacaccctggaggtgctggacagacactgctttgacagaacagacagcagcaacagcatggagaccctgtaccacaagatcttctgggccaaccagaacaaggacaaccaggaggtggccccaaatgatgaagctgtggtgaccctgctgtgtgagtgggccgtgtcctgcaagaggtctgggaagcaccgggccatggctgtggccaagctgctggagaagaggcaggccgagattgaagctgagcgctgtggggagagcgaggtgctggatgagaaggagagcatcagcagcagcagcctggccggcagcagcctgcctgtgttccagaatgtgctgctgcgcttcctggacacccaggcccccagcctgagtgaccccaacagtgaatgtgagaaggtggagtttgtgaacctggtgctgctcttctgtgagttcatcagacatgatgtgttcagccatgatgcctacatgtgcaccctcatcagcagaggagacctgtctgtgacagccagcacccggcccaggagccctgtgggagaaaatgctgatgagcactacagcaaggaccatgatgtgaagatggagatcttcagccccatgcctggagagagctgtgaaaatgccaacaccagcctgggccgcaggatgtctgtgaactgtgagaagctggtgaagcgggagaagccccgggagctgatcttccccagcaactatgacctgctgcggcacctgcagtatgccacccacttccccatccccctggatgagagcagcagccatgagtgcaaccagaggaccatcctgctgtatggagtgggcaaggagagagatgaggcccggcaccagctgaagaagatcaccaaggacatcctgaagatcctgaacaagaagagcaccacagaaacaggagtgggagatgagggccagaaggccaggaagaacaagcaggagaccttccccaccctggagaccgtcttcaccaagctgcagctgctgagctactttgaccagcaccaggtgaccagccagatcagcaacaacgtgctggagcagatcaccagctttgccagcggcaccagctaccacctgcccctggcccaccacatccagctgatctttgacctgatggagcccgccctgaacatcaatggcctgattgactttgccatccagctgctgaatgagctgtctgtggtggaggccgagctgctgctgaagagcagcagcctggccggcagctacaccaccggcctgtgtgtgtgcatcgtggccgtgctgcggcgctaccacagctgcctgatcctgaacccagaccagacagcccaggtgtttgagggcctgtgtggggtggtgaagcacgtggtgaaccccagcgagtgcagcagccctgagcgctgcatcctggcctacctgtatgacctgtatgtgtcctgcagccacctgcggagcaagtttggagacctcttcagcagcgcctgcagcaaggtgaagcagaccatctacaacaacgtgatgcctgccaacagcaacctgcgctgggaccctgacttcatgatggacttcatcgagaaccccagcgcccggagcatcaactacagcatgctgggcaagatcctgagtgacaatgctgccaaccgctacagctttgtgtgcaacaccctgatgaatgtgtgcatgggccaccaggatgctggccgcatcaatgacatcgccaacttcagcagcgagctgacagcctgctgcaccgtgctgagcagcgagtggctgggcgtgctgaaggccctgtgctgcagcagcaaccacgtgtggggcttcaatgatgtgctgtgcaccgtggatgtgtctgacctgtccttccatgacagcctggccaccttcatcgccatcctgattgcccggcagtgcttcagcctggaggatgtggtgcagcacgtggccctgcccagcctgctggccgccgcctgtggagatgctgatgctgagcccggggccaggatgacctgccgcctgctgctgcacctgttccgggccccccaggcctgcttcctgccccaggccaccgggaagcccttccctggcatccgcagcagctgtgacagacacctgctggccgccgcccacaacagcattgaggtgggcgctgtgtttgctgtgctgaaggccatcatgatgctgggagatgccaagattggcaacaacagcgtgagcagcctgaagaatgatgacttcaccatgaggggcctgcgctgtgatggaaatgctgatgacatctggacagccagccagaaccccaagagctgtgggaagagcatcagcattgaaacagccaacctgcgggagtatgcccgctacgtgctgcggaccatctgccagcaggagtgggtgggggagcactgcctgaaggagcctgagcggctgtgcacagacaaggagctgatcctggaccctgtgctgagcaacatgcaggcccagaagctgctgcagctgatctgctacccccacggcatcaaggaatgtacagaaggagacaacctgcagaggcagcacatcaagaggatcctgcagaacctggagcagtggaccctgcggcagagctggctggagctgcagctgatgatcaagcagtgcctgaaggaccccggcagcggctctgtggccgagatgaacaacctgctggacaacatcgccaaggccaccatcgaggtgttccagcagagcgctgacctgaacaacagcagcaacagcggcatgagcctcttcaaccccaacagcatcggcagcgctgacaccagcagcacccggcagaatggcatcaagaccttcctgagcagcagcgagcggcggggcgtgtggctggtggcccccctcatcgcccggctgcccacctctgtgcagggccgggtgctgaaggctgctggggaggagctggagaagggccagcacctgggcagcagcagcaagaaggagcgggaccggcagaagcagaagtccatgagcctgctgagccagcagcccttcctgagcctggtgctgacctgcctgaagggccaggatgagcagcgggagggcctgctgaccagcctgcagaaccaggtgaaccagatcctgagcaactggagggaggagcgctaccaggatgacatcaaggcccggcagatgatgcatgaggccctgcagctgcggctgaacctggtgggcggcatgtttgacacagtgcagaggagcacccagtggaccacagactgggccctgctgctgctgcagatcatcaccagcggcaccgtggacatgcacaccaacaatgagctgttcaccaccgtgctggacatgctgggcgtgctgatcaatggcaccctggccagtgacctgagcaatgccagccctgggggcagcgaggagaacaagagggcctacatgaacctggtgaagaagctgaagaaggagctgggggacaagaggtctgagagcattgacaaggtgcggcagctgctgcccctgcccaagcagacctgtgatgtgatcacctgtgagcccatgggcagcctgattgacaccaagggcaacaagattgctggctttgacagcattgacaagaagcagggcctgcaggtgtccaccaagcagaaggtgagcccctgggacctgtttgagggccagaagaacccagcccccctgtcctgggcctggtttggaacagtgcgggtggaccggcgggtcatcaagtatgaggagcagcaccacctgctgctgtaccacacccaccccatgcccaagcccaggagctactacctgcagcccctgcccctgcccccagaggaggaggaggaggagcccaccagccctgtgtcccaggagcctgagaggaagtctgctgagctgagtgaccagggcaagaccaccacagatgaggagaagaagaccaagggcaggaagaggaagaccaagagcagcagccgggtggatgagtacccccagagcaacatctacagagtgccccccaactacagccccatcagcagccagatgatgcaccacccccagagcaccctgtggggctacaacctggtgggccagccccagcagcccggcttcttcctgcagaaccagagcctgacccctgggggcagccggctggaccctgctggcagctttgtgcccaccaacaccaagcaggccctgagcaacatgctgcagaggagaagtggggccatgatgcagccccccagcctgcacgccatcaccagccagcagcagctgatccagatgaagctgctgcagcagcagcagcagcagaggctgctgcggcaggcccagacccggcccttccagcagggccagcccggggaccaggccgccctgtttgctgcccaggcccggcccagcccccagctgccccagtacccaggcctgcagcaggcccagaccatgccccagggctacaccatgtatggcacccagatgcccctgcagcagaccagccagcagcaggccggctctgtggtgctgagccccagctacaacagccgggcctacccagctgcccacagcaaccctgtgctgatggagcggctgcggcagatccagcagcagcccagcggctacgtgcagcagcaggccagcccctacctgcagcccctgaccggcagccagaggctgaaccaccaggccctgcagcagagccccctggtgggcggcggcattgatgctgtgctgaccagcgcccaccccaacctgcccagcgtgcccctgccccaggaccccatgaggccccggcagccccaggtgcggcagcagcagaggctgctgcagatgcagcagccccagcagccccagccccagcagcccccccagccccagcagagcagccagagccagagccagaccctgggcctgcaggccatgcagccccagcagcccctcttcccccggcagggcctgcagcagacccagcagcagcagcagacagctgccctggtgcggcagctgcagaagcagctgagcagcaaccagccccagcagggcgtgaccccctacggccaccccagccacttctag

SEQ ID NO: 230040 - DNA, 2757 bp, Artificial Sequence
  derived and/or modified sequence
gtccgctccacagcttcttcccgggaggggagggccaccctcgccttgggcgagcacttcagccaccagcctaggcgccaagaaaagtttttttttttttttttccagtgccccacccccacccccatcctgcgcccagctggggtgggtttgggtccattggtgaaaaaagtcacacgttcccatcagctgctcctccccctggagacaaggtaggggggagcagaggaggcaggcgccgcggaggaccctggccgacctctagtccctccgccgccgccaccggagcggtgcgtcccggggctcgagcgcagccgagtacccgccgaaggctgtccccatcagtgcgtgtctgctgccgggcagcggcagcatccaacctgctttattcctcctgcctgcagcgccacagcgagcgagcgagcgaggagggggagagagggagtctgtctgcaaagtgctgctccctggtgctcagaggcggctgctccagctccaactctcattcatttcgccggttaacatgagagatcatggccgccttcgggcttctcagctatgagcagagaccgctgaagcgcccccggctcgggccgcccgacgtctacccacaggaccccaagcagaaggaggatgaacttactgctgtgaatgtaaagcaaggcttcaataatcagccagccttcactggagatgaacatggctcagccagaaatattgtaattaacccatcaaagattggagcttattttagcagcatattagctgagaaactgaagcttaacactttccaggacacgggaaagaagaaaccacaagttaatgctaaagataattattggctggttactgctcgatcccagagtgcaattcatagttggttttctgacttagcaggaaataagccactttctattttggcaaaaaaggttcctatccttagtaaaaaagaggatgtttttgcatatttagctaaatattctgtgccaatggttcgagcaacgtggctgatcaagatgacttgtgcctattattctgctatatctgaagctaaaattaagaaacgtcaggctcctgatccgaatttggagtggacacagatatctaccagatatcttcgagagcagttggccaagatttctgacttttaccacatggcctccagcacgggcgatggccctgtccctgtgccaccagaggtggagcaagccatgaagcaatgggaatacaacgaaaagctagcatttcacatgttccaggaaggaatgttagaaaaacacgaatatttgacatggatcctggatgttttagaaaagatcagaccaatggatgatgatcttcttaaactcttgctaccactaatgctgcagtattcagatgagtttgttcagtcggcctacctgtctcgtcgtcttgcctacttttgtgcccggcgtctttccttgctgctgagcgatagccccaacctccttgctgcccactcaccccacatgatgataggaccaaacaactcgagtatcggggcccccagccctggcccccccggccctggcatgagccccgtgcagctggccttctcagattttctttcctgtgcacagcatggtcccctggtttatggacttagttgtatgttgcagactgtcactctctgttgcccaagtgccttggtgtggaattattccacaaatgaaaataagagcgcaaacccaggctcacccctggatctgctgcaggtggccccgtccagcctccccatgccgggtgggaacacggctttcaatcagcaggttcgggcaaggatttatgaagtagaacaacagataaaacaaagaggccgtgcagtggaagttcggtggtcatttgacaagtgccaagaatccacagcaggggtgactattagtcgggttttgcacacgttggaagttttggatcgtcactgttttgaccgaactgattccagcaattccatggagacactttatcataagattttctgggcaaaccaaaacaaagataaccaagaggttgcgcccaacgatgaagctgtggtgacgctgttatgtgaatgggccgtgagctgcaaacggtctggcaagcacagggccatggctgtggcaaaactcctggagaagaggcaagcagaaattgaggcagagagatgtggtgaatcagaagtcttagatgagaaggagtctatttcttcatcctctcttgctggatccagtttgcctgttttccagaatgtgctgttaaggtttttagatacacaggccccctctttgtcggacccaaacagtgaatgtgaaaaggtggaatttgtgaacctggtgctgctcttctgcgagttcatccgccatgatgtcttctcccatgacgcatacatgtgtaccctcatatctcgaggagatttgtcagtcactgcctcaactcggccgcggtcaccagtaggggaaaatgcagatgaacactattcaaaggaccatgatgtgaaaatggagattttttctcctatgcctggagaatcctgtgagaatgccaacacttcgttgggcagaagaatgtcagttaattgtgagaagttggtgaagagggaaaagccaagggaattaatttttccatctaattatgacctccttcgccacttacagtatgcaacacattttcctatacctctggtaagtcattgcttcagttaatctataccctgattattttattataagatcaataactgttgaacgtcagattattcaa

SEQ ID NO: 230041 - DNA, 10744 bp, Artificial Sequence
  derived and/or modified sequence
ccaactctcattcatttcgccggttaacatgagagatcatggccgccttcgggcttctcagctatgagcagagaccgctgaagcgcccccggctcgggccgcccgacgtctacccacaggaccccaagcagaaggaggatgaacttactgctgtgaatgtaaagcaaggcttcaataatcagccagccttcactggagatgaacatggctcagccagaaatattgtaattaacccatcaaagattggagcttattttagcagcatattagctgagaaactgaagcttaacactttccaggacacgggaaagaagaaaccacaagttaatgctaaagataattattggctggttactgctcgatcccagagtgcaattcatagttggttttctgacttagcaggaaataagccactttctattttggcaaaaaaggttcctatccttagtaaaaaagaggatgtttttgcatatttagctaaatattctgtgccaatggttcgagcaacgtggctgatcaagatgacttgtgcctattattctgctatatctgaagctaaaattaagaaacgtcaggctcctgatccgaatttggagtggacacagatatctaccagatatcttcgagagcagttggccaagatttctgacttttaccacatggcctccagcacgggcgatggccctgtccctgtgccaccagaggtggagcaagccatgaagcaatgggaatacaacgaaaagctagcatttcacatgttccaggaaggaatgttagaaaaacacgaatatttgacatggatcctggatgttttagaaaagatcagaccaatggatgatgatcttcttaaactcttgctaccactaatgctgcagtattcagatgagtttgttcagtcggcctacctgtctcgtcgtcttgcctacttttgtgcccggcgtctttccttgctgctgagcgatagccccaacctccttgctgcccactcaccccacatgatgataggaccaaacaactcgagtatcggggcccccagccctggcccccccggccctggcatgagccccgtgcagctggccttctcagattttctttcctgtgcacagcatggtcccctggtttatggacttagttgtatgttgcagactgtcactctctgttgcccaagtgccttggtgtggaattattccacaaatgaaaataagagcgcaaacccaggctcacccctggatctgctgcaggtggccccgtccagcctccccatgccgggtgggaacacggctttcaatcagcaggttcgggcaaggatttatgaagtagaacaacagataaaacaaagaggccgtgcagtggaagttcggtggtcatttgacaagtgccaagaatccacagcaggggtgactattagtcgggttttgcacacgttggaagttttggatcgtcactgttttgaccgaactgattccagcaattccatggagacactttatcataagattttctgggcaaaccaaaacaaagataaccaagaggttgcgcccaacgatgaagctgtggtgacgctgttatgtgaatgggccgtgagctgcaaacggtctggcaagcacagggccatggctgtggcaaaactcctggagaagaggcaagcagaaattgaggcagagagatgtggtgaatcagaagtcttagatgagaaggagtctatttcttcatcctctcttgctggatccagtttgcctgttttccagaatgtgctgttaaggtttttagatacacaggccccctctttgtcggacccaaacagtgaatgtgaaaaggtggaatttgtgaacctggtgctgctcttctgcgagttcatccgccatgatgtcttctcccatgacgcatacatgtgtaccctcatatctcgaggagatttgtcagtcactgcctcaactcggccgcggtcaccagtaggggaaaatgcagatgaacactattcaaaggaccatgatgtgaaaatggagattttttctcctatgcctggagaatcctgtgagaatgccaacacttcgttgggcagaagaatgtcagttaattgtgagaagttggtgaagagggaaaagccaagggaattaatttttccatctaattatgacctccttcgccacttacagtatgcaacacattttcctatacctctggatgaatcttcaagtcatgaatgtaaccagcgcacaatccttctctatggagtcggcaaagagcgtgatgaagcaaggcatcagctgaagaagattaccaaagatatcctgaaaattctaaataagaagagcaccacagagacaggggttggggacgaaggacaaaaagccaggaagaacaaacaggagacatttccaacactggagactgtgttcactaaactccagctcctttcatattttgatcaacatcaagtgacatctcagatttctaacaatgtgctagaacaaatcacaagctttgcgtcaggaacatcctatcatctccctttggctcaccacattcagctcatctttgatctcatggagccagcactgaacatcaacggactaattgacttcgcaatacagttactaaatgaactgagtgttgtggaagctgaactgctcctaaaatcctccagcctggcaggaagttatacaacaggactgtgtgtctgcatcgtggctgttctcaggcgctatcacagttgtctaatcttgaatcctgatcagacagcccaggtgtttgaagggttgtgtggtgtggtcaagcatgtcgtaaacccctcagaatgttcttcccctgaaagatgcattttagcctacctctatgatctctatgtgtcatgtagccacctcagaagtaaatttggagacctcttcagtagtgcctgttcaaaagtaaagcaaaccatatataataacgtgatgcctgcaaattcgaacttgcgatgggatccagacttcatgatggattttattgagaatccctcagcccgcagcatcaactactcaatgctgggcaagatcctcagtgacaatgcggccaatcgctacagctttgtctgcaatacactcatgaatgtatgtatgggccatcaggatgctggcaggattaacgacatagccaatttctcctctgagcttacggcttgctgcactgttcttagttcagaatggctgggggttctgaaggctctttgttgttcttcaaatcacgtgtgggggtttaatgatgtactttgcactgtagatgtgagtgacctttcattccatgattcattagctactttcattgctattctgatagcacgacagtgtttttccctggaggacgtcgtgcagcatgtcgcacttccctctcttctagcagcagcttgtggggatgcggacgccgagcctggggcgagaatgacatgccgactcttgcttcatctcttccgagctccccaggcctgcttcttacctcaagcaacgggcaaacctttccctggaataagatcatcttgtgatagacacctcttagccgctgctcacaacagcattgaagtgggagccgtgtttgctgtcttaaaagcaattatgatgcttggagatgccaaaattggcaataacagtgtcagctctttaaagaatgatgacttcaccatgagaggtttgcgatgtgatgggaatgctgatgatatctggactgcctcacaaaatccaaaatcctgtgggaaaagcatttccatagaaactgccaatttaagagaatacgctagatatgtactgaggactatctgtcaacaggaatgggtaggagagcattgcttaaaagaacctgaaagattatgtacagacaaagaacttatattggaccctgtgctttcaaatatgcaagcacagaaattactgcagcttatctgttatcctcatggcattaaagaatgtaccgagggggacaatctgcaaagacagcacattaagcgtattcttcagaatcttgagcagtggacactgaggcaatcctggttagaactccagctaatgatcaaacagtgcttgaaggaccctggctctggttctgtggccgaaatgaacaacttactggacaatattgcaaaggcaacaatagaggtattccagcagtctgcagacctaaataattcttctaattctggcatgagcctcttcaacccaaacagtattggaagtgctgatacaagtagcacgagacagaatggaataaagacattcctaagttcctccgaacgcaggggtgtatggttggtggcccccctcatcgccaggttgccaacttctgtgcaaggaagagtgctgaaagccgctggggaagagctggagaagggacagcacttgggttcttcttccaaaaaggaaagggacagacagaaacagaaaagtatgtctcttttgagtcaacaacccttcctctcactggtacttacctgccttaagggacaagatgaacaaagggaaggcctcctaacatctctccagaatcaagttaaccagattttaagtaactggagagaagaacgataccaagatgacataaaagcgcggcagatgatgcacgaagcattgcaactccgcctaaatttggtaggaggaatgtttgacacggtgcagaggagcacccagtggactacagactgggccctgctactccttcagatcattacttcaggaactgttgacatgcacactaacaatgaattattcacaacagttcttgacatgctgggtgttttaatcaatggaacgttagcctctgacctatcaaatgcatcccctgggggatctgaagagaacaagcgtgcatacatgaatttagtaaagaaactgaaaaaagagctaggagacaagcgatcagaaagtattgacaaagttcgacagttactacctttgccgaaacagacatgtgatgtcatcacttgtgaacctatgggttccttgattgacacaaaaggaaacaaaattgctggatttgactctatagataaaaaacagggtctccaggtctctacgaagcagaaggtgtccccgtgggacttgtttgagggtcagaagaacccagctcctttgtcctgggcctggtttgggacagtccgagtggaccgaagagtgatcaagtacgaggagcagcatcacctcctgctgtatcacacacaccccatgcccaagccccgcagttactacctccagccactgcccctgcctcctgaggaggaagaggaagagcccacatctccagtttctcaggaaccagaaaggaagtccgctgagctgtcagatcagggaaaaaccacaacagatgaagaaaagaaaacaaaaggaaggaagcgcaagacgaaatctagctcaagagttgatgaatatccacagagcaacatataccgagtgcctcctaattactcgcctatctcctcccaaatgatgcaccatccacagtccaccttgtggggttacaacctcgtgggccagccccagcagcccggctttttccttcagaaccaatctcttactccaggtggctccagattggaccctgcaggctcctttgtcccaaccaacaccaaacaagctctgtcaaacatgctacagcggcgctcaggcgccatgatgcagccgccttctcttcatgcaatcacatcgcagcagcagttgatacagatgaagcttctgcagcagcagcagcaacagcgacttctcaggcaagcccagactcggcctttccaacagggccagccgggggaccaggctgctctctttgctgcgcaagcacggccctcccctcagctccctcagtatccagggctgcagcaagcacagaccatgccacagggctatacaatgtatgggacacagatgcctttgcagcagacatcgcagcagcaggctggcagtgtggtcctgtctcccagctataactccagagcctatccggccgcacattccaaccccgtgctaatggaaagactcagacagattcagcagcagccgagtggctatgttcagcagcaggcctcgccgtacctgcagcccctgactggctctcagagactgaaccatcaggctctacagcagagccctctggtgggcgggggaattgatgctgtgctgacttctgcacatccaaaccttccctccgtgcccctgcctcaggatcccatgagacccagacagccgcaagttcgacagcagcagagactcctccagatgcagcagccccagcagccccagccccagcagcctccccagccccagcagtcctcgcagtcccagagtcagacccttggtctccaagcaatgcagccccagcagcccttgtttcccaggcaaggcttgcagcagacccagcagcagcagcagacggccgccttggtgcggcagctccagaagcagctttccagcaaccagccacagcaaggagtgactccgtatgggcatccttcacacttctgaatctgcaagaggagaagacatgacgttttatgtttgcactgaaaaacagaaaatcaaatttaatgcattagtcatcttaaaaatgtccctttttttcatttctttgacattttactatattttatgctacatctcacaaaaaaaaaaaaaggtgtttaaacaaaaagccaaggagaagttgtggtttgattttgttgaattcacctttaaagtaggtttacaaatgtgaatcatgcaggcaggcctactcccggaagagtgtgctagcagaccttttgaaattggtgctttttttgaatctcacatttctagaaagaatggattatgatggatctaaggtatttatgtatttcattcattaatgatgacgttgtttttttttttttaattttattttccaaactgtgctggaccaaactactgatttgaaaggcatgtcagatcttgacagaaacatggcctgtttattctgcattcacctgtgatggtgaaacggacatttatttgcatcgctctaatttgaaatgtttgtaatctcataagcactttataaactttgttcttatttatgtaggactcttctttgcttttgttgtggtcaaaaggtgctgaaacagattgttgcttcgtacttaaacttcttaaaccaagaacctaaaccaaggtttctttgagagccgccctaagatgtgcggaaacctgttagaagtagctgtactcaaatttgttttgaggcaagatcattgatgagagtcattgtgaaggtacaacatgtaaatcctaaaggcctgaaagaactgcagtggaatcgtccaactatttattgccagttttggttctcctgaaccttatgccaccttaaggggaaaaaaaaatccagtagctggcttgagattccagtgctcacacttgacatggtttccagagaatctggccccaaagtccagaaggctctggttttcataaaaggtgtatttgctgtttattttgtatggtaagtatttgctcttttgaatttaattattactgtcagtgtcagtcttggttgtgtattgcatatactgtatttataaattggtgcaaaaagcacaagtaaattatacatcaaatttattataaagaaatagtaactattttaactttgttcaagtatgtggtaatttgctcctattagagtaaaaaagaaaccagtaaattatcagtttgtgtaacttaagagtattctatataatatttttttagatttagatgcataaaattttgaatgtgaaaattgcagggcattttaaaacatatgtgggggatattttcccatgttctctgttatttcattttcttttgccatatgattttacatataatatagtcaagcatactgtgaatagacttgtctataatgagcagaccatgtaaatctactttttttaaaatgtagctagtacaactttagtagacattttcttttgcaaatcattatctataaataatttatatcttcctgggtgagttactcattgcaaagtttgactcatgcaaatgacctcaaatacatgtcagcttactttgctgtggcaacatccatgtgaactgctttgtacactgtgaaaatatttcactccagcctgcccattttgtgtttactctgggctggaaaagactttgccaaaacattaaaaactattcttttcactaaattaatagtctatctgctttcagaagatgtatcatctatctgtacacatttttgctggttttgtatatcagattttttcctctcaagaaacatacttagataagctaatgaagttgttttcttcaaagtaatatatctatataatgactgcattggcaaatcaaccgaaatgtgaatgttgtgcctagtgagtgagtcatgttccatcattatttctttccaaatttctttgccagttcagtttgaaccatatattttgtagctcagcattgcaaacaacagtaatactgttttaagaatgagtgttataattgcatagcatttgtatgcactttatactttgcagaggtgagttaaattattaatcattttgcacatgaaagctgtggggcatatcttttttctttttttaggtgaggaagttatgctacgactctaattaattccacgattctattgaaagttgaggaatgctgttttacccctgcgcattataaagaaaataactagaattactttagtcttcagattttctccctgttaattctgtatcttgagaggtttcttttttttttttttttttttcttttcttgcaaatgcattcttttgcattaagatggtcacaaggtaaagccctgtggcagaacctggtactttaccttaccagaggaaattaccttagaataagatggagcgagaccccagctccccttaaagacaagaccttgaaatcaaatggagtcagctatacctatcaatcaatcacagttcttggatataagaagcccatagactctcttgtttacactgtaggctttttcttaatagggttgcatttgtcagtcattgcatttacccttcttggcctggaagtagaggagatcaatgcgtagctttgaccacttccagccacagggtactaacatcagacataagttgcaaccaggtcacattttaggctgagatggggctaactgaaagtcagtgtgatgaaaacccaagggcgctattccacatgtctcaaatgattggcaggggctaacttattagtaattctcggttttgtgcactgagatatctaagacctatggcatttttttcccatttataaagctcctataattcttaagtaagtactaggtgaatgtttgaatagatgctggagaaattacactggaaaaccccacccctagatttagataagatcaatcatttaatattccccaaattaattcaggttgaattaagcatgtaatataaattcagtgaattacaaaaacacattttgtgtaggattgatcagattttaaatacagtgaaacttcattatatataatagacctagaccctcccaagcattttcccatcccataaagaattaatgaaatgaaatgcttatagagcaacgattcctgctcagaaaaatttccttataaacagctccaaaccaggggtgcctgagctagattttaaagttataaagaagtttcattgtatttttaaaacctttttaatgggtgtatttggacaaaaataacccccttttcacattttatgatgtgcaggtattacattgctttttacatgtggaaaagtgagcctgcatttatttttaaatgcagttattaaaacatttttgtattccccatcaatgaaaattttcagtgtgaacaaatggtgaatcataagacagttcagtgcttattttctgtaggttttagcaaaaaaatttataaaccacaaaatatttatacatcaggatggtaaatttacatcataaagattgcagatttaatattttccattgtctctgttctgagtgccatgcttgtaacattgataggaggtggacactaggcaactggtattagaagttcatttttttactgaaaaattcaggtacattagccatttgttattttatagtgaaccgtttcaatgtttgtttattgttatttgttggcaaaataaaagtgccttaagttaaaagtttgttttgagatccattaaataaatcagtatcatcagttcataatgcatttatttacaagtccttttattttgcatgttcattgtaaatttaatactgtaaatgtattcaaattcatttacatgcctatggctgcctttgattaaacttcttccaaaaaataaattctgcccagatgttgttgactttattatttcatgtcagattacttgaatatacgttgctgcataatcactaccaagtgggttctttgctgtgcatttgtatatcccagaatcggaggtttggggattctgaatgactagggtaccttgtaagtgaagctgctcacttccatgtgtcctctctttacttgccgttgagagaagggagtggtcaggcatctcccatgtgatttctggcttgggaactcccaaggccacacagtggagctgaaaggctgcccctgtcctggtgacaatactcctgggtggacgatttgtaattcggggagggtaggctacaatcattactggaacagtaatcagtgtatgaccaacactattttgagccttacagatatagtttcctctgtcataagctgt

SEQ ID NO: 230042 - DNA, 2166 bp, Artificial Sequence
  derived and/or modified sequence
atggccgccttcggcctgctgagctacgagcagcggcccctgaagcgccctagactgggccctcccgacgtttatccacaggaccctaagcagaaagaggacgagcttacagcagtaaatgtgaaacaaggctttaataatcagcctgccttcacaggagacgaacatgggtctgctcgcaatatcgtaattaacccttcaaagatcggcgcctacttctcctcaattctggccgaaaaacttaaacttaatacgttccaggataccggaaagaagaagccccaggtcaatgccaaggacaactattggctcgtcacagccagatctcagagtgcgattcattcgtggtttagcgacctggccgggaacaagccacttagtatcttagcaaagaaagtgcccattttgtccaaaaaagaggatgtgtttgcgtatttggccaaatactcagtgccaatggtgagggcaacatggttgatcaaaatgacctgtgcctattacagcgccatttccgaggccaaaatcaagaagcgtcaggcaccagacccaaatctggaatggacacaaatcagcactcgttacttgcgcgagcagctggctaagatttccgacttttatcacatggcatctagcacaggagacggtccagtgcccgtccctccagaagtggagcaggccatgaaacagtgggagtacaatgaaaagttggcctttcatatgttccaagagggtatgttagagaagcacgaatatctgacttggattctcgatgtgctggagaagattcgacctatggacgatgatctcctcaagcttctgctcccactaatgttacagtatagcgacgaatttgtccagtctgcttacctgtcaaggcggttagcgtacttttgcgctcgcaggctgagcctcctactgagtgactcccctaatttactggccgctcactcccctcatatgatgatcggcccaaataattcatcaattggggccccctcaccggggccccctgggccagggatgtctcctgtccagttagcgtttagcgactttctttcatgcgcccaacacggacccctcgtctatggcctgagttgtatgctccaaaccgtcaccctgtgctgtcccagcgcgctagtttggaattatagcactaacgagaataaaagtgccaatcccggatcccccttggatctgctccaggtggcgcccagctcccttcctatgcctggtggaaataccgccttcaaccaacaggtgcgcgcaaggatctatgaggtggaacagcagatcaaacagcgaggcagggccgtcgaggttcgatggtcattcgataagtgtcaggagtctacagctggtgtgacaatttccagagttctgcatactttggaggtgctcgacagacactgctttgacagaacagattcttccaactcaatggagacgctctatcacaagatcttctgggcgaatcagaataaagataaccaggaagtcgccccaaatgacgaggcagttgtgacacttctgtgcgaatgggcagtgtcttgcaagcggagcgggaagcaccgcgccatggcagtggctaaactgttggagaaaagacaggcggaaatagaggcagagcgctgcggcgaatcagaagtactcgacgaaaaggagtctatctcctcttccagtctggccggctccagtctgcctgtctttcagaatgtccttctgagattcctggatacccaggcgcctagcctgagtgatcccaactctgaatgcgagaaggtggagtttgtcaatctcgtcctgctgttttgcgaatttattcgtcacgacgtgttctcccatgatgcatatatgtgcactctcatctctcgcggtgacctgtctgttacagcttcaacccgccccagatccccggtaggggagaatgcggatgaacactattcgaaggatcatgacgtaaagatggaaatcttctctcctatgccaggagaatcctgcgagaatgctaacacctcgctcggacggcgtatgtctgtcaactgcgaaaaattagttaagcgcgaaaaaccaagagaactcattttccctagcaactatgacttattacgacatctgcagtatgctactcactttcccatacctctggtgtcccactgtttctcctag

SEQ ID NO: 230043 - DNA, 6438 bp, Artificial Sequence
  derived and/or modified sequence
atggccgccttcggcctgctgagctacgagcagcggcccctgaagcgaccacgcttaggcccacccgatgtctacccacaagaccccaaacagaaggaagacgagctgaccgcggttaacgtcaaacagggattcaataaccaaccagctttcacaggcgacgaacacgggagtgctcgtaatatcgtcattaatccttctaagattggcgcttactttagttctatcctagccgaaaagctgaagctcaatacctttcaggatacaggcaagaaaaagccacaggtgaatgcaaaggataattactggcttgttactgcccggagccaatctgctattcatagttggttctcggatctggcagggaacaaacctctatctattctggcaaagaaggtacccatactctctaaaaaagaggatgtctttgcctaccttgctaaatactctgtccctatggtgcgcgccacatggttgatcaaaatgacatgcgcgtactacagcgcaatatccgaggctaaaatcaaaaaaagacaagctcctgatcccaacttggaatggactcagatctccacccggtatctgcgtgaacagttggcaaaaatctcagacttctaccatatggcgagctcaaccggagatgggcctgtgccggttccacctgaggtcgagcaggctatgaagcaatgggagtataatgaaaaactggcgttccatatgtttcaggaaggtatgttggaaaaacacgaatatctgacttggattctcgacgtgctcgaaaagataaggcccatggacgacgacctcctgaagctgctgttgcctctgatgctccagtacagcgatgagtttgttcagtcagcatacttaagcaggaggcttgcctatttttgcgcccgtaggctttcacttctactctccgactcgcctaacctccttgctgcccatagcccccatatgatgattggtccaaacaatagctccattggcgcaccatcgccagggccaccaggccccggaatgtcacctgtacaattggccttctccgacttcctgagctgtgcccagcatggtccactggtctacggactgtcatgcatgctgcaaacagtaaccctttgctgccctagtgccctggtctggaactacagcacaaacgagaacaagtccgccaatcctggcagccctttggacctactgcaggtcgcccctagctctctccctatgccgggtggtaatacagcgtttaaccagcaggtgagggcaagaatctatgaggtcgagcagcagattaaacagcggggccgagctgtggaagtgcgatggagttttgacaagtgtcaagagagtacagcaggcgtcacaatatctagagtcctccacaccctggaggtcttagatcggcactgctttgacagaaccgacagtagcaattccatggaaacactataccataaaatcttttgggcaaatcagaataaagacaatcaggaagttgctccaaacgacgaagcagtcgtgaccttgctctgcgagtgggcagtgtcttgtaagcggtctgggaaacaccgtgctatggctgtagctaagttgctagagaagcgacaagccgaaatcgaagcagagcgatgtggcgagagcgaggtgttggacgagaaggagtctatatcttcttcctctcttgcgggctcttcactgcctgtgtttcagaacgtgctgctgagattcctcgacacacaggccccgtctctgtcagatcccaattccgagtgtgagaaagtcgaatttgtcaatctcgtcttgctcttctgtgagttcattcgacacgatgtcttctctcacgatgcctatatgtgtactctgatttctcgaggcgatctgagcgtgaccgcttccacccgaccgaggtcaccggttggagaaaatgccgacgaacattattccaaggaccacgacgtcaaaatggagattttttcccctatgcctggtgaaagctgtgaaaatgccaatacaagcctaggacgccgtatgtcagtgaactgtgagaagttggttaaacgtgaaaagcccagagagttaatcttcccctctaattacgacctgttgagacacctgcagtacgctacccattttccgatccctcttgacgagtccagcagtcacgaatgtaatcaaaggacaatccttctgtatggtgttggcaaagagagagacgaggctcggcatcagttgaagaagatcacaaaggacatcttaaagatcctgaacaagaagagcactactgaaacaggtgtgggcgacgagggtcagaaagccaggaaaaacaagcaggaaaccttcccgaccctggaaaccgtttttaccaaactccagttgttaagctactttgatcagcaccaagtgacatcgcagatcagtaacaacgtgttggaacagatcacaagcttcgcgtccgggactagctaccacctgcctctggctcaccatatccagctcatctttgatctaatggaacccgcacttaatatcaatgggcttatcgacttcgccatacaactgttaaacgaacttagtgtggtagaagctgagcttttgctgaagagctctagcctagccggctcttacacgaccggactctgtgtttgtatcgtcgccgtgttaagacgctatcacagctgcctgatcctaaaccccgaccaaactgcacaggtgtttgaggggctgtgtggcgtggtgaagcacgtggtaaaccctagtgagtgctcttcacctgaaaggtgtatcttggcatatctgtacgacttatacgtcagctgttcccacctgcgatctaagttcggggacttgtttagctccgcctgctcgaaggtgaaacagacaatctacaacaatgtcatgcctgctaatagcaacttacgctgggacccagacttcatgatggacttcatagaaaacccctcggcccggtccattaactactccatgttgggtaaaattctctctgacaacgcggctaatagatacagtttcgtctgcaacactctaatgaatgtgtgcatgggtcaccaggacgcgggccggatcaacgatatcgccaatttctccagcgagttgactgcttgctgtactgtcctgtcaagcgagtggctcggagtgctgaaggctctttgctgttccagtaatcacgtgtggggattcaacgatgtgctttgcactgtggacgttagcgacttgtcctttcatgattcacttgctactttcatcgccatactcatcgctcgacagtgcttcagtctggaagatgtcgtgcagcacgtcgcgctcccaagcctcctggcagctgcttgtggtgatgccgatgccgagcccggtgctcggatgacttgccggctcctgctgcacctgttccgcgcaccccaggcatgcttcttaccgcaagcaacagggaaacccttcccaggcattaggagctcatgtgatcgccatctgcttgccgctgcccacaatagtatcgaggtgggagccgtcttcgccgtgttgaaagccatcatgatgttaggggatgctaaaataggtaacaattcagttagttctcttaagaatgacgacttcaccatgagaggcctacgctgtgacggcaatgccgatgatatctggaccgcaagccagaacccaaagtcgtgcggcaagagcatctccatagagactgccaacctgagggaatatgcccgttacgtcctgagaaccatctgccaacaggaatgggtcggggaacattgtctaaaggagcccgagcggttgtgcacggacaaggagcttattctcgaccccgtgctgtccaatatgcaggcgcagaagctcctgcagctgatctgctatcctcacggtatcaaggagtgcaccgagggggacaatctgcagaggcagcatatcaaacggatacttcaaaacttggaacagtggaccttgcggcagagctggctggaactacagcttatgattaaacaatgtttgaaagaccccggatccggcagcgtcgccgaaatgaacaacctgttggataacatagcaaaagcaacaatcgaggtatttcagcagtccgccgatctcaataatagtagtaatagcggcatgagcttgttcaatccgaactcaattggttccgctgatacctcttccaccagacagaatgggatcaagacgttccttagttcgtccgagagaagaggggtctggttagttgcccccctgatagctcggctgcctacctccgttcagggccgggtgttgaaagccgctggagaggagctggagaagggccagcacctgggaagctcctcaaaaaaggagagagaccggcagaagcagaagagcatgagtctgctctcccaacagccgtttttatccttggtgctgacttgtctcaaaggccaggatgagcaacgtgaaggactcctgacctccctgcagaatcaggtgaaccagattttatctaactggcgggaggagagatatcaggatgacatcaaagcccgccaaatgatgcacgaagccctccagctgcggctgaacttggtgggcggaatgttcgataccgtgcagcgatctacccaatggacaacagattgggcattgctgctactccaaatcatcacttctggaactgtggatatgcacaccaacaacgagctgtttactacagttctcgacatgctgggagtgcttataaacgggaccttagccagtgacctttcaaatgcttcacctggtgggagcgaggaaaacaaaagggcatacatgaacctagttaaaaaactgaaaaaggagttgggcgataagcggtccgagtcaatagataaggttcgtcagctgttacccttgccaaagcaaacttgtgacgtcattacttgtgagccaatgggctcactaatagacaccaaaggcaacaaaattgccggattcgactctatcgacaagaaacagggtctgcaagtatccactaaacagaaagtcagtccgtgggacctcttcgagggccagaagaatcctgctcctctctcctgggcctggtttggaaccgtccgcgtggacaggcgagtgattaagtatgaggagcagcatcacttactgctctaccatactcatcctatgcccaaacctcgcagttactatctccaaccactccccctaccacccgaggaagaggaagaagaacctacgtcacccgtgagccaggagcctgaacggaagagcgccgaactctctgaccagggaaagactactacggacgaggagaaaaaaacaaagggtcggaaacggaaaactaaatcctcaagcagggtggatgagtaccctcagtcgaacatctacagggttcccccaaactacagccctatcagctcccagatgatgcatcatccccagtccacactctggggatacaatttggtcggtcaaccccagcagccggggttcttcctgcaaaaccagagcctgacacccggcggctctcggctggatcctgctggcagctttgtccccactaatacaaagcaggccctgagcaatatgctccaaaggaggtcgggcgctatgatgcagcctccctctctgcacgcaattacatctcaacagcagttgatccaaatgaaactgcttcaacagcagcagcaacaacgactgctcagacaagcccagacgagacctttccaacagggacaaccgggggatcaagccgccctattcgctgctcaggcccgaccctccccacagcttccccaataccctgggctgcagcaagctcagaccatgcctcagggatataccatgtacggaacacaaatgcccttgcaacagaccagtcagcagcaggcaggctccgtggtccttagcccaagttataactctcgcgcttatccagcggctcactcgaatcctgttctgatggagcgccttagacagatccaacagcaaccttccggatacgtccagcagcaagccagcccttatttgcaacccctgactggatcccagcgacttaaccaccaggcccttcagcaaagtcccctcgtgggagggggcatcgatgcagtgttaacatcagctcaccccaatcttccttctgtccccctgcctcaggatcctatgcggcctagacagcctcaggttaggcagcaacagagactgttgcagatgcagcagcctcagcaacctcagccacaacagccaccacagcctcagcaatcgtcccagagccagagccaaactctgggtcttcaggccatgcagcctcagcaacctctgttcccccgtcagggactgcagcagacacagcagcagcagcagaccgcggctcttgtccgacagctccagaagcaattgtcaagcaatcagcctcagcagggagtcacaccatatggacatcccagtcatttttag

SEQ ID NO: 230044 - DNA, 2166 bp, Artificial Sequence
  derived and/or modified sequence
atggcagcattcggtcttctgagttatgaacagaggcctttgaaacggcctagactcggtccccctgatgtgtacccccaggaccccaaacagaaggaagatgaactgaccgctgtgaatgtcaaacagggttttaacaaccagcccgcatttactggcgacgagcacgggtcagcgcgaaacattgtcatcaacccctcaaaaatcggcgcttacttcagctccatactggcggagaagctgaaattaaatacctttcaagacaccggcaaaaagaaacctcaagtaaacgcgaaggataactattggctggtaacagccagatctcagagtgccatccacagttggttctcagatctggccggaaacaaaccactctcaatactcgctaagaaagtgcctatcctgagcaaaaaggaggatgtcttcgcgtaccttgccaaatactctgtcccaatggttcgagccacctggctgattaagatgacttgcgcgtattactctgctataagtgaggcaaagatcaaaaagcgtcaagctcctgacccaaaccttgagtggacccagatttctacccgatatcttagagagcagctcgcaaagatctcggacttttaccacatggcttcctccacgggggacggtcccgtgcctgtgcctccagaggtggaacaggctatgaagcaatgggagtacaacgaaaaactggccttccacatgtttcaggaaggtatgctggaaaaacacgaatacctgacctggatcctggacgttcttgaaaaaattcgccctatggacgacgacctcctgaagctattactgccactaatgctgcagtactctgacgagtttgtccagtctgcctatttatcacgacgcctggcatacttttgtgcgcgtcgtctcagtctactcctcagcgacagccctaacctgcttgcggctcactcccctcatatgatgatcggcccaaataactcttcaattggggcaccctctcctggtcctcctggacctggcatgagtcccgtacagctagctttttcggatttcttgagctgcgcgcagcacggacccctggtgtacggcttgtcatgcatgttgcagaccgtcaccctgtgctgcccttccgctctggtgtggaattactcaacaaacgagaataagtctgcgaatccagggtctcccttggatctgctgcaggtcgctccttcatctttgccaatgccaggcggaaacacagccttcaaccagcaggtccgagcccgtatctacgaagtcgagcagcagatcaagcaacgcggacgggcagtggaagttaggtggtcttttgacaaatgccaggaaagcactgcgggtgtgacaatctctcgcgtgcttcatacactcgaggttttggacagacactgcttcgaccgcacggacagttcaaattcaatggaaactctgtatcataaaatattctgggccaaccagaataaggacaatcaggaggtggcgcctaatgacgaggcggttgttaccctcctgtgtgagtgggctgtgtcttgtaaacgcagcggcaagcacagagctatggccgtggcaaaacttttggaaaaaagacaggccgagattgaagccgaaagatgtggagagagcgaggttctggatgagaaagagtcaatttcctcttctagcctggctggatccagcttgcccgtgttccagaatgtactgttgcggttcctcgacacacaggcacccagtctgtctgatcccaactctgaatgtgagaaggtggagtttgtgaaccttgttctgcttttttgcgagtttattcggcacgatgtgttttcgcatgacgcctatatgtgcacactgatatccagaggggatctctccgtcaccgcaagcacaagaccacgcagtcctgtgggtgagaatgctgacgagcactactcaaaggaccacgacgtgaagatggagattttttcacccatgccgggtgaatcttgtgagaacgcaaacacctctctgggcaggagaatgtctgtgaattgcgaaaagctggttaagcgtgagaaacctcgcgagcttattttcccaagtaattatgatctactgaggcacctccagtacgctacccattttccgataccacttgtgagccactgcttttcatag

SEQ ID NO: 230045 - DNA, 6437 bp, Artificial Sequence
  derived and/or modified sequence
atggcggctttcggtctattgagttacgagcagaggcctctgaagcggcctagattaggccctcctgatgtttatccacaggatcctaagcagaaagaagacgagctgaccgccgtgaatgtcaagcagggcttcaataatcagcccgcattcacaggagatgagcacggctccgcgagaaacatcgttattaatccctcaaaaattggcgcatacttctccagtatcctagctgaaaaactcaaactgaacacattccaggacaccggcaagaagaaaccccaagtcaacgctaaggacaactactggctagtgaccgctcgttctcagtctgccatacactcctggttcagtgatcttgctggcaataagcccctctccattctggccaaaaaggtgccaatactgtctaagaaagaggacgtgtttgcttatctggccaaatatagtgtccccatggtgagagccacctggctgattaaaatgacttgtgcatactattccgcgatcagcgaggctaagatcaaaaaaaggcaagcgcctgacccgaatttggagtggactcagatatctactagatatctgagggaacagctggccaagatatcggatttttaccacatggcttcgtccactggagatggacccgttcccgtgccacccgaggttgagcaggccatgaaacagtgggagtataatgagaaactcgcctttcatatgtttcaggagggcatgctggagaagcatgagtaccttacctggattcttgatgtgctcgaaaagattcgacccatggatgacgatctcttgaagctgctgctaccactcatgctgcagtatagtgacgaatttgtccagagtgcataccttagcagaagactcgcatacttctgtgcaagacgactgtccctcttgctttccgatagtcctaatttactagctgctcacagcccacacatgatgattggacccaacaattcctctatcggggctcccagtcctggaccacctggcccaggaatgtctcctgtccagctagctttttcagacttcctttcttgtgcccagcacggccctctggtgtacggtctgagctgtatgctccagaccgtgactctatgctgtccctcggcgctagtgtggaattactctactaacgaaaacaagtcagccaatcccggatcccctctggacttactccaggtggcacctagtagcctccccatgcccggtggtaataccgccttcaaccagcaggtaagagccaggatctatgaggtggaacaacagatcaagcagagaggacgcgcagtggaggttcgctggtcctttgataagtgtcaggaatcaacagcaggcgtgacaatttcacgagtgctgcacacactcgaggtactggataggcactgttttgatagaacagatagctccaatagcatggaaacgctctaccacaagatcttctgggccaatcagaacaaagacaatcaggaagtggcccctaatgacgaggctgtggtgaccctcctttgtgaatgggccgtgagttgcaagcggtccggaaagcacagagccatggccgtagctaagctcttggaaaagcgtcaagctgagattgaggcagaacgctgcggggagagcgaagtgctcgatgagaaggagagcatctcgtctagctctctggccggttcaagtcttccggtcttccagaacgtccttctccggtttctcgatacgcaggctccatctctctccgacccaaatagtgagtgcgagaaggtggagtttgttaatctggtccttctcttctgcgaatttattcgccatgatgtgttttcccatgacgcttacatgtgtaccctgatcagtcgcggagatctgagtgttaccgcatctacccgcccaaggtctcctgtaggagagaacgccgatgagcactattctaaagaccatgacgttaaaatggaaattttctcaccaatgcctggcgagtcctgtgagaatgctaacacttcgttgggcaggcggatgtcggtgaattgtgaaaaacttgtgaagcgcgaaaagcccagggagctcatcttcccaagcaattacgaccttctgcgccaccttcagtacgctacgcacttccccattcctttagacgagtctagcagtcatgagtgcaaccaaagaaccatccttctctacggggtggggaaagaaagagatgaagcgcgacaccaactcaagaagatcacaaaagatatcctgaagatcctgaacaagaagtcaactactgagactggtgtgggcgacgagggacagaaagctcggaagaacaagcaggagacttttcccacccttgagaccgttttcaccaagctgcagttgctttcctacttcgatcagcaccaggtaactagccaaatttccaacaatgtgctcgaacagataacctcattcgccagtggcaccagctaccatcttcctctcgcgcaccacatccagctgatctttgatctcatggagccagcattaaacattaacgggttaattgactttgccatccagttactgaacgagctgtcagtcgtggaagccgagcttctcctgaagtcgtcctcgcttgctgggagctacactaccggcctgtgcgtatgtatcgtggcagtattgcgacgctatcactcatgtctgatcctgaaccccgatcagaccgcccaggtgtttgaaggactgtgcggagtcgtcaagcacgtcgtgaacccaagcgaatgttcatctccagagagatgcattctggcctatctatatgatctttatgtgtcctgctcccatctgaggtccaaattcggcgatctgttctcatcagcctgctccaaggtcaagcagacaatctacaacaacgtgatgccggctaactctaaccttcgctgggaccccgactttatgatggactttatagagaacccctccgctcgcagcatcaattactccatgctggggaaaatcctgagcgacaatgcagcaaatcggtattcatttgtgtgtaacacattgatgaatgtgtgtatggggcaccaagacgccggtcgtatcaacgacatcgccaatttttccagcgaactgactgcatgttgcacagtactgagcagcgagtggctcggcgtgcttaaagctctgtgctgcagtagtaatcatgtttggggcttcaatgacgtgctgtgcacagtggatgtgtccgatttatccttccacgattctctggctacctttattgccattcttatcgctcgtcaatgcttttcgcttgaagatgtggttcagcacgtagccctgccctccctgctcgcagcggcttgtggcgacgccgacgccgagccaggcgctaggatgacctgccgtctgctgcttcacctttttcgcgcaccacaggcctgcttcctgcctcaggcaaccggcaaaccttttcccggaatccgctctagctgtgatcgccacctgttggccgcagcacacaacagcatcgaggtgggcgctgtatttgctgttcttaaagctataatgatgctgggagatgctaagataggaaataactcagtgtcatccctgaagaacgacgattttaccatgagaggtttacgatgtgatggaaacgccgatgacatttggacagcctcccagaatccaaagagctgcggaaagtccatctcgatcgagaccgcaaacctccgagaatacgcacgttatgtgctgcggacgatctgccagcaggaatgggtgggcgagcactgcctaaaggaacccgagcggctctgtaccgacaaagagttgattctggaccccgttttgagtaatatgcaggcccagaaactgctgcaacttatttgttacccccatggaatcaaggagtgtactgagggggacaacctacagcggcaacatatcaagcgcatactccaaaatctagagcagtggaccctccggcagagctggttagaacttcagctgatgatcaaacagtgcctaaaagacccgggaagcggctccgtggcagagatgaacaatttgctcgacaacattgcgaaggcgacaatagaagtgttccaacagagcgccgaccttaataactcctccaactcaggtatgagcttgttcaaccctaacagtataggtagtgccgacacaagctcaacaagacaaaacggcattaagacttttttgtctagttcagagagaaggggcgtgtggctggtggcacctttaattgcccgattaccgactagtgtgcaggggagggtgcttaaagctgccggtgaggaactggagaagggtcagcacctggggtccagttctaagaaggagagggaccggcagaaacaaaagtcaatgtcacttctgtctcagcaaccattcctgagtctcgtcctcacctgccttaaaggtcaggacgaacagagagaaggcctattgactagcctccagaatcaagtcaaccaaatccttagtaactggagggaagaaagataccaagatgatatcaaagcacggcagatgatgcacgaggcactgcagttaagactgaacctggtgggagggatgttcgacacagtgcagaggtcaacacagtggactacagactgggctctcctgctattgcagatcataacaagtggcacagtagacatgcataccaataacgagttatttactacagttctcgacatgctgggagttttaattaatggtaccttggcatctgacctgtccaacgcctcacctggcggatccgaggagaataaacgcgcatatatgaatctcgttaagaagctcaaaaaggaacttggtgataaaaggtcagagtctatagacaaagtgagacagttgttgccactgccaaagcagacatgtgatgtgataacttgtgagccaatggggtccttgatcgataccaaaggaaataagatagctggctttgatagcattgataaaaagcagggattgcaagtatctaccaagcagaaggttagtccctgggatctgttcgaggggcagaaaaacccggcacccctgtcatgggcgtggttcggaaccgtgcgcgtcgatagacgggtaatcaagtatgaggagcaacaccatctgttgctgtatcatactcatcccatgccaaagcccaggtcttactatttgcagccactccctttacctccagaagaggaagaggaggaacctacgagtcctgtgtctcaggagcctgagaggaagagcgctgaattatcggaccaggggaagaccaccacagacgaagagaagaaaacaaaaggcagaaagaggaagaccaagagcagctctagagtcgacgaatacccgcagtccaacatatatagagtgcccccaaattattctcctattagttcccagatgatgcatcacccccaatccaccctctggggctacaacctcgtaggacagccccagcagcccggattttttctgcagaaccagtcactgactcccggtggatctcggctcgacccggctggatcttttgtaccaaccaatactaaacaagcactgtcaaacatgctccagcgacgcagtggtgctatgatgcagccaccaagcctgcacgctatcacttctcagcagcaactcatccagatgaagctgcttcagcagcagcaacagcagaggctactccgacaagctcaaactaggccgtttcagcaagggcagcctggtgaccaagccgctctgttcgcggctcaggcccgtccttccccacagttgccccaatatcccggtctccagcaggcacaaacaatgccccaaggatatacaatgtatggcacacaaatgcctctccagcaaacctctcagcagcaggcaggatctgtggtgttgtctccatcctacaattccagagcctatcctgccgctcactccaatcctgttctcatggagaggctgcggcagatccagcaacaaccttccggatatgttcagcaacaggctagtccatacctgcagccactgactggaagccaaaggttgaatcatcaggcccttcagcagagtccgttagtgggtggtggtattgatgcagttttaaccagcgcgcatccaaacttgccatcggtgcccctgcctcaagacccaatgcgacctaggcagcctcaagtccgccaacaacagagactcctccagatgcagcaaccgcagcagccccagcctcagcagccaccccagcctcagcagagctcacagagccagagccagacactgggacttcaggccatgcagccccagcagccactgtttccacgacaagggctgcagcagacccagcagcaacagcaaaccgcggctctggtgcggcagctgcagaaacagttgtcgtctaatcagccccagcaaggcgtgaccccatatggccacccctctcatttcta

SEQ ID NO: 230046 - DNA, 2166 bp, Artificial Sequence
  derived and/or modified sequence
atggccgccttcggcctgctgagctacgagcagagacccctgaagagacccagactgggcccccccgacgtgtacccccaggaccccaagcagaaggaggacgagctgaccgccgtgaacgtgaagcagggcttcaacaaccagcccgccttcaccggcgacgagcacggcagcgccagaaacatcgtgatcaaccccagcaagatcggcgcctacttcagcagcatcctggccgagaagctgaagctgaacaccttccaggacaccggcaagaagaagccccaggtgaacgccaaggacaactactggctggtgaccgccagaagccagagcgccatccacagctggttcagcgacctggccggcaacaagcccctgagcatcctggccaagaaggtgcccatcctgagcaagaaggaggacgtgttcgcctacctggccaagtacagcgtgcccatggtgagagccacctggctgatcaagatgacctgcgcctactacagcgccatcagcgaggccaagatcaagaagagacaggcccccgaccccaacctggagtggacccagatcagcaccagatacctgagagagcagctggccaagatcagcgacttctaccacatggccagcagcaccggcgacggccccgtgcccgtgccccccgaggtggagcaggccatgaagcagtgggagtacaacgagaagctggccttccacatgttccaggagggcatgctggagaagcacgagtacctgacctggatcctggacgtgctggagaagatcagacccatggacgacgacctgctgaagctgctgctgcccctgatgctgcagtacagcgacgagttcgtgcagagcgcctacctgagcagaagactggcctacttctgcgccagaagactgagcctgctgctgagcgacagccccaacctgctggccgcccacagcccccacatgatgatcggccccaacaacagcagcatcggcgcccccagccccggcccccccggccccggcatgagccccgtgcagctggccttcagcgacttcctgagctgcgcccagcacggccccctggtgtacggcctgagctgcatgctgcagaccgtgaccctgtgctgccccagcgccctggtgtggaactacagcaccaacgagaacaagagcgccaaccccggcagccccctggacctgctgcaggtggcccccagcagcctgcccatgcccggcggcaacaccgccttcaaccagcaggtgagagccagaatctacgaggtggagcagcagatcaagcagagaggcagagccgtggaggtgagatggagcttcgacaagtgccaggagagcaccgccggcgtgaccatcagcagagtgctgcacaccctggaggtgctggacagacactgcttcgacagaaccgacagcagcaacagcatggagaccctgtaccacaagatcttctgggccaaccagaacaaggacaaccaggaggtggcccccaacgacgaggccgtggtgaccctgctgtgcgagtgggccgtgagctgcaagagaagcggcaagcacagagccatggccgtggccaagctgctggagaagagacaggccgagatcgaggccgagagatgcggcgagagcgaggtgctggacgagaaggagagcatcagcagcagcagcctggccggcagcagcctgcccgtgttccagaacgtgctgctgagattcctggacacccaggcccccagcctgagcgaccccaacagcgagtgcgagaaggtggagttcgtgaacctggtgctgctgttctgcgagttcatcagacacgacgtgttcagccacgacgcctacatgtgcaccctgatcagcagaggcgacctgagcgtgaccgccagcaccagacccagaagccccgtgggcgagaacgccgacgagcactacagcaaggaccacgacgtgaagatggagatcttcagccccatgcccggcgagagctgcgagaacgccaacaccagcctgggcagaagaatgagcgtgaactgcgagaagctggtgaagagagagaagcccagagagctgatcttccccagcaactacgacctgctgagacacctgcagtacgccacccacttccccatccccctggtgagccactgcttcagctag

SEQ ID NO: 230047 - DNA, 6438 bp, Artificial Sequence
  derived and/or modified sequence
atggccgccttcggcctgctgagctacgagcagagacccctgaagagacccagactgggcccccccgacgtgtacccccaggaccccaagcagaaggaggacgagctgaccgccgtgaacgtgaagcagggcttcaacaaccagcccgccttcaccggcgacgagcacggcagcgccagaaacatcgtgatcaaccccagcaagatcggcgcctacttcagcagcatcctggccgagaagctgaagctgaacaccttccaggacaccggcaagaagaagccccaggtgaacgccaaggacaactactggctggtgaccgccagaagccagagcgccatccacagctggttcagcgacctggccggcaacaagcccctgagcatcctggccaagaaggtgcccatcctgagcaagaaggaggacgtgttcgcctacctggccaagtacagcgtgcccatggtgagagccacctggctgatcaagatgacctgcgcctactacagcgccatcagcgaggccaagatcaagaagagacaggcccccgaccccaacctggagtggacccagatcagcaccagatacctgagagagcagctggccaagatcagcgacttctaccacatggccagcagcaccggcgacggccccgtgcccgtgccccccgaggtggagcaggccatgaagcagtgggagtacaacgagaagctggccttccacatgttccaggagggcatgctggagaagcacgagtacctgacctggatcctggacgtgctggagaagatcagacccatggacgacgacctgctgaagctgctgctgcccctgatgctgcagtacagcgacgagttcgtgcagagcgcctacctgagcagaagactggcctacttctgcgccagaagactgagcctgctgctgagcgacagccccaacctgctggccgcccacagcccccacatgatgatcggccccaacaacagcagcatcggcgcccccagccccggcccccccggccccggcatgagccccgtgcagctggccttcagcgacttcctgagctgcgcccagcacggccccctggtgtacggcctgagctgcatgctgcagaccgtgaccctgtgctgccccagcgccctggtgtggaactacagcaccaacgagaacaagagcgccaaccccggcagccccctggacctgctgcaggtggcccccagcagcctgcccatgcccggcggcaacaccgccttcaaccagcaggtgagagccagaatctacgaggtggagcagcagatcaagcagagaggcagagccgtggaggtgagatggagcttcgacaagtgccaggagagcaccgccggcgtgaccatcagcagagtgctgcacaccctggaggtgctggacagacactgcttcgacagaaccgacagcagcaacagcatggagaccctgtaccacaagatcttctgggccaaccagaacaaggacaaccaggaggtggcccccaacgacgaggccgtggtgaccctgctgtgcgagtgggccgtgagctgcaagagaagcggcaagcacagagccatggccgtggccaagctgctggagaagagacaggccgagatcgaggccgagagatgcggcgagagcgaggtgctggacgagaaggagagcatcagcagcagcagcctggccggcagcagcctgcccgtgttccagaacgtgctgctgagattcctggacacccaggcccccagcctgagcgaccccaacagcgagtgcgagaaggtggagttcgtgaacctggtgctgctgttctgcgagttcatcagacacgacgtgttcagccacgacgcctacatgtgcaccctgatcagcagaggcgacctgagcgtgaccgccagcaccagacccagaagccccgtgggcgagaacgccgacgagcactacagcaaggaccacgacgtgaagatggagatcttcagccccatgcccggcgagagctgcgagaacgccaacaccagcctgggcagaagaatgagcgtgaactgcgagaagctggtgaagagagagaagcccagagagctgatcttccccagcaactacgacctgctgagacacctgcagtacgccacccacttccccatccccctggacgagagcagcagccacgagtgcaaccagagaaccatcctgctgtacggcgtgggcaaggagagagacgaggccagacaccagctgaagaagatcaccaaggacatcctgaagatcctgaacaagaagagcaccaccgagaccggcgtgggcgacgagggccagaaggccagaaagaacaagcaggagaccttccccaccctggagaccgtgttcaccaagctgcagctgctgagctacttcgaccagcaccaggtgaccagccagatcagcaacaacgtgctggagcagatcaccagcttcgccagcggcaccagctaccacctgcccctggcccaccacatccagctgatcttcgacctgatggagcccgccctgaacatcaacggcctgatcgacttcgccatccagctgctgaacgagctgagcgtggtggaggccgagctgctgctgaagagcagcagcctggccggcagctacaccaccggcctgtgcgtgtgcatcgtggccgtgctgagaagataccacagctgcctgatcctgaaccccgaccagaccgcccaggtgttcgagggcctgtgcggcgtggtgaagcacgtggtgaaccccagcgagtgcagcagccccgagagatgcatcctggcctacctgtacgacctgtacgtgagctgcagccacctgagaagcaagttcggcgacctgttcagcagcgcctgcagcaaggtgaagcagaccatctacaacaacgtgatgcccgccaacagcaacctgagatgggaccccgacttcatgatggacttcatcgagaaccccagcgccagaagcatcaactacagcatgctgggcaagatcctgagcgacaacgccgccaacagatacagcttcgtgtgcaacaccctgatgaacgtgtgcatgggccaccaggacgccggcagaatcaacgacatcgccaacttcagcagcgagctgaccgcctgctgcaccgtgctgagcagcgagtggctgggcgtgctgaaggccctgtgctgcagcagcaaccacgtgtggggcttcaacgacgtgctgtgcaccgtggacgtgagcgacctgagcttccacgacagcctggccaccttcatcgccatcctgatcgccagacagtgcttcagcctggaggacgtggtgcagcacgtggccctgcccagcctgctggccgccgcctgcggcgacgccgacgccgagcccggcgccagaatgacctgcagactgctgctgcacctgttcagagccccccaggcctgcttcctgccccaggccaccggcaagcccttccccggcatcagaagcagctgcgacagacacctgctggccgccgcccacaacagcatcgaggtgggcgccgtgttcgccgtgctgaaggccatcatgatgctgggcgacgccaagatcggcaacaacagcgtgagcagcctgaagaacgacgacttcaccatgagaggcctgagatgcgacggcaacgccgacgacatctggaccgccagccagaaccccaagagctgcggcaagagcatcagcatcgagaccgccaacctgagagagtacgccagatacgtgctgagaaccatctgccagcaggagtgggtgggcgagcactgcctgaaggagcccgagagactgtgcaccgacaaggagctgatcctggaccccgtgctgagcaacatgcaggcccagaagctgctgcagctgatctgctacccccacggcatcaaggagtgcaccgagggcgacaacctgcagagacagcacatcaagagaatcctgcagaacctggagcagtggaccctgagacagagctggctggagctgcagctgatgatcaagcagtgcctgaaggaccccggcagcggcagcgtggccgagatgaacaacctgctggacaacatcgccaaggccaccatcgaggtgttccagcagagcgccgacctgaacaacagcagcaacagcggcatgagcctgttcaaccccaacagcatcggcagcgccgacaccagcagcaccagacagaacggcatcaagaccttcctgagcagcagcgagagaagaggcgtgtggctggtggcccccctgatcgccagactgcccaccagcgtgcagggcagagtgctgaaggccgccggcgaggagctggagaagggccagcacctgggcagcagcagcaagaaggagagagacagacagaagcagaagagcatgagcctgctgagccagcagcccttcctgagcctggtgctgacctgcctgaagggccaggacgagcagagagagggcctgctgaccagcctgcagaaccaggtgaaccagatcctgagcaactggagagaggagagataccaggacgacatcaaggccagacagatgatgcacgaggccctgcagctgagactgaacctggtgggcggcatgttcgacaccgtgcagagaagcacccagtggaccaccgactgggccctgctgctgctgcagatcatcaccagcggcaccgtggacatgcacaccaacaacgagctgttcaccaccgtgctggacatgctgggcgtgctgatcaacggcaccctggccagcgacctgagcaacgccagccccggcggcagcgaggagaacaagagagcctacatgaacctggtgaagaagctgaagaaggagctgggcgacaagagaagcgagagcatcgacaaggtgagacagctgctgcccctgcccaagcagacctgcgacgtgatcacctgcgagcccatgggcagcctgatcgacaccaagggcaacaagatcgccggcttcgacagcatcgacaagaagcagggcctgcaggtgagcaccaagcagaaggtgagcccctgggacctgttcgagggccagaagaaccccgcccccctgagctgggcctggttcggcaccgtgagagtggacagaagagtgatcaagtacgaggagcagcaccacctgctgctgtaccacacccaccccatgcccaagcccagaagctactacctgcagcccctgcccctgccccccgaggaggaggaggaggagcccaccagccccgtgagccaggagcccgagagaaagagcgccgagctgagcgaccagggcaagaccaccaccgacgaggagaagaagaccaagggcagaaagagaaagaccaagagcagcagcagagtggacgagtacccccagagcaacatctacagagtgccccccaactacagccccatcagcagccagatgatgcaccacccccagagcaccctgtggggctacaacctggtgggccagccccagcagcccggcttcttcctgcagaaccagagcctgacccccggcggcagcagactggaccccgccggcagcttcgtgcccaccaacaccaagcaggccctgagcaacatgctgcagagaagaagcggcgccatgatgcagccccccagcctgcacgccatcaccagccagcagcagctgatccagatgaagctgctgcagcagcagcagcagcagagactgctgagacaggcccagaccagacccttccagcagggccagcccggcgaccaggccgccctgttcgccgcccaggccagacccagcccccagctgccccagtaccccggcctgcagcaggcccagaccatgccccagggctacaccatgtacggcacccagatgcccctgcagcagaccagccagcagcaggccggcagcgtggtgctgagccccagctacaacagcagagcctaccccgccgcccacagcaaccccgtgctgatggagagactgagacagatccagcagcagcccagcggctacgtgcagcagcaggccagcccctacctgcagcccctgaccggcagccagagactgaaccaccaggccctgcagcagagccccctggtgggcggcggcatcgacgccgtgctgaccagcgcccaccccaacctgcccagcgtgcccctgccccaggaccccatgagacccagacagccccaggtgagacagcagcagagactgctgcagatgcagcagccccagcagccccagccccagcagcccccccagccccagcagagcagccagagccagagccagaccctgggcctgcaggccatgcagccccagcagcccctgttccccagacagggcctgcagcagacccagcagcagcagcagaccgccgccctggtgagacagctgcagaagcagctgagcagcaaccagccccagcagggcgtgaccccctacggccaccccagccacttctag

SEQ ID NO: 230048 - protein, 327 aa, Artificial Sequence
  derived and/or modified sequence
MTAPCPPPPPDPQFVLRGTQSPVHALHFCEGAQAQGRPLLFSGSQSGLVHIWSLQTRRAVTTLDGHGGQCVTWLQTLPQGRQLLSQGRDLKLCLWDLAEGRSAVVDSVCLESVGFCRSSILAGGQPRWTLAVPGRGSDEVQILEMPSKTSVCALKPKADAKLGMPMCLRLWQADCSSRPLLLAGYEDGSVVLWDVSEQKVCSRIACHEEPVMDLDFDSQKARGISGSAGKALAVWSLDWQQALQVRGTHELTNPGIAEVTIRPDRKILATAGWDHRIRVFHWRTMQPLAVLAFHSAAVQCVAFTADGLLAAGSKDQRISLWSLYPRA

SEQ ID NO: 230049 - protein, 212 aa, Artificial Sequence
  derived and/or modified sequence
MTAPCPPPPPDPQFVLRGTQSPVHALHFCEGAQAQGRPLLFSGSQSGLVHIWSLQTRRAVTTLDGHGGQCVTWLQTLPQGRQLLSQGRDLKLCLWDLAEGRSAVVDSVCLESVGFCRSSILAGGQPRWTLAVPGRGSDEVQILEMPSKTSVCALKPKADAKLGMPMCLRLWQADCSSRPLLLAGYEDGSVVLWDVSEQKVCSRIACHEEPGL

SEQ ID NO: 230050 - DNA, 984 bp, Artificial Sequence
  derived and/or modified sequence
atgacagctccctgtcctcccccaccacctgatccacagtttgtccttcgcggaacacagagtccagtgcacgcattgcacttctgtgagggtgcacaggctcaaggcaggccgctgctgttttctggcagccagtctggactcgtccacatctggtcactacagacaagaagggcagtcaccacactcgacggccacgggggtcagtgcgtgacctggctgcagacactgccccagggtcgacagttgctgtcccaagggagggacctgaaactctgtctctgggacctggctgaaggccgctccgccgtggttgactctgtttgtctcgagagtgtcgggttttgtagatctagcatcctagccggcggccagcccaggtggacccttgccgttcccggtcgaggttccgacgaggtccagattttggagatgccaagtaagacaagcgtttgcgccttgaaaccgaaagccgatgctaagctcggcatgccgatgtgtctgaggctgtggcaggccgactgctccagtagaccactgcttttggccgggtacgaggatgggtctgtcgtcctctgggacgtctcagagcagaaggtatgcagtaggatcgcctgtcatgaggagccagtgatggacttagacttcgactctcaaaaggctagaggaatctccgggtctgccggaaaagcactggctgtgtggagcttggactggcagcaggccctccaggttaggggtactcacgaactgacaaacccaggaatcgctgaagtgacaataaggccggataggaagatattggcgaccgccgggtgggaccaccgtattagagttttccactggagaaccatgcagcccttggcagtcctggcatttcactcggccgccgtccaatgtgtggccttcaccgcggatgggctgctggccgcaggatccaaggatcagcggatctcactgtggagcttgtacccgcgcgcctag

SEQ ID NO: 230051 - DNA, 984 bp, Artificial Sequence
  derived and/or modified sequence
atgaccgcaccttgcccgcctccacctcccgaccctcagtttgtgctgagaggaacgcaatccccggtccacgcgctgcatttctgcgaaggcgcgcaggcccagggtcgccctctccttttctccggatcgcaatccggcctggtgcacatttggtccttgcaaacaaggagagctgtgactaccctggacggacatggcggccagtgtgtcacttggctgcagacattgccgcaggggaggcaactcctctcccaggggcgagacctgaaactttgcctgtgggacttggccgaggggagatctgcggtggtggatagcgtttgtctcgaatctgtggggttttgtcggagttccatcttggctggaggccagccgcggtggaccttggcggtaccaggcaggggatcagatgaagtccagattctggagatgccctccaaaacaagcgtgtgcgctcttaaacctaaggctgacgccaagctcggtatgcctatgtgccttaggctctggcaagccgattgttctagccgaccactcctgttggctggttacgaggacggttcagtggtcctgtgggacgtgagcgagcagaaggtgtgcagtcggatcgcatgccacgaggagcccgtgatggatttagattttgactcacagaaggcccgcggaatcagtggttctgcaggcaaagctttagcggtctggtccctggactggcagcaggccctgcaagttagagggacccatgagctgactaatcctggaatcgcggaggttaccatacgaccagaccgcaaaatccttgctaccgcaggttgggaccacagaatccgggtttttcattggcgcacgatgcagcccctggccgttctggccttccacagtgccgcagttcagtgtgtggcatttaccgccgatggcttactggccgccggctctaaggaccaacggatctccctgtggtctttgtatccacgagcatag

SEQ ID NO: 230052 - DNA, 639 bp, Artificial Sequence
  derived and/or modified sequence
atgaccgctccttgtcctcctcctccacccgaccctcagttcgtactacgcgggacccaatctcccgtgcacgctttacacttctgcgaaggagctcaggcccagggaaggccacttttattcagcggtagccagagtggacttgtgcatatctggtcacttcagactcgacgggccgttaccacactcgatggtcatggaggccaatgcgtgacctggctgcagaccctgccacagggccgacagctgctctctcaagggcgagatctgaaattgtgtctttgggaccttgctgaggggcgctccgccgtcgtggactccgtctgcctggagtctgttggattctgtcggtctagtatactggctggagggcaaccccgctggaccttggctgtgccaggaagagggtcagacgaagtacagatcctggaaatgcctagcaagacttcggtgtgcgctttgaagcccaaagccgatgccaagctgggcatgcctatgtgcctgaggctttggcaggctgactgttcatcccggcccctgcttctggccggctacgaggatgggtcagtcgtgctttgggatgtgagcgaacagaaggtttgctcccggattgcatgtcatgaagaacccggactttag

SEQ ID NO: 230053 - DNA, 6706 bp, Artificial Sequence
  derived and/or modified sequence
catgcgccgggtcgtacacggcggccgcgcgcacgctgggggcgtggctgcgcgatgtaatcggtctctggacgctgcgcggcgctcctaggagcaggcgttcccgactccggcaagagggtggcgcctggactctcgccctcagagggaggcccgtcccacggtctgtggctacggatcccaggaccctcttcgcgggcgattcgcgtagcctcaggtaactgcatcctgcccagcatgacggccccctgcccgccgccacctccagacccccagtttgtcctccgaggcacccagtcaccggtgcatgcgctgcacttctgcgaaggagcccaggctcaggggcgcccgctcctcttctcagggtctcagagtggcctggtacacatctggagcctgcagacgcggagagcggttaccaccctggatggccacggcggccagtgtgtgacctggctgcagacgctgccccaggggcgccagctcctcagtcagggccgggacctgaagctgtgcctgtgggacctcgcggagggcaggagcgctgtcgtggactccgtgtgcttggagagtgtgggcttctgccggagcagcatcctggccgggggccagccacgctggacgcttgccgtgccagggaggggcagcgacgaggttcagattctggagatgccctccaagacgtcagtgtgcgccctgaagccgaaggcagatgccaagctgggcatgcccatgtgcctgcggctgtggcaggccgactgcagctcccgcccactccttctggccggctatgaggatggatcggtggtcctgtgggacgtctctgagcagaaggtgtgcagccgcatcgcctgccatgaggagcccgtcatggaccttgactttgactcccagaaggccaggggcatctcaggctccgcggggaaggcgctggctgtctggagcctggactggcagcaggccctgcaggtgcgtgggactcatgaactcaccaatcccgggatcgccgaggtcacgatccggccagatcgcaagatcctggccaccgcaggctgggaccaccgcatccgcgtgttccactggcggacgatgcagccactggccgtgctggccttccacagcgccgctgtccagtgcgtggccttcaccgccgatggcttgctggccgcgggctccaaggatcagcggatcagcctctggtcactctacccacgcgcatgactcacccactcccttcccgggagacgaggagggcgggcagggaggtgggcatcaggccccagccttggcctgaaacctcaagggcctctgaggaccagcaagtcatggcccaaggaccatggagtccccgctgtcttcatgaggttggtatttccttttgtggagtgcctcatcacaggacggtgactctgggggccagccagagccctggccgtccgaggcctgcaggagacgttggcttgggcctgctgtgttgccagctgagggtattttataataaatttccattgccaagttgcaggcttgaggtgggagctccctgaggaggccctggtcccccacttagcatcagtgccctcagacccccaccaggcaggatgctcagccccaccctcacacctgctgttgaatgggccaccccgagtgtgggtttcctgggccaggcctcaggagatgataggccccaaccatagctgcgtcgatgtccacatgacccctcaccccgaggaggccaggagctcccaacacacaggttgaggccaggatcaggatcaggaagtaactgaactccctaaagagtgaagcagagaaaggtgcctgtgagggacggcaaggggggcttgcagcgcacagggccaggccagatgtgggatccgggagggcacgcctgcccgcagagggtgcagtggggaaggcgcacagggtgcacctccaggtgagtgctgggcagaaggcacgagagcagcaagggagtgtgacaagcaccgcctcacagtggccaaggccacagtcacagctgcggctgcacacagggtggcccccagggcacaacacagcaagagcaggacttagcagccagagcctcacactgcatgcagccgggcccagcctggccggtcgtctcctcctaaaagcgggtgttgattgggaaagaaccatgaccctgaatattggagtggggcccatgggcagatccagagaagctgggaccacacacgcctgtgtctgcccggattgccggaagagcccctctagctgaaggcccggggtggcctcccttgaggcagttgccctgcaaggccctgccgatgctccttgggacccccacctgggcttctagtcctagaactagactcgagtccagcagacccccaggatgagatacagagggtgaccctgagagtggcaccagcctcctgcaggaccacatggcatttccaggtttccaggcagaaatctgaacatgtgtgggacggatcggaagggtgtgggatccaggtggccggagcaggggtggatcaggggagttcccggaacagacctgccaaacggagggctggactgggcgctgcagcttggggccaggaaggctccagtgccgggctgggggtgggggctggattacagcctgagggtggctgcactgagtgaagtggacatggccagccgccgtggggtacagccgaggagggcttccaaggcctggggatgggggtgttggatttgtcagtgagacctgtgcacccactgcagggggtcccaaggccgtgcctccccaaccccactgtgaggaacatggttgctggggggcccggagtccttgaggagtcctgtgaccacacttctctgttggtcagaggtaccatggggaccgttccatcaaacgggaatgtcagtgctggccgggaaagcggcccctggcccaagcttggagaccacctggctcgggtactggcctggctccgttggacaagggtggccaccaggtgcccaggacctttggagaggggggccctgctgcttttcctcgagtgtcctatagccgccaggatgcgtagggcactccgggaggtattttcatatcactgaggtgtcagggaggggaagggtcctgggtttaggctgcagtgactgcaggtgctgagggagctgtgccctgggtgctcatcacaggctgtcacagtgagggaaggtgtcaggttctgacatccccatgacagcggcagggtaggtggagtgggaattggctttgcagtttccctgcatgcccttgacagccttgccaaaggcacatctgccccgcctcagctcccaccctgagggttctgggcctctaccccttcccctgtttatgtccctgtcatctttggcatcatcactgtagttacaaaactccctacgtcccacagccacgaggtgggtatcccacatgagggcccaggtgtgcatgccagcatgaggttggcgagtggcactgcctgctgatgtcttacatagaggccatgaagagctgtgggcagggtgtacagaccctgagttggcccctggccctcgtgctttcagtcaaaggcacaagcagggtggatggcaggcggctgccccctagcctggccttgagctccctgccccaggccatgtggcgttgagcagtgtccaggcacatcttgttctgaatctcagtgtgcagggatggagtcgggacagcgtgagtcctgcatgcctaacacagccctcacccctccagtgcacaacggggccacgtgcccgcatctgggtggctaggcagatagggccccccttgccaggcagatccagcttctgaggccttatagacgtcctgtggagggcaggcccaggactttcattcacctggctgagctgcctgggagagcagcagaaccggtgctggggtccaagccggccaagagcagtgcagccctcctggtcctgttcctctcttgagctgctccgtggtgtccacagcagagccatgtggctctggacaggtcggcctttgtgtcaacagaacctgggtcgtgatgaatcaccatgcgtctgaccagccttgaaacccccacaacagaagaagaaacggtctcagctccagacatccagcttggaaaagatgcacctgaacattggcattctcttcctagcaaacagccacttcctgtaggctggcaggaacgccaacagagccagcagtgaaggcattaagtggggaggaggggtggcccggaggcagcacgcgaaggtcagcatgcagctcctgggatgaacctgagaggcgactcctggcagcatggctggtcgctgccatcacgcccctggccaacccaccaactgggagaggcagcccttccacatcttcctccataatgctcttgggtagcagtgaggcctctcaagccagagagaacttggtgtttggaaacaacggcggacatttcttgccattttcagtgccaactcaggtaggtgtgttctaccatcctgtgtttttggggtgtttttttttttgagtcagagtctcactctgtcccccaggctggagtgcaatggagcagtctcggctcactgcaacctctgattcccaggttcaagcgattctcctgcctcagcctcccgagaagctcaggaccacccacataggtgcaggccatcatgcccagctaattttttatttttttttatagagaaggagtctcgctatgttgcccaggctggtttcgaactcctgggctcaagcgatcgatcctcccgcctctagcctcccaaagcactagaattataggcctgagccactgcgcccggcccaccatcctgttcttattggaagaatttccatgtgtcgaggcacgggcacaacgtagctggtcctctgctcagggccccacaaggctgcgtcagggtggcagcgcggctgggggctttttctgttcaaatccagattctcgtggctgtgagccccagccctgggcactgtccgcctggtggtgtcttcacagccagcaggggtggccttggggtgttctgtggagtaactttcacggcccagagtgggatcctgagtggctggagccgtatgctccagcatccccagccgctgcctccggtgcaggtggagtgggcccctctgattaccaggagctgtcagaggggcagcaggtcccactccactggccggtgggcagctgtgtgcagggacgcgggtcctggcacgtctgcctggtgaggccctgcctccagtgccaaggggcctcccctctcgacggtgggcgccaccatgtgctgacctctgtgcagccccactttacaaggtaggttcggccagcaccccatccgcgggcgggcagcactcacccagcgttgcgccgccaacagggtccctcttagacaagcagctgtgcctagagccttttccttcctccctgcgtgttacctgcaggccaacagacggccctgggtctgggaccaggagaacctgcctccgcctctggcagtgggtgtccctgcaggcagattgggcttggcacgtagacaccgaggggtcagccgatgccgggagatgatcccgggaagggctccggagcacagcccaggacccgccgccgctgctgggcgctccatgttgacgtgctgtgcgtgtctccactccccaggcaatgatgttcaatcaggtgtttcccacctgtgtctctgccaagaagccacagaacaccctctgcacaaaaggagtgtttgcacaaagaaaaacaaccctccgggggttctttagaaatgcttatactcaattagctagaacttcatgtgaaatcccagcgtggaagacaacaagccggcaccggtgaaaactttgctgtgcacctgccctctaccaagctgccagccccaccagccctgtggtcctaggtgggcacagctgctgcacggtcccccaggcctgcctctcctcggggtctcaaccttcataccagatttgccagcatccccattcccgccttgtgggtggagagtccttgagaccctctgtcactctgtcagcttccccaggtcagcgagctgtggcttggctcccacgcatcagcttttatgggaggcccattaggagctgggcaggagggacagaggggaggccaggcagccactgctgagtgggacgggtagcccagcccatgaggctggccagccctacaggggaggtcccacagcactggccgggaagtccacataggaaagcatcagttgagggatgaagccacggacgatggggacaacggccacagggtgtgctaagctgaggaaattagtaggaggtgctcataagctgttttgttttttggtttgtttgtttgttttttcttttaagagaccagggacagtgggggtctcactctgtcacccaggctggagtgcagtggcatgatcatagcttactgcagcctccaactaataggctcaagtgatcctcctgcctcagcctcccgagtaactcatggcctttaagtgaactgcttccaccatccagctgtgcaggtggcctgggaacagcagcacatctgtcccctgccacctcttgcatgcacacttgacctcctgacttgggctctgaaacctgtaaaatgtggggtgtagagaaatcgagtcatttggcctcatcctggtgccattatctcttgctacattaataaaccacctcaaacag

SEQ ID NO: 230054 - DNA, 1699 bp, Artificial Sequence
  derived and/or modified sequence
ggcgttcccgactccggcaagagggtcagtgtggaggcgggagcccgggcggccggcttgaactccgtgcacgcgggcctggagctgcgcccctgcgtcttttcccgacttctgatccgcagaggggcactcggagccccagcctgggtcgcagtgccttcggtctgcgggcctcagtttctcggtccgcgccgggggtttgtgggggcacctggagacatttgggccgttctcgcagtctcgggaagccgcgcccgctccttgcctggcctcacggcggccgatctcgttctccactttctaggtggcgcctggactctcgccctcagagggaggcccgtcccacggtctgtggctacggatcccaggaccctcttcgcgggcgattcgcgtagcctcaggtaactgcatcctgcccagcatgacggccccctgcccgccgccacctccagacccccagtttgtcctccgaggcacccagtcaccggtgcatgcgctgcacttctgcgaaggagcccaggctcaggggcgcccgctcctcttctcagggtctcagagtggcctggtacacatctggagcctgcagacgcggagagcggttaccaccctggatggccacggcggccagtgtgtgacctggctgcagacgctgccccaggggcgccagctcctcagtcagggccgggacctgaagctgtgcctgtgggacctcgcggagggcaggagcgctgtcgtggactccgtgtgcttggagagtgtgggcttctgccggagcagcatcctggccgggggccagccacgctggacgcttgccgtgccagggaggggcagcgacgaggttcagattctggagatgccctccaagacgtcagtgtgcgccctgaagccgaaggcagatgccaagctgggcatgcccatgtgcctgcggctgtggcaggccgactgcagctcccgcccactccttctggccggctatgaggatggatcggtggtcctgtgggacgtctctgagcagaaggtgtgcagccgcatcgcctgccatgaggagcccgtcatggaccttgactttgactcccagaaggccaggggcatctcaggctccgcggggaaggcgctggctgtctggagcctggactggcagcaggccctgcaggtgcgtgggactcatgaactcaccaatcccgggatcgccgaggtcacgatccggccagatcgcaagatcctggccaccgcaggctgggaccaccgcatccgcgtgttccactggcggacgatgcagccactggccgtgctggccttccacagcgccgctgtccagtgcgtggccttcaccgccgatggcttgctggccgcgggctccaaggatcagcggatcagcctctggtcactctacccacgcgcatgactcacccactcccttcccgggagacgaggagggcgggcagggaggtgggcatcaggccccagccttggcctgaaacctcaagggcctctgaggaccagcaagtcatggcccaaggaccatggagtccccgctgtcttcatgaggttggtatttccttttgtggagtgcctcatcacaggacggtgactctgggggccagccagagccctggccgtccgaggcctgcaggagacgttggcttgggcctgctgtgttgccagctgagggtattttataataaatttccattgccaa

SEQ ID NO: 230055 - DNA, 1076 bp, Artificial Sequence
  derived and/or modified sequence
catgcgccgggtcgtacacggcggccgcgcgcacgctgggggcgtggctgcgcgatgtaatcggtctctggacgctgcgcggcgctcctaggagcaggcgttcccgactccggcaagagggtggcgcctggactctcgccctcagagggaggcccgtcccacggtctgtggctacggatcccaggaccctcttcgcgggcgattcgcgtagcctcaggtaactgcatcctgcccagcatgacggccccctgcccgccgccacctccagacccccagtttgtcctccgaggcacccagtcaccggtgcatgcgctgcacttctgcgaaggagcccaggctcaggggcgcccgctcctcttctcagggtctcagagtggcctggtacacatctggagcctgcagacgcggagagcggttaccaccctggatggccacggcggccagtgtgtgacctggctgcagacgctgccccaggggcgccagctcctcagtcagggccgggacctgaagctgtgcctgtgggacctcgcggagggcaggagcgctgtcgtggactccgtgtgcttggagagtgtgggcttctgccggagcagcatcctggccgggggccagccacgctggacgcttgccgtgccagggaggggcagcgacgaggttcagattctggagatgccctccaagacgtcagtgtgcgccctgaagccgaaggcagatgccaagctgggcatgcccatgtgcctgcggctgtggcaggccgactgcagctcccgcccactccttctggccggctatgaggatggatcggtggtcctgtgggacgtctctgagcagaaggtgtgcagccgcatcgcctgccatgaggagcccggcctctgaggaccagcaagtcatggcccaaggaccatggagtccccgctgtcttcatgaggttggtatttccttttgtggagtgcctcatcacaggacggtgactctgggggccagccagagccctggccgtccgaggcctgcaggagacgttggcttgggcctgctgtgttgccagctgagggtattttataataaatttccattgc

SEQ ID NO: 230056 - DNA, 984 bp, Artificial Sequence
  derived and/or modified sequence
atgacagccccctgccccccacctcctccagacccccagtttgtgctgcggggcacccagagccctgtgcacgccctgcacttctgtgagggcgcccaggcccagggccggcccctgctcttcagcggcagccagagcggcctggtgcacatctggagcctgcagaccaggagagctgtgaccaccctggatggccacggcggccagtgtgtgacctggctgcagaccctgccccagggccggcagctgctgagccagggccgggacctgaagctgtgcctgtgggacctggccgagggccgctctgctgtggtggacagcgtgtgcctggagagcgtgggcttctgccgcagcagcatcctggccggcggccagccccgctggaccctggccgtgcccggccggggcagtgatgaggtgcagatcctggagatgcccagcaagacctctgtgtgtgccctgaagcccaaggcagatgccaagctgggcatgcccatgtgcctgcggctgtggcaggccgactgcagcagccggcccctgctgctggccggctatgaagatggctctgtggtgctgtgggatgtgtctgagcagaaggtgtgcagccgcatcgcctgccacgaggagcctgtgatggacctggactttgacagccagaaggcccggggcatcagcggcagcgctgggaaggccctggccgtgtggagcctggactggcagcaggccctgcaggtgcggggcacccatgagctgaccaaccctggcattgctgaggtgaccatccggccagacaggaagatcctggccacagctggctgggaccaccgcatccgggtcttccactggaggaccatgcagcccctggccgtgctggccttccacagcgctgctgtgcagtgtgtggccttcaccgcagatggcctgctggccgccggcagcaaggaccagaggatcagcctgtggagcctgtacccccgggcctag

SEQ ID NO: 230057 - DNA, 639 bp, Artificial Sequence
  derived and/or modified sequence
atgacagccccctgccccccacctcctccagacccccagtttgtgctgcggggcacccagagccctgtgcacgccctgcacttctgtgagggcgcccaggcccagggccggcccctgctcttcagcggcagccagagcggcctggtgcacatctggagcctgcagaccaggagagctgtgaccaccctggatggccacggcggccagtgtgtgacctggctgcagaccctgccccagggccggcagctgctgagccagggccgggacctgaagctgtgcctgtgggacctggccgagggccgctctgctgtggtggacagcgtgtgcctggagagcgtgggcttctgccgcagcagcatcctggccggcggccagccccgctggaccctggccgtgcccggccggggcagtgatgaggtgcagatcctggagatgcccagcaagacctctgtgtgtgccctgaagcccaaggcagatgccaagctgggcatgcccatgtgcctgcggctgtggcaggccgactgcagcagccggcccctgctgctggccggctatgaagatggctctgtggtgctgtgggatgtgtctgagcagaaggtgtgcagccgcatcgcctgccacgaggagcccggcctgtag

SEQ ID NO: 230058 - DNA, 984 bp, Artificial Sequence
  derived and/or modified sequence
atgaccgccccctgccccccccccccccccgacccccagttcgtgctccgcggaacccagtctcccgtgcatgctcttcacttctgcgaaggggcccaggcacagggtaggcctctgctgttctccgggagtcagtcgggtctggtccacatctggagcctccagacgcgaagagctgtcaccaccctcgacggccacgggggacagtgtgttacttggctgcagaccctgcctcaggggcgccagcttctctcccagggcagggatctgaagctctgtttatgggatctggctgagggtcgcagcgcagtcgtcgattctgtatgcctggagtccgtgggattctgtagatcttccatcctcgccgggggccagccacgctggactctggccgtgcctggaagaggttctgacgaggttcagatactcgagatgccctccaagaccagtgtgtgcgccctgaagcctaaggcggatgccaaactaggtatgccaatgtgtctgcggctttggcaggctgattgttcgtcccgacccttattactcgcaggctacgaggacggtagcgtggttctgtgggacgttagtgagcaaaaggtgtgctcccggatcgcttgccacgaggaacccgttatggatttagattttgacagccaaaaggctcggggcatttctggatctgccggaaaagctttggcagtctggtctttagactggcagcaggcacttcaggtacgcggtacacatgagctgacaaatcctgggattgcggaagtcacgattcggccagacaggaagattctggcaacggcaggctgggaccaccgcatccgcgtattccattggaggacaatgcaaccactggccgtgctggcattccacagtgctgctgtgcaatgcgtggcctttactgctgatgggctgctcgctgccgggagcaaggatcaacgaatctcgttgtggagcctgtacccccgagcctag

SEQ ID NO: 230059 - DNA, 984 bp, Artificial Sequence
  derived and/or modified sequence
atgaccgccccctgccccccccccccccccgacccccagttcgtgctgaggggtacacagtcccccgtgcatgccttacatttttgcgaaggagcccaagcccaaggtcggcctctgctctttagtggctctcagtccggcctggtgcatatctggtctctgcagacccgcagggctgtcacaaccttggatggacacggcggtcagtgtgtcacctggctacagactttgccacagggacgccagctgcttagccagggcagggacctgaagttgtgtttatgggacctagcggagggccggtccgctgtggtggattccgtgtgcctggaatccgtcggcttctgccggtcctccatactcgccggaggtcagcccaggtggaccctggctgtccccggtagaggcagtgacgaggtacagatccttgagatgccctccaagacaagcgtttgtgctctgaagccaaaagcggacgccaaacttggtatgcctatgtgtttaagactgtggcaggctgactgctctagcagaccactgctgctggccggctatgaggatggatcagtggtactttgggacgtctccgagcaaaaagtctgctcccggattgcctgccacgaggagcccgttatggatctagatttcgatagtcagaaggctcggggaatatccgggagtgccggtaaggccttagcggtttggtcccttgattggcagcaagcactgcaggtcagaggaacgcatgagctcaccaacccagggattgccgaggtgacaatccggccagatcggaagatcctggccaccgccggctgggatcatcgaatcagggtttttcattggcggacaatgcaaccccttgccgtgctcgctttccatagcgcggccgtgcagtgtgtcgcttttaccgcagatggcctactcgccgcaggatctaaagatcagcggatctcgctctggagtctgtacccgagggcatag

SEQ ID NO: 230060 - DNA, 639 bp, Artificial Sequence
  derived and/or modified sequence
atgaccgccccctgccccccccccccccccgacccccagttcgtgctgcggggtacacagtcccccgtgcatgcattacatttctgcgagggagcacaggcccagggcagacctctgctattcagtggtagtcagtccggacttgtacacatttggtcactgcaaacacggagggccgtgaccacactcgatggccacgggggtcagtgtgtgacgtggctccagactctgccacagggccggcagttgctctcccagggcagagaccttaagctgtgtctttgggacctagccgagggccgaagcgcggtggtggattctgtttgtttggagagtgttggcttttgtaggtcctcaattcttgcaggaggccagcccagatggacattggctgtgcctgggcgcggttccgacgaggtgcagatcttggagatgccaagcaagacctctgtctgcgcgctcaagccaaaggcggacgccaaacttgggatgcccatgtgccttcgcttatggcaggccgactgctcatctagacctctgcttctggctggttacgaggatggcagtgtcgtcttatgggatgtctcagagcagaaggtctgtagccgaatcgcttgccatgaagaacctggcctgtag

SEQ ID NO: 230061 - DNA, 984 bp, Artificial Sequence
  derived and/or modified sequence
atgacagcaccatgcccaccccctccgcctgaccctcaattcgtgctccgcggaacccagagccctgttcacgctctgcacttctgtgagggcgctcaggcccagggtcgacccctactgttttcaggcagccaaagcgggcttgtacacatttggagcttgcagacacgaagagccgtcacaaccttggacggacacggtgggcagtgcgtaacatggctccaaaccctcccacaggggaggcagcttctctcccagggtagggatctgaagctctgtttgtgggacctggccgagggacgttctgctgttgtcgactctgtgtgtctggaatccgtcggattctgccgctcatccatcctcgcaggagggcagccacgatggacgctggccgtgcctggcaggggctccgacgaggtgcagatactggaaatgccaagcaagacttcagtgtgtgcactgaagccaaaggctgatgccaagctgggcatgccaatgtgcttaagattgtggcaggcagactgttcatctaggcctctgcttctggctggttatgaggacgggtccgtcgtcctgtgggatgtgtccgaacagaaagtttgtagtaggatcgcttgtcacgaagagccggtcatggaccttgactttgactcccaaaaggcaaggggcatctcgggaagcgcgggaaaagccctggccgtgtggtcactggactggcagcaagctttgcaggtccgtgggactcatgagctcactaatcctggcattgcggaggtgacgatccggcctgaccgcaaaattttagctactgccggttgggatcatcggatacgcgtattccactggcggacaatgcagccgttggccgttctcgcttttcactcagctgccgtgcagtgtgtcgcatttactgccgacggcctcctcgccgcagggagtaaagatcaacggatctctctgtggagcttgtaccccagggcctag

SEQ ID NO: 230062 - DNA, 984 bp, Artificial Sequence
  derived and/or modified sequence
atgacagcgccttgtcccccaccccctccggacccgcaattcgtgctcaggggaactcagagccccgtccatgccctgcacttctgcgaaggcgcacaggcccaaggcaggcctctgctgtttagcggctcccagagcgggctggtgcacatttggtcactgcagacacgtagggctgtcaccacattggacggccacggcggacaatgtgtcacatggctgcagaccctgccacagggaagacaattgctgtcccaggggagagatctgaagctgtgtctctgggaccttgcggagggcagaagtgccgtcgtagattccgtctgcctggagtctgtcgggttctgtcgcagctccattctagcaggaggccagccaaggtggacgctggccgtgccaggcagagggtcggacgaagttcagatattagaaatgccctctaagacttcagtgtgtgcactcaagccgaaagctgatgccaagctcggcatgccaatgtgtctgcgactctggcaagctgattgttcctctcgtcctttgctccttgctggatatgaagacgggagcgtggtgctgtgggacgtctctgagcaaaaagtctgttccaggatcgcttgccatgaagaacctgtcatggatctcgacttcgattcccagaaggcaaggggaattagtggttctgctggtaaggcactggcagtatggtccctggattggcaacaggctttgcaggtccgaggaacacatgagctcacgaacccaggaatcgccgaagtaaccattagaccagataggaaaatcttagcgactgcaggctgggaccatcgcattagagttttccactggcggaccatgcaacctctagctgtgctggcgttccattctgcggcagtgcagtgcgttgcattcacagccgacggtctcctggccgctggctccaaagatcagagaatctctctttggagtctgtatcccagagcttag

SEQ ID NO: 230063 - DNA, 639 bp, Artificial Sequence
  derived and/or modified sequence
atgactgcaccctgccccccacccccacccgacccacaattcgtgctcagagggacacaatctcccgtgcacgccctccacttctgcgagggcgcacaggcacagggcaggcctctcctgtttagtggcagccaatctggactagtgcacatatggtcattacagactagaagggctgtgactaccctcgacgggcacgggggacagtgtgtgacatggctgcagaccctcccccagggtaggcagctcctctcccaggggagagacctcaagctgtgtttgtgggatttggccgaaggcagatcagcggtggttgatagcgtctgcctggaatcagtgggattttgtcgttccagcattctcgctggcggacagcctagatggaccttagcagtgcctggtcgcggatctgatgaggtgcagattctggaaatgccaagcaagaccagcgtctgcgccctcaagccaaaggctgacgccaaactgggaatgcctatgtgcttgagactatggcaggcagactgctccagccgcccactactgctggccggttatgaggacggctcagttgtgctctgggatgtctctgagcagaaggtatgtagtcgaatcgcatgccacgaggagcctggtctctag

SEQ ID NO: 230064 - DNA, 984 bp, Artificial Sequence
  derived and/or modified sequence
atgaccgccccctgccccccccccccccccgacccccagttcgtgctgagaggcacccagagccccgtgcacgccctgcacttctgcgagggcgcccaggcccagggcagacccctgctgttcagcggcagccagagcggcctggtgcacatctggagcctgcagaccagaagagccgtgaccaccctggacggccacggcggccagtgcgtgacctggctgcagaccctgccccagggcagacagctgctgagccagggcagagacctgaagctgtgcctgtgggacctggccgagggcagaagcgccgtggtggacagcgtgtgcctggagagcgtgggcttctgcagaagcagcatcctggccggcggccagcccagatggaccctggccgtgcccggcagaggcagcgacgaggtgcagatcctggagatgcccagcaagaccagcgtgtgcgccctgaagcccaaggccgacgccaagctgggcatgcccatgtgcctgagactgtggcaggccgactgcagcagcagacccctgctgctggccggctacgaggacggcagcgtggtgctgtgggacgtgagcgagcagaaggtgtgcagcagaatcgcctgccacgaggagcccgtgatggacctggacttcgacagccagaaggccagaggcatcagcggcagcgccggcaaggccctggccgtgtggagcctggactggcagcaggccctgcaggtgagaggcacccacgagctgaccaaccccggcatcgccgaggtgaccatcagacccgacagaaagatcctggccaccgccggctgggaccacagaatcagagtgttccactggagaaccatgcagcccctggccgtgctggccttccacagcgccgccgtgcagtgcgtggccttcaccgccgacggcctgctggccgccggcagcaaggaccagagaatcagcctgtggagcctgtaccccagagcctag

SEQ ID NO: 230065 - DNA, 639 bp, Artificial Sequence
  derived and/or modified sequence
atgaccgccccctgccccccccccccccccgacccccagttcgtgctgagaggcacccagagccccgtgcacgccctgcacttctgcgagggcgcccaggcccagggcagacccctgctgttcagcggcagccagagcggcctggtgcacatctggagcctgcagaccagaagagccgtgaccaccctggacggccacggcggccagtgcgtgacctggctgcagaccctgccccagggcagacagctgctgagccagggcagagacctgaagctgtgcctgtgggacctggccgagggcagaagcgccgtggtggacagcgtgtgcctggagagcgtgggcttctgcagaagcagcatcctggccggcggccagcccagatggaccctggccgtgcccggcagaggcagcgacgaggtgcagatcctggagatgcccagcaagaccagcgtgtgcgccctgaagcccaaggccgacgccaagctgggcatgcccatgtgcctgagactgtggcaggccgactgcagcagcagacccctgctgctggccggctacgaggacggcagcgtggtgctgtgggacgtgagcgagcagaaggtgtgcagcagaatcgcctgccacgaggagcccggcctgtag

SEQ ID NO: 230066 - protein, 358 aa, Artificial Sequence
  derived and/or modified sequence
MDDATVLRKKGYIVGINLGKGSYAKVKSAYSERLKFNVAVKIIDRKKTPTDFVERFLPREMDILATVNHGSIIKTYEIFETSDGRIYIIMELGVQGDLLEFIKCQGALHEDVARKMFRQLSSAVKYCHDLDIVHRDLKCENLLLDKDFNIKLSDFGFSKRCLRDSNGRIILSKTFCGSAAYAAPEVLQSIPYQPKVYDIWSLGVILYIMVCGSMPYDDSDIRKMLRIQKEHRVDFPRSKNLTCECKDLIYRMLQPDVSQRLHIDEILSHSWLQPPKPKATSSASFKREGEGKYRAECKLDTKTGLRPDHRPDHKLGAKTQHRLLVVPENENRMEDRLAETSRAKDHHISGAEVGKAST

SEQ ID NO: 230067 - DNA, 1077 bp, Artificial Sequence
  derived and/or modified sequence
atggacgacgccaccgtgctgagaaagaagggctacatcgtgggcatcaacctgggcaagggcagctacgccaaggtgaagagcgcctacagcgagagactgaagttcaacgtggccgtgaagatcatcgacagaaagaagacccccaccgacttcgtggagagattcctgcccagagagatggacatcctggccaccgtgaaccacggcagcatcatcaagacctacgagatcttcgagaccagcgacggcagaatctacatcatcatggagctgggcgtgcagggcgacctgctggagttcatcaagtgccagggcgccctgcacgaggacgtggccagaaagatgttcagacagctgagcagcgccgtgaagtactgccacgacctggacatcgtgcacagagacctgaagtgcgagaacctgctgctggacaaggacttcaacatcaagctgagcgacttcggcttcagcaagagatgcctgagagacagcaacggcagaatcatcctgagcaagaccttctgcggcagcgccgcctacgccgcccccgaggtgctgcagagcatcccctaccagcccaaggtgtacgacatctggagcctgggcgtgatcctgtacatcatggtgtgcggcagcatgccctacgacgacagcgacatcagaaagatgctgagaatccagaaggagcacagagtggacttccccagaagcaagaacctgacctgcgagtgcaaggacctgatctacagaatgctgcagcccgacgtgagccagagactgcacatcgacgagatcctgagccacagctggctgcagccccccaagcccaaggccaccagcagcgccagcttcaagagagagggcgagggcaagtacagagccgagtgcaagctggacaccaagaccggcctgagacccgaccacagacccgaccacaagctgggcgccaagacccagcacagactgctggtggtgcccgagaacgagaacagaatggaggacagactggccgagaccagcagagccaaggaccaccacatcagcggcgccgaggtgggcaaggccagcacctag

SEQ ID NO: 230068 - DNA, 1077 bp, Artificial Sequence
  derived and/or modified sequence
atggacgacgcaaccgtgcttcgcaagaagggctatatcgtgggaattaatttgggaaagggatcatacgccaaagtcaaaagtgcgtactctgaacgcctgaagtttaacgtcgcagtgaagatcatcgaccgcaaaaagacaccaacagactttgtcgaacgtttccttcctagagaaatggatatcctggcaactgttaatcatggatctatcataaagacatacgagatcttcgagacaagcgacgggaggatttacattataatggaattgggggtgcagggcgatcttctggagtttatcaagtgtcagggggcactgcacgaagatgttgcccggaagatgtttaggcagctttcaagcgctgtgaaatactgccacgatttagacatcgtgcaccgcgatctgaagtgtgagaatctactactggacaaagacttcaacattaaacttagcgattttggtttcagcaaacgatgtctgcgtgacagcaacgggcgtattattctgtccaagactttctgcggcagtgccgcttacgctgcccccgaagttctccagtcaatcccctatcagcctaaagtttatgacatatggtctctgggtgttattctgtacattatggtctgtggctctatgccatatgatgactccgatattagaaagatgctgcgtatacagaaggagcacagggtagactttccgaggagtaaaaatctaacttgcgaatgcaaagatctgatttatcggatgctccaaccggatgtatcccagcgactccatatcgacgagatcctctcgcactcttggttgcaacctcccaaaccgaaagccacttcgtcggcaagcttcaagagggaaggcgagggaaagtatagggctgaatgtaaacttgacaccaagacaggtctcaggcccgatcaccgccccgaccacaaactcggcgctaaaactcagcacaggttgctcgtcgtgccggagaatgaaaaccggatggaagatagactcgccgaaacttcaagggctaaggaccaccacatctcgggcgctgaggttgggaaggcatcgacttag

SEQ ID NO: 230069 - DNA, 1077 bp, Artificial Sequence
  derived and/or modified sequence
atggatgatgccaccgtgctgaggaagaagggctacatcgtgggcatcaacctgggcaagggcagctatgccaaggtgaagagcgcctacagcgagcggctgaagttcaacgtggccgtgaagatcatcgacaggaagaagacccccacagactttgtggagcgcttcctgccccgggagatggacatcctggccaccgtgaaccacggcagcatcatcaagacctatgagatctttgagaccagtgatggccgcatctacatcatcatggagctgggcgtgcagggcgacctgctggagttcatcaagtgccagggcgccctgcatgaagatgtggccaggaagatgttccggcagctgagcagcgctgtgaagtactgccacgacctggacatcgtgcaccgggacctgaagtgtgagaacctgctgctggacaaggacttcaacatcaagctgagtgactttggcttcagcaagcgctgcctgcgggacagcaatggccgcatcatcctgagcaagaccttctgtggcagcgctgcctatgctgcccctgaggtgctgcagagcatcccctaccagcccaaggtgtatgacatctggagcctgggcgtcatcctgtacatcatggtgtgtggctccatgccctatgatgacagcgacatcaggaagatgctgcgcatccagaaggagcaccgggtggacttccccaggagcaagaacctgacctgtgagtgcaaggacctgatctacaggatgctgcagccagatgtgtcccagaggctgcacattgatgagatcctgagccacagctggctgcagccccccaagcccaaggccaccagcagcgccagcttcaagcgggagggggagggcaagtacagagctgagtgcaagctggacaccaagacaggcctgcggccagaccacaggccagaccacaagctgggcgccaagacccagcaccggctgctggtggtgcctgaaaatgaaaataggatggaggaccggctggccgagaccagccgggccaaggaccaccacatctctggagctgaggtgggcaaggccagcacctag

SEQ ID NO: 230070 - DNA, 1077 bp, Artificial Sequence
  derived and/or modified sequence
atggacgacgccaccgtgctgcggaagaagggctacatcgtgggcattaacttgggcaagggctcctacgccaaggtgaagagcgcttactccgaacgcttgaaattcaatgtcgcggtgaaaatcatcgataggaagaagacccctaccgatttcgtggagcggttcctgccaagagaaatggatatcttggcaacagtgaaccacggatcgatcatcaaaacctacgaaatcttcgagacatctgacggacgaatatatatcataatggagctgggcgtccagggggacctgctcgagtttatcaaatgtcagggtgcattgcacgaggatgtagcacgcaagatgtttagacagctttcctctgccgtcaaatattgccatgatcttgacattgtccaccgagatcttaagtgcgagaaccttcttctggataaggacttcaacataaaattgagtgactttgggttctcgaaaaggtgtctgcgtgactcaaatggccgcattatcctgagtaaaaccttttgtggtagcgctgcttatgctgcaccagaggttctgcaatccataccctaccagcccaaggtgtatgatatttggtctttaggtgtaatcttgtatattatggtttgtggcagcatgccatatgatgactctgatatcagaaaaatgctacgtatccagaaagagcatcgggtggattttcccaggtccaaaaacctgacctgtgaatgtaaggacctaatttacagaatgctccagcccgacgtgtctcaaagactgcatatagacgagatcctgagccactcttggctccagccacccaaaccaaaggcaaccagctcagcctcgttcaagcgtgaaggcgaagggaagtacagagccgagtgcaagctcgacacaaagaccggcttgagacctgaccatagaccggaccataaacttggggcgaaaacccaacatcggctacttgtcgtgcccgagaatgagaataggatggaggacagactggctgagaccagccgggccaaggatcatcacataagcggagctgaagtcggaaaggcctccacctag

SEQ ID NO: 230071 - DNA, 1077 bp, Artificial Sequence
  derived and/or modified sequence
atggatgatgccacagtacttaggaagaaagggtatatcgtgggaatcaatctggggaagggcagttacgccaaggtgaagagtgcatactcagagagactgaagtttaacgtggctgtcaagatcatcgataggaagaaaacaccaactgactttgtcgaacggtttcttcccagagagatggatatactggcgaccgtcaaccatggctctatcatcaagacatacgaaattttcgaaacaagtgatggcagaatttatattatcatggagctgggagtccagggggacctattggagttcatcaagtgtcagggggcactgcacgaggatgtggctcgtaagatgttcagacaactgtcctccgccgtcaagtattgtcacgatctggacatcgtgcatagagatctgaagtgtgaaaacctgctgctggacaaggactttaatatcaaactatccgactttggtttcagcaagcggtgtctcagggactccaacggtcgtattatactaagcaaaacattctgtggtagtgcagcatacgccgctcccgaagtgctgcagtctattccataccagcctaaagtgtacgatatatggagtttaggtgtaatactgtacattatggtttgcggatccatgccctatgatgactctgatattagaaagatgctgcgcattcagaaagagcacagggtggatttcccgcgatccaaaaacctgacgtgtgagtgtaaagatctaatatatagaatgcttcagcctgatgtgtcccagcgactgcatatagacgagatcctcagccactcgtggctccaacctccgaaacctaaagccacctcctcagcatcattcaagagagagggtgaaggcaaataccgggcagagtgtaagctggatacaaagactggattgagaccagatcaccgccctgaccacaagttgggcgctaaaacacagcacagactacttgtagtgccagagaatgagaatcgcatggaggaccggctagccgaaactagtcgggcaaaagaccatcacatcagtggggctgaagtgggcaaagctagcacttag

SEQ ID NO: 230072 - DNA, 1814 bp, Artificial Sequence
  derived and/or modified sequence
tcaatggtaaggcagtgctgtggaaatctgtctgtgtaactggggtgctatgcaggcctgtctgggtgactgtcagggacaactgtcctaccacaccaaggacacagccctgggggtgcttttcttcatagccaaagaagctgcaggaaacccaccctagtgggacaaagaccaatgcagggtcagtccccacagccaggtgatgcaaacaggctggacgtgggccgcctcccctccagcttgacttgtgacagggaaaccaatgcagcagcagcagggccaccagagtcctgtcctggggacaggcttccttccagcgggcggggagtgggtgctcctgccagaccagcctggcttccacggttccagagaccctgttctccctcagcccagtccccgcccccactccttggctttatgagttcattggctgaagtcacccggagacaatgctgagtgttccacccctgagtcgaagcccagcccagggcagcccagccagacgcctccggtagtgtaaatgaggacaatgcctgctggcccacatgacggggggatgtagacggcagcggcgccagtcgctcctggcaccatggacgatgccacagtcctaaggaagaagggttacatcgtaggcatcaatcttggcaagggttcctacgcaaaagtcaaatctgcctactctgagcgcctcaagttcaatgtggctgtcaagatcatcgaccgcaagaaaacacctactgactttgtggagagattccttcctcgggagatggacatcctggcaactgtcaaccacggctccatcatcaagacttacgagatctttgagacctctgacggacggatctacatcatcatggagcttggcgtccagggcgacctcctcgagttcatcaagtgccagggagccctgcatgaggacgtggcacgcaagatgttccgacagctctcctccgccgtcaagtactgccacgacctggacatcgtccaccgggacctcaagtgcgagaaccttctcctcgacaaggacttcaacatcaagctgtctgactttggcttctccaagcgctgcctgcgggacagcaatgggcgcatcatcctcagcaagaccttctgcgggtcggcagcatatgcagcccccgaggtgctgcagagcatcccctaccagcccaaggtgtatgacatctggagcctgggcgtgatcctgtacatcatggtctgcggctccatgccctatgacgactccgacatcaggaagatgctgcgtatccagaaggagcaccgtgtggacttcccgcgctccaagaacctgacctgcgagtgcaaggacctcatctaccgcatgctgcagcccgacgtcagccagcggctccacatcgatgagatcctcagccactcgtggctgcagccccccaagcccaaagccacgtcttctgcctccttcaagagggagggggagggcaagtaccgcgctgagtgcaaactggacaccaagacaggcttgaggcccgaccaccggcccgaccacaagcttggagccaaaacccagcaccggctgctggtggtgcccgagaacgagaacaggatggaggacaggctggccgagacctccagggccaaagaccatcacatctccggagctgaggtggggaaagcaagcacctagcatgacaatggccccgttgtgtgtggtgggggtcggggttggggggcatggtgcagtcggccttcacgtaaactaagtaggcaggtaggatctgaagaaggcacaggtgcaagtaaaattcgtcaattaaaccactattttgatt

SEQ ID NO: 230073 - DNA, 1305 bp, Artificial Sequence
  derived and/or modified sequence
atggctatgcagaaaatttttgccagggagatcctggacagtagaggaaatcctacagtggaggtagacctgcatacagcgaagggacgctttcgggcagctgtcccaagtggtgcttctaccgggatctacgaagctctggaactgcgcgatggcgataaagggcggtacctaggaaaaggtgtcctcaaggcggtcgagaatattaacaatacactgggcccagcactgctccaaaaaaaactgtcagtggttgaccaggagaaagtagataagttcatgatcgagctggatggcaccgagaacaaatccaagttcggagccaatgccatactaggcgtatcccttgccgtatgcaaggccggcgcggccgagaagggagtgccgctgtacaggcacattgcggatctggcgggcaatcccgacttaatcctccctgtgccggcttttaatgtgattaacgggggatcacatgccgggaacaaactggccatgcaggagtttatgatcttgcccgtcggggccagctctttcaaggaggccatgaggatcggagcagaggtctaccatcatttaaaaggtgtcatcaaggcaaagtatgggaaagacgccacaaacgttggtgatgaaggaggcttcgctcccaacatcctagagaataatgaagcccttgagctattgaagactgccatccaagccgcggggtaccccgataaagtcgtgattggcatggacgtagccgcaagcgaattctaccgcaacggcaaatacgacttggattttaaaagcccggacgaccccgcccggcacattactggggagaaacttggcgaactgtacaaaagcttcattaaaaattacccggttgtcagcatcgaagaccccttcgaccaggacgattgggccacatggacgtcctttctctctggcgtcaatatacaaatcgtgggcgacgatctaaccgttaccaaccccaaacgtattgcacaggccgttgaaaagaaagcatgtaactgtcttctgctgaaggttaaccagattggctctgtaaccgaaagcatccaagcctgtaaactcgctcagagcaatggctggggtgttatggtatcccatagaagtggtgaaaccgaagacaccttcatcgccgacctggtcgttggattgtgtacaggccaaatcaagaccggtgcaccatgcaggtcagagcgactcgctaagtataatcagctcatgaggattgaggaggccttaggagacaaggccatctttgccggaaggaaattccggaaccctaaggccaagtag

SEQ ID NO: 230074 - DNA, 1305 bp, Artificial Sequence
  derived and/or modified sequence
atggctatgcagaagatctttgccagagagattctggacagccgggggaatcccaccgttgaagttgatctgcacacggctaaaggcaggtttcgggctgccgttccgagcggggcctctactggcatttacgaagccctggaactgcgtgatggtgacaaaggcagatatctgggaaagggagtgttaaaggccgtcgaaaatatcaataacacgcttggccccgccttacttcagaagaagctgtccgtggtggatcaggagaaagtcgataagttcatgatcgagctggacggtaccgagaacaagtctaagtttggggcaaatgccatcctcggagtaagcttggccgtctgcaaagccggggcagccgagaaaggggtgcccttgtatcgccacatcgccgatttggcgggtaatcccgatctgattctccctgttcctgccttcaatgtaatcaatggtggttctcacgccggcaacaaactcgcgatgcaggaatttatgatcctcccggttggcgcctctagcttcaaggaagctatgcggattggagccgaggtttatcaccacctgaaaggggttattaaagctaagtatgggaaagatgccacaaatgtgggagatgagggtggctttgcacccaatatactagaaaacaatgaggctttagagctgctaaaaactgccattcaggcggccggctaccctgataaggtagttattgggatggatgtggccgcttccgagttctatagaaatgggaaatatgacctggacttcaaaagccccgacgatccagccagacacatcacaggcgagaaactcggggagctgtataaaagcttcattaaaaactatcctgtcgtcagtatcgaggatcctttcgatcaggacgactgggccacatggacttctttccttagcggcgtgaatattcagattgtgggggatgatctgactgtcaccaatcccaaacgcattgcccaggcggtggagaaaaaagcctgcaactgccttttgttgaaggtgaatcagattggcagtgtgactgagagcatccaggcttgcaagctggcacagagcaacggctggggtgtcatggtgtcgcaccgctcaggtgagacggaagacacttttattgccgatcttgttgtcggtctgtgcaccgggcaaatcaaaaccggcgctccgtgccgcagtgagagattagcaaaatataaccagctgatgaggatcgaagaggccctcggcgacaaggccatctttgcaggccggaagtttagaaatcccaaagccaagtag

SEQ ID NO: 230075 - DNA, 852 bp, Artificial Sequence
  derived and/or modified sequence
atggccatgcagaagatttttgcccgcgaaatactggactctcgcggcaaccccactgtggaggtggatttgcatacggctaaagggaggtttagggccgcagtgccttctggggccagtaccggcatctatgaggctctcgagctgcgggacggcgataaaggtcgatacctcgggaagggtgttctgaaggctgtggaaaatatcaataacacattgggccctgcactgttgcagaaaaaactgtctgtcgtggaccaggagaaggtcgacaaattcatgatcgagctcgacggaactgaaaacaagagcaaattcggcgctaacgcaattcttggtgtttccttggccgtctgcaaagccggagcagccgaaaagggagtgccactgtacaggcatattgctgatctggcaggaaatcccgacctcatcctgccagtccctgcgtttaatgtcattaatggcggctcccatgctggaaataaacttgcaatgcaggaattcatgattctgcctgtgggggcatccagttttaaagaagctatgcggataggcgccgaagtgtaccatcatctcaaaggggtgatcaaggctaaatacggaaaagatgctacgaatgtaggtgatgaaggtggtttcgcaccaaatatactggaaaataacgaagctcttgagctcctgaagactgccatccaggccgcgggctacccagacaaggtggtgatcgggatggatgtcgccgcctctgagttttaccgcaatggcaaatacgatcttgactttaagtcccctgacgatcccgcgagacacatcacaggcgagaaacttggggagctttataaatccttttag

SEQ ID NO: 230076 - DNA, 465 bp, Artificial Sequence
  derived and/or modified sequence
atggctatgcaaaagatcttcgcccgggagatccttgattcacgcggcaaccctaccgttgaggtggatctccacaccgcaaagggacggtttcgggccgcagtacccagcggcgcctctaccggaatctacgaggcgttggagctgagggacggagataagggtagatacctggggaaaggcgttctcaaagccgtggaaaacattaataacacgctgggtccagccctgctccagaagaagctttctgtggtggaccaggagaaagtcgacaaattcatgattgagctcgatgggaccgagaacaagtctaagttcggggctaatgccatactaggtgtgagtctggccgtctgtaaggccggcgcagcggaaaagggcgtgcccctctatcggcacattgccgatctcgcaggaaatcctgacctgattttacccgttcctgccttcaatgtcattaattag

SEQ ID NO: 230077 - DNA, 447 bp, Artificial Sequence
  derived and/or modified sequence
atggccatgcagaaaatcttcgcaagagagatcttagactcacgcggaaacccaaccgttgaggtcgatctgcacactgctaaagggaggtttagggccgcagttcctagcggcgcttccacaggcatatacgaagccctcgagctcagagatggagataaggggcgatatttaggaaagggggtactcaaagcagttgagaacattaacaacaccctcggtccagcacttctccagaaaaagcttagcgtggtagatcaggagaaggtcgacaagtttatgatcgaactggacggcaccgaaaataaatctaaattcggcgcaaatgccatacttggtgtgtcgttggcagtgtgcaaagctggcgccgctgaaaaaggcgttccgctttatcgacacattgcagatctcgcgggcaatccagacctgattttgcctgtgccttag

SEQ ID NO: 230078 - DNA, 1305 bp, Artificial Sequence
  derived and/or modified sequence
atggccatgcagaagatctttgcccgggagatcctggacagccggggcaaccccaccgtggaggtggacctgcacacagccaagggccgcttccgggctgctgtgcccagcggggccagcacaggcatctatgaggccctggagctgagagatggagacaagggccgctacctgggcaagggcgtgctgaaggctgtggagaacatcaacaacaccctgggccctgccctgctgcagaagaagctgtctgtggtggaccaggagaaggtggacaagttcatgattgagctggatggaacagagaacaagagcaagtttggagccaatgccatcctgggcgtgtccctggccgtgtgcaaggccggggctgctgagaagggcgtgcccctgtaccgccacatcgctgacctggccggcaacccagacctgatcctgcctgtgcctgccttcaacgtcatcaatggaggcagccatgctggcaacaagctggccatgcaggagttcatgatcctgcctgtgggcgccagcagcttcaaggaggccatgagaattggagctgaggtgtaccaccacctgaagggcgtcatcaaggccaagtatggcaaggatgccaccaacgtgggagatgaaggaggctttgcccccaacatcctggagaacaatgaggccctggagctgctgaagacagccatccaggccgccggctacccagacaaggtggtgattggcatggatgtggccgccagcgagttctacagaaatggcaagtatgacctggacttcaagagcccagatgatcctgcccggcacatcaccggggagaagctgggggagctgtacaagagcttcatcaagaactaccctgtggtgtccattgaggacccctttgaccaggatgactgggccacctggaccagcttcctgtctggagtgaacatccagatcgtgggagatgacctgactgtgaccaaccccaagagaattgcccaggccgtggagaagaaggcctgcaactgcctgctgctgaaggtgaaccagatcggctctgtgacagagagcatccaggcctgcaagctggcccagagcaatggctggggcgtgatggtgagccacaggtctggagaaacagaggacaccttcatcgctgacctggtggtgggcctgtgcaccggccagatcaagacaggagccccctgccgctctgagcggctggccaagtacaaccagctgatgagaattgaggaggccctgggggacaaggccatctttgctggcaggaagttcaggaaccccaaggccaagtag

SEQ ID NO: 230079 - DNA, 852 bp, Artificial Sequence
  derived and/or modified sequence
atggccatgcagaagatctttgcccgggagatcctggacagccggggcaaccccaccgtggaggtggacctgcacacagccaagggccgcttccgggctgctgtgcccagcggggccagcacaggcatctatgaggccctggagctgagagatggagacaagggccgctacctgggcaagggcgtgctgaaggctgtggagaacatcaacaacaccctgggccctgccctgctgcagaagaagctgtctgtggtggaccaggagaaggtggacaagttcatgattgagctggatggaacagagaacaagagcaagtttggagccaatgccatcctgggcgtgtccctggccgtgtgcaaggccggggctgctgagaagggcgtgcccctgtaccgccacatcgctgacctggccggcaacccagacctgatcctgcctgtgcctgccttcaacgtcatcaatggaggcagccatgctggcaacaagctggccatgcaggagttcatgatcctgcctgtgggcgccagcagcttcaaggaggccatgagaattggagctgaggtgtaccaccacctgaagggcgtcatcaaggccaagtatggcaaggatgccaccaacgtgggagatgaaggaggctttgcccccaacatcctggagaacaatgaggccctggagctgctgaagacagccatccaggccgccggctacccagacaaggtggtgattggcatggatgtggccgccagcgagttctacagaaatggcaagtatgacctggacttcaagagcccagatgatcctgcccggcacatcaccggggagaagctgggggagctgtacaagagcttctag

SEQ ID NO: 230080 - DNA, 465 bp, Artificial Sequence
  derived and/or modified sequence
atggccatgcagaagatctttgcccgggagatcctggacagccggggcaaccccaccgtggaggtggacctgcacacagccaagggccgcttccgggctgctgtgcccagcggggccagcacaggcatctatgaggccctggagctgagagatggagacaagggccgctacctgggcaagggcgtgctgaaggctgtggagaacatcaacaacaccctgggccctgccctgctgcagaagaagctgtctgtggtggaccaggagaaggtggacaagttcatgattgagctggatggaacagagaacaagagcaagtttggagccaatgccatcctgggcgtgtccctggccgtgtgcaaggccggggctgctgagaagggcgtgcccctgtaccgccacatcgctgacctggccggcaacccagacctgatcctgcctgtgcctgccttcaacgtcatcaactag

SEQ ID NO: 230081 - DNA, 447 bp, Artificial Sequence
  derived and/or modified sequence
atggccatgcagaagatctttgcccgggagatcctggacagccggggcaaccccaccgtggaggtggacctgcacacagccaagggccgcttccgggctgctgtgcccagcggggccagcacaggcatctatgaggccctggagctgagagatggagacaagggccgctacctgggcaagggcgtgctgaaggctgtggagaacatcaacaacaccctgggccctgccctgctgcagaagaagctgtctgtggtggaccaggagaaggtggacaagttcatgattgagctggatggaacagagaacaagagcaagtttggagccaatgccatcctgggcgtgtccctggccgtgtgcaaggccggggctgctgagaagggcgtgcccctgtaccgccacatcgctgacctggccggcaacccagacctgatcctgcctgtgccctag

SEQ ID NO: 230082 - DNA, 1305 bp, Artificial Sequence
  derived and/or modified sequence
atggccatgcagaagatcttcgcccgggagatcctggacagccgggggaatccaaccgtggaggtagacttgcacaccgcgaaagggaggttccgggcggctgtgccctctggcgcatccactgggatatacgaggcccttgagctcagggacggggataagggccggtacttaggcaagggtgtcctgaaggctgtggagaacataaataatacactaggccccgctttactgcagaaaaaactgtcagtggtggatcaggaaaaggtcgacaaattcatgatagagttggacgggaccgagaacaagtccaaatttggcgctaacgctattctaggcgtatcactcgcagtgtgcaaggctggcgctgcagagaagggcgttccactgtatcgacatatagccgaccttgccggtaatccagacctgatccttcccgtcccggctttcaacgtcattaacggaggctcacacgctgggaacaagctggctatgcaagaattcatgatcctcccagtgggggccagctcctttaaagaagctatgcgtatcggtgcagaggtgtatcaccatctgaagggtgtgataaaagccaaatacggaaaggacgcaactaacgtcggcgatgaaggtgggttcgcccctaatatcctcgagaataatgaggcccttgagttgctcaagacagcaattcaggcagcaggctaccccgacaaagtggtgatcggtatggacgttgctgcgagcgagttctacagaaacggaaagtacgatctggattttaagtccccagacgaccccgccaggcacattacgggcgagaagttgggggaactgtacaagagctttatcaaaaattacccggtggtgtctatcgaagacccctttgatcaggacgactgggcaacctggaccagttttctgagcggcgtgaacatccagatcgtcggtgacgatttgaccgtgacaaaccctaagcgcatagcacaggccgtggagaagaaggcttgcaattgtctcctactgaaggtcaaccagatcggctctgttactgagagcatacaggcttgtaagctggcgcagtctaatggttggggcgtgatggtttcccaccgctcaggagagactgaagacaccttcatagcagacctcgtggtgggcctgtgtaccggtcaaattaaaactggagcaccctgcaggtccgaacgcttagccaagtataaccagctgatgcgcatcgaggaggctttgggcgataaagctatcttcgcgggacgcaagtttaggaatccaaaggccaagtag

SEQ ID NO: 230083 - DNA, 1305 bp, Artificial Sequence
  derived and/or modified sequence
atggccatgcagaagatcttcgcccgggagatcctggacagccggggcaatcctaccgtagaagtggaccttcatacggcgaaggggaggttcagggcggccgtcccatctggtgcgtccacaggcatttacgaggccttggaactcagagatggggataaaggccgctatctgggcaagggtgtactgaaggccgtcgagaacatcaataataccctcgggcccgctttgttgcagaagaagctgtccgttgtggatcaggagaaagtggacaagtttatgatagagctggacgggacggagaacaaaagtaagtttggtgccaatgccattctaggcgtcagcctcgccgtatgcaaagccggcgcagctgaaaaaggggtgcctctgtatcggcatattgccgacctcgctgggaatccagatctaattttgccagtgcccgcattcaatgtgattaatggtgggtcccatgccggcaataaacttgccatgcaggagttcatgatcttgccagtcggcgcaagtagcttcaaggaggcgatgcggataggcgctgaggtgtaccaccacctcaaaggagtgatcaaggctaagtatggaaaggacgccaccaacgtcggcgatgaaggagggttcgcccctaacatattagagaataatgaggctctcgagctcctcaagacagccattcaggcggctggttacccagataaggttgttatcggcatggatgttgctgcttctgagttttatcgcaacggcaaatacgacctcgacttcaagagtcctgacgaccccgctagacacattactggggagaagctcggcgagctgtacaagagcttcataaaaaattacccggtggtatcaatcgaggatccttttgatcaggatgactgggccacctggacatcattcctgagcggcgtgaatattcagattgttggcgacgacctgacagtgacgaatcccaagaggatcgctcaggctgtggaaaagaaagcctgcaactgtttgctgctcaaggtaaatcaaatcggatcagtgacggaaagcatccaggcctgcaagttggcccagagcaacggctggggcgtcatggtgtcacatcgttcaggggaaaccgaggatacttttatagccgatttggtggtggggctgtgcacaggccaaataaagaccggtgcaccatgccggtctgagcggttggctaagtataaccagctgatgagaattgaggaggccctcggtgataaggccattttcgctggccgcaagttccggaaccctaaggcgaaatag

SEQ ID NO: 230084 - DNA, 852 bp, Artificial Sequence
  derived and/or modified sequence
atggccatgcagaagatcttcgcccgggagatcctggacagccgggggaatccaactgttgaagtggacctgcacaccgcgaaggggagattcagagccgccgtccccagtggtgcctccacgggtatttacgaggcgctcgagttgcgcgatggcgacaaaggacggtacctgggcaaaggcgtgttaaaagccgtcgaaaatatcaacaacactctgggtcctgcattgctgcaaaagaagctgtctgtcgttgaccaggagaaggtggacaaattcatgatagagctcgacggaactgaaaataaatctaaatttggcgctaacgcaatcctgggcgtctccctggccgtatgcaaagccggcgctgccgaaaagggcgttcctctgtaccgccacatcgccgatttggcaggcaatcctgacctaatcctgcccgtccctgcctttaatgtgattaatggaggttcccatgcgggcaataagctcgctatgcaggaatttatgatcctgcccgtgggcgcttcctcatttaaggaagccatgaggattggagcagaagtctatcaccacttaaagggggttattaaagccaagtatggtaaagatgccacgaacgttggagatgagggagggtttgctcctaacatactcgagaacaacgaggctctggagttgctgaaaactgcaattcaggccgcaggttacccggacaaggtggtgatcgggatggacgtcgccgcttcagagttttacagaaatggaaagtacgacctggatttcaaaagtcccgacgatccggcgcgccacatcactggcgagaagctgggtgagctctacaaatcgttctag

SEQ ID NO: 230085 - DNA, 465 bp, Artificial Sequence
  derived and/or modified sequence
atggccatgcagaagatcttcgcccgggagatcctggacagccgggggaaccccaccgtggaggtggatctccacacggctaaggggcgttttagggcggcagtcccatccggagcttcaaccggcatttacgaggccctggaattacgcgatggggataagggcaggtatctgggcaagggggtcctcaaggccgttgagaatattaataatacgctcggtcccgctctcttgcagaagaagctgtctgtggtggatcaggagaaagtggacaaattcatgatcgaactggacggcacagagaacaagagtaaatttggagctaacgccattctgggagtgagcttggccgtgtgtaaagccggtgcggctgagaaaggcgttcccttatacagacacatcgccgatttggccggcaatccggacctgattctgccggtgcctgccttcaatgtgattaattag

SEQ ID NO: 230086 - DNA, 447 bp, Artificial Sequence
  derived and/or modified sequence
atggccatgcagaagatcttcgcccgggagatcctggacagccggggtaaccctacagtagaggtggacctccataccgcgaaagggcggttccgcgccgcagttcccagcggggccagcaccggcatctatgaggctttagaacttcgcgatggtgataaaggcaggtatctcggaaaaggtgtgctgaaagcagtcgagaacattaacaacactctgggccccgcgctgctacagaagaagctgtctgtggttgaccaggagaaggtcgacaagttcatgattgaactcgatggaacagagaacaaaagcaagtttggggcaaatgcaattctgggggtgagcctggcggtctgcaaggctggcgcagccgagaaaggggttcctttgtatcgtcacatcgcagatcttgccggaaatcccgatcttatactgccggttccttag

SEQ ID NO: 230087 - DNA, 1305 bp, Artificial Sequence
  derived and/or modified sequence
atggctatgcagaagattttcgccagagagatccttgacagcagagggaatcccaccgtcgaggtcgatcttcacacggctaaggggagattccgggctgccgtgccatctggcgcatctaccgggatctatgaggctctggagttgagggacggggataagggtcgctacctgggaaaaggagtacttaaggccgtcgaaaatatcaacaacaccttggggccagccctgctgcagaaaaaactctccgtggtggatcaggagaaggtggacaaatttatgatcgagctggacggcaccgagaataagtcaaagttcggggctaacgccatcctgggtgtcagcttggcagtgtgtaaggccggtgccgcagagaaaggagtgcccctctaccggcatattgccgacctggcaggtaatccagatctgatccttcccgttccagcatttaacgtgatcaatggcggtagccacgccggaaataagctggcaatgcaggagttcatgatcctgccagtgggcgcatccagttttaaggaggcaatgaggattggcgcagaagtgtaccatcacctaaagggagtgattaaggctaagtatggcaaagatgcaactaacgtgggcgacgaaggtggatttgcacctaatatattggagaacaatgaggccctggagctcctcaaaacggccatacaggccgcaggttatcccgacaaggtggtgattggaatggacgttgccgcatccgaattctatcggaatggtaagtacgatcttgactttaagtcgccggatgaccctgccaggcacataaccggagaaaagttaggcgaactgtacaagtcatttatcaagaattaccctgttgtaagcattgaagatccctttgatcaagacgattgggcgacctggacttcctttctgtccggggtgaatatccaaattgtgggagacgacttgacagtaaccaatcccaaaaggatagcccaggccgtggaaaaaaaagcatgtaactgcctattactgaaggtcaaccagatcggaagcgtgactgagagtattcaagcgtgcaagctggcacaatccaatggatggggtgtgatggtcagccacaggagcggcgagaccgaagatacattcattgcagacctggttgttggcctctgtactggccaaattaagaccggggcaccatgtcggtccgagagactggccaaatataatcagttgatgcgcatcgaggaggcgctcggtgacaaagctatattcgccggaagaaagttccgcaacccaaaggccaaatag

SEQ ID NO: 230088 - DNA, 1305 bp, Artificial Sequence
  derived and/or modified sequence
atggctatgcagaagatcttcgcccgtgagatccttgactcacgaggcaatccaaccgtcgaagtcgacctgcatacagccaaaggacggtttagggctgcggtgccctctggcgctagtactggaatctacgaggcactagagttacgcgatggggataaaggcaggtacttaggcaaaggagttttgaaggccgttgagaacattaacaataccctgggtccagcactgttacagaagaaactgagcgtcgtggatcaggagaaggtggataagtttatgattgaactcgatgggactgagaataaatctaagttcggagctaatgctattcttggtgtgagtctggccgtgtgcaaggcaggagcggcagagaaaggagttcccctatatagacatatcgctgacctagccggaaatccggatctgatcttgcctgtacccgcattcaatgtgattaacggtggtagccatgcaggcaacaaactagccatgcaggagttcatgatcttacccgtcggggctagctcctttaaggaagcgatgagaataggggcagaggtttatcatcatctgaaaggcgtgatcaaggctaaatatgggaaggatgccaccaatgtgggtgatgagggcggatttgcgcctaatatccttgagaataatgaggcccttgaattactgaagactgccatccaggctgccggatatcccgataaagtcgtgatcggtatggatgtcgctgcctcagagttctatagaaatgggaaatacgatttagacttcaaatctcctgatgatccagcccgacacattacaggtgaaaaactgggcgagctttacaaaagctttataaagaattatccagttgtgtcaattgaggatccttttgatcaagatgactgggccacctggacaagctttctgtcaggcgtaaatatccagatagtgggcgatgatctgacggtcactaaccccaagaggattgcgcaagccgtcgagaagaaagcatgtaactgccttctactcaaggtcaaccagattggcagcgtaacagagtccattcaagcttgcaaattggcccagagtaacgggtggggggtgatggtgtctcatagaagcggcgagactgaggacacattcatcgccgatctggtggttggcctgtgcactggccagattaaaacaggggctccttgcaggtctgaaaggcttgccaagtacaatcagctgatgagaattgaggaagccctgggtgacaaagctatcttcgctggtagaaaatttcggaatcccaaggctaagtag

SEQ ID NO: 230089 - DNA, 852 bp, Artificial Sequence
  derived and/or modified sequence
atggccatgcaaaaaatctttgcaagagagatccttgactcacgtggtaaccccacggtcgaagtggacttacacacagctaagggacgcttccgcgctgccgtcccctccggagctagcaccggaatttacgaggctctcgagttgagggacggcgataaaggtagatatctgggcaagggggtgctaaaggctgttgaaaacattaacaacactttgggcccagctttgttacagaagaagctcagcgtggtggaccaggaaaaggttgataaattcatgatagagctggatgggaccgaaaataagtcaaagtttggtgctaatgccatcctgggggtgtcgctggcggtttgtaaagcgggtgccgctgaaaaaggagtgcccctgtatagacacatcgccgaccttgcgggtaacccagacttgatcctccccgttcccgcattcaacgtcataaatgggggatcccacgctggcaacaagctggcaatgcaggagttcatgattctgccagtcggggcatccagctttaaggaggctatgcgtattggagccgaagtttaccaccatttaaagggcgtcattaaagccaaatatgggaaggacgccaccaacgtgggcgatgaaggcggattcgctccgaacatactggagaataatgaggccttggagctattgaaaactgcaatccaggcagccggttatcccgataaagtggtgatcggcatggatgtagcagcctctgaattttatcggaatgggaaatatgatctggattttaaatcacctgacgacccagctcgacacattacaggagaaaagctaggcgaactttacaaatcattctag

SEQ ID NO: 230090 - DNA, 465 bp, Artificial Sequence
  derived and/or modified sequence
atggccatgcagaagatatttgcccgtgagattcttgatagtcgcggaaaccccacagtagaggtcgacctgcacaccgcgaagggtagattcagagccgctgtgccatctggcgcatcaactgggatctacgaagccctagaactaagagacggtgataaggggaggtacctggggaaaggcgtgttgaaggccgttgaaaacatcaataacactctaggacccgctcttctgcagaagaaactgagcgtggtggatcaggagaaggtcgataagttcatgatcgagctcgacggtaccgaaaacaagtccaagtttggtgccaatgcaatcctcggagtgagcctggccgtgtgtaaagcgggagcagccgagaaaggggtgccgctatatcgacacatcgcagacctggctggaaacccagacttgattctcccggtcccagcctttaacgtgatcaattag

SEQ ID NO: 230091 - DNA, 447 bp, Artificial Sequence
  derived and/or modified sequence
atggcaatgcagaagatcttcgcgagggaaattctagatagtagggggaatccgacggtggaggtggatctgcatactgctaaaggtcgctttagagcagcagttccatctggtgcaagcaccggcatctacgaagcactagagctcagggacggagacaaggggaggtacctgggcaaaggtgtgcttaaagctgtggagaatataaacaacacgctgggaccagctcttctccagaaaaaactgtcagtcgtggaccaggagaaggtggataaatttatgatcgagctcgacggaactgagaacaagagcaaatttggtgccaatgcaatcctcggagtgtccttggccgtctgtaaagcaggtgccgctgaaaaaggggtccccctgtaccgacatatcgctgacctggcaggcaacccagacctaattcttcctgtgccttag

SEQ ID NO: 230092 - DNA, 1305 bp, Artificial Sequence
  derived and/or modified sequence
atggccatgcagaagatcttcgccagagagatcctggacagcagaggcaaccccaccgtggaggtggacctgcacaccgccaagggcagattcagagccgccgtgcccagcggcgccagcaccggcatctacgaggccctggagctgagagacggcgacaagggcagatacctgggcaagggcgtgctgaaggccgtggagaacatcaacaacaccctgggccccgccctgctgcagaagaagctgagcgtggtggaccaggagaaggtggacaagttcatgatcgagctggacggcaccgagaacaagagcaagttcggcgccaacgccatcctgggcgtgagcctggccgtgtgcaaggccggcgccgccgagaagggcgtgcccctgtacagacacatcgccgacctggccggcaaccccgacctgatcctgcccgtgcccgccttcaacgtgatcaacggcggcagccacgccggcaacaagctggccatgcaggagttcatgatcctgcccgtgggcgccagcagcttcaaggaggccatgagaatcggcgccgaggtgtaccaccacctgaagggcgtgatcaaggccaagtacggcaaggacgccaccaacgtgggcgacgagggcggcttcgcccccaacatcctggagaacaacgaggccctggagctgctgaagaccgccatccaggccgccggctaccccgacaaggtggtgatcggcatggacgtggccgccagcgagttctacagaaacggcaagtacgacctggacttcaagagccccgacgaccccgccagacacatcaccggcgagaagctgggcgagctgtacaagagcttcatcaagaactaccccgtggtgagcatcgaggaccccttcgaccaggacgactgggccacctggaccagcttcctgagcggcgtgaacatccagatcgtgggcgacgacctgaccgtgaccaaccccaagagaatcgcccaggccgtggagaagaaggcctgcaactgcctgctgctgaaggtgaaccagatcggcagcgtgaccgagagcatccaggcctgcaagctggcccagagcaacggctggggcgtgatggtgagccacagaagcggcgagaccgaggacaccttcatcgccgacctggtggtgggcctgtgcaccggccagatcaagaccggcgccccctgcagaagcgagagactggccaagtacaaccagctgatgagaatcgaggaggccctgggcgacaaggccatcttcgccggcagaaagttcagaaaccccaaggccaagtag

SEQ ID NO: 230093 - DNA, 852 bp, Artificial Sequence
  derived and/or modified sequence
atggccatgcagaagatcttcgccagagagatcctggacagcagaggcaaccccaccgtggaggtggacctgcacaccgccaagggcagattcagagccgccgtgcccagcggcgccagcaccggcatctacgaggccctggagctgagagacggcgacaagggcagatacctgggcaagggcgtgctgaaggccgtggagaacatcaacaacaccctgggccccgccctgctgcagaagaagctgagcgtggtggaccaggagaaggtggacaagttcatgatcgagctggacggcaccgagaacaagagcaagttcggcgccaacgccatcctgggcgtgagcctggccgtgtgcaaggccggcgccgccgagaagggcgtgcccctgtacagacacatcgccgacctggccggcaaccccgacctgatcctgcccgtgcccgccttcaacgtgatcaacggcggcagccacgccggcaacaagctggccatgcaggagttcatgatcctgcccgtgggcgccagcagcttcaaggaggccatgagaatcggcgccgaggtgtaccaccacctgaagggcgtgatcaaggccaagtacggcaaggacgccaccaacgtgggcgacgagggcggcttcgcccccaacatcctggagaacaacgaggccctggagctgctgaagaccgccatccaggccgccggctaccccgacaaggtggtgatcggcatggacgtggccgccagcgagttctacagaaacggcaagtacgacctggacttcaagagccccgacgaccccgccagacacatcaccggcgagaagctgggcgagctgtacaagagcttctag

SEQ ID NO: 230094 - DNA, 465 bp, Artificial Sequence
  derived and/or modified sequence
atggccatgcagaagatcttcgccagagagatcctggacagcagaggcaaccccaccgtggaggtggacctgcacaccgccaagggcagattcagagccgccgtgcccagcggcgccagcaccggcatctacgaggccctggagctgagagacggcgacaagggcagatacctgggcaagggcgtgctgaaggccgtggagaacatcaacaacaccctgggccccgccctgctgcagaagaagctgagcgtggtggaccaggagaaggtggacaagttcatgatcgagctggacggcaccgagaacaagagcaagttcggcgccaacgccatcctgggcgtgagcctggccgtgtgcaaggccggcgccgccgagaagggcgtgcccctgtacagacacatcgccgacctggccggcaaccccgacctgatcctgcccgtgcccgccttcaacgtgatcaactag

SEQ ID NO: 230095 - DNA, 447 bp, Artificial Sequence
  derived and/or modified sequence
atggccatgcagaagatcttcgccagagagatcctggacagcagaggcaaccccaccgtggaggtggacctgcacaccgccaagggcagattcagagccgccgtgcccagcggcgccagcaccggcatctacgaggccctggagctgagagacggcgacaagggcagatacctgggcaagggcgtgctgaaggccgtggagaacatcaacaacaccctgggccccgccctgctgcagaagaagctgagcgtggtggaccaggagaaggtggacaagttcatgatcgagctggacggcaccgagaacaagagcaagttcggcgccaacgccatcctgggcgtgagcctggccgtgtgcaaggccggcgccgccgagaagggcgtgcccctgtacagacacatcgccgacctggccggcaaccccgacctgatcctgcccgtgccctag

SEQ ID NO: 230096 - protein, 570 aa, Artificial Sequence
  derived and/or modified sequence
MPGETEEPRPPEQQDQEGGEAAKAAPEEPQQRPPEAVAAAPAGTTSSRVLRGGRDRGRAAAAAAAAAVSRRRKAEYPRRRRSSPSARPPDVPGQQPQAAKSPSPVQGKKSPRLLCIEKVTTDKDPKEEKEEEDDSALPQEVSIAASRPSRGWRSSRTSVSRHRDTENTRSSRSKTGSLQLICKSEPNTDQLDYDVGEEHQSPGGISSEEEEEEEEEMLISEEEIPFKDDPRDETYKPHLERETPKPRRKSGKVKEEKEKKEIKVEVEVEVKEEENEIREDEEPPRKRGRRRKDDKSPRLPKRRKKPPIQYVRCEMEGCGTVLAHPRYLQHHIKYQHLLKKKYVCPHPSCGRLFRLQKQLLRHAKHHTDQRDYICEYCARAFKSSHNLAVHRMIHTGEKPLQCEICGFTCRQKASLNWHMKKHDADSFYQFSCNICGKKFEKKDSVVAHKAKSHPEVLIAEALAANAGALITSTDILGTNPESLTQPSDGQGLPLLPEPLGNSTSGECLLLEAEGMSKSYCSGTERVSLMADGKIFVGSGSSGGTEGLVMNSDILGATTEVLIEDSDSAGP

SEQ ID NO: 230097 - protein, 529 aa, Artificial Sequence
  derived and/or modified sequence
MPGETEEPRPPEQQDQEGGEAAKAAPEEPQQRPPEAVAAAPAGTTSSRVLRGGRDRGRAAAAAAAAAVSRRRKAEYPRRRRSSPSARPPDVPGQQPQAAKSPSPVQGKKSPRLLCIEKVTTDKDPKEEKEEEDDSALPQEVSIAASRPSRGWRSSRTSVSRHRDTENTRSSRSKTGSLQLICKSEPNTDQLDYDVGEEHQSPGGISSEEEEEEEEEMLISEEEIPFKDDPRDETYKPHLERETPKPRRKSGKVKEEKEKKEIKVEVEVEVKEEENEIREDEEPPRKRGRRRKDDKSPRLPKRRKKPPIQYVRCEMEGCGTVLAHPRYLQHHIKYQHLLKKKYVCPHPSCGRLFRLQKQLLRHAKHHTDQRDYICEYCARAFKSSHNLAVHRMIHTGEKPLQCEICGFTCRQKASLNWHMKKHDADSFYQFSCNICGKKFEKKDSVVAHKAKSHPEVLIAEALAANAGALITSTDILGTNPESLTQPSDGQGLPLLPEPLGNSTSGECLLLEAEGMSKSYCSGTERARHR

SEQ ID NO: 230098 - DNA, 5180 bp, Artificial Sequence
  derived and/or modified sequence
ggcacgaggtgagccgcaggcttcgggaggcgagggggcggggggagcagcgccgaggccgccgcctccgcctccgccgcctaggactagggggtgggggacggacaagccccgatgccgggggagacggaagagccgagacccccggagcagcaggaccaggaagggggagaggcggccaaggcggctccggaggagccccaacaacggccccctgaggcggtcgcggcggcgcctgcagggaccactagcagccgcgtgctgaggggaggtcgggaccgaggccgggccgctgcggccgccgccgccgcagctgtgtcccgccggaggaaggccgagtatccccgccggcggaggagcagccccagcgccaggcctcccgacgtccccgggcagcagccccaggccgcgaagtccccgtctccagttcagggcaagaagagtccgcgactcctatgcatagaaaaagtaacaactgataaagatcccaaggaagaaaaagaggaagaagacgattctgccctccctcaggaagtttccattgctgcatctagacctagccggggctggcgtagtagtaggacatctgtttctcgccatcgtgatacagagaacacccgaagctctcggtccaagaccggttcattgcagctcatttgcaagtcagaaccaaatacagaccaacttgattatgatgttggagaagagcatcagtctccaggtggcattagtagtgaagaggaagaggaggaggaagaagagatgttaatcagtgaagaggagataccattcaaagatgatccaagagatgagacctacaaaccccacttagaaagggaaaccccaaagccacggagaaaatcagggaaggtaaaagaagagaaggagaagaaggaaattaaagtggaagtagaggtggaggtgaaagaagaggagaatgaaattagagaggatgaggaacctccaaggaagagaggaagaagacgaaaagatgacaaaagtccacgtttacccaaaaggagaaaaaagcctccaatccagtatgtccgttgtgagatggaaggatgtggaactgtccttgcccatcctcgctatttgcagcaccacattaaataccagcatttgctgaagaagaaatatgtatgtccccatccctcctgtggacgactcttcaggcttcagaagcaacttctgcgacatgccaaacatcatacagatcaaagggattatatctgtgaatattgtgctcgggccttcaagagttcccacaatctggcagtgcaccggatgattcacactggcgagaagccattacaatgtgagatctgtggatttacttgtcgacaaaaggcatctcttaattggcacatgaagaaacatgatgcagactccttctaccagttttcttgcaatatctgtggcaaaaaatttgagaagaaggacagcgtagtggcacacaaggcaaaaagccaccctgaggtgctgattgcagaagctctggctgccaatgcaggcgccctcatcaccagcacagatatcttgggcactaacccagagtccctgacgcagccttcagatggtcagggtcttcctcttcttcctgagcccttgggaaactcaacctctggagagtgcctactgttagaagctgaagggatgtcaaagtcatactgcagtgggacggaacgggtgagcctgatggctgatgggaagatctttgtgggaagcggcagcagtggaggcactgaagggctggttatgaactcagatatactcggtgctaccacagaggttctgattgaagattcagactctgccggaccttagtggacaggaagacttggggcatgggacagctcagactttgtatttaaaagttaaaaaggacaaaaaaaaaatctaaagcatttaaaatctagtgaaataactgaagggcctgctctttccattgtggatcacagcacacacatacatacaccctccacctccccatcccctgttctccctctgttgctccccttataaaattgatgttgtctttaccagaaaggtagacaaaaaagaagcagcagcagctcttaaagtgagggttattctcatactcggttccagccatcagcagacttcctgctcatcggcagatccccctttccaacctgtaactctgatgtgctctggatcagcttttaacttttaatcatatattactgtcttctaaatcccttctcctcctctactgctgccctatggttctggctcctaccccctgcggcacacttatcttcaaataccatagaattctaatctctggaggctggcagcttgacttggcactttagggccccttagcagggtgagctgttaaaacagcacacatctctcatcccctcttcctttattcccccctgggtttcagaaaggaaggatatatggggaccacctcccccttctttgatcccagcatctcagtccccctcccaaccctccatatggctctcaatggtgctcacttgcttggaagcaggctcccaatagggagggggctgccctctacagtctctttgactgtaagacagggctctgtatcagtgagacgatgagaaaagtcccaggctaatggcagaaatttgcactttgaacatgtgtgtttttgtgttgtggaacctgagattccttatttattaacaggaagtctgattttttttttttggagtctttgttgctatattttgtggggctgggagagagagattagattattttgacatgggatcccttccataacaggtactttgaaggcaagacatagggttgaagaagcacagccagcctctgaaatcatagctctccagtggcttttaaagaaagctggtcctcagcactaacaaaatcactacaatagcctagtgcttttttggaagcctttttagggaagaatgttaggttcatggtaactagtatgctctttgagatttttacagtgttgaaacttaagaattttgagagggtgaggagggttgttcagaatctaaattacagatagatgattgtttcttgtgaatttgtttcttttcctttttttttgtccctaccatttccttacatttcccttggggcccatctctggctccttgctttttgtttcttgctttgctttatcagttcattccagctccctgttagtgaaggacactgctgttagtgaaggaacaaagtctatgagtcctaaaattttaagtcaaagaaaactgctctgtttcccctttagtaacacttctgaagaggaaaaacttcaatgagccaaagttaataatcctatataataattgctttggctttcacctaaaattctgggcatcacaatttccttgggatagaggttgtgttggggaatagattgcttattgctgttcactggagagaaaaggtagtgtttttgtacaaggtcataccgccagaagccccaaatcctattttggctcatcttcaggtaaagagtaattcctatcctgtgtgcctcagaagctagaatcgaaggcttaccctattcattgtttattgtcagaaatgcatgatggctcttggaaagaatgacgttttgctggaaaaaaaaaaaagaacagtttgtgtttcacaaacatggcttatcaattttttcaaagaattcttttttcccaaaaagaggagtaacaaaatgtcatttctgaaagaggcttactttataccaactagtgtcagcatttgggatgccagggaacagagagtgagacacctacaatcaccagtctcaaatgcgctattgtttcttttcagagtgttgcagatttgccatttctccataatatggggatagaaaatggaataaagatagaagggatgtagaatatgctttcctgccaacatggtttggagtcgactttggtatattgactagatttgaaaatacaagattgattagatgaatctacaaaaaagttgtcctcctctcaggtcccttttacactttttgactaactagcatctatattccacacttagcttttttgtcacacttatcctttgtctccgtaaatttcatttgcagtggttagtcatcagatattttagccacctacacaaaagcaaactgcatttttaaaaatctttctgagatgggagaaaatgtattctcctttcctataccgctctcccaacaaaaaaacaactagttagttctactaattagaaacttgctgtactttttcttttcttttaggggtcaaggaccctctttatagctaccatttgcctacaataaattattgcagcagtttgcaatactaaaatattttttatagactttatatttttccttttgataaagggatgctgcatagtagagttggtgtaattaaactatctcagccgtttccctgctttcccttctgctccatatgcctcattgtccttccagggagctcttttaatcttaaagttctacatttcatgctcttagtcaaattctgttacctttttaataactcttcccactgcatatttccatcttgaattggtggttctaaattctgaaactgtagttgagatacagctatttaatatttctgggagatgtgcatccctcttctttgtggttgcccaaggttgttttgcgtaactgagactccttgatatgcttcagagaatttaggcaaacactggccatggccgtgggagtactgggagtaaaataaaaatatcgaggtatagactagcatccacatagagcacttgaacctcctttgtacctgtttggggaaaaagtataatgagtgtactaccaatctaactaagattattatagtctggttgtttgaaataccatttttttctccttttgtgtttttcccactttccaatgtactcaagaaaattgaacaaatgtaatggatcaatttaaaatattttatttcttaaaagccttttttgcctgttgtaatgtgcaggacccttctcctttcatgggagagacaggtagttacctgaatataggttgaaaaggttatgtaaaaagaaattataataaaagggatactttgcttttcaaatctttgttttctcttattctaggtaaggcatattaaaaataaatatgtaaagaagaaaaataaaagttgtcttcatggaaaaaaaaaaaaaaaaaa

SEQ ID NO: 230099 - DNA, 1713 bp, Artificial Sequence
  derived and/or modified sequence
atgcccggcgagaccgaggagcccagaccccccgagcagcaggaccaggagggcggcgaggccgccaaggccgcccccgaggagccccagcagagaccccccgaggccgtggccgccgcccccgccggcaccaccagcagcagagtgctgagaggcggcagagacagaggcagagccgccgccgccgccgccgccgccgccgtgagcagaagaagaaaggccgagtaccccagaagaagaagaagcagccccagcgccagaccccccgacgtgcccggccagcagccccaggccgccaagagccccagccccgtgcagggcaagaagagccccagactgctgtgcatcgagaaggtgaccaccgacaaggaccccaaggaggagaaggaggaggaggacgacagcgccctgccccaggaggtgagcatcgccgccagcagacccagcagaggctggagaagcagcagaaccagcgtgagcagacacagagacaccgagaacaccagaagcagcagaagcaagaccggcagcctgcagctgatctgcaagagcgagcccaacaccgaccagctggactacgacgtgggcgaggagcaccagagccccggcggcatcagcagcgaggaggaggaggaggaggaggaggagatgctgatcagcgaggaggagatccccttcaaggacgaccccagagacgagacctacaagccccacctggagagagagacccccaagcccagaagaaagagcggcaaggtgaaggaggagaaggagaagaaggagatcaaggtggaggtggaggtggaggtgaaggaggaggagaacgagatcagagaggacgaggagccccccagaaagagaggcagaagaagaaaggacgacaagagccccagactgcccaagagaagaaagaagccccccatccagtacgtgagatgcgagatggagggctgcggcaccgtgctggcccaccccagatacctgcagcaccacatcaagtaccagcacctgctgaagaagaagtacgtgtgcccccaccccagctgcggcagactgttcagactgcagaagcagctgctgagacacgccaagcaccacaccgaccagagagactacatctgcgagtactgcgccagagccttcaagagcagccacaacctggccgtgcacagaatgatccacaccggcgagaagcccctgcagtgcgagatctgcggcttcacctgcagacagaaggccagcctgaactggcacatgaagaagcacgacgccgacagcttctaccagttcagctgcaacatctgcggcaagaagttcgagaagaaggacagcgtggtggcccacaaggccaagagccaccccgaggtgctgatcgccgaggccctggccgccaacgccggcgccctgatcaccagcaccgacatcctgggcaccaaccccgagagcctgacccagcccagcgacggccagggcctgcccctgctgcccgagcccctgggcaacagcaccagcggcgagtgcctgctgctggaggccgagggcatgagcaagagctactgcagcggcaccgagagagtgagcctgatggccgacggcaagatcttcgtgggcagcggcagcagcggcggcaccgagggcctggtgatgaacagcgacatcctgggcgccaccaccgaggtgctgatcgaggacagcgacagcgccggcccctag

SEQ ID NO: 230100 - DNA, 1590 bp, Artificial Sequence
  derived and/or modified sequence
atgcccggcgagaccgaggagcccagaccccccgagcagcaggaccaggagggcggcgaggccgccaaggccgcccccgaggagccccagcagagaccccccgaggccgtggccgccgcccccgccggcaccaccagcagcagagtgctgagaggcggcagagacagaggcagagccgccgccgccgccgccgccgccgccgtgagcagaagaagaaaggccgagtaccccagaagaagaagaagcagccccagcgccagaccccccgacgtgcccggccagcagccccaggccgccaagagccccagccccgtgcagggcaagaagagccccagactgctgtgcatcgagaaggtgaccaccgacaaggaccccaaggaggagaaggaggaggaggacgacagcgccctgccccaggaggtgagcatcgccgccagcagacccagcagaggctggagaagcagcagaaccagcgtgagcagacacagagacaccgagaacaccagaagcagcagaagcaagaccggcagcctgcagctgatctgcaagagcgagcccaacaccgaccagctggactacgacgtgggcgaggagcaccagagccccggcggcatcagcagcgaggaggaggaggaggaggaggaggagatgctgatcagcgaggaggagatccccttcaaggacgaccccagagacgagacctacaagccccacctggagagagagacccccaagcccagaagaaagagcggcaaggtgaaggaggagaaggagaagaaggagatcaaggtggaggtggaggtggaggtgaaggaggaggagaacgagatcagagaggacgaggagccccccagaaagagaggcagaagaagaaaggacgacaagagccccagactgcccaagagaagaaagaagccccccatccagtacgtgagatgcgagatggagggctgcggcaccgtgctggcccaccccagatacctgcagcaccacatcaagtaccagcacctgctgaagaagaagtacgtgtgcccccaccccagctgcggcagactgttcagactgcagaagcagctgctgagacacgccaagcaccacaccgaccagagagactacatctgcgagtactgcgccagagccttcaagagcagccacaacctggccgtgcacagaatgatccacaccggcgagaagcccctgcagtgcgagatctgcggcttcacctgcagacagaaggccagcctgaactggcacatgaagaagcacgacgccgacagcttctaccagttcagctgcaacatctgcggcaagaagttcgagaagaaggacagcgtggtggcccacaaggccaagagccaccccgaggtgctgatcgccgaggccctggccgccaacgccggcgccctgatcaccagcaccgacatcctgggcaccaaccccgagagcctgacccagcccagcgacggccagggcctgcccctgctgcccgagcccctgggcaacagcaccagcggcgagtgcctgctgctggaggccgagggcatgagcaagagctactgcagcggcaccgagagagccagacacagatag

SEQ ID NO: 230101 - DNA, 1713 bp, Artificial Sequence
  derived and/or modified sequence
atgcctggggaaaccgaggagcctcgcccacctgagcaacaggatcaggaaggcggcgaagctgccaaggctgcgccggaagagccccagcagcggccgcccgaggccgtagccgccgcgcctgcggggacaacatccagtagggtgttacgcggaggccgcgaccgcggacgggctgcagcggctgcggccgccgccgccgtctcccggcgacgcaaggctgaatatccacgcagaagacggtcttcacctagcgctcgaccaccagatgtgcctgggcagcagccccaagccgctaagagtccgtctcctgtccagggaaaaaagagtcccagattgctctgtattgagaaggtcactacagataaagacccaaaagaggagaaggaggaagaagacgactcggctcttccccaagaggtgtctattgccgcatcacgaccatctagggggtggaggtcatctcggacctccgtgagtcggcatagagacactgagaatacccgctcctcgagaagtaaaactggttccctccagttgatttgcaagtccgaacccaatactgatcaactggattatgatgtgggtgaggagcatcagtcaccaggaggaatctcctctgaagaagaggaggaggaagaagaagagatgcttatcagtgaagaagaaatcccctttaaggatgacccacgagacgaaacctacaagcctcatttagagcgcgaaaccccgaagcctagacgaaaatcaggtaaggttaaggaggaaaaggagaagaaggagattaaagttgaggtcgaggtagaggtgaaggaggaggagaacgaaattagggaggacgaagagccccccagaaaacgggggcggcgcaggaaagacgacaagagccccagactgcctaagcgccgcaagaaacctcccatccagtacgtgcgttgtgaaatggaaggatgtggcaccgttctcgcccacccccggtacctgcagcatcacattaaataccaacatctcctcaagaaaaaatacgtctgtccgcaccctagctgcggccgcttatttcgcctgcagaagcagcttttacgccatgctaagcaccacactgatcaacgcgactatatctgtgaatactgtgcaagggcttttaagtctagtcacaatctcgccgttcatcggatgatccataccggtgagaaaccattgcagtgcgaaatctgtgggttcacttgtcgtcagaaggccagcttgaattggcatatgaaaaaacatgatgccgattctttctaccagttctcctgcaatatttgcggaaagaagttcgagaagaaagattcagtcgtggctcacaaagctaagagtcatcccgaggtattgatcgctgaggcactagccgctaatgctggcgcactgataacctcaacggacatccttggaaccaacccggagtctctgacacagccctctgacggacaaggcttgccattgttgcccgagcccttaggcaattcgacgtcgggtgagtgtctgctgttggaggctgaaggtatgtcaaaatcgtactgtagtgggacggagagggtgagcctgatggcggacgggaagatctttgttggcagcggttcctccggcggtaccgaaggtttggttatgaacagcgatatcctgggtgccacgaccgaggtgttaatagaggactctgactcagccggaccatag

SEQ ID NO: 230102 - DNA, 1590 bp, Artificial Sequence
  derived and/or modified sequence
atgcctggagagaccgaagagcctaggccccccgaacaacaagatcaagaaggaggggaggcagcaaaagccgccccagaggaaccccaacagaggcctccagaggctgtggccgccgctccagctggcacaacctcctccagagtgctgagaggggggagggataggggacgtgcagccgccgccgccgcagcggccgcggtctcacggcggcgcaaagctgagtatccaaggaggcgacgctcctcaccctcagcgaggcccccagacgtgccaggtcaacagccccaggcagccaaaagtccgagccccgtgcagggcaagaagagcccaagactgctttgtattgaaaaagtaactacagacaaagaccccaaggaggagaaagaggaggaagacgatagcgctttgccacaagaggtcagcattgccgcctcccgcccctctcggggctggaggtccagtcgcacgtctgtctctcgccaccgcgatacagaaaacactcggagtagccgcagcaaaacggggtctttgcagcttatctgcaaatccgaacctaatactgaccagctagactacgacgtaggggaggaacatcaatctccaggcggaatctcatcagaagaagaagaagaggaggaggaggagatgctgatatctgaggaggagatacctttcaaggacgaccccagagatgagacctacaagcctcacctggaaagggagactccaaagccgcgacgaaagtcaggaaaagtgaaagaagagaaggaaaaaaaggagataaaggtcgaggtcgaagtcgaagtcaaagaggaggagaatgagatcagagaagatgaggaaccccccaggaagagggggaggcgaaggaaggacgataaatcccctcgcctccctaaacgccgcaaaaagcccccaatccagtatgtcaggtgtgagatggaggggtgcggaacagttcttgcacacccacgatacctgcagcaccatattaaatatcagcacctgcttaaaaagaaatacgtatgtcctcatccttcctgtgggaggctgttccgtttgcagaagcagctcctgaggcatgccaaacaccataccgatcaacgggactatatctgtgaatactgcgcaagagctttcaagagttcccacaacttagcagttcaccggatgattcacactggggaaaagcccctgcaatgtgaaatctgtgggtttacatgcagacaaaaagcaagtctaaattggcacatgaaaaaacatgatgctgacagcttctaccagttcagttgcaacatttgtgggaagaaatttgaaaagaaagatagcgtggttgctcataaggccaaatcccacccagaggttctgattgccgaggccttggccgccaatgccggggccttaatcactagcacagacatcctcggaaccaaccccgaatccctgactcagccatctgatgggcaggggctgccgctgctgcccgagcccctgggcaacagtaccagcggggagtgcctcctgcttgaggccgagggtatgtctaaatcgtattgctccggcaccgagagagctagacataggtag

SEQ ID NO: 230103 - DNA, 1713 bp, Artificial Sequence
  derived and/or modified sequence
atgcctggagaaacagaggagccccggcccccagagcagcaggaccaggagggcggggaggccgccaaggccgcccctgaggagccccagcagaggcctcctgaggccgtggccgccgccccagctggcaccaccagcagccgggtgctgcggggcggccgggaccggggccgggctgctgctgctgctgctgctgctgctgtgtccagaagaaggaaggccgagtaccccaggagaagaagaagcagccccagcgcccggcccccagatgtgcccggccagcagccccaggccgccaagagccccagccctgtgcagggcaagaagagcccccggctgctgtgcatcgagaaggtgaccacagacaaggaccccaaggaggagaaggaggaggaggatgattctgccctgccccaggaggtgtccattgctgccagccggcccagccggggctggaggagcagcaggacctctgtgagccgccaccgggacacagagaacaccaggagcagccgcagcaagacaggcagcctgcagctgatctgcaagtctgagcccaacacagaccagctggactatgatgtgggggaggagcaccagagccctgggggcatcagcagcgaggaggaggaggaggaggaggaggagatgctgatcagcgaggaggagatccccttcaaggatgaccccagagatgagacctacaagccccacctggagcgggagacccccaagcccaggaggaagagcggcaaggtgaaggaggagaaggagaagaaggagatcaaggtggaggtggaggtggaggtgaaggaggaggagaatgagatcagagaagatgaggagccccccaggaagagaggaagaagaaggaaggatgacaagagcccccggctgcccaagaggaggaagaagccacccatccagtatgtgcgctgtgagatggagggctgcggcaccgtgctggcccacccccgctacctgcagcaccacatcaagtaccagcacctgctgaagaagaagtatgtgtgcccccaccccagctgtggccgcctcttccggctgcagaagcagctgctgcggcatgccaagcaccacacagaccagagggactacatctgtgagtactgtgcccgggccttcaagagcagccacaacctggccgtgcacaggatgatccacactggagagaagcccctgcagtgtgagatctgtggcttcacctgccggcagaaggccagcctgaactggcacatgaagaagcatgatgctgacagcttctaccagttcagctgcaacatctgtgggaagaagtttgagaagaaggacagcgtggtggcccacaaggccaagagccaccctgaggtgctgattgctgaggccctggccgccaatgctggggccctgatcaccagcacagacatcctgggcaccaaccctgagagcctgacccagcccagtgatggccagggcctgcccctgctgcctgagcccctgggcaacagcaccagcggggagtgcctgctgctggaggccgagggcatgagcaagagctactgcagcggcacagagcgggtgtccctgatggctgatggcaagatctttgtgggcagcggcagcagcggcggcacagagggcctggtgatgaacagcgacatcctgggcgccaccacagaggtgctgattgaagattctgattctgctggcccctag

SEQ ID NO: 230104 - DNA, 1590 bp, Artificial Sequence
  derived and/or modified sequence
atgcctggagaaacagaggagccccggcccccagagcagcaggaccaggagggcggggaggccgccaaggccgcccctgaggagccccagcagaggcctcctgaggccgtggccgccgccccagctggcaccaccagcagccgggtgctgcggggcggccgggaccggggccgggctgctgctgctgctgctgctgctgctgtgtccagaagaaggaaggccgagtaccccaggagaagaagaagcagccccagcgcccggcccccagatgtgcccggccagcagccccaggccgccaagagccccagccctgtgcagggcaagaagagcccccggctgctgtgcatcgagaaggtgaccacagacaaggaccccaaggaggagaaggaggaggaggatgattctgccctgccccaggaggtgtccattgctgccagccggcccagccggggctggaggagcagcaggacctctgtgagccgccaccgggacacagagaacaccaggagcagccgcagcaagacaggcagcctgcagctgatctgcaagtctgagcccaacacagaccagctggactatgatgtgggggaggagcaccagagccctgggggcatcagcagcgaggaggaggaggaggaggaggaggagatgctgatcagcgaggaggagatccccttcaaggatgaccccagagatgagacctacaagccccacctggagcgggagacccccaagcccaggaggaagagcggcaaggtgaaggaggagaaggagaagaaggagatcaaggtggaggtggaggtggaggtgaaggaggaggagaatgagatcagagaagatgaggagccccccaggaagagaggaagaagaaggaaggatgacaagagcccccggctgcccaagaggaggaagaagccacccatccagtatgtgcgctgtgagatggagggctgcggcaccgtgctggcccacccccgctacctgcagcaccacatcaagtaccagcacctgctgaagaagaagtatgtgtgcccccaccccagctgtggccgcctcttccggctgcagaagcagctgctgcggcatgccaagcaccacacagaccagagggactacatctgtgagtactgtgcccgggccttcaagagcagccacaacctggccgtgcacaggatgatccacactggagagaagcccctgcagtgtgagatctgtggcttcacctgccggcagaaggccagcctgaactggcacatgaagaagcatgatgctgacagcttctaccagttcagctgcaacatctgtgggaagaagtttgagaagaaggacagcgtggtggcccacaaggccaagagccaccctgaggtgctgattgctgaggccctggccgccaatgctggggccctgatcaccagcacagacatcctgggcaccaaccctgagagcctgacccagcccagtgatggccagggcctgcccctgctgcctgagcccctgggcaacagcaccagcggggagtgcctgctgctggaggccgagggcatgagcaagagctactgcagcggcacagagcgggcccggcacaggtag

SEQ ID NO: 230105 - DNA, 1713 bp, Artificial Sequence
  derived and/or modified sequence
atgcccggcgagaccgaggagccccggccccccgagcagcaggaccaggaggggggtgaagccgcaaaagccgctccagaggaaccacagcagagaccgcctgaagcagtcgcagccgctccggcaggcacgacgagtagccgcgtgctccgcggagggagagatcgaggacgcgcagccgcagctgcagccgctgctgctgtgtctaggaggaggaaagctgagtacccccgaaggagacggtcaagcccaagcgcaagacctcctgatgtgcctggtcagcagccgcaggccgccaaaagtccctcacctgtccaaggcaagaaatcacctcgactcctgtgtattgaaaaggtcacaacggacaaggaccctaaggaggagaaggaggaagaggatgattcagcgcttccccaggaggtcagtatcgccgcttcacgcccatccagaggctggcgctcatcccggaccagtgtaagtcgccatagagacacggagaatactaggtcctcccggtcaaagactggctccctgcagttgatttgcaaaagcgaacccaataccgaccagcttgattacgatgtcggcgaggagcatcagagccccggcgggatttcttccgaagaggaggaagaggaagaggaggaaatgctgatcagcgaggaggagatccccttcaaagatgacccaagggatgaaacatataagccccatctcgaacgagagactcctaaaccccgccgcaagtcgggcaaggtgaaagaggagaaggaaaaaaaggagatcaaggtggaggtggaagtagaggtgaaagaggaagaaaacgaaatccgtgaggatgaagagcctccaaggaagcgggggcgacggcgcaaggacgacaagtcaccacggctacctaagagacgaaagaagccacctattcagtatgtgcgatgtgagatggagggctgtggtaccgtcctggctcatccaaggtacctgcagcaccacattaagtatcagcatcttcttaaaaaaaagtatgtgtgtcctcaccctagttgtggccggttatttaggctgcaaaagcaactgttgagacacgcaaaacaccacacggatcagagggattacatttgtgagtattgcgccagagccttcaagtcctcccataacttagccgtccaccggatgatacacaccggagaaaagccgctccagtgcgaaatttgcgggtttacatgccgtcagaaggcatctttaaactggcatatgaaaaaacacgacgcagacagcttctatcagttttcatgtaatatttgcggcaaaaagttcgaaaagaaagatagtgtcgtcgctcacaaagctaagagtcatccggaggtgctcatcgctgaggccctcgccgccaacgccggagcgctcataacatcaaccgatatccttgggacaaacccagaatccctgacacagccaagcgatggccagggactcccattacttcctgaacccctggggaattccacgtccggtgaatgccttctgctggaggcggagggcatgagcaagagctattgtagcgggacggagagggtgtcactgatggccgacgggaagatatttgtggggagcggatcttccggtggaacagaaggcctcgtgatgaatagcgatatcttgggtgccacgaccgaggtcctgattgaggacagtgattctgctgggccttag

SEQ ID NO: 230106 - DNA, 1590 bp, Artificial Sequence
  derived and/or modified sequence
atgcccggcgagaccgaggagccccggccccccgagcagcaggaccaagaagggggtgaagccgcaaaagcagccccggaggaaccgcagcagcggcctcctgaagccgttgctgctgcccccgccggaacgacctccagccgtgtacttcgtgggggacgggaccgcggtcgagcggcagctgcagccgctgctgcggccgtgtcgaggcgacggaaagccgaataccctaggcgtcggagatcatctcccagtgctcggccaccggacgtgcccgggcagcagccccaggcagccaagagcccatcacctgtacagggtaagaagtcccctagactgctgtgtatagaaaaggtgacgaccgacaaagatcctaaagaggagaaggaggaggaagacgacagtgcactcccacaggaagttagcatcgcagcatcaagaccctctcgtggttggcggtccagccgaacgagcgtgtcccgacaccgcgacaccgaaaacaccagatcatctcggtccaaaaccggctcgctgcaactaatctgcaagagtgagcccaatacggaccagctggactacgacgtgggcgaagaacaccagagccctggaggcatatcttcggaggaggaggaggaggaagaggaagagatgctcatttcagaagaagaaataccattcaaagatgacccgagagacgagacctataagcctcatcttgaaagggagactcctaaaccccggagaaaaagtggaaaggttaaggaagagaaagaaaaaaaggagatcaaggtggaggtcgaagtcgaagtgaaagaagaggagaacgagatccgggaggatgaggagcctccaaggaaaagaggccgacgccggaaggatgataagagtcccaggctgccgaagcgccgcaaaaagccccctattcagtatgtaaggtgcgagatggaggggtgcggcacggtgcttgcacacccacggtacctgcagcaccatatcaagtatcagcacctcctcaagaagaaatatgtgtgtccccatccctcttgcgggaggctatttagactccagaaacaattacttcgccacgcgaaacaccacaccgaccaacgtgattatatctgcgagtattgtgccagggccttcaaatctagccataacctggcagtgcacaggatgatccacaccggggagaagcccctgcagtgtgaaatctgcggcttcacgtgccgtcaaaaagcctctctcaactggcatatgaagaaacacgacgccgatagcttctatcagtttagctgtaatatttgtggaaagaaattcgaaaaaaaagatagcgtggtggcccataaggctaaaagccaccccgaggtccttattgcggaagcccttgctgcaaatgccggagcattaattacttctacagacatcctcggcaccaatcctgaaagcctgacgcagccttccgacggacaggggctccctttattacctgagcccttggggaactcaacctcaggagagtgtctgctcttggaagccgagggcatgagcaaatcctactgcagtgggacagagagagcaagacacagatag

SEQ ID NO: 230107 - DNA, 1713 bp, Artificial Sequence
  derived and/or modified sequence
atgcccggtgaaacagaagagcctcgacctccagaacagcaggaccaagagggaggagaagccgcaaaggcagccccagaggaacctcagcagaggccgcctgaggcagtagctgccgctccagccggtacaacctcatctcgggttttgcgcggaggaagagatcggggacgcgctgccgctgcagccgcagccgctgccgtcagccggcgacggaaggccgaatacccccgtaggcggagaagctccccaagcgctagaccaccagatgtacccggtcagcagccacaagctgcgaagagcccaagtcctgttcaggggaaaaagagcccacgactcttatgtattgagaaggttacgaccgataaagacccaaaggaggaaaaagaagaagaagacgacagcgctttgccacaggaggtctccattgctgctagccgaccttcacgtgggtggcggtcttcaaggacatctgtgtcaaggcatcgggataccgagaacacgcgctcatcacggtccaaaaccggaagcctccagctcatctgtaaaagcgaacctaatacagatcagctggactacgacgtgggagaggaacatcaaagtcccggtggaattagctccgaggaagaggaagaggaagaggaagaaatgctgatctctgaagaagaaattccctttaaagacgatcctcgtgacgaaacttacaagccccatctggaacgcgagaccccaaaacctaggcgcaagtctgggaaggtgaaggaagagaaagaaaagaaggaaatcaaagtggaggtggaagtagaggttaaagaggaggagaatgagatccgtgaagacgaagaaccccctcgtaagagagggagacggaggaaggacgacaagtctcccagactgcctaaacgacgcaagaagccgcctatccagtacgtccgttgtgaaatggagggctgcggcaccgtgctagcccatccacgttatcttcagcatcatatcaaataccagcatttgttgaaaaagaagtacgtgtgtccccacccctcatgcggtcgtctgtttaggctgcaaaagcagttactgcgacatgctaaacaccatacagatcagagagattacatatgtgaatattgcgcacgcgctttcaaatcatcccataacctggcagtacataggatgatccacaccggtgagaagcccctgcaatgcgagatatgtgggtttacgtgtcggcaaaaagcctccctgaactggcatatgaagaagcacgacgccgattccttttatcagttcagttgcaacatttgtggtaagaagttcgaaaaaaaagatagtgtagtcgctcacaaggctaaatcccatcctgaagtcctgatcgcagaggcattagcagccaatgccggagccctaataacatctactgatatcctgggcaccaaccctgagtcattgactcagccgtccgacggacaagggctccccctgttaccagagccccttgggaattcgacctctggcgaatgtctcctcctcgaagccgagggcatgtcgaagtcgtattgttccggaaccgaacgggtgtccctgatggctgatggcaaaatctttgtggggtccgggagcagcggaggcactgaagggcttgtaatgaattctgatatactgggagcaactaccgaagtgctcattgaggactccgattccgccggtccttag

SEQ ID NO: 230108 - DNA, 1590 bp, Artificial Sequence
  derived and/or modified sequence
atgcctggcgagacggaagagcccaggcccccagaacagcaggatcaagagggaggggaagctgcaaaggcagctcctgaagagcctcaacagagaccccctgaagctgtggctgccgcaccagcaggcacaacaagtagtcgagttttgcgcggtggacgtgatcggggacgtgcagcggctgctgctgctgccgcagcagtgtctcgccgacgaaaggcagagtacccacgacgccgaagaagctccccctctgccagaccccctgacgtgccaggccagcagccgcaggcagcaaaaagtccctcccctgtgcagggtaaaaagagtccccgactgctgtgtatcgagaaggttactactgacaaggatcccaaagaggagaaagaggaagaggacgatagcgccctgccccaggaagtgagtatcgccgcttcaagaccgtcgagaggctggaggagcagtagaacttctgtctctaggcatcgagataccgagaacacccgctcgagccgttcaaagacgggaagcctacagctgatctgcaaaagcgaacccaatacagatcagcttgactacgacgtgggagaggagcatcagagccctgggggaattagctctgaagaggaagaggaggaggaggaggagatgctgatctccgaggaagagattcctttcaaggacgatcccagggatgaaacctacaaaccgcacctggagcgcgagacgcctaagcctcgcaggaaatccggcaaagtgaaagaagagaaggagaagaaagagatcaaggtagaggtagaggtcgaggttaaggaagaggaaaatgaaatcagagaagatgaggagcctccacgcaagcgtggcaggagaaggaaggatgataaatcccccagactgccaaaacggagaaagaaacccccaattcagtacgtgagatgcgaaatggagggctgcggaaccgtgttagctcacccccgatatctacagcatcacataaaataccagcacctgttgaaaaaaaagtatgtgtgccctcatcctagctgcggaagattgttcaggctacagaagcagttactgcgccacgccaagcaccataccgaccaaagagactatatttgtgagtactgtgctcgggctttcaaaagcagccacaacttggcggtgcaccgaatgatccacactggcgaaaagcctcttcagtgcgaaatctgcggcttcacatgtagacagaaagcctcactgaactggcatatgaaaaaacacgatgctgacagcttctaccagttctcatgcaacatctgcggaaaaaagttcgagaagaaagactctgtggtcgcccacaaagctaaaagtcatccagaagttttgatcgcggaagccctcgccgcaaatgccggtgcactgattactagcaccgatattctggggactaatccagagtcacttactcaacccagtgatggccagggcttgcctcttctccctgaaccgctcggcaactccacgagtggggagtgcctccttcttgaggcagaagggatgtctaagagctactgtagcggaactgaacgagcaagacacagatag

SEQ ID NO: 230109 - DNA, 5220 bp, Artificial Sequence
  derived and/or modified sequence
ggggtggggggggcgccctcggagccgggcggaggggaggggggaaagaggagcgcagggtgagagtgagccgcaggcttcgggaggcgagggggcggggggagcagcgccgaggccgccgcctccgcctccgccgcctaggactagggggtgggggacggacaagccccgatgccgggggagacggaagagccgagacccccggagcagcaggaccaggaagggggagaggcggccaaggcggctccggaggagccccaacaacggccccctgaggcggtcgcggcggcgcctgcagggaccactagcagccgcgtgctgaggggaggtcgggaccgaggccgggccgctgcggccgccgccgccgcagctgtgtcccgccggaggaaggccgagtatccccgccggcggaggagcagccccagcgccaggcctcccgacgtccccgggcagcagccccaggccgcgaagtccccgtctccagttcagggcaagaagagtccgcgactcctatgcatagaaaaagtaacaactgataaagatcccaaggaagaaaaagaggaagaagacgattctgccctccctcaggaagtttccattgctgcatctagacctagccggggctggcgtagtagtaggacatctgtttctcgccatcgtgatacagagaacacccgaagctctcggtccaagaccggttcattgcagctcatttgcaagtcagaaccaaatacagaccaacttgattatgatgttggagaagagcatcagtctccaggtggcattagtagtgaagaggaagaggaggaggaagaagagatgttaatcagtgaagaggagataccattcaaagatgatccaagagatgagacctacaaaccccacttagaaagggaaaccccaaagccacggagaaaatcagggaaggtaaaagaagagaaggagaagaaggaaattaaagtggaagtagaggtggaggtgaaagaagaggagaatgaaattagagaggatgaggaacctccaaggaagagaggaagaagacgaaaagatgacaaaagtccacgtttacccaaaaggagaaaaaagcctccaatccagtatgtccgttgtgagatggaaggatgtggaactgtccttgcccatcctcgctatttgcagcaccacattaaataccagcatttgctgaagaagaaatatgtatgtccccatccctcctgtggacgactcttcaggcttcagaagcaacttctgcgacatgccaaacatcatacagatcaaagggattatatctgtgaatattgtgctcgggccttcaagagttcccacaatctggcagtgcaccggatgattcacactggcgagaagccattacaatgtgagatctgtggatttacttgtcgacaaaaggcatctcttaattggcacatgaagaaacatgatgcagactccttctaccagttttcttgcaatatctgtggcaaaaaatttgagaagaaggacagcgtagtggcacacaaggcaaaaagccaccctgaggtgctgattgcagaagctctggctgccaatgcaggcgccctcatcaccagcacagatatcttgggcactaacccagagtccctgacgcagccttcagatggtcagggtcttcctcttcttcctgagcccttgggaaactcaacctctggagagtgcctactgttagaagctgaagggatgtcaaagtcatactgcagtgggacggaacgggtgagcctgatggctgatgggaagatctttgtgggaagcggcagcagtggaggcactgaagggctggttatgaactcagatatactcggtgctaccacagaggttctgattgaagattcagactctgccggaccttagtggacaggaagacttggggcatgggacagctcagactttgtatttaaaagttaaaaaggacaaaaaaaaaatctaaagcatttaaaatctagtgaaataactgaagggcctgctctttccattgtggatcacagcacacacatacatacaccctccacctccccatcccctgttctccctctgttgctccccttataaaattgatgttgtctttaccagaaaggtagacaaaaaagaagcagcagcagctcttaaagtgagggttattctcatactcggttccagccatcagcagacttcctgctcatcggcagatccccctttccaacctgtaactctgatgtgctctggatcagcttttaacttttaatcatatattactgtcttctaaatcccttctcctcctctactgctgccctatggttctggctcctaccccctgcggcacacttatcttcaaataccatagaattctaatctctggaggctggcagcttgacttggcactttagggccccttagcagggtgagctgttaaaacagcacacatctctcatcccctcttcctttattcccccctgggtttcagaaaggaaggatatatggggaccacctcccccttctttgatcccagcatctcagtccccctcccaaccctccatatggctctcaatggtgctcacttgcttggaagcaggctcccaatagggagggggctgccctctacagtctctttgactgtaagacagggctctgtatcagtgagacgatgagaaaagtcccaggctaatggcagaaatttgcactttgaacatgtgtgtttttgtgttgtggaacctgagattccttatttattaacaggaagtctgattttttttttttggagtctttgttgctatattttgtggggctgggagagagagattagattattttgacatgggatcccttccataacaggtactttgaaggcaagacatagggttgaagaagcacagccagcctctgaaatcatagctctccagtggcttttaaagaaagctggtcctcagcactaacaaaatcactacaatagcctagtgcttttttggaagcctttttagggaagaatgttaggttcatggtaactagtatgctctttgagatttttacagtgttgaaacttaagaattttgagagggtgaggagggttgttcagaatctaaattacagatagatgattgtttcttgtgaatttgtttcttttcctttttttttgtccctaccatttccttacatttcccttggggcccatctctggctccttgctttttgtttcttgctttgctttatcagttcattccagctccctgttagtgaaggacactgctgttagtgaaggaacaaagtctatgagtcctaaaattttaagtcaaagaaaactgctctgtttcccctttagtaacacttctgaagaggaaaaacttcaatagccaaagttaataatcctatataataattgctttggctttcacctaaaattctgggcatcacaatttccttgggatagaggttgtgttggggaatagattgcttattgctgttcactggagagaaaaggtagtgtttttgtacaaggtcataccgccagaagccccaaatcctattttggctcatcttcaggtaaagagtaattcctatcctgtgtgcctcagaagctagaatcgaaggcttaccctattcattgtttattgtcagaaatgcatgatggctcttggaaagaatgacgttttgctggaaaaaaaaaaaagaacagtttgtgtttcacaaacatggcttatcaattttttcaaagaattcttttttcccaaaaagaggagtaacaaaatgtcatttctgaaagaggcttactttataccaactagtgtcagcatttgggatgccagggaacagagagtgagacacctacaatcaccagtctcaaatgcgctattgtttcttttcagagtgttgcagatttgccatttctccataatatggggatagaaaatggaataaagatagaagggatgtagaatatgctttcctgccaacatggtttggagtcgactttggtatattgactagatttgaaaatacaagattgattagatgaatctacaaaaaagttgtcctcctctcaggtcccttttacactttttgactaactagcatctatattccacacttagcttttttgtcacacttatcctttgtctccgtaaatttcatttgcagtggttagtcatcagatattttagccacctacacaaaagcaaactgcatttttaaaaatctttctgagatgggagaaaatgtattctcctttcctataccgctctcccaacaaaaaaacaactagttagttctactaattagaaacttgctgtactttttcttttcttttaggggtcaaggaccctctttatagctaccatttgcctacaataaattattgcagcagtttgcaatactaaaatattttttatagactttatatttttccttttgataaagggatgctgcatagtagagttggtgtaattaaactatctcagccgtttccctgctttcccttctgctccatatgcctcattgtccttccagggagctcttttaatcttaaagttctacatttcatgctcttagtcaaattctgttacctttttaataactcttcccactgcatatttccatcttgaattggtggttctaaattctgaaactgtagttgagatacagctatttaatatttctgggagatgtgcatccctcttctttgtggttgcccaaggttgttttgcgtaactgagactccttgatatgcttcagagaatttaggcaaacactggccatggccgtgggagtactgggagtaaaataaaaatatcgaggtatagactagcatccacatagagcacttgaacctcctttgtacctgtttggggaaaaagtataatgagtgtactaccaatctaactaagattattatagtctggttgtttgaaataccatttttttctccttttgtgtttttcccactttccaatgtactcaagaaaattgaacaaatgtaatggatcaatttaaaatattttatttcttaaaagccttttttgcctgttgtaatgtgcaggacccttctcctttcatgggagagacaggtagttacctgaatataggttgaaaaggttatgtaaaaagaaattataataaaagggatactttgcttttcaaatctttgttttctcttattctaggtaaggcatattaaaaataaatatgtaaagaagaaaaataaaagttgtcttcatggaa

SEQ ID NO: 230110 - DNA, 1755 bp, Artificial Sequence
  derived and/or modified sequence
gtggggggggcgccctcggagccgggcggaggggaggggggaaagaggagcgcagggtgagagtgagccgcaggcttcgggaggcgagggggcggggggagcagcgccgaggccgccgcctccgcctccgccgcctaggactagggggtgggggacggacaagccccgatgccgggggagacggaagagccgagacccccggagcagcaggaccaggaagggggagaggcggccaaggcggctccggaggagccccaacaacggccccctgaggcggtcgcggcggcgcctgcagggaccactagcagccgcgtgctgaggggaggtcgggaccgaggccgggccgctgcggccgccgccgccgcagctgtgtcccgccggaggaaggccgagtatccccgccggcggaggagcagccccagcgccaggcctcccgacgtccccgggcagcagccccaggccgcgaagtccccgtctccagttcagggcaagaagagtccgcgactcctatgcatagaaaaagtaacaactgataaagatcccaaggaagaaaaagaggaagaagacgattctgccctccctcaggaagtttccattgctgcatctagacctagccggggctggcgtagtagtaggacatctgtttctcgccatcgtgatacagagaacacccgaagctctcggtccaagaccggttcattgcagctcatttgcaagtcagaaccaaatacagaccaacttgattatgatgttggagaagagcatcagtctccaggtggcattagtagtgaagaggaagaggaggaggaagaagagatgttaatcagtgaagaggagataccattcaaagatgatccaagagatgagacctacaaaccccacttagaaagggaaaccccaaagccacggagaaaatcagggaaggtaaaagaagagaaggagaagaaggaaattaaagtggaagtagaggtggaggtgaaagaagaggagaatgaaattagagaggatgaggaacctccaaggaagagaggaagaagacgaaaagatgacaaaagtccacgtttacccaaaaggagaaaaaagcctccaatccagtatgtccgttgtgagatggaaggatgtggaactgtccttgcccatcctcgctatttgcagcaccacattaaataccagcatttgctgaagaagaaatatgtatgtccccatccctcctgtggacgactcttcaggcttcagaagcaacttctgcgacatgccaaacatcatacagatcaaagggattatatctgtgaatattgtgctcgggccttcaagagttcccacaatctggcagtgcaccggatgattcacactggcgagaagccattacaatgtgagatctgtggatttacttgtcgacaaaaggcatctcttaattggcacatgaagaaacatgatgcagactccttctaccagttttcttgcaatatctgtggcaaaaaatttgagaagaaggacagcgtagtggcacacaaggcaaaaagccaccctgaggtgctgattgcagaagctctggctgccaatgcaggcgccctcatcaccagcacagatatcttgggcactaacccagagtccctgacgcagccttcagatggtcagggtcttcctcttcttcctgagcccttgggaaactcaacctctggagagtgcctactgttagaagctgaagggatgtcaaagtcatactgcagtgggacggaacgggcaagacatagg

SEQ ID NO: 230111 - protein, 140 aa, Artificial Sequence
  derived and/or modified sequence
MAGWQSYVDNLMCDGCCQEAAIVGYCDAKYVWAATAGGVFQSITPIEIDMIVGKDREGFFTNGLTLGAKKCSVIRDSLYVDGDCTMDIRTKSQGGEPTYNVAVGRAGRVLVFVMGKEGVHGGGLNKKAYSMAKYLRDSGF

SEQ ID NO: 230112 - DNA, 423 bp, Artificial Sequence
  derived and/or modified sequence
atggctggttggcagtcttacgtggacaacctcatgtgcgacggctgctgccaagaagcagcgatcgtgggatactgcgatgccaagtatgtgtgggctgcaactgcaggaggggttttccagagtataacacccatcgagatcgatatgatcgttggcaaagacagagagggcttttttactaacgggctgactctaggcgcaaaaaagtgtagcgttataagagatagcttatacgtggacggcgactgtacaatggacatcagaaccaagagccaggggggcgaacccacctataacgtggctgttgggagggctggaagagttctagtttttgtgatgggcaaagaaggagttcatggtggaggactcaacaagaaggcctacagtatggcaaagtatttacgggatagtggtttctag

SEQ ID NO: 230113 - DNA, 423 bp, Artificial Sequence
  derived and/or modified sequence
atggccggctggcagagctatgtggacaacctgatgtgtgatggctgctgccaggaggccgccatcgtgggctactgtgatgccaagtatgtgtgggccgccacagctgggggcgtcttccagagcatcacccccatcgagattgacatgattgtgggcaaggaccgggagggcttcttcaccaacggcctgaccctgggcgccaagaagtgcagcgtcatccgggacagcctgtatgtggatggagactgcaccatggacatccgcaccaagagccagggcggggagcccacctacaacgtggccgtgggccgggccggccgggtgctggtgtttgtgatgggcaaggagggcgtgcacggcggcggcctgaacaagaaggcctacagcatggccaagtacctgcgggacagcggcttctag

SEQ ID NO: 230114 - DNA, 423 bp, Artificial Sequence
  derived and/or modified sequence
atggccggctggcagagctacgtggacaacctgatgtgcgacggctgctgtcaggaagcagccatagtgggatactgcgatgcaaaatacgtttgggccgccacagccggtggggttttccagtctattactccgatcgaaatcgatatgattgtcggcaaggatagggaggggttttttaccaacgggctgactctaggtgctaagaagtgttcagttatccgggattccctctacgtggatggcgactgcactatggacatcagaaccaaaagccagggcggagagcccacatataatgtggctgtaggacgcgccggcagagtcctagtgtttgttatgggcaaggagggcgtccacgggggcggtttgaacaagaaggcctactccatggcgaaatatctcagagacagtggattctag

SEQ ID NO: 230115 - DNA, 423 bp, Artificial Sequence
  derived and/or modified sequence
atggccggatggcagagctacgtggacaatctcatgtgtgacggctgttgtcaagaggcggcaatagtcggatactgcgacgccaaatacgtctgggctgcgaccgccggaggcgtgttccaaagcattactcctatcgagatcgatatgatcgtggggaaagatcgggaggggttctttaccaacgggctcacactgggagctaagaagtgcagtgtgataagggacagcttgtacgtcgacggcgattgcacgatggacatccggaccaagtctcagggaggcgagcctacctataatgtggctgttggaagagcagggcgagtcctagtcttcgtcatggggaaggaaggggtgcacgggggtggtctcaacaagaaagcctattctatggctaaatacctacgcgactcgggcttttag

SEQ ID NO: 230116 - DNA, 2261 bp, Artificial Sequence
  derived and/or modified sequence
gccgctggtttgtcagccccgcggctgcgggcggccgggcggccgagcgcgctctgaggttcgtccctcatcgctgaacccgcgtcctcccgccgcagctcctcggggaggggggcggtcggtgcctgcgcagagccgcctcctccccgcccccgccccgcctccccccgcgccgccgccgcccgctaccgccgccgccgccgctgcgcctgctgctcctcgccgtccgcgctgcagtgcgaagggctcgaagatggccggttggcagagctacgtggataacctgatgtgcgatggctgctgccaggaggccgccattgtcggctactgcgacgccaaatacgtctgggcagccacggccgggggcgtctttcagagcattacgccaatagaaatagatatgattgtaggaaaagaccgggaaggtttctttaccaacggtttgactcttggcgcgaagaaatgctcagtgatcagagatagtctatacgtcgatggtgactgcacaatggacatccggacaaagagtcaaggtggggagccaacatacaatgtggctgtcggcagagctggtagagtcttggtctttgtaatgggaaaagaaggggtccatggaggcggattgaataagaaggcatactcaatggcaaaatacttgagagactctgggttctagctgctaggcagactgttaagtattaggggaaaattgctcttaaactttcctagctataagcttaagtcttaattctggaaattttattagcaatgcagggtgatggggtatgaacctgtgtctcctttgtatccctctgttggtggggaaaggtgtctttctttctgccctccccccccaaaataattctgttcacttttgttttgtttccttgtgtactccagcattggttatagtcatgggaaaggaaggtgtccacggaggcacacttaacaagaaagcatatgaactcgctttatacctgaggaggtctgatgtgtaagcagcctctccccatctacctagcaactgtcttcatcaacaaccctaattatggtcacaatgctaccaaactgtagatggtagctaatttttctttacctattttctaatgtcatgattcctgtttgcccaatggatcatttgtatgttaaccactgtatgtaaccaacccttatctggcaacataattgcagcacaataatgatttgcatgataccttgaaattggggggagggggcatgccaagttgggcatcactttgtcttagcaattaatgggatattgattactaaaataagttaatattaagcaaggtgccggttgtacaatctctgatcagtgtcttttcagcactttgagcatttacttggctcatttagtcttccttttgtagcgcatggttgggaggaaaaagtgcatgcatcattccttcactcttctctttttcccgccccccctcccttcgcacataggcatttggtttgcttccatctttttttatgcagtgcctgtttttttttaaccaattaaaatcccttttgttgatgagctattgagagctgcagtagtttgcttttagtattgttgttgcacttgagcagagacaaacctttattcatagtgtctacaggacatatgaagagtgcaatggcaaaacaagagcaaaaagcacttcctcccatgaccttacagtaaccatactgattgaatccccagggacattccatcattgcaatagctcagatttttcttcctttttctttgcacaccagctctactctttagtaaaattgtaaaaggctgccattatggacattaggtatcccaacataaccatctggagtgtgtccagtttgttcttcataggaccaatttttatttgcagcttgagtttttatatgaagttgcattattgtggacttggctgtcttgtgatgaatttttttcatatgtattctgtgccatactattgttaaaatgaactgttgctattgtgagatggattttaactgacctattaagggtttctttcgaatggcactactttagggacattctagtatttgcttctattgtttgggccttgtggataatgtacagatttaaaaacaaatcttgttgctgatttgtccatttctttccctgcactttgttacatctgggatacagtctaactcatctgatttaatatgcatttaaaaaaatgccataactattaaacaccttgtttacagacagatgaaataaatttattccaaccaaa

SEQ ID NO: 230117 - DNA, 423 bp, Artificial Sequence
  derived and/or modified sequence
atggccggctggcagagctacgtggacaacctgatgtgcgacggctgctgccaggaggccgccatcgtgggctactgcgacgccaagtacgtgtgggccgccaccgccggcggcgtgttccagagcatcacccccatcgagatcgacatgatcgtgggcaaggacagagagggcttcttcaccaacggcctgaccctgggcgccaagaagtgcagcgtgatcagagacagcctgtacgtggacggcgactgcaccatggacatcagaaccaagagccagggcggcgagcccacctacaacgtggccgtgggcagagccggcagagtgctggtgttcgtgatgggcaaggagggcgtgcacggcggcggcctgaacaagaaggcctacagcatggccaagtacctgagagacagcggcttctag

SEQ ID NO: 230118 - protein, 1914 aa, Artificial Sequence
  derived and/or modified sequence
MGDVKLVASSHISKTSLSVDPSRVDSMPLTEAPAFILPPRNLCIKEGATAKFEGRVRGYPEPQVTWHRNGQPITSGGRFLLDCGIRGTFSLVIHAVHEEDRGKYTCEATNGSGARQVTVELTVEGSFAKQLGQPVVSKTLGDRFSAPAVETRPSIWGECPPKFATKLGRVVVKEGQMGRFSCKITGRPQPQVTWLKGNVPLQPSARVSVSEKNGMQVLEIHGVNQDDVGVYTCLVVNGSGKASMSAELSIQGLDSANRSFVRETKATNSDVRKEVTNVISKESKLDSLEAAAKSKNCSSPQRGGSPPWAANSQPQPPRESKLESCKDSPRTAPQTPVLQKTSSSITLQAARVQPEPRAPGLGVLSPSGEERKRPAPPRPATFPTRQPGLGSQDVVSKAANRRIPMEGQRDSAFPKFESKPQSQEVKENQTVKFRCEVSGIPKPEVAWFLEGTPVRRQEGSIEVYEDAGSHYLCLLKARTRDSGTYSCTASNAQGQLSCSWTLQVERLAVMEVAPSFSSVLKDCAVIEGQDFVLQCSVRGTPVPRITWLLNGQPIQYARSTCEAGVAELHIQDALPEDHGTYTCLAENALGQVSCSAWVTVHEKKSSRKSEYLLPVAPSKPTAPIFLQGLSDLKVMDGSQVTMTVQVSGNPPPEVIWLHNGNEIQESEDFHFEQRGTQHSLCIQEVFPEDTGTYTCEAWNSAGEVRTQAVLTVQEPHDGTQPWFISKPRSVTASLGQSVLISCAIAGDPFPTVHWLRDGKALCKDTGHFEVLQNEDVFTLVLKKVQPWHAGQYEILLKNRVGECSCQVSLMLQNSSARALPRGREPASCEDLCGGGVGADGGGSDRYGSLRPGWPARGQGWLEEEDGEDVRGVLKRRVETRQHTEEAIRQQEVEQLDFRDLLGKKVSTKTLSEDDLKEIPAEQMDFRANLQRQVKPKTVSEEERKVHSPQQVDFRSVLAKKGTSKTPVPEKVPPPKPATPDFRSVLGGKKKLPAENGSSSAETLNAKAVESSKPLSNAQPSGPLKPVGNAKPAETLKPMGNAKPAETLKPMGNAKPDENLKSASKEELKKDVKNDVNCKRGHAGTTDNEKRSESQGTAPAFKQKLQDVHVAEGKKLLLQCQVSSDPPATIIWTLNGKTLKTTKFIILSQEGSLCSVSIEKALPEDRGLYKCVAKNDAGQAECSCQVTVDDAPASENTKAPEMKSRRPKSSLPPVLGTESDATVKKKPAPKTPPKAAMPPQIIQFPEDQKVRAGESVELFGKVTGTQPITCTWMKFRKQIQESEHMKVENSENGSKLTILAARQEHCGCYTLLVENKLGSRQAQVNLTVVDKPDPPAGTPCASDIRSSSLTLSWYGSSYDGGSAVQSYSIEIWDSANKTWKELATCRSTSFNVQDLLPDHEYKFRVRAINVYGTSEPSQESELTTVGEKPEEPKDEVEVSDDDEKEPEVDYRTVTINTEQKVSDFYDIEERLGSGKFGQVFRLVEKKTRKVWAGKFFKAYSAKEKENIRQEISIMNCLHHPKLVQCVDAFEEKANIVMVLEIVSGGELFERIIDEDFELTERECIKYMRQISEGVEYIHKQGIVHLDLKPENIMCVNKTGTRIKLIDFGLARRLENAGSLKVLFGTPEFVAPEVINYEPIGYATDMWSIGVICYILVSGLSPFMGDNDNETLANVTSATWDFDDEAFDEISDDAKDFISNLLKKDMKNRLDCTQCLQHPWLMKDTKNMEAKKLSKDRMKKYMARRKWQKTGNAVRAIGRLSSMAMISGLSGRKSSTGSPTSPLNAEKLESEEDVSQAFLEAVAEEKPHVKPYFSKTIRDLEVVEGSAARFDCKIEGYPDPEVVWFKDDQSIRESRHFQIDYDEDGNCSLIISDVCGDDDAKYTCKAVNSLGEATCTAELIVETMEEGEGEGEEEEE

SEQ ID NO: 230119 - DNA, 5745 bp, Artificial Sequence
  derived and/or modified sequence
atgggcgacgtgaagctggtggccagcagccacatcagcaagaccagcctgagcgtggaccccagcagagtggacagcatgcccctgaccgaggcccccgccttcatcctgccccccagaaacctgtgcatcaaggagggcgccaccgccaagttcgagggcagagtgagaggctaccccgagccccaggtgacctggcacagaaacggccagcccatcaccagcggcggcagattcctgctggactgcggcatcagaggcaccttcagcctggtgatccacgccgtgcacgaggaggacagaggcaagtacacctgcgaggccaccaacggcagcggcgccagacaggtgaccgtggagctgaccgtggagggcagcttcgccaagcagctgggccagcccgtggtgagcaagaccctgggcgacagattcagcgcccccgccgtggagaccagacccagcatctggggcgagtgcccccccaagttcgccaccaagctgggcagagtggtggtgaaggagggccagatgggcagattcagctgcaagatcaccggcagaccccagccccaggtgacctggctgaagggcaacgtgcccctgcagcccagcgccagagtgagcgtgagcgagaagaacggcatgcaggtgctggagatccacggcgtgaaccaggacgacgtgggcgtgtacacctgcctggtggtgaacggcagcggcaaggccagcatgagcgccgagctgagcatccagggcctggacagcgccaacagaagcttcgtgagagagaccaaggccaccaacagcgacgtgagaaaggaggtgaccaacgtgatcagcaaggagagcaagctggacagcctggaggccgccgccaagagcaagaactgcagcagcccccagagaggcggcagccccccctgggccgccaacagccagccccagccccccagagagagcaagctggagagctgcaaggacagccccagaaccgccccccagacccccgtgctgcagaagaccagcagcagcatcaccctgcaggccgccagagtgcagcccgagcccagagcccccggcctgggcgtgctgagccccagcggcgaggagagaaagagacccgccccccccagacccgccaccttccccaccagacagcccggcctgggcagccaggacgtggtgagcaaggccgccaacagaagaatccccatggagggccagagagacagcgccttccccaagttcgagagcaagccccagagccaggaggtgaaggagaaccagaccgtgaagttcagatgcgaggtgagcggcatccccaagcccgaggtggcctggttcctggagggcacccccgtgagaagacaggagggcagcatcgaggtgtacgaggacgccggcagccactacctgtgcctgctgaaggccagaaccagagacagcggcacctacagctgcaccgccagcaacgcccagggccagctgagctgcagctggaccctgcaggtggagagactggccgtgatggaggtggcccccagcttcagcagcgtgctgaaggactgcgccgtgatcgagggccaggacttcgtgctgcagtgcagcgtgagaggcacccccgtgcccagaatcacctggctgctgaacggccagcccatccagtacgccagaagcacctgcgaggccggcgtggccgagctgcacatccaggacgccctgcccgaggaccacggcacctacacctgcctggccgagaacgccctgggccaggtgagctgcagcgcctgggtgaccgtgcacgagaagaagagcagcagaaagagcgagtacctgctgcccgtggcccccagcaagcccaccgcccccatcttcctgcagggcctgagcgacctgaaggtgatggacggcagccaggtgaccatgaccgtgcaggtgagcggcaaccccccccccgaggtgatctggctgcacaacggcaacgagatccaggagagcgaggacttccacttcgagcagagaggcacccagcacagcctgtgcatccaggaggtgttccccgaggacaccggcacctacacctgcgaggcctggaacagcgccggcgaggtgagaacccaggccgtgctgaccgtgcaggagccccacgacggcacccagccctggttcatcagcaagcccagaagcgtgaccgccagcctgggccagagcgtgctgatcagctgcgccatcgccggcgaccccttccccaccgtgcactggctgagagacggcaaggccctgtgcaaggacaccggccacttcgaggtgctgcagaacgaggacgtgttcaccctggtgctgaagaaggtgcagccctggcacgccggccagtacgagatcctgctgaagaacagagtgggcgagtgcagctgccaggtgagcctgatgctgcagaacagcagcgccagagccctgcccagaggcagagagcccgccagctgcgaggacctgtgcggcggcggcgtgggcgccgacggcggcggcagcgacagatacggcagcctgagacccggctggcccgccagaggccagggctggctggaggaggaggacggcgaggacgtgagaggcgtgctgaagagaagagtggagaccagacagcacaccgaggaggccatcagacagcaggaggtggagcagctggacttcagagacctgctgggcaagaaggtgagcaccaagaccctgagcgaggacgacctgaaggagatccccgccgagcagatggacttcagagccaacctgcagagacaggtgaagcccaagaccgtgagcgaggaggagagaaaggtgcacagcccccagcaggtggacttcagaagcgtgctggccaagaagggcaccagcaagacccccgtgcccgagaaggtgcccccccccaagcccgccacccccgacttcagaagcgtgctgggcggcaagaagaagctgcccgccgagaacggcagcagcagcgccgagaccctgaacgccaaggccgtggagagcagcaagcccctgagcaacgcccagcccagcggccccctgaagcccgtgggcaacgccaagcccgccgagaccctgaagcccatgggcaacgccaagcccgccgagaccctgaagcccatgggcaacgccaagcccgacgagaacctgaagagcgccagcaaggaggagctgaagaaggacgtgaagaacgacgtgaactgcaagagaggccacgccggcaccaccgacaacgagaagagaagcgagagccagggcaccgcccccgccttcaagcagaagctgcaggacgtgcacgtggccgagggcaagaagctgctgctgcagtgccaggtgagcagcgacccccccgccaccatcatctggaccctgaacggcaagaccctgaagaccaccaagttcatcatcctgagccaggagggcagcctgtgcagcgtgagcatcgagaaggccctgcccgaggacagaggcctgtacaagtgcgtggccaagaacgacgccggccaggccgagtgcagctgccaggtgaccgtggacgacgcccccgccagcgagaacaccaaggcccccgagatgaagagcagaagacccaagagcagcctgccccccgtgctgggcaccgagagcgacgccaccgtgaagaagaagcccgcccccaagaccccccccaaggccgccatgcccccccagatcatccagttccccgaggaccagaaggtgagagccggcgagagcgtggagctgttcggcaaggtgaccggcacccagcccatcacctgcacctggatgaagttcagaaagcagatccaggagagcgagcacatgaaggtggagaacagcgagaacggcagcaagctgaccatcctggccgccagacaggagcactgcggctgctacaccctgctggtggagaacaagctgggcagcagacaggcccaggtgaacctgaccgtggtggacaagcccgacccccccgccggcaccccctgcgccagcgacatcagaagcagcagcctgaccctgagctggtacggcagcagctacgacggcggcagcgccgtgcagagctacagcatcgagatctgggacagcgccaacaagacctggaaggagctggccacctgcagaagcaccagcttcaacgtgcaggacctgctgcccgaccacgagtacaagttcagagtgagagccatcaacgtgtacggcaccagcgagcccagccaggagagcgagctgaccaccgtgggcgagaagcccgaggagcccaaggacgaggtggaggtgagcgacgacgacgagaaggagcccgaggtggactacagaaccgtgaccatcaacaccgagcagaaggtgagcgacttctacgacatcgaggagagactgggcagcggcaagttcggccaggtgttcagactggtggagaagaagaccagaaaggtgtgggccggcaagttcttcaaggcctacagcgccaaggagaaggagaacatcagacaggagatcagcatcatgaactgcctgcaccaccccaagctggtgcagtgcgtggacgccttcgaggagaaggccaacatcgtgatggtgctggagatcgtgagcggcggcgagctgttcgagagaatcatcgacgaggacttcgagctgaccgagagagagtgcatcaagtacatgagacagatcagcgagggcgtggagtacatccacaagcagggcatcgtgcacctggacctgaagcccgagaacatcatgtgcgtgaacaagaccggcaccagaatcaagctgatcgacttcggcctggccagaagactggagaacgccggcagcctgaaggtgctgttcggcacccccgagttcgtggcccccgaggtgatcaactacgagcccatcggctacgccaccgacatgtggagcatcggcgtgatctgctacatcctggtgagcggcctgagccccttcatgggcgacaacgacaacgagaccctggccaacgtgaccagcgccacctgggacttcgacgacgaggccttcgacgagatcagcgacgacgccaaggacttcatcagcaacctgctgaagaaggacatgaagaacagactggactgcacccagtgcctgcagcacccctggctgatgaaggacaccaagaacatggaggccaagaagctgagcaaggacagaatgaagaagtacatggccagaagaaagtggcagaagaccggcaacgccgtgagagccatcggcagactgagcagcatggccatgatcagcggcctgagcggcagaaagagcagcaccggcagccccaccagccccctgaacgccgagaagctggagagcgaggaggacgtgagccaggccttcctggaggccgtggccgaggagaagccccacgtgaagccctacttcagcaagaccatcagagacctggaggtggtggagggcagcgccgccagattcgactgcaagatcgagggctaccccgaccccgaggtggtgtggttcaaggacgaccagagcatcagagagagcagacacttccagatcgactacgacgaggacggcaactgcagcctgatcatcagcgacgtgtgcggcgacgacgacgccaagtacacctgcaaggccgtgaacagcctgggcgaggccacctgcaccgccgagctgatcgtggagaccatggaggagggcgagggcgagggcgaggaggaggaggagtag

SEQ ID NO: 230120 - DNA, 5745 bp, Artificial Sequence
  derived and/or modified sequence
atgggggatgtcaaattggtggcatcttcacacattagtaagaccagtttatccgtagacccatcgcgggtggatagcatgccccttactgaggcccccgcatttattttaccgccccggaacttgtgcatcaaggaaggagcaaccgcaaagtttgaagggagagtccggggctatcctgagccgcaggtgacgtggcaccgcaacggccagcctataacctcaggaggccgttttctcctggactgcggtattagaggaaccttcagcctggtaattcacgccgtgcacgaggaagaccgcggcaaatacacatgtgaggccaccaacggatctggggccagacaggtgacggtcgaattgacagtggaagggagcttcgcaaaacaattggggcagcccgttgtgagtaaaacgctcggcgaccgattcagcgcacccgccgtggagacgcggccgtccatttggggggagtgccctccaaagtttgccactaagctgggaagggtggtcgtgaaagagggtcagatgggcagattttcctgtaagattactggacgcccccagccacaagtgacctggctgaaaggcaatgtgccgttgcaaccttcagcacgagtaagcgttagtgaaaagaacggtatgcaggtgttggaaattcacggagttaaccaggatgacgttggcgtttatacttgtttggtcgttaacggaagcggcaaggccagtatgagcgccgagctttcaatccagggcctcgactcagccaatcgtagttttgtgagagaaacaaaagctaccaatagcgacgtacgaaaggaagtgacaaacgtcatatccaaagaatctaaacttgactctctcgaagctgctgccaagagcaagaactgctccagcccccagaggggtggcagcccaccttgggccgccaacagccagccacagcctcccagggagagtaagctggagtcctgtaaggatagtcccagaacggccccacagaccccagttctccagaaaaccagctccagcattaccctgcaggctgcaagggtgcagcccgagccccgagcgccaggcctgggagtgctgagtccatctggcgaggaacgcaaacgaccagcgccaccacgccccgcgacattcccaacccggcagcctgggctaggatcccaagatgtcgtctcgaaggcggctaacaggcggatacccatggaggggcagagagatagtgcatttccgaagtttgagtccaaaccccagagccaggaagttaaggaaaaccaaactgtcaagttccgctgcgaagtgagcggaatcccaaaacccgaagtggcatggttccttgagggcacccctgtgagacgtcaggaggggagtattgaggtgtatgaagacgctggttcccactatctttgccttctgaaggcccggacaagggactctgggacatatagctgcacagcatctaacgcacaaggacagctgagctgcagctggacactgcaggtcgaaagactcgctgttatggaagttgcaccttctttttccagcgtgctcaaagactgtgctgtgatcgagggtcaagactttgttctacagtgtagcgtccgagggacgccagtaccaaggatcacctggctcctgaacggacagccaatacagtacgcgaggtcaacatgtgaggcaggagtggcggaacttcatattcaagacgctctcccagaagaccatggtacatacacatgcctggctgagaatgctctgggccaggtgtcatgttctgcctgggtcactgtgcatgagaagaaatcctctagaaagtcagagtatctgctgccagtagcgccaagcaaacctacagcgcccatcttcctacagggactatctgatctgaaagtcatggatggatcccaggtaaccatgactgtccaggtgagtggcaaccctcctcctgaggtgatctggctccataacggtaacgaaatacaagaaagcgaagacttccactttgaacaacggggaactcaacattcgctgtgcatacaggaggtgtttccggaagataccgggacctacacctgtgaggcatggaacagcgccggcgaagtcaggacccaagccgtgctgaccgtccaggagccgcacgacggaacccagccatggttcatttctaaaccacggtcagtcactgcatctctgggccagtctgttctaatatcctgcgccattgccggggatccctttcccacagtgcactggctgagggatggcaaagcactttgtaaggacacaggtcacttcgaagtgctgcagaatgaagacgtgtttacactggtattgaagaaagtgcagccatggcacgctggacagtacgaaattctgctgaagaaccgcgttggcgagtgcagctgtcaggtgtcacttatgctgcaaaattcaagtgcaagagcattgccccgaggacgagaacccgccagttgcgaagatctgtgcggaggaggcgtaggcgcagacggcggcggtagtgacaggtacggctctctgaggccaggttggccggcacggggacaagggtggttggaggaggaggatggggaagatgtaaggggcgtgctgaagagacgagtggagacccggcagcatacagaggaggccatccgacaacaggaagtggagcagttggactttcgtgaccttctaggaaagaaggtcagtaccaagacgttatccgaagacgacctaaaggaaattcctgccgaacagatggattttcgtgcaaatctgcagcgccaggtaaagccgaagactgtttctgaggaggagcgtaaggtccattcaccccaacaggttgattttagatctgtactggctaaaaaaggcacctccaagactcctgtgccagaaaaagtgccacctcctaaacccgcgactcccgacttccgcagcgttctaggaggcaagaaaaagctccctgcggaaaacgggagcagctctgctgaaactctgaatgccaaagcagtcgagtcctccaaacctttgtccaacgcccaaccctctggccccttaaaaccagtgggtaacgccaaacctgccgagaccctgaagccaatgggaaatgccaagccggccgagaccctgaaacccatggggaatgcgaaacctgacgaaaatctcaaaagtgccagtaaagaagagctgaagaaagatgtgaagaatgatgtgaactgtaaacgcggccacgccggaacaaccgataatgagaaacgctcagagtctcaggggactgcacccgcattcaagcagaaactgcaagacgtccatgttgcagaggggaagaagctgttactgcagtgtcaagtttcatcggatccacccgcgaccatcatttggactctaaatggaaaaaccctcaagacaactaagttcattattctgtcccaggaggggtctctgtgctccgtatcaattgagaaggcactgccagaggacagaggtctgtacaagtgcgtggccaagaatgacgcgggtcaggcagagtgttcatgtcaggtaacagtcgacgatgcaccggcgtcggaaaatacaaaggcccctgaaatgaaatcccggagacccaagtcctccctaccccctgtgctgggtacagagagtgacgctactgttaagaaaaaaccggcccctaagactcctcctaaagccgccatgcccccacagattatacagtttcctgaggatcagaaagtcagagctggggagtcagtggaactttttggcaaggtgactggtacccagccaataacctgtacttggatgaagtttagaaagcagattcaggagagtgagcatatgaaggtcgaaaattcagagaacggctcaaagttgacaatcctggcggcgaggcaggagcattgcggatgctataccctgttagtcgaaaacaaactgggatccaggcaggcccaggtaaatctaaccgtggtagacaagcccgacccccctgcaggaacaccatgcgcatctgacatccgttcaagcagcttaaccctgagctggtacgggagcagttatgacggcggatctgccgtgcaatcatacagcattgagatctgggactccgcaaataagacttggaaggaattagcaacgtgtcggtctacatcatttaacgtccaagatctcctgccggatcatgagtacaagttcagggtgagagcaatcaacgtctatgggacaagcgaaccaagccaggaatcagaactgaccaccgtgggggaaaaaccagaagaacccaaggatgaagtggaggtgtccgacgatgatgaaaaggaacctgaggtagactaccgcacagtaaccatcaacacggagcagaaggtctcagacttctacgacatcgaggagagattgggctctgggaaatttggacaggtgttccgacttgttgagaagaagacaaggaaggtctgggcaggcaaattcttcaaagcgtattctgccaaagagaaagagaatattagacaggagatctcaataatgaactgcttgcaccaccctaagctggtgcaatgcgtggacgcttttgaggaaaaagccaacattgtaatggtattagaaattgtgtctgggggtgagctttttgagcgcataatcgatgaagattttgaactaaccgaacgcgagtgcatcaagtacatgcgtcaaatctcagaaggtgtggagtacatacacaagcagggcattgtgcacctggacctgaagcccgagaacataatgtgtgtgaacaaaacagggactcgaattaagctgattgattttggactggcccgccgattagaaaatgccggaagccttaaagtcttattcggtacccctgaatttgtcgctccggaggtgatcaattacgaaccaatcgggtacgccaccgacatgtggtctataggcgtaatatgctacattctggtgtcaggtttgagtcccttcatgggtgacaacgataatgaaacactcgccaatgttacaagtgctacctgggacttcgacgacgaagcttttgatgagatcagtgacgatgctaaggattttatctcaaacctgctgaagaaggacatgaagaaccggctagattgtacccagtgcttgcaacacccttggctgatgaaagacaccaaaaatatggaggctaaaaagttgtcgaaggatagaatgaaaaagtatatggctcgccgaaaatggcagaagactggtaacgcagtcagagcgataggcagactgagttctatggcaatgatctctggactgagcgggcggaagagcagcacaggctcacccacgtcaccccttaatgcagaaaagcttgaatccgaggaagatgtgtcccaggctttcctggaggctgtggccgaggagaaaccccatgttaagccatacttcagcaaaaccattcgtgacctagaggtggtggaggggtccgcggctcgatttgattgtaaaatcgagggatacccagatccagaagttgtttggttcaaagacgaccagtctatcagggagtcccgacattttcagattgattatgatgaagatggaaattgctcactcatcatttctgacgtctgcggagacgatgacgctaagtacacctgcaaggctgtaaacagcttgggagaagcaacctgcaccgcggagcttatcgtggaaactatggaagagggcgagggtgagggagaggaggaggaagagtag

SEQ ID NO: 230121 - DNA, 5745 bp, Artificial Sequence
  derived and/or modified sequence
atgggggacgtcaaacttgtggcatcctcccatatatccaaaacctctctgagtgttgacccaagcagagtggacagcatgccattgaccgaggcaccggctttcatcctaccaccccgtaatctctgcatcaaggaaggagccactgctaagttcgagggaagggtcaggggatatcccgaaccccaggtgacatggcatcggaacggtcagccgattacatctggagggcgatttttactggattgcggtatccggggaacgtttagcttagtcatccatgcagttcatgaggaagacagggggaaatacacttgcgaggcaactaacgggtccggtgccaggcaagtcacagtcgagcttacagtggaagggagcttcgctaagcaactggggcagccagttgttagcaaaacgctaggcgacaggttcagcgcccctgctgtggagaccagacctagtatttggggcgagtgcccacccaaattcgccacgaagctgggtcgcgtggtcgtgaaggaaggacagatggggcgattcagttgcaaaatcacaggacgtccgcagccgcaggtgacctggctgaagggtaatgtaccgctgcaaccaagcgccagagtcagcgtgtcagagaagaatggcatgcaggtgctggagattcatggtgtcaaccaggacgatgtgggcgtatacacatgcctggtggtgaatgggtctggcaaagcgtccatgtcagccgagctctccatccagggcttggacagcgctaataggagtttcgtgagggagacaaaagcaaccaactccgacgttaggaaggaggtcactaacgtcatttctaaagaatctaagcttgacagccttgaggccgccgccaagagtaagaactgttcgtcaccccagaggggtggttctccaccctgggccgcaaattcccagcctcagcccccacgcgaaagcaagctggagtcatgcaaggacagtccccgaactgcgccccagacacccgtcctgcagaagacctctagctctatcacacttcaggctgcgagagttcagcctgagccacgggcaccgggactgggtgttctgagcccaagcggggaagaacggaagcgtcccgcccccccacggccagcaaccttccccaccagacagcccgggttggggagtcaagatgttgtcagcaaggccgccaatcgccggattcctatggaagggcaaagggatagcgcgttccccaaattcgaatccaagccacagtctcaggaggtgaaggaaaatcagaccgtaaagtttaggtgtgaggtaagtgggatacccaaacctgaggttgcctggttcctggagggcactcctgtcaggaggcaggaagggtcaattgaagtgtatgaggatgcaggctctcattacttgtgcttgctcaaggccagaacccgggactccggcacatactcatgcactgcttccaatgcccagggacagctctcttgcagctggaccttgcaggtggagagacttgccgtcatggaggtcgcacccagcttttcgagcgttctgaaggactgtgccgtaattgaaggccaagattttgtgctccagtgctcggtgcgcggtacccccgtgccacggatcacctggcttctaaacggccagcccattcagtacgcacgcagcacttgtgaggcaggcgtagcagaattacatattcaggacgcactgcctgaagaccatggcacctacacgtgcttggcagagaatgctcttggccaggtttcctgcagtgcctgggtaactgtgcatgagaaaaaatcatctcggaagagtgagtatctccttcctgtcgccccaagtaagccaaccgcccccattttcctgcaggggctctctgatctgaaagtgatggatggctcccaggtgacaatgaccgttcaggtttcgggaaatccgccacccgaggttatttggctgcataacggcaatgaaattcaagagagcgaggattttcactttgagcagcgaggcacccagcattccctgtgtattcaagaagtgttcccagaggacaccggcacttatacttgcgaggcctggaactccgcaggcgaggtacgcacacaggctgtgctaacagtgcaagaacctcacgacggcacgcagccctggttcatatcgaaaccacgctctgtcaccgccagcctggggcagtcagtgctcatctcctgcgccattgcaggcgacccgtttcccacggtgcattggctgagagatgggaaagccctctgcaaggacacaggtcacttcgaggttttgcagaatgaggatgttttcacactggtgctgaaaaaagtccaaccctggcacgctggtcaatatgaaatcctgctgaagaaccgtgtaggagagtgctcctgccaggtgtccctaatgctgcagaatagttcggccagggcgctacccaggggcagggaaccagcatcttgtgaagacctgtgtggaggcggggtcggcgccgatgggggcggcagtgaccgctatggaagtctgagaccaggatggcctgcccggggtcagggatggctggaggaggaagatggcgaggatgtgaggggagtgcttaaacgccgagtggagacacgacagcacactgaggaggcaatccgacagcaggaggtggaacaactggattttagggaccttctgggcaaaaaggtgagcactaaaacactgagtgaggacgacttaaaagaaattcccgccgaacagatggacttcagagcgaacctgcaacgccaagtaaagccaaaaactgtgtcggaggaggagagaaaagtccacagcccccagcaggtcgactttagaagtgtccttgctaagaagggaacatcaaaaacaccagtgcctgagaaagtgcccccccccaagcctgcaacccctgacttccgttctgtgcttggaggcaagaagaagctgccagccgagaacggcagttccagcgctgagaccttgaacgccaaagctgtggaatcttctaaacccctaagcaatgcacagccctcagggcccttgaagcctgtgggaaacgctaagccggccgagactctcaagcccatggggaatgccaaaccggcggaaacgttgaaacctatgggcaacgccaagcctgacgagaatcttaagagtgcatccaaggaagagctgaagaaagacgtgaagaacgacgttaactgcaaacggggccatgctgggactacggataacgaaaagcggtcagaaagccaaggtacagccccagcctttaaacaaaaattgcaggacgtccacgtggcagagggcaagaagctgttgcttcagtgtcaagtttcaagtgatcctccagcgaccattatctggacactgaatggcaagacccttaaaactaccaagtttatcattctctcacaggagggaagtctctgttctgtgtcaattgagaaggcactgcccgaggataggggcctttataagtgcgtggccaagaacgatgccggacaggctgaatgttcttgccaggtgacagttgacgatgccccagcgtcagagaacaccaaagcacccgaaatgaagtctagaagaccaaaatctagcctgcctcccgtgctggggaccgaaagcgacgccacggtgaagaaaaagcccgctccaaagacccccccaaaggccgcaatgccaccacagatcattcagtttcccgaggaccaaaaggttagggctggggagagtgtggagctgttcggaaaagtgactggcactcagcccattacctgcacatggatgaaattcagaaaacaaatccaggaatcagagcacatgaaggtggagaactctgaaaatggctcgaagctgacgattctcgccgctagacaggagcattgcggttgctacactctgctggtagagaataaactggggtctagacaagcccaggtaaatctaacagttgtggacaagccagaccccccggcgggaactccttgcgcatctgacatcagatcttcaagcctcaccctgagctggtacggctcgtcctatgacggcggctcggccgtacaatcttatagtatcgaaatttgggactccgcgaacaaaacctggaaggaactggccacctgccgctctacatcgttcaacgtgcaggacctcttgccagaccatgaatataaattccgcgtgcgcgccatcaatgtttacggcacgtcggagccttctcaggaaagcgagctaacaactgtgggcgagaaaccagaagagcccaaggacgaagtggaagtgtccgatgatgatgagaaagagcctgaggtcgactaccgcactgttactatcaataccgaacagaaagtgtcagacttttacgatatagaggaacgacttggctcaggcaagttcggtcaggtgttccggctggttgaaaagaaaacaaggaaggtttgggccggaaaattctttaaggcctattccgcaaaagagaaagagaacataaggcaggagatcagcattatgaactgtcttcaccatcccaagttggtgcagtgtgtcgacgcatttgaggaaaaggcgaacattgtgatggttcttgagatcgtttctggtggagaactctttgaacggattatcgacgaggactttgagctcacggagagagagtgcatcaagtacatgagacagatctccgagggtgtggagtacatccataaacaggggatcgtgcacctggatctgaagccagagaacatcatgtgtgtaaataagaccggaacccgcatcaagttaattgatttcggcctggctcgtagactcgaaaatgcaggatccctcaaggtactttttggcaccccggagtttgtggcacctgaggttataaattatgaaccaattggctacgccactgatatgtggtcaattggcgtgatctgttacattcttgtttccggattaagcccttttatgggagataatgataacgagaccctagcgaatgtaaccagcgcaacatgggacttcgacgacgaagccttcgacgagatttctgatgacgccaaggatttcatcagcaacttactcaaaaaggacatgaaaaatcgcctagactgtacccagtgcctccagcatccctggctcatgaaagataccaagaatatggaagcaaaaaaactgtccaaagataggatgaagaaatacatggcacggagaaaatggcagaagacaggtaacgcggtgcgcgccatcggaaggctgagcagcatggctatgatctcaggactgagcggccgtaaatcttctacgggtagccctacgtctccattaaacgctgagaagctggagagcgaagaggacgtgtctcaagcttttttggaagcagtggctgaggaaaaacctcacgtcaagccctacttcagcaaaactattagagaccttgaggtagtggaaggtagtgcagcacgtttcgactgcaagatcgagggttaccccgatcccgaggtggtttggttcaaagacgatcaaagtatcagggaatccagacattttcagattgactacgatgaagatggcaattgctctctgatcatttccgatgtgtgcggggatgacgacgcgaagtatacgtgcaaggccgtgaacagcctcggtgaggccacttgcaccgctgagctaatcgtggaaacaatggaggagggagagggggagggtgaagaagaagaggaatag

SEQ ID NO: 230122 - DNA, 5745 bp, Artificial Sequence
  derived and/or modified sequence
atgggagatgtgaagctggtggccagcagccacatcagcaagaccagcctgtctgtggaccccagccgggtggacagcatgcccctgacagaggccccagccttcatcctgccccccaggaacctgtgcatcaaggagggcgccacagccaagtttgagggccgggtgcggggctacccagagccccaggtgacctggcacagaaatggccagcccatcaccagcggcggccgcttcctgctggactgtggcatccggggcaccttcagcctggtgattcatgctgtgcatgaagaagatcggggcaagtacacctgtgaggccaccaacggcagcggggcccggcaggtgacagtggagctgactgtggagggcagctttgccaagcagctgggccagcctgtggtgtccaagaccctgggggaccgcttcagcgccccagctgtggagacccggcccagcatctggggcgagtgcccccccaagtttgccaccaagctgggccgggtggtggtgaaggagggccagatgggccgcttcagctgcaagatcaccggccggccccagccccaggtgacctggctgaagggaaatgtgcccctgcagcccagcgcccgggtgtctgtgtctgagaagaatggcatgcaggtgctggagatccatggagtgaaccaggatgatgtgggcgtgtacacctgcctggtggtgaatggaagtggcaaggcctccatgtctgctgagctgagcatccagggcctggacagcgccaacagaagctttgtgcgggagaccaaggccaccaacagtgatgtgaggaaggaggtgaccaacgtcatcagcaaggagagcaagctggacagcctggaggccgccgccaagagcaagaactgcagcagcccccagagaggaggcagccccccctgggccgccaacagccagccccagcccccccgggagagcaagctggagagctgcaaggacagccccaggacagccccccagacccctgtgctgcagaagaccagcagcagcatcaccctgcaggccgcccgggtgcagcctgagccccgggcccctggcctgggcgtgctgagccccagcggggaggagaggaagaggcctgccccacccaggcctgccaccttccccacccggcagcccggcctgggcagccaggatgtggtgtccaaggccgccaacagacgcatccccatggagggccagagggacagcgccttccccaagtttgagagcaagccccagagccaggaggtgaaggagaaccagacagtgaagttccgctgtgaggtgtctggcatccccaagccagaggtggcctggttcctggagggcacccctgtgcggcggcaggagggcagcattgaggtgtatgaagatgctggcagccactacctgtgcctgctgaaggcccggacccgggacagcggcacctacagctgcacagccagcaatgcccagggccagctgagctgctcctggaccctgcaggtggagcggctggccgtgatggaggtggcccccagcttcagctctgtgctgaaggactgtgccgtcatcgagggccaggactttgtgctgcagtgcagcgtgcggggcacccctgtgccccgcatcacctggctgctgaatggccagcccatccagtatgcccggagcacctgtgaggccggcgtggccgagctgcacatccaggatgccctgcctgaggaccacggcacctacacctgcctggccgagaatgccctgggccaggtgtcctgcagcgcctgggtgacagtgcatgagaagaagagcagcaggaagtctgagtacctgctgcctgtggcccccagcaagcccacagcccccatcttcctgcagggcctgagtgacctgaaggtgatggatggcagccaggtgaccatgacagtgcaggtgtctggcaaccccccacctgaggtgatctggctgcacaatggaaatgagatccaggagagcgaggacttccactttgagcagaggggcacccagcacagcctgtgcatccaggaggtgtttcctgaggacaccggcacctacacctgtgaggcctggaacagcgctggggaggtgaggacccaggccgtgctgactgtgcaggagccccatgatggcacccagccctggttcatcagcaagcccaggtctgtgacagccagcctgggccagagcgtgctgatcagctgtgccatcgccggggaccccttccccaccgtgcactggctgagagatggcaaggccctgtgcaaggacaccggccactttgaggtgctgcagaatgaagatgtgttcaccctggtgctgaagaaggtgcagccctggcatgctggccagtatgagatcctgctgaagaacagagtgggggagtgcagctgccaggtgtccctgatgctgcagaacagcagcgcccgggccctgccccggggccgggagcccgccagctgtgaggacctgtgtggcggcggcgtgggcgcagatggcggcggcagtgacagatatggcagcctgcggcccggctggccagcccggggccagggctggctggaggaggaggatggagaagatgtgcggggcgtgctgaagagaagagtggagacccggcagcacacagaggaggccatccggcagcaggaggtggagcagctggacttccgggacctgctgggcaagaaggtgtccaccaagaccctgtctgaagatgacctgaaggagatcccagctgagcagatggacttccgggccaacctgcagaggcaggtgaagcccaagacagtgtctgaggaggagaggaaggtgcacagcccccagcaggtggacttccgctctgtgctggccaagaagggcaccagcaagacccctgtgcctgagaaggtgcccccacccaagccagccaccccagacttccgctctgtgctgggcggcaagaagaagctgcctgcagaaaatggcagcagcagcgctgagaccctgaatgccaaggctgtggagagcagcaagcccctgagcaatgcccagcccagcggccccctgaagcctgtgggcaatgccaagccagctgagaccctgaagcccatgggaaatgccaagccagctgagaccctgaagcccatgggaaatgccaagccagatgagaacctgaagagcgccagcaaggaggagctgaagaaggatgtgaagaatgatgtgaactgcaagaggggccacgccggcaccacagacaatgagaagaggtctgagagccagggcacagccccagccttcaagcagaagctgcaggatgtgcacgtggccgagggcaagaagctgctgctgcagtgccaggtgtccagtgaccccccagccaccatcatctggaccctgaatggcaagaccctgaagaccaccaagttcatcatcctgagccaggagggcagcctgtgcagcgtgtccattgagaaggccctgcctgaagatcggggcctgtacaagtgtgtggccaagaatgatgctggccaggccgagtgcagctgccaggtgacagtggatgatgccccagccagcgagaacaccaaggcccctgagatgaagagccggcggcccaagagcagcctgccccctgtgctgggcacagaaagtgatgccaccgtgaagaagaagccagcccccaagaccccacccaaggccgccatgccaccccagatcatccagtttcctgaggaccagaaggtgcgggccggggagagcgtggagctgtttgggaaggtgacaggcacccagcccatcacctgcacctggatgaagttcaggaagcagatccaggagagcgagcacatgaaggtggagaacagtgaaaatggcagcaagctgaccatcctggccgcccggcaggagcactgcggctgctacaccctgctggtggagaacaagctgggcagccggcaggcccaggtgaacctgactgtggtggacaagccagaccccccagctggcaccccctgtgccagtgacatccgcagcagcagcctgaccctgtcctggtacggcagcagctatgatggcggcagcgctgtgcagagctacagcattgagatctgggacagcgccaacaagacctggaaggagctggccacctgccgcagcaccagcttcaacgtgcaggacctgctgcctgaccacgagtacaagttccgggtgcgggccatcaacgtgtatggcaccagcgagcccagccaggagagcgagctgaccaccgtgggggagaagccagaggagcccaaggatgaggtggaggtgtctgatgatgatgagaaggagcctgaggtggactacagaacagtgaccatcaacacagagcagaaggtgtctgacttctatgacatcgaggagcggctgggcagcggcaagtttggccaggtgttccggctggtggagaagaagaccaggaaggtgtgggccggcaagttcttcaaggcctacagcgccaaggagaaggagaacatccggcaggagatcagcatcatgaactgcctgcaccaccccaagctggtgcagtgtgtggatgcctttgaggagaaggccaacatcgtgatggtgctggagatcgtgtctggaggagagctgtttgagcgcatcattgatgaagattttgagctgacagaaagagagtgcatcaagtacatgaggcagatcagcgagggcgtggagtacatccacaagcagggcatcgtgcacctggacctgaagccagagaacatcatgtgtgtgaacaagacaggcacccgcatcaagctgattgactttggcctggcccggcggctggagaatgccggcagcctgaaggtgctgtttggcaccccagagtttgtggcccctgaggtgatcaactatgagcccatcggctacgccacagacatgtggagcattggagtcatctgctacatcctggtgtctggcctgagccccttcatgggagacaatgacaatgagaccctggccaacgtgaccagcgccacctgggactttgatgatgaggcctttgatgagatcagtgatgatgccaaggacttcatcagcaacctgctgaagaaggacatgaagaaccggctggactgcacccagtgcctgcagcacccctggctgatgaaggacaccaagaacatggaggccaagaagctgagcaaggacaggatgaagaagtacatggcccggaggaagtggcagaagacaggaaatgctgtgcgggccatcggccgcctgagctccatggccatgatcagcggcctgagcggcaggaagagcagcacaggcagccccaccagccccctgaatgctgagaagctggagagcgaggaggatgtgtcccaggccttcctggaggccgtggccgaggagaagccccacgtgaagccctacttcagcaagaccatccgggacctggaggtggtggagggcagcgctgccaggtttgactgcaagattgagggctacccagaccctgaggtggtgtggttcaaggatgaccagagcatccgggagagccgccacttccagattgattatgatgaagatggcaactgcagcctcatcatcagtgatgtgtgtggagatgatgatgccaagtacacctgcaaggctgtgaacagcctgggggaggccacctgcacagctgagctgattgtggagaccatggaggagggggagggggagggggaggaggaggaggagtag

SEQ ID NO: 230123 - DNA, 5745 bp, Artificial Sequence
  derived and/or modified sequence
atgggcgacgtgaagctggtggccagcagccacatcagcaagaccagcctgagcgttgacccttccagagtggactccatgccactgactgaggcgcctgcctttattctccccccccgaaatctgtgtatcaaagaaggtgccaccgcaaaatttgaggggcgcgtcagagggtatcccgaaccccaggtaacatggcaccgcaacggacagccgataacgtctggaggcagatttctgctcgattgcggaattcggggaacattttctctggtgatccatgccgttcacgaagaggacagaggtaagtacacatgtgaggctaccaatgggagcggtgctcgacaggtcaccgtagaactgacagttgagggctcatttgctaaacaactcggccaacctgtggtcagcaaaacactaggcgatagattcagcgcccctgccgtagaaaccaggccctcaatttggggggagtgtccgcccaaatttgctactaagctgggaagggtggtcgtgaaggagggccagatgggccgctttagttgtaaaattactggacgcccgcagcctcaggttacttggctcaaaggaaacgtacctctacagccatcagcacgggtgagcgtcagtgagaaaaacgggatgcaggtgctcgagattcatggcgtgaaccaggatgacgttggcgtctatacctgtttggtggtaaatggctctgggaaggcctcgatgtcagcagagctctcaattcaaggcttggatagcgcaaatcgctcgtttgttagggaaacgaaggccaccaacagtgatgtgcgtaaggaggtaaccaacgttatttctaaggaaagcaaactcgattcccttgaggcggccgctaaatccaagaattgttcttccccccagcgaggcgggagtcctccatgggctgctaactctcagccacagcccccaagggagtcaaagctggaatcttgcaaagattcccctagaactgcgccccaaacccctgttctgcagaagacttcctcaagtattactttgcaagctgctagagttcagcctgaacccagggcgcctgggctcggcgtactttccccaagcggagaggaacggaaacgcccagctccccccaggcctgctacctttcccacacgtcagcctggacttggaagtcaggacgtcgtgtcaaaagccgctaaccgccggattccaatggaaggccagagggacagcgcttttcctaagttcgagtccaagccccagtcccaggaggtcaaggaaaaccaaacggtgaaattccgctgtgaggtgtccggcatccctaagccagaggtcgcttggttcttggagggcacacctgtccgtcggcaagaaggctcgattgaggtgtacgaggacgctgggagccactatttgtgtctccttaaggctaggacaagggatagtggtacttatagctgcacagcttccaatgcacagggccaactatcatgtagctggacactacaggtggagcgcttggccgttatggaagtggccccctctttctcttcagtgctgaaagattgtgccgtcattgagggccaggatttcgtcttacagtgttccgtgcgtgggacgccagtgccccgtatcacctggttgcttaatggccaacccatacagtatgccaggtcaacatgtgaagccggagtggccgagttgcatatccaggacgcactacctgaggaccatggtacctacacctgtctggccgagaatgcccttggccaggtcagctgcagcgcttgggttaccgtgcacgaaaagaagtccagtaggaaaagtgagtacctcctccccgtggcgcccagtaaaccgacagcccccatattcctgcagggcctttccgatctaaaggtaatggatggctcccaggtgactatgacggtccaggtatctggtaatccccctcctgaggtgatatggctacataacggcaacgagatccaggagtctgaggactttcactttgaacagagaggcactcagcatagtctgtgcatacaagaagtgtttccggaggataccggcacatacacctgtgaagcttggaactcagcaggagaggtcagaacacaggctgtcctcaccgtgcaggagccgcacgacggaacacaaccgtggtttatctccaagcctagatccgtgaccgcttccctgggccaatctgttctcatctcgtgtgcaatcgccggggatccttttccgactgtacactggttaagggatgggaaggcactgtgcaaagatacgggacattttgaggtgctgcagaacgaggacgtgttcacactggttttgaagaaggtccaaccctggcatgcggggcagtatgagattctgctaaagaaccgtgtcggtgagtgtagctgccaggtgtccttaatgctgcagaactcctcagctcgagcactaccccggggcagggagcctgccagctgcgaggatctgtgtgggggcggggttggagctgacggcggcggatcggacagatatgggagcctgaggccaggttggcctgctagggggcaggggtggctggaagaagaagacggggaggatgttcgaggggtgctcaaaaggagagtggagactaggcagcatacagaggaggcaataagacagcaggaagtggagcaactggattttcgggatctgctgggaaagaaggtttctacaaagactctgtcagaggacgacctgaaagagattccagccgaacagatggacttcagagccaatctgcagagacaggtaaagcccaaaactgtgtccgaggaggaaagaaaggtgcattccccccaacaggtcgattttaggagtgttcttgcaaaaaaaggtacaagcaagacaccagttcccgaaaaggtgccaccacctaagcctgccaccccagactttcgctccgtactgggggggaaaaagaagcttccagccgagaatggcagcagcagcgccgagaccctgaatgccaaggctgtcgagagctctaagcctctaagcaatgcccagcctagtgggcctttgaaacctgttggaaatgcgaagcccgcggaaactttgaagcccatgggtaatgcaaagccagccgagactcttaaaccaatgggtaacgccaagccagacgaaaatcttaagagtgcgtctaaggaggaactcaaaaaggacgtgaagaacgatgtcaactgtaagcgagggcatgctggaacaaccgataacgagaaaagatcagagtcgcagggcacagctcctgcgtttaagcagaaacttcaggacgtccatgtggctgagggcaagaagctactgttgcaatgccaggtaagcagcgacccgcccgctactatcatatggactttgaatggcaaaacactgaaaaccacaaagtttatcatcctcagtcaggagggcagcctgtgttcggtgtccatagagaaagctctccctgaggatcgaggcctgtacaagtgcgttgctaagaacgatgccggacaggctgagtgttcttgccaggtcaccgtggatgacgcaccagcttctgagaataccaaggcaccagaaatgaagtcccgccggccaaaatctagcttgccccccgtgctgggaaccgagtccgatgcaaccgtgaagaagaaaccggcacctaagacacctcccaaggcggcaatgcctccccagattatccagtttccggaagatcaaaaagtacgagccggcgaaagcgtggagctgttcggaaaggtcaccggaacacaaccaataacctgtacctggatgaagtttcggaaacaaattcaggagagtgaacacatgaaagtggagaatagtgagaacggctcaaagctcacaatcttggcagccaggcaggagcattgtggatgctacactcttcttgtggaaaacaagctaggatctcgtcaggcccaggtgaatctcacggtggtcgacaagccagatcccccggccgggacaccgtgcgcgtctgacatccgttcctctagcctgaccctgtcttggtacgggtcatcatacgatggcggctctgcagtccagagctactctatcgaaatctgggattctgcaaataaaacatggaaggaactggccacatgcagatctactagctttaatgtacaggacctgttgcccgaccacgagtataagtttagggtgcgggccatcaatgtgtatgggacgagcgaacctagtcaagagtctgaacttacaaccgttggtgagaaacccgaggagcctaaagacgaggtggaggtgtccgacgatgatgagaaagagccagaggtagattatagaactgtcacaattaatacagagcagaaggtctccgatttttacgacattgaggagcgcttgggctctggtaaattcggtcaagtatttaggctagtcgagaaaaaaactaggaaagtgtgggccggcaagttctttaaggcttactctgccaaggaaaaggaaaatattaggcaagagattagtataatgaattgtctacaccatcccaagctggttcagtgtgttgatgccttcgaggaaaaggcgaacattgtgatggttctggagatcgtgagcggcggggagctctttgagaggatcattgatgaagatttcgagctcacagaaagggaatgcattaaatacatgcggcagataagtgaaggtgtcgaatacatacacaagcagggcattgtgcacctggatctgaaacccgaaaatataatgtgtgttaacaagacgggcacacggattaagctgatcgacttcggcttggcccgaaggctcgaaaatgcagggagtctgaaggtcttgttcgggacccccgaatttgtcgctcccgaggtcattaactacgaacccatcggctacgccacagacatgtggtctattggggtaatctgttatatcttggtgagtggcctgagcccatttatgggggataatgacaacgaaaccttggccaatgttacctcagccacctgggacttcgatgacgaagccttcgacgagatctccgacgatgcgaaggatttcatatcaaatctcctgaagaaggacatgaagaatcgtctcgattgcacccaatgtctgcaacacccctggctgatgaaggatactaaaaatatggaggcaaagaaactgtcaaaagatagaatgaagaagtacatggcaagaagaaagtggcaaaagaccggcaatgcagtgagggctatcggacgcctgagctccatggccatgatctcaggcttgtccgggcgcaaatcctccacaggcagtcccacctcccctctaaatgctgaaaagctggaaagcgaggaggatgtgagccaggcctttctggaagcggttgccgaagagaaacctcacgtgaaaccttacttctctaaaacaattagggatctggaggtcgtggaagggtctgcagcgcggtttgactgtaagatagaagggtacccggatcctgaggtagtgtggtttaaggacgatcagtccatccgggagtcaagacacttccagatcgactacgacgaggacggtaattgctcactgatcattagtgatgtgtgcggcgatgatgatgctaaatacacctgcaaggctgttaatagcctgggagaagccacttgcactgccgaactgatcgtagagacaatggaagaaggtgaaggggagggggaggaggaagaagaatag

SEQ ID NO: 230124 - DNA, 5745 bp, Artificial Sequence
  derived and/or modified sequence
atgggcgacgtgaagctggtggccagcagccacatcagcaagacctcactgagtgtggacccaagtcgagtggatagcatgccgctaactgaggcccccgcattcatcttgcctccccggaatttatgtattaaggagggggctaccgccaaatttgaaggaagggtgagaggttaccctgagccccaggtcacctggcatagaaacgggcagcctattacctccgggggtcgcttcttgctcgactgcggcataagggggaccttttctttagtcatacacgccgtgcacgaagaggatagagggaaatatacctgcgaagcaacgaatggctccggggcacgccaggtgactgtagagctcacagtggagggttctttcgctaagcagcttggacagcctgtcgttagcaagactctgggcgaccggtttagcgctccagccgtggaaacccggcccagcatctggggggagtgtccacccaagtttgctaccaagctgggccgggtcgttgtgaaggagggccaaatgggcaggttttcatgcaaaatcacgggtaggccccagcctcaggtgacttggctaaaaggtaatgtgccgttacaacccagtgcgagggtcagcgtctcagagaagaatggaatgcaagtgctggagatccacggcgttaatcaggatgatgtgggggtttatacttgcctagtggttaatggttccggcaaggccagcatgagcgctgaattgagcatccaggggctggacagtgccaatcgatcatttgtacgggaaacaaaggccactaacagcgacgtgaggaaggaggtcacaaatgttatttccaaggagtcaaagctggactctttagaagccgccgccaagagtaagaactgttcttcaccacagcgcggagggagtccaccatgggccgccaattctcaaccacagcctccaagagaaagcaaactggagtcctgcaaagacagtccaagaaccgctccccagacaccagtgctgcagaagacaagctccagcattactttgcaggccgcgcgggtgcagcccgagccacgggccccagggctcggagtgttgtcgcctagcggcgaagagcggaagagacccgctccgccacggcctgccacgtttcccaccagacagccagggctggggtcccaggacgtcgtatcaaaggctgcaaataggaggatccctatggagggccagcgagacagcgcctttcctaaattcgagagtaagccccagagtcaggaggtgaaagagaaccagactgtgaaattcagatgtgaggtgtccggtattcctaagcccgaggtagcctggtttttggaaggcacacccgttaggaggcaggagggttcaatcgaggtatacgaagatgcgggcagtcactacctctgtctgctgaaagcgcggacacgtgacagtggcacctatagttgcacggcgtcaaatgcccagggtcaactgtcttgcagctggacacttcaagtggagcgtctagccgtcatggaggtggctccatcattttcatccgtattaaaagactgcgccgtgattgaaggccaggattttgttctgcagtgcagcgtccggggcaccccggtgccgaggattacctggctcctgaacgggcagcccattcaatatgcgcggagcacctgtgaggcgggtgtggccgaacttcatatccaggatgcactgcctgaagaccacggcacatacacttgtcttgcggagaatgcattgggacaggtgagttgttctgcctgggttacagtgcacgaaaagaaatcctcacggaaaagcgagtatcttctgccggtagcaccttccaagcccaccgctccaattttcctgcagggattgtcagacctgaaggtgatggatgggagtcaggtgacaatgacggtccaggtttccggtaacccccctcctgaagtaatatggctccataacggtaatgaaattcaagagtccgaagatttccacttcgaacagaggggcacccagcattcgctctgcatccaggaggtgtttccagaggacaccgggacctatacatgtgaggcatggaattcggcaggcgaagtccggacccaagccgtcctcactgtccaggaacctcacgatggcacccagccttggttcatttccaagcctagatctgtcaccgcaagcttgggccagtcagtccttatctcttgtgccatcgctggagatccatttccaaccgtccattggctgcgggacggaaaggcgctatgcaaggataccgggcactttgaagtgcttcagaatgaggacgtgtttaccctcgtattgaagaaggtccagccatggcacgccgggcagtatgagattctgttaaagaatagagttggagagtgcagctgtcaggtgtcactaatgctccaaaactccagcgcgagggccctgccccgcggcagagagccggcaagttgtgaagacctttgtggcggaggcgtgggggccgacgggggcggctctgatagatacggcagtttaagaccaggttggcccgccaggggacagggatggctagaagaggaagatggtgaggacgtgagaggggtgctgaaacgccgcgtggagaccagacagcacaccgaagaagcaatccgccaacaggaggtggagcagttagatttccgagatctgctgggaaagaaggtctccactaaaacactcagcgaagacgatctgaaagagattcctgccgaacaaatggatttccgcgctaatctgcagaggcaggtaaagccgaaaaccgtgtccgaagaagagcggaaagtgcattcgcctcaacaggttgacttcagaagtgtgctggccaagaagggcacaagcaaaactccagtgcctgaaaaagtgccaccgcctaaaccagcaactcccgactttcgctccgttctgggcggaaaaaagaagctgcctgctgagaatggcagctcaagcgccgagacactgaacgccaaggcagtggagtcgagcaaaccactgagtaatgctcagccttcagggcctttgaagccagttggcaatgcgaagcccgcagagacacttaaacctatgggtaatgccaagcctgccgaaacgttaaagcctatgggaaacgctaagcccgatgagaacttgaaaagcgccagtaaggaagaactaaaaaaagatgtgaaaaacgatgtcaattgtaagaggggccacgcaggaacgactgataacgaaaaaaggtctgagtcccagggaactgcacccgcctttaagcaaaaattgcaggatgtgcacgttgccgagggaaagaagctgctgctgcaatgtcaggtgtcttctgaccccccggccactataatttggacccttaatgggaagacactcaaaaccacaaaattcattatcctatcccaagagggatccctttgttctgtgtccatcgaaaaagcccttcccgaagatcgcggtctgtacaagtgcgttgctaagaatgatgcaggacaggctgagtgctcatgccaagtcacagtggatgatgccccagcttctgagaataccaaagcccctgagatgaaatcacgacgaccaaagagcagtctccctcccgttttgggcacggaatctgatgctacagtgaagaagaaacccgccccgaaaacccctcccaaggccgccatgccaccacaaattatacaattcccagaggaccagaaggtccgtgcaggagaaagtgtggaactttttggaaaggtgactggcacccagcccatcacatgtacctggatgaagttccggaaacagatccaggagtccgaacacatgaaggttgagaattcagaaaacgggtctaagctcaccattcttgctgcaaggcaggaacactgcgggtgttatacattactggttgaaaacaaattaggcagccgccaagctcaagtcaacctcactgtggtggacaagcctgatcctcccgcaggcacaccctgcgcttctgatattaggtcctcatctcttactctgtcctggtacggttcaagctacgatggaggtagcgctgtacaatcatattctatcgagatctgggacagcgcgaacaaaacgtggaaggaactcgctacctgtcgtagcacatcctttaatgtgcaggatctactcccggatcatgagtacaagttccgcgttcgcgccattaatgtctacggaacaagcgagccctctcaagagtctgaactcaccaccgtgggcgagaagccggaagaacccaaggatgaggtcgaggtaagcgacgacgacgaaaaagagccagaggttgactatcgaacggtgaccatcaacactgaacagaaggtttctgatttctatgatatcgaagaacggttgggtagtggtaagttcgggcaggtatttcgtctggtggagaagaagacacggaaagtgtgggccgggaagtttttcaaggcctacagcgcaaaggaaaaagagaatatcagacaggagatatccataatgaactgtctgcaccatccgaaattggtacagtgcgtcgatgctttcgaggaaaaagctaatatcgtgatggtcctcgagattgtaagtggcggggagttattcgaacggataattgacgaagacttcgagcttaccgagagagagtgcatcaagtatatgcggcaaattagcgaaggcgttgaatatatccataagcagggcatcgtccacctggaccttaaaccagaaaacatcatgtgtgtaaacaagactgggactcgtattaagctgatcgacttcgggctcgctaggcgcctggagaacgctggctcactaaaagtgcttttcgggacgcctgagtttgtggctcctgaggtcatcaactatgagcccattggatatgccactgacatgtggagtataggcgtgatctgttacatcctggtcagcggcctgagccccttcatgggcgacaatgacaatgagactctcgccaacgtgacctccgcaacatgggacttcgatgatgaggccttcgacgagatcagtgacgatgccaaagatttcatttccaacttattaaagaaagatatgaagaaccgcctcgactgcacccagtgcttgcaacatccgtggctgatgaaggacaccaaaaacatggaagccaaaaagctgtccaaggaccgaatgaaaaagtacatggccaggaggaaatggcagaagactgggaacgccgtgcgtgctataggtcgactgtcttcaatggcaatgatctctggtctatcaggtcgaaagagttccactggaagccctacctcacctctcaacgctgagaagttagaaagcgaagaagatgtaagccaagcattcttggaagcggtggctgaagagaagcctcacgttaaaccatactttagcaagacaatccgagacctcgaggttgtagaaggatcggctgcacggtttgactgtaagattgagggataccctgacccggaggtcgtttggtttaaggatgaccagtcaatccgggagagccgtcacttccagatcgactacgatgaagacggcaattgcagcctgattatcagcgacgtgtgcggagacgatgacgcgaaatacacatgcaaggctgttaatagcctgggcgaggcaacctgcaccgcagagctgatcgttgagacaatggaggagggagagggcgagggtgaagaggaagaagagtag

SEQ ID NO: 230125 - DNA, 7834 bp, Artificial Sequence
  derived and/or modified sequence
ggcgctgagcgagctcggagcccgcgctgtgcgcctgcggccggggcgccccgccgagcgccggtgccccggctcccgggccgccttcgccgcgcgggaaggattcttcaaaattaacagaaaccaattcgggccagctgaagagaaaaaataaaggtggctcccggctgcctctgctgcagttcagagcaacttcaggagcttcccagccgagagcttcaggacgcctttcctgtcccactggcccagttgccacaacaaacaacagagaagacggtgaccatgggggatgtgaagctggttgcctcgtcacacatttccaaaacctccctcagtgtggatccctcaagagttgactccatgcccctgacagaggcccctgctttcattttgccccctcggaacctctgcatcaaagaaggagccaccgccaagttcgaagggcgggtccggggttacccagagccccaggtgacatggcacagaaacgggcaacccatcaccagcgggggccgcttcctgctggattgcggcatccgggggactttcagccttgtgattcatgctgtccatgaggaggacaggggaaagtatacctgtgaagccaccaatggcagtggtgctcgccaggtgacagtggagttgacagtagaaggaagttttgcgaagcagcttggtcagcctgttgtttccaaaaccttaggggatagattttcagctccagcagtggagacccgtcctagcatctggggggagtgcccaccaaagtttgctaccaagctgggccgagttgtggtcaaagaaggacagatgggacgattctcctgcaagatcactggccggccccaaccgcaggtcacctggctcaagggaaatgttccactgcagccgagtgcccgtgtgtctgtgtctgagaagaacggcatgcaggttctggaaatccatggagtcaaccaagatgacgtgggagtgtacacgtgcctggtggtgaacgggtcggggaaggcctcgatgtcagctgaactttccatccaaggtttggacagtgccaataggtcatttgtgagagaaacaaaagccaccaattcagatgtcaggaaagaggtgaccaatgtaatctcaaaggagtcgaagctggacagtctggaggctgcagccaaaagcaagaactgctccagcccccagagaggtggctccccaccctgggctgcaaacagccagcctcagcccccaagggagtccaagctggagtcatgcaaggactcgcccagaacggccccgcagaccccggtccttcagaagacttccagctccatcaccctgcaggccgcaagagttcagccggaaccaagagcaccaggcctgggggtcctatcaccttctggagaagagaggaagaggccagctcctccccgtccagccaccttccccaccaggcagcctggcctggggagccaagatgttgtgagcaaggctgctaacaggagaatccccatggagggccagagggattcagcattccccaaatttgagagcaagccccaaagccaggaggtcaaggaaaatcaaactgtcaagttcagatgtgaagtttccgggattccaaagcctgaagtggcctggttcctggaaggcacccccgtgaggagacaggaaggcagcattgaggtttatgaagatgctggctcccattacctctgcctgctgaaagcccggaccagggacagtgggacatacagctgcactgcttccaacgcccaaggccagctgtcctgtagctggaccctccaagtggaaaggcttgccgtgatggaggtggccccctccttctccagtgtcctgaaggactgcgctgttattgagggccaggattttgtgctgcagtgctccgtacgggggaccccagtgccccggatcacttggctgctgaatgggcagcccatccagtacgctcgctccacctgcgaggccggcgtggctgagctccacatccaggatgccctgccggaggaccatggcacctacacctgcctagctgagaatgccttggggcaggtgtcctgcagcgcctgggtcaccgtccatgaaaagaagagtagcaggaagagtgagtaccttctgcctgtggctcccagcaagcccactgcacccatcttcctgcagggcctctctgatctcaaagtcatggatggaagccaggtcactatgactgtccaagtgtcagggaatccaccccctgaagtcatctggctgcacaatgggaatgagatccaagagtcagaggacttccactttgaacagagaggaactcagcacagcctttgtatccaggaagtgttcccggaggacacgggcacgtacacctgcgaggcctggaacagcgctggagaggtccgcacccaggccgtgctcacggtacaagagcctcacgatggcacccagccctggttcatcagtaagcctcgctcagtgacagcctccctgggccagagtgtcctcatctcctgcgccatagctggtgacccctttcctaccgtgcactggctcagagatggcaaagccctctgcaaagacactggccacttcgaggtgcttcagaatgaggacgtgttcaccctggttctaaagaaggtgcagccctggcatgccggccagtatgagatcctgctcaagaaccgggttggcgaatgcagttgccaggtgtcactgatgctacagaacagctctgccagagcccttccacgggggagggagcctgccagctgcgaggacctctgtggtggaggagttggtgctgatggtggtggtagtgaccgctatgggtccctgaggcctggctggccagcaagagggcagggttggctagaggaggaagacggcgaggacgtgcgaggggtgctgaagaggcgcgtggagacgaggcagcacactgaggaggcgatccgccagcaggaggtggagcagctggacttccgagacctcctggggaagaaggtgagtacaaagaccctatcggaagacgacctgaaggagatcccagccgagcagatggatttccgtgccaacctgcagcggcaagtgaagccaaagactgtgtctgaggaagagaggaaggtgcacagcccccagcaggtcgattttcgctctgtcctggccaagaaggggacttccaagacccccgtgcctgagaaggtgccaccgccaaaacctgccaccccggattttcgctcagtgctgggtggcaagaagaaattaccagcagagaatggcagcagcagtgccgagaccctgaatgccaaggcagtggagagttccaagcccctgagcaatgcacagccttcagggcccttgaaacccgtgggcaacgccaagcctgctgagaccctgaagccaatgggcaacgccaagcctgccgagaccctgaagcccatgggcaatgccaagcctgatgagaacctgaaatccgctagcaaagaagaactcaagaaagacgttaagaatgatgtgaactgcaagagaggccatgcagggaccacagataatgaaaagagatcagagagccaggggacagccccagccttcaagcagaagctgcaagatgttcatgtggcagagggcaagaagctgctgctccagtgccaggtgtcttctgaccccccagccaccatcatctggacgctgaacggaaagaccctcaagaccaccaagttcatcatcctctcccaggaaggctcactctgctccgtctccatcgagaaggcactgcctgaggacagaggcttatacaagtgtgtagccaagaatgacgctggccaggcggagtgctcctgccaagtcaccgtggatgatgctccagccagtgagaacaccaaggccccagagatgaaatcccggaggcccaagagctctcttcctcccgtgctaggaactgagagtgatgcgactgtgaaaaagaaacctgcccccaagacacctccgaaggcagcaatgccccctcagatcatccagttccctgaggaccagaaggtacgcgcaggagagtcagtggagctgtttggcaaagtgacaggcactcagcccatcacctgtacctggatgaagttccgaaagcagatccaggaaagcgagcacatgaaggtggagaacagcgagaatggcagcaagctcaccatcctggccgcgcgccaggagcactgcggctgctacacactgctggtggagaacaagctgggcagcaggcaggcccaggtcaacctcactgtcgtggataagccagaccccccagctggcacaccttgtgcctctgacattcggagctcctcactgaccctgtcctggtatggctcctcatatgatgggggcagtgctgtacagtcctacagcatcgagatctgggactcagccaacaagacgtggaaggaactagccacatgccgcagcacctctttcaacgtccaggacctgctgcctgaccacgaatataagttccgtgtacgtgcaatcaacgtgtatggaaccagtgagccaagccaggagtctgaactcacaacggtaggagagaaacctgaagagccgaaggatgaagtggaggtgtcagatgatgatgagaaggagcccgaggttgattaccggacagtgacaatcaatactgaacaaaaagtatctgacttctacgacattgaggagagattaggatctgggaaatttggacaggtctttcgacttgtagaaaagaaaactcgaaaagtctgggcagggaagttcttcaaggcatattcagcaaaagagaaagagaatatccggcaggagattagcatcatgaactgcctccaccaccctaagctggtccagtgtgtggatgcctttgaagaaaaggccaacatcgtcatggtcctggagatcgtgtcaggaggggagctgtttgagcgcatcattgacgaggactttgagctgacggagcgtgagtgcatcaagtacatgcggcagatctcggagggagtggagtacatccacaagcagggcatcgtgcacctggacctcaagccggagaacatcatgtgtgtcaacaagacgggcaccaggatcaagctcatcgactttggtctggccaggaggctggagaatgcggggtctctgaaggtcctctttggcaccccagaatttgtggctcctgaagtgatcaactatgagcccatcggctacgccacagacatgtggagcatcggggtcatctgctacatcctagtcagtggcctttcccccttcatgggagacaacgataacgaaaccttggccaacgttacctcagccacctgggacttcgacgacgaggcattcgatgagatctccgacgatgccaaggatttcatcagcaatctgctgaagaaagatatgaaaaaccgcctggactgcacgcagtgccttcagcatccatggctaatgaaagataccaagaacatggaggccaagaaactctccaaggaccggatgaagaagtacatggcaagaaggaaatggcagaaaacgggcaatgctgtgagagccattggaagactgtcctctatggcaatgatctcagggctcagtggcaggaaatcctcaacagggtcaccaaccagcccgctcaatgcagaaaaactagaatctgaagaagatgtgtcccaagctttccttgaggctgttgctgaggaaaagcctcatgtaaaaccctatttctctaagaccattcgcgatttagaagttgtggagggaagtgctgctagatttgactgcaagattgaaggatacccagaccccgaggttgtctggttcaaagatgaccagtcaatcagggagtcccgccacttccagatagactacgatgaggacgggaactgctctttaattattagtgatgtttgcggggatgacgatgccaagtacacctgcaaggctgtcaacagtcttggagaagccacctgcacagcagagctcattgtggaaacgatggaggaaggtgaaggggaaggggaagaggaagaagagtgaaacaaagccagagaaaagcagtttctaagtcatattaaaaggactatttctctaaaactcaaaaaaaaaaaaaaaactcaagatagtaaaagcacctagtgtgatagattatcggttaggtcatttgtgggttgattcttcagaaacagcagttgatacctagcagcgttattgatgggcattaatctatgttagttggcaccttaagatactagtgcagctagatttcatttagggaaatcaccagtaacttgactgaccaattgattttagagagaaagtaaccaaaccaaatatttatctgggcaaagtcataaattctccacttgaatgcgctcatgaaaaataaggccaaaacaagagttctgggccacagctcagcccagagggttcctggggatgggaggcctctctctccccaccccctgactctagagaactgggttttctcccagtactccagcaattcatttctgaaagcagttgagccactttattccaaagtacactgcagatgttcaaactctccatttctctttccccttccacctgccagttttgctgactctcaacttgtcatgagtgtaagcattaaggacattatgcttcttcgattctgaagacaggtccctgctcatggatgactctggcttccttaggaaaatatttttcttccaaaatcagtaggaaatctaaacttatcccctctttgcagatgtctagcagcttcagacatttggttaagaacccatgggaaaaaaaaaatccttgctaatgtggtttcctttgtaaaccaggattcttatttgtgctgttatagaatatcagctctgaacgtgtggtaaagatttttgtgtttgaatataggagaaatcagtttgctgaaaagttagtcttaattatctattggccacgatgaaacagatttcaactgataaagagctggagaactccatgtactttggaatctcctccaagatagccagagtttaatacatcttcattctcaacactctccaaagaacttgacctaccttatgggttccatatttttcttcttaaatgtgcatcaatcatgccttgcccccaacctttaaatatattcttagacctggtaaatgcactcagacttgcgtctttaggaatttttaactttctttcactacattggcacttaaattttttctttataaagctttttgaaggtcataaacaaagaccataattgatgatagacctaatacatttcctctgtgtgtgtgtgtaacattccaaatactttttttttcttttccactgtttgtaaggtgcaacaatttaatatttttaagggactttttaagagttccttaagaaccaatttaaaattacttcagtgcaatcctacacagtatcaacattagaattttgatattagtcttatgttatcttccattctatttttatctgctttttgctgctagtttcaaactgccagtatttttccttttgcttttaaaatagttacaatatttttcatgatagccacagtattgccacagtttattataataaagggtttttatttgatttagcgcattcaaagcttttttctatcacttttgtgttcagaatataacctttgtgtgcgtgtatgttgtgtgtgtgcatgtgtggcgtatatgtgtgttacaggttaatgccttcttggaattgtgttaatgttctcttggtttattatgccatcagaatggtaaatgagaacactacaactgtagtcagctcacaatttttaaataaaggataccacagtgcatgctgtttgttc

SEQ ID NO: 230126 - DNA, 5745 bp, Artificial Sequence
  derived and/or modified sequence
atgggggatgtgaagctggttgcctcgtcacacatttccaaaacctccctcagtgtggatccctcaagagttgactccatgcccctgacagaggcccctgctttcattttgccccctcggaacctctgcatcaaagaaggagccaccgccaagttcgaagggcgggtccggggttacccagagccccaggtgacatggcacagaaacgggcaacccatcaccagcgggggccgcttcctgctggattgcggcatccgggggactttcagccttgtgattcatgctgtccatgaggaggacaggggaaagtatacctgtgaagccaccaatggcagtggtgctcgccaggtgacagtggagttgacagtagaaggaagttttgcgaagcagcttggtcagcctgttgtttccaaaaccttaggggatagattttcagctccagcagtggagacccgtcctagcatctggggggagtgcccaccaaagtttgctaccaagctgggccgagttgtggtcaaagaaggacagatgggacgattctcctgcaagatcactggccggccccaaccgcaggtcacctggctcaagggaaatgttccactgcagccgagtgcccgtgtgtctgtgtctgagaagaacggcatgcaggttctggaaatccatggagtcaaccaagatgacgtgggagtgtacacgtgcctggtggtgaacgggtcggggaaggcctcgatgtcagctgaactttccatccaaggtttggacagtgccaataggtcatttgtgagagaaacaaaagccaccaattcagatgtcaggaaagaggtgaccaatgtaatctcaaaggagtcgaagctggacagtctggaggctgcagccaaaagcaagaactgctccagcccccagagaggtggctccccaccctgggctgcaaacagccagcctcagcccccaagggagtccaagctggagtcatgcaaggactcgcccagaacggccccgcagaccccggtccttcagaagacttccagctccatcaccctgcaggccgcaagagttcagccggaaccaagagcaccaggcctgggggtcctatcaccttctggagaagagaggaagaggccagctcctccccgtccagccaccttccccaccaggcagcctggcctggggagccaagatgttgtgagcaaggctgctaacaggagaatccccatggagggccagagggattcagcattccccaaatttgagagcaagccccaaagccaggaggtcaaggaaaatcaaactgtcaagttcagatgtgaagtttccgggattccaaagcctgaagtggcctggttcctggaaggcacccccgtgaggagacaggaaggcagcattgaggtttatgaagatgctggctcccattacctctgcctgctgaaagcccggaccagggacagtgggacatacagctgcactgcttccaacgcccaaggccagctgtcctgtagctggaccctccaagtggaaaggcttgccgtgatggaggtggccccctccttctccagtgtcctgaaggactgcgctgttattgagggccaggattttgtgctgcagtgctccgtacgggggaccccagtgccccggatcacttggctgctgaatgggcagcccatccagtacgctcgctccacctgcgaggccggcgtggctgagctccacatccaggatgccctgccggaggaccatggcacctacacctgcctagctgagaatgccttggggcaggtgtcctgcagcgcctgggtcaccgtccatgaaaagaagagtagcaggaagagtgagtaccttctgcctgtggctcccagcaagcccactgcacccatcttcctgcagggcctctctgatctcaaagtcatggatggaagccaggtcactatgactgtccaagtgtcagggaatccaccccctgaagtcatctggctgcacaatgggaatgagatccaagagtcagaggacttccactttgaacagagaggaactcagcacagcctttgtatccaggaagtgttcccggaggacacgggcacgtacacctgcgaggcctggaacagcgctggagaggtccgcacccaggccgtgctcacggtacaagagcctcacgatggcacccagccctggttcatcagtaagcctcgctcagtgacagcctccctgggccagagtgtcctcatctcctgcgccatagctggtgacccctttcctaccgtgcactggctcagagatggcaaagccctctgcaaagacactggccacttcgaggtgcttcagaatgaggacgtgttcaccctggttctaaagaaggtgcagccctggcatgccggccagtatgagatcctgctcaagaaccgggttggcgaatgcagttgccaggtgtcactgatgctacagaacagctctgccagagcccttccacgggggagggagcctgccagctgcgaggacctctgtggtggaggagttggtgctgatggtggtggtagtgaccgctatgggtccctgaggcctggctggccagcaagagggcagggttggctagaggaggaagacggcgaggacgtgcgaggggtgctgaagaggcgcgtggagacgaggcagcacactgaggaggcgatccgccagcaggaggtggagcagctggacttccgagacctcctggggaagaaggtgagtacaaagaccctatcggaagacgacctgaaggagatcccagccgagcagatggatttccgtgccaacctgcagcggcaagtgaagccaaagactgtgtctgaggaagagaggaaggtgcacagcccccagcaggtcgattttcgctctgtcctggccaagaaggggacttccaagacccccgtgcctgagaaggtgccaccgccaaaacctgccaccccggattttcgctcagtgctgggtggcaagaagaaattaccagcagagaatggcagcagcagtgccgagaccctgaatgccaaggcagtggagagttccaagcccctgagcaatgcacagccttcagggcccttgaaacccgtgggcaacgccaagcctgctgagaccctgaagccaatgggcaacgccaagcctgccgagaccctgaagcccatgggcaatgccaagcctgatgagaacctgaaatccgctagcaaagaagaactcaagaaagacgttaagaatgatgtgaactgcaagagaggccatgcagggaccacagataatgaaaagagatcagagagccaggggacagccccagccttcaagcagaagctgcaagatgttcatgtggcagagggcaagaagctgctgctccagtgccaggtgtcttctgaccccccagccaccatcatctggacgctgaacggaaagaccctcaagaccaccaagttcatcatcctctcccaggaaggctcactctgctccgtctccatcgagaaggcactgcctgaggacagaggcttatacaagtgtgtagccaagaatgacgctggccaggcggagtgctcctgccaagtcaccgtggatgatgctccagccagtgagaacaccaaggccccagagatgaaatcccggaggcccaagagctctcttcctcccgtgctaggaactgagagtgatgcgactgtgaaaaagaaacctgcccccaagacacctccgaaggcagcaatgccccctcagatcatccagttccctgaggaccagaaggtacgcgcaggagagtcagtggagctgtttggcaaagtgacaggcactcagcccatcacctgtacctggatgaagttccgaaagcagatccaggaaagcgagcacatgaaggtggagaacagcgagaatggcagcaagctcaccatcctggccgcgcgccaggagcactgcggctgctacacactgctggtggagaacaagctgggcagcaggcaggcccaggtcaacctcactgtcgtggataagccagaccccccagctggcacaccttgtgcctctgacattcggagctcctcactgaccctgtcctggtatggctcctcatatgatgggggcagtgctgtacagtcctacagcatcgagatctgggactcagccaacaagacgtggaaggaactagccacatgccgcagcacctctttcaacgtccaggacctgctgcctgaccacgaatataagttccgtgtacgtgcaatcaacgtgtatggaaccagtgagccaagccaggagtctgaactcacaacggtaggagagaaacctgaagagccgaaggatgaagtggaggtgtcagatgatgatgagaaggagcccgaggttgattaccggacagtgacaatcaatactgaacaaaaagtatctgacttctacgacattgaggagagattaggatctgggaaatttggacaggtctttcgacttgtagaaaagaaaactcgaaaagtctgggcagggaagttcttcaaggcatattcagcaaaagagaaagagaatatccggcaggagattagcatcatgaactgcctccaccaccctaagctggtccagtgtgtggatgcctttgaagaaaaggccaacatcgtcatggtcctggagatcgtgtcaggaggggagctgtttgagcgcatcattgacgaggactttgagctgacggagcgtgagtgcatcaagtacatgcggcagatctcggagggagtggagtacatccacaagcagggcatcgtgcacctggacctcaagccggagaacatcatgtgtgtcaacaagacgggcaccaggatcaagctcatcgactttggtctggccaggaggctggagaatgcggggtctctgaaggtcctctttggcaccccagaatttgtggctcctgaagtgatcaactatgagcccatcggctacgccacagacatgtggagcatcggggtcatctgctacatcctagtcagtggcctttcccccttcatgggagacaacgataacgaaaccttggccaacgttacctcagccacctgggacttcgacgacgaggcattcgatgagatctccgacgatgccaaggatttcatcagcaatctgctgaagaaagatatgaaaaaccgcctggactgcacgcagtgccttcagcatccatggctaatgaaagataccaagaacatggaggccaagaaactctccaaggaccggatgaagaagtacatggcaagaaggaaatggcagaaaacgggcaatgctgtgagagccattggaagactgtcctctatggcaatgatctcagggctcagtggcaggaaatcctcaacagggtcaccaaccagcccgctcaatgcagaaaaactagaatctgaagaagatgtgtcccaagctttccttgaggctgttgctgaggaaaagcctcatgtaaaaccctatttctctaagaccattcgcgatttagaagttgtggagggaagtgctgctagatttgactgcaagattgaaggatacccagaccccgaggttgtctggttcaaagatgaccagtcaatcagggagtcccgccacttccagatagactacgatgaggacgggaactgctctttaattattagtgatgtttgcggggatgacgatgccaagtacacctgcaaggctgtcaacagtcttggagaagccacctgcacagcagagctcattgtggaaacgatggaggaaggtgaaggggaaggggaagaggaagaagagtga

SEQ ID NO: 230127 - DNA, 5744 bp, Artificial Sequence
  derived and/or modified sequence
atgggggacgtcaagctggtggcaagctcccatatctccaaaacctcgttgagcgtggatcctagccgggtggactcaatgccccttaccgaggcgcctgcctttatactaccaccaaggaatctctgcatcaaggagggtgctacggctaaattcgaaggtcgggtcagaggttatccggagccgcaggtaacctggcaccgaaacggacaaccaataacaagtggaggtaggtttctcttggattgtggcatacggggaacattcagtctggtaattcacgctgtccacgaggaggaccgaggaaagtacacctgcgaggctacaaacggcagtggtgccaggcaggttaccgttgagctgactgtggaaggaagctttgctaagcagctgggccaacctgttgtgtccaagacactgggcgatcggttttctgcgcctgcggttgagacccggccttccatctggggcgagtgccctcctaaattcgcaaccaagcttggacgggtggtggtcaaagaagggcaaatggggagattttcatgtaagatcaccggcaggccacagcctcaggtgacatggttaaagggaaatgttcccctccagccgtccgccagagtgtcagtttcagaaaagaacggcatgcaggtactcgagattcacggggtaaatcaagacgacgtgggggtgtacacatgtctggtggtgaacggaagtggaaaggcctctatgagcgccgaactgtccatccagggactagactccgctaatcgatctttcgtaagggagaccaaagcaaccaatagcgacgttcgtaaggaggtaacaaacgtcattagcaaggagagcaaacttgacagcctcgaggctgccgctaaatctaaaaattgctcatcaccccagcgtgggggaagccccccttgggcggcaaactcgcagcctcagccccctcgcgagtccaaactagaatcctgtaaggacagtccacgcaccgctcctcagacaccagttctgcaaaagacttcatccagcatcacgctacaggccgctagggtgcaaccagagcccagagcgccaggattgggggttctatccccaagcggtgaggaacgtaaaaggcccgctcctcccagacccgcaacttttcccacgaggcagcccggtcttggaagccaagacgtagtctctaaggctgccaatcggagaatccccatggaggggcaacgagatagtgcattccctaagttcgagtcaaaaccccagtctcaggaggtcaaagaaaaccagactgttaagttccggtgcgaggtgtcaggtattcccaagcctgaagtggcttggttccttgaagggacccccgttcggaggcaggaaggatcaatcgaggtatatgaagacgctgggagtcactacttgtgtctcctgaaggcccgaacaagggattctgggacctatagctgtaccgctagtaacgcgcaaggccaactctcatgtagctggacattgcaggtagagcgtctggcagtcatggaggtggcgccaagtttttctagtgtcctcaaggattgcgcagtcatcgaagggcaggatttcgtcctccagtgtagtgtaaggggcacgccagtacctagaattacttggctgctcaatggacagccaatccagtacgcacggtctacttgtgaggctggggtggcggagcttcacattcaggatgctctgcccgaagatcacggcacctacacctgcttggccgagaacgccctgggtcaggtgtcttgctccgcctgggtgactgtccacgagaagaagtcaagtcgtaaatcagagtacttgttacccgtcgctcccagtaagcctacagcccctattttcttgcagggattgtctgatcttaaggtcatggacgggtcccaggtaaccatgactgtgcaggtctccggtaacccccctccagaggttatctggttgcataatgggaacgagattcaggagagcgaggatttccactttgagcagcgcggtacccagcattccctgtgtattcaggaggtgttccctgaagacaccggcacttatacgtgcgaagcatggaatagcgcgggtgaggtacggacccaggcagttctcacagtccaggagcctcacgacggcacccaaccctggtttatctccaagccacggagtgtgacagcctcgctgggacagagcgttctgattagctgcgcaatcgccggagaccccttcccaactgttcactggttgcgcgatggaaaagcactgtgcaaagatacgggtcatttcgaagtcctgcaaaacgaagacgtgttcacgctggtactcaaaaaagttcagccttggcacgctgggcagtacgagattctgctgaagaaccgagtcggcgaatgctcttgtcaggtgtctttgatgcttcaaaactcatccgcacgtgcactccctcgcggacgtgagcctgccagttgcgaggacttgtgtgggggtggtgtgggggcagatggcggtgggtccgataggtatggttcactcaggcccggttggcccgctcgaggacagggatggttggaagaggaggacggggaggacgtacgaggcgtgctgaagcggagggtagaaaccaggcagcacactgaggaagccatccggcaacaggaagtcgagcagcttgactttcgcgacctcttgggcaagaaggtgagcactaagacactttctgaggatgacctgaaggagataccggcagaacagatggatttcagggcgaatcttcaaaggcaagtcaagcctaaaacggtgtccgaggaagaacgcaaggtgcattcacctcagcaggtggattttcggagcgtcttggcaaagaaagggactagtaagacacctgtacccgaaaaagtgccacctcctaagcccgcaactccggatttccggagtgtcctcgggggtaaaaaaaagctgcctgcggagaacgggtcgagtagtgccgagaccttaaatgcaaaggccgtggaaagctctaaaccactcagcaatgcgcagcccagtgggccactgaagcctgttggaaatgcgaagccagctgaaaccctcaagccgatggggaatgccaagcccgctgaaactctaaagcctatggggaacgcgaagcctgacgaaaatctgaagagcgcctctaaggaagaattgaagaaggacgttaagaatgacgtgaattgtaagcggggacatgccggtacgacggacaatgaaaaacggagcgagtcccagggaactgccccagccttcaagcagaagctgcaggatgtccatgtagccgagggcaagaagctccttttgcagtgccaagtatcctccgacccgcctgccaccattatctggacgctcaatggaaaaactttgaaaacaaccaagtttatcatcttgagccaggagggctcgctgtgcagtgtgtccatcgaaaaggcccttccagaagaccggggtttatataaatgcgtggcaaaaaacgacgccggtcaggctgaatgttcgtgccaagtcacagtcgacgatgccccagcatccgagaacactaaggcccctgagatgaagagtaggcgccctaaaagcagcctgcccccagtgttagggactgagagtgacgccacagtgaagaagaagcctgcacccaagactcctcctaaggcagccatgcctcctcagatcatacagtttccggaggaccagaaagttcgcgctggggagtctgtcgagctgttcggtaaggtaaccggcacccagcctatcacttgcacctggatgaagtttaggaaacagatacaggaatcggagcatatgaaagttgagaattcagaaaacggctctaagctaaccatcctggcagccagacaagagcactgcggctgttacactctcctggtggaaaataaacttggctcgcgacaggcccaggtgaacctaacagttgtggataagcctgacccccctgcaggaactccatgcgcgagcgatatccgaagcagctccctcactctgagttggtacggttcttcctatgacgggggatcagctgtccagagttattccatcgagatctgggactcagcaaacaagacttggaaagagctcgccacttgccggagtacttcttttaatgtgcaggacctgcttccagaccacgagtacaagttcagagttagagccatcaacgtgtatggaacaagcgaaccctcacaagagagcgagctcacaaccgtgggcgaaaagcccgaggagccaaaagacgaagtcgaggtgtccgatgacgatgaaaaagagccggaggtagattatcggacggtcacgattaatacagaacagaaagtgtcagacttttatgacatagaagaacgattaggctcagggaagttcggccaggtctttaggctagttgaaaaaaagacccggaaggtctgggccggtaagtttttcaaggcgtatagcgcaaaggaaaaagagaacatcaggcaggagataagtattatgaattgcctccaccaccccaagctcgtgcagtgcgtggatgcattcgaggaaaaggctaacatcgtgatggtccttgagattgtatccggcggtgagctctttgagagaatcatagatgaagatttcgaactaacggaaagggagtgtatcaagtatatgagacagatcagcgaaggagtggaatacatccacaagcaggggatcgtgcatctggacctgaaaccggagaatataatgtgtgtgaacaagaccgggacaaggatcaaactgatcgacttcggcctggccaggcggctggaaaacgccggaagtctgaaggtgttattcggaactcccgaatttgttgcacctgaagtgattaattatgagcctatcgggtacgctacagacatgtggagcatcggtgttatctgctatatccttgtttcgggacttagtccattcatgggggataatgataatgagactctcgctaacgttacgtcagcgacctgggatttcgatgacgaagcgtttgacgaaatcagtgatgatgctaaagacttcataagtaatctgctgaagaaagatatgaagaatcgcctggattgcacgcagtgtttacaacacccgtggctcatgaaggatactaagaatatggaagcaaagaagctgtcgaaagatcgcatgaaaaaatatatggccaggagaaagtggcagaaaactggtaatgccgtgagagctatcggacggttgagtagcatggctatgattagtggactcagcggacgcaaaagctcgaccggaagtcccacttcacctttaaacgcggagaaactggagtcggaagaggacgtgtcccaagctttcctggaggcagttgctgaggaaaagccacatgttaagccctacttctcgaagactatccgagatctggaggtggttgagggctccgcggcaagatttgactgcaagatagagggataccccgacccggaggtggtttggttcaaggatgatcagtccattcgggagtctcgacactttcaaatcgattacgatgaggacggaaactgttccttgatcataagtgacgtgtgtggggacgacgacgcgaaatacacttgtaaggcggtgaattcgcttggtgaggccacctgtactgctgagctcattgtggaaacaatggaggagggcgagggagaaggtgaggaagaagaggagta

SEQ ID NO: 230128 - DNA, 5744 bp, Artificial Sequence
  derived and/or modified sequence
atgggcgacgttaaactcgtggcaagctcgcacatttcgaagacgtcattgtcagtagatcctagccgggtagacagtatgcctctcactgaagccccagcattcatactccccccacgcaacctctgcatcaaggagggcgctactgctaagttcgaaggtagggtgaggggataccctgaaccccaggtgacttggcatagaaatggacagcctattacttcgggtgggcgtttcttactggattgtggcatacggggaacctttagcttagtaattcacgccgtccatgaggaagacagaggcaagtatacttgcgaggccacaaacggaagtggggctcgccaggttaccgtggagcttacagtggagggctcatttgccaagcagctcgggcagccagtcgtgagcaaaacgcttggggataggttcagtgctccagcagtggaaacaagaccttcgatctggggtgagtgcccccctaagtttgctaccaaattgggtagggtggtcgtgaaggaaggtcaaatgggcagattttcctgcaaaataaccgggagacctcaacctcaggtcacatggcttaaggggaatgttcctctgcagcccagtgcacgcgtttccgtatctgagaagaatggcatgcaggtgctcgaaatacacggggttaaccaagacgacgtgggtgtctacacatgcctggtggtcaacggcagcggaaaggcctctatgtccgcagagctgagtattcagggactggactccgcgaaccgttcgtttgtgcgggaaacgaaggcgaccaatagcgatgtcagaaaagaagtaaccaacgtcatatccaaggagagcaagctggattcactggaggctgcagccaagagtaagaactgttcaagcccacagagaggcggttctccaccttgggccgcaaatagccaaccgcagccacccagagaaagtaagctggaatcttgcaaagattctcctaggaccgctccgcagacgccagtactccaaaaaacatcttcatccatcaccttgcaagccgctcgggtacagcctgaaccacgggcacccggactgggagttttatccccgagcggtgaggagcgtaagcgcccagccccacctcgccctgcaacgtttcccacacgacagccaggtctgggctcccaggacgtggtgagtaaggcagccaataggaggatcccaatggagggtcaacgtgacagtgccttccctaagttcgagagcaaaccccagagccaggaagtgaaagaaaatcagaccgtcaagttccgatgtgaagtctcagggattcctaagcccgaagtcgcttggttcttggagggtacccctgtgcggagacaggagggatctatagaagtttatgaagacgccggttcccactacctctgtctcctaaaggctagaacaagggactccggcacatacagttgtacagcgagtaatgctcagggccaactttcttgtagctggacgctgcaggtcgaaaggttggcggtaatggaagtcgccccttcattctcaagcgttttgaaggactgtgcagttatcgagggccaggattttgtcttacagtgctccgtgcgcggtacaccagtgcccagaattacatggttactgaatgggcagcctatccaatatgctcggagcacttgtgaggccggtgtggccgaactgcacatacaggatgcactgccagaagaccacggtacctacacttgtctggccgaaaacgcactggggcaagtgtcatgttcagcttgggtcaccgtgcacgaaaaaaaatcctctcgcaagagcgagtaccttctccccgtcgcaccctccaaacccaccgccccaatttttctgcagggcctgtcagatctaaaagttatggacggctcccaggttacaatgactgtgcaggtgtcaggcaacccacccccagaagtcatatggctccataatggcaatgaaattcaagagtctgaggatttccatttcgagcagcggggtactcagcacagcctatgcattcaggaagtgttcccggaggacaccggtacctatacttgcgaagcgtggaactcggcgggagaggtccggacgcaggcggtcctgacagtgcaggagcctcacgacggtactcagccttggttcatctctaaacctcgtagcgttaccgcatcacttgggcaaagtgttctcattagctgcgcaatcgctggcgaccccttccccaccgtgcactggctacgtgacgggaaggccctttgtaaggacacaggtcatttcgaagttcttcagaatgaagatgtgttcactctcgttctcaaaaaggtccagccctggcacgcaggacaatatgaaattctactgaagaatcgcgtgggagaatgcagctgccaagtctctctgatgctacagaactctagtgctagagcactgccgcgaggacgcgaacctgcctcctgtgaggacctctgcggagggggtgtaggggcagacggaggtggaagtgaccggtatggaagtctgagacccggatggcctgcccgagggcagggttggctagaggaggaagatggagaggacgtacggggtgtactaaaaagaagagtggagacaagacagcacaccgaagaagccattcgtcagcaagaggtcgagcagctcgactttagagatctgctgggtaagaaggtttccacgaaaacgctgagtgaagacgatctgaaggagatccccgctgagcagatggactttcgcgcaaatctccaacgacaagtgaaacctaaaacagtatctgaggaggagcgcaaggtgcacagccctcagcaggtggactttcggtccgtgctcgccaagaaagggaccagcaaaactcctgtgccggagaaagtgccacctccaaagcctgccacaccagatttcaggtccgtgttagggggaaagaaaaagttgcctgctgaaaatggaagttcaagcgctgagaccctaaatgcgaaggctgtggaaagctctaagccgttgtctaatgctcagcccagtggcccacttaagcccgttggaaacgcgaagcccgctgaaaccctgaagcctatgggaaatgctaaaccagctgagacccttaaacctatgggtaatgcaaaaccagatgaaaatctcaagtcagcttccaaagaagaactaaagaaggatgtaaagaatgacgtgaattgcaagagaggtcatgcagggacaacagataatgagaagagaagcgagtcccaagggacagccccagcctttaagcagaaactccaagatgtgcacgtggcggagggcaaaaaactcttgctgcaatgtcaggtgtcaagtgatccccctgcaaccatcatctggaccctgaacgggaagaccttgaagacaacgaaatttattattctgtctcaggaaggatccctgtgcagcgtatccattgagaaagcattgccagaagacaggggtttatataaatgcgtggccaagaatgatgcgggacaggcggaatgcagctgccaggtcactgtagacgatgcacccgcaagcgagaacacgaaagcgcctgagatgaagagcagaagacctaagtcctccttgccccctgtactgggcacagagagcgatgcgacggtgaagaagaagcctgccccaaaaactcctcctaaggctgctatgcctccacagattattcagttccccgaagaccagaaggttagagccggagaaagtgtggagttgttcggaaaagtcacaggcacccagcccatcacctgtacatggatgaagtttcgaaagcagatccaggagtccgaacacatgaaagtggagaattctgagaacgggtccaagctgactattctagccgctcgccaggaacattgtggctgctatacactcttggttgagaataagcttgggtcacgtcaagcccaggtcaacttgaccgttgtcgacaaaccggatccccctgcaggaactccgtgtgctagcgacattagatcgtcgtcattgacactgtcctggtacgggagctcctacgatgggggttcagcagtacagtcttatagcatcgaaatctgggactctgctaacaaaacttggaaggaactggccacctgccgcagtacatccttcaatgttcaagatctgcttcctgaccacgaatacaaattcagggtgcgagctatcaatgtgtatggcacaagcgagccttctcaagagagtgagctgaccactgtaggagaaaaaccagaggagccgaaagacgaggtagaggtgtccgatgatgacgagaaagaaccagaggtggattatcgcacagtgaccattaataccgagcagaaagtgtcagatttttatgacattgaagaaaggctaggatccgggaagttcggccaggtgttccgccttgtggaaaagaagactcggaaggtttgggcagggaagttcttcaaggcctattccgcgaaagagaaagaaaacatccgccaggagatcagcatcatgaactgcctccatcaccctaagctggtgcagtgtgtggacgcctttgaagagaaagccaacattgtgatggtgctcgaaattgtctccggcggagagctgtttgaacgcataatcgacgaagactttgaattgacagagcgcgaatgcatcaaatatatgagacagattagcgagggggtcgagtatatccataaacagggcatagtgcacttggacttgaaaccagagaatatcatgtgcgtgaataagacaggcacaagaattaagctgattgatttcggcctggccaggagactggagaatgccggatcgctaaaagtgctttttggcacacccgaatttgttgcacctgaggtaatcaactatgagccaatagggtatgctaccgatatgtggtccattggtgtcatttgttacattcttgtgtctggactttctccttttatgggagataatgataatgaaaccctcgcaaatgttacaagcgcaacctgggattttgacgacgaggcattcgacgaaatcagtgacgacgccaaagacttcatctctaacctactcaagaaagatatgaagaatcgcctcgactgtactcaatgcctgcagcatccctggctaatgaaagacaccaagaatatggaagccaagaaactctctaaggaccgaatgaagaagtatatggcaaggagaaagtggcagaagactggcaatgccgtgagagctataggacgcctgtcatccatggctatgattagtggcttgtcaggacgaaagtctagtacaggctcaccaacgagcccattgaacgccgaaaagctggagagcgaagaagatgtcagtcaggcctttctggaggccgttgcggaagagaagcctcacgttaaaccgtacttcagcaaaactatccgcgatctggaggtggtggagggaagtgcagcacgctttgactgtaaaattgaggggtatcccgaccccgaggtggtgtggttcaaagacgatcagtctatcagggaatcacgccacttccagatcgattatgatgaggatggtaattgttctctaattatctcagatgtgtgcggggatgatgatgcaaagtatacctgtaaggccgtgaactctctgggggaagcaacatgcactgcggaactgatcgttgaaaccatggaggaaggagaaggagaaggcgaagaggaggaggaata

SEQ ID NO: 230129 - protein, 1845 aa, Artificial Sequence
  derived and/or modified sequence
MGDVKLVASSHISKTSLSVDPSRVDSMPLTEAPAFILPPRNLCIKEGATAKFEGRVRGYPEPQVTWHRNGQPITSGGRFLLDCGIRGTFSLVIHAVHEEDRGKYTCEATNGSGARQVTVELTVEGSFAKQLGQPVVSKTLGDRFSAPAVETRPSIWGECPPKFATKLGRVVVKEGQMGRFSCKITGRPQPQVTWLKGNVPLQPSARVSVSEKNGMQVLEIHGVNQDDVGVYTCLVVNGSGKASMSAELSIQGLDSANRSFVRETKATNSDVRKEVTNVISKESKLDSLEAAAKSKNCSSPQRGGSPPWAANSQPQPPRESKLESCKDSPRTAPQTPVLQKTSSSITLQAARVQPEPRAPGLGVLSPSGEERKRPAPPRPATFPTRQPGLGSQDVVSKAANRRIPMEGQRDSAFPKFESKPQSQEVKENQTVKFRCEGLAVMEVAPSFSSVLKDCAVIEGQDFVLQCSVRGTPVPRITWLLNGQPIQYARSTCEAGVAELHIQDALPEDHGTYTCLAENALGQVSCSAWVTVHEKKSSRKSEYLLPVAPSKPTAPIFLQGLSDLKVMDGSQVTMTVQVSGNPPPEVIWLHNGNEIQESEDFHFEQRGTQHSLCIQEVFPEDTGTYTCEAWNSAGEVRTQAVLTVQEPHDGTQPWFISKPRSVTASLGQSVLISCAIAGDPFPTVHWLRDGKALCKDTGHFEVLQNEDVFTLVLKKVQPWHAGQYEILLKNRVGECSCQVSLMLQNSSARALPRGREPASCEDLCGGGVGADGGGSDRYGSLRPGWPARGQGWLEEEDGEDVRGVLKRRVETRQHTEEAIRQQEVEQLDFRDLLGKKVSTKTLSEDDLKEIPAEQMDFRANLQRQVKPKTVSEEERKVHSPQQVDFRSVLAKKGTSKTPVPEKVPPPKPATPDFRSVLGGKKKLPAENGSSSAETLNAKAVESSKPLSNAQPSGPLKPVGNAKPAETLKPMGNAKPAETLKPMGNAKPDENLKSASKEELKKDVKNDVNCKRGHAGTTDNEKRSESQGTAPAFKQKLQDVHVAEGKKLLLQCQVSSDPPATIIWTLNGKTLKTTKFIILSQEGSLCSVSIEKALPEDRGLYKCVAKNDAGQAECSCQVTVDDAPASENTKAPEMKSRRPKSSLPPVLGTESDATVKKKPAPKTPPKAAMPPQIIQFPEDQKVRAGESVELFGKVTGTQPITCTWMKFRKQIQESEHMKVENSENGSKLTILAARQEHCGCYTLLVENKLGSRQAQVNLTVVDKPDPPAGTPCASDIRSSSLTLSWYGSSYDGGSAVQSYSIEIWDSANKTWKELATCRSTSFNVQDLLPDHEYKFRVRAINVYGTSEPSQESELTTVGEKPEEPKDEVEVSDDDEKEPEVDYRTVTINTEQKVSDFYDIEERLGSGKFGQVFRLVEKKTRKVWAGKFFKAYSAKEKENIRQEISIMNCLHHPKLVQCVDAFEEKANIVMVLEIVSGGELFERIIDEDFELTERECIKYMRQISEGVEYIHKQGIVHLDLKPENIMCVNKTGTRIKLIDFGLARRLENAGSLKVLFGTPEFVAPEVINYEPIGYATDMWSIGVICYILVSGLSPFMGDNDNETLANVTSATWDFDDEAFDEISDDAKDFISNLLKKDMKNRLDCTQCLQHPWLMKDTKNMEAKKLSKDRMKKYMARRKWQKTGNAVRAIGRLSSMAMISGLSGRKSSTGSPTSPLNAEKLESEEDVSQAFLEAVAEEKPHVKPYFSKTIRDLEVVEGSAARFDCKIEGYPDPEVVWFKDDQSIRESRHFQIDYDEDGNCSLIISDVCGDDDAKYTCKAVNSLGEATCTAELIVETMEEGEGEGEEEEE

SEQ ID NO: 230130 - protein, 714 aa, Artificial Sequence
  derived and/or modified sequence
MKSRRPKSSLPPVLGTESDATVKKKPAPKTPPKAAMPPQIIQFPEDQKVRAGESVELFGKVTGTQPITCTWMKFRKQIQESEHMKVENSENGSKLTILAARQEHCGCYTLLVENKLGSRQAQVNLTVVDKPDPPAGTPCASDIRSSSLTLSWYGSSYDGGSAVQSYSIEIWDSANKTWKELATCRSTSFNVQDLLPDHEYKFRVRAINVYGTSEPSQESELTTVGEKPEEPKDEVEVSDDDEKEPEVDYRTVTINTEQKVSDFYDIEERLGSGKFGQVFRLVEKKTRKVWAGKFFKAYSAKEKENIRQEISIMNCLHHPKLVQCVDAFEEKANIVMVLEIVSGGELFERIIDEDFELTERECIKYMRQISEGVEYIHKQGIVHLDLKPENIMCVNKTGTRIKLIDFGLARRLENAGSLKVLFGTPEFVAPEVINYEPIGYATDMWSIGVICYILVSGLSPFMGDNDNETLANVTSATWDFDDEAFDEISDDAKDFISNLLKKDMKNRLDCTQCLQHPWLMKDTKNMEAKKLSKDRMKKYMARRKWQKTGNAVRAIGRLSSMAMISGLSGRKSSTGSPTSPLNAEKLESEEDVSQAFLEAVAEEKPHVKPYFSKTIRDLEVVEGSAARFDCKIEGYPDPEVVWFKDDQSIRESRHFQIDYDEDGNCSLIISDVCGDDDAKYTCKAVNSLGEATCTAELIVETMEEGEGEGEEEEE

SEQ ID NO: 230131 - protein, 76 aa, Artificial Sequence
  derived and/or modified sequence
MGDVKLVASSHISKTSLSVDPSRVDSMPLTEAPAFILPPRNLCIKEGATAKFEGRVRGYPEPQVTWHRNGQPITSG

SEQ ID NO: 230132 - DNA, 5538 bp, Artificial Sequence
  derived and/or modified sequence
atgggcgacgtgaagctggtggccagcagccacatcagcaagaccagcctgagcgtggaccccagcagagtggacagcatgcccctgaccgaggcccccgccttcatcctgccccccagaaacctgtgcatcaaggagggcgccaccgccaagttcgagggcagagtgagaggctaccccgagccccaggtgacctggcacagaaacggccagcccatcaccagcggcggcagattcctgctggactgcggcatcagaggcaccttcagcctggtgatccacgccgtgcacgaggaggacagaggcaagtacacctgcgaggccaccaacggcagcggcgccagacaggtgaccgtggagctgaccgtggagggcagcttcgccaagcagctgggccagcccgtggtgagcaagaccctgggcgacagattcagcgcccccgccgtggagaccagacccagcatctggggcgagtgcccccccaagttcgccaccaagctgggcagagtggtggtgaaggagggccagatgggcagattcagctgcaagatcaccggcagaccccagccccaggtgacctggctgaagggcaacgtgcccctgcagcccagcgccagagtgagcgtgagcgagaagaacggcatgcaggtgctggagatccacggcgtgaaccaggacgacgtgggcgtgtacacctgcctggtggtgaacggcagcggcaaggccagcatgagcgccgagctgagcatccagggcctggacagcgccaacagaagcttcgtgagagagaccaaggccaccaacagcgacgtgagaaaggaggtgaccaacgtgatcagcaaggagagcaagctggacagcctggaggccgccgccaagagcaagaactgcagcagcccccagagaggcggcagccccccctgggccgccaacagccagccccagccccccagagagagcaagctggagagctgcaaggacagccccagaaccgccccccagacccccgtgctgcagaagaccagcagcagcatcaccctgcaggccgccagagtgcagcccgagcccagagcccccggcctgggcgtgctgagccccagcggcgaggagagaaagagacccgccccccccagacccgccaccttccccaccagacagcccggcctgggcagccaggacgtggtgagcaaggccgccaacagaagaatccccatggagggccagagagacagcgccttccccaagttcgagagcaagccccagagccaggaggtgaaggagaaccagaccgtgaagttcagatgcgagggcctggccgtgatggaggtggcccccagcttcagcagcgtgctgaaggactgcgccgtgatcgagggccaggacttcgtgctgcagtgcagcgtgagaggcacccccgtgcccagaatcacctggctgctgaacggccagcccatccagtacgccagaagcacctgcgaggccggcgtggccgagctgcacatccaggacgccctgcccgaggaccacggcacctacacctgcctggccgagaacgccctgggccaggtgagctgcagcgcctgggtgaccgtgcacgagaagaagagcagcagaaagagcgagtacctgctgcccgtggcccccagcaagcccaccgcccccatcttcctgcagggcctgagcgacctgaaggtgatggacggcagccaggtgaccatgaccgtgcaggtgagcggcaaccccccccccgaggtgatctggctgcacaacggcaacgagatccaggagagcgaggacttccacttcgagcagagaggcacccagcacagcctgtgcatccaggaggtgttccccgaggacaccggcacctacacctgcgaggcctggaacagcgccggcgaggtgagaacccaggccgtgctgaccgtgcaggagccccacgacggcacccagccctggttcatcagcaagcccagaagcgtgaccgccagcctgggccagagcgtgctgatcagctgcgccatcgccggcgaccccttccccaccgtgcactggctgagagacggcaaggccctgtgcaaggacaccggccacttcgaggtgctgcagaacgaggacgtgttcaccctggtgctgaagaaggtgcagccctggcacgccggccagtacgagatcctgctgaagaacagagtgggcgagtgcagctgccaggtgagcctgatgctgcagaacagcagcgccagagccctgcccagaggcagagagcccgccagctgcgaggacctgtgcggcggcggcgtgggcgccgacggcggcggcagcgacagatacggcagcctgagacccggctggcccgccagaggccagggctggctggaggaggaggacggcgaggacgtgagaggcgtgctgaagagaagagtggagaccagacagcacaccgaggaggccatcagacagcaggaggtggagcagctggacttcagagacctgctgggcaagaaggtgagcaccaagaccctgagcgaggacgacctgaaggagatccccgccgagcagatggacttcagagccaacctgcagagacaggtgaagcccaagaccgtgagcgaggaggagagaaaggtgcacagcccccagcaggtggacttcagaagcgtgctggccaagaagggcaccagcaagacccccgtgcccgagaaggtgcccccccccaagcccgccacccccgacttcagaagcgtgctgggcggcaagaagaagctgcccgccgagaacggcagcagcagcgccgagaccctgaacgccaaggccgtggagagcagcaagcccctgagcaacgcccagcccagcggccccctgaagcccgtgggcaacgccaagcccgccgagaccctgaagcccatgggcaacgccaagcccgccgagaccctgaagcccatgggcaacgccaagcccgacgagaacctgaagagcgccagcaaggaggagctgaagaaggacgtgaagaacgacgtgaactgcaagagaggccacgccggcaccaccgacaacgagaagagaagcgagagccagggcaccgcccccgccttcaagcagaagctgcaggacgtgcacgtggccgagggcaagaagctgctgctgcagtgccaggtgagcagcgacccccccgccaccatcatctggaccctgaacggcaagaccctgaagaccaccaagttcatcatcctgagccaggagggcagcctgtgcagcgtgagcatcgagaaggccctgcccgaggacagaggcctgtacaagtgcgtggccaagaacgacgccggccaggccgagtgcagctgccaggtgaccgtggacgacgcccccgccagcgagaacaccaaggcccccgagatgaagagcagaagacccaagagcagcctgccccccgtgctgggcaccgagagcgacgccaccgtgaagaagaagcccgcccccaagaccccccccaaggccgccatgcccccccagatcatccagttccccgaggaccagaaggtgagagccggcgagagcgtggagctgttcggcaaggtgaccggcacccagcccatcacctgcacctggatgaagttcagaaagcagatccaggagagcgagcacatgaaggtggagaacagcgagaacggcagcaagctgaccatcctggccgccagacaggagcactgcggctgctacaccctgctggtggagaacaagctgggcagcagacaggcccaggtgaacctgaccgtggtggacaagcccgacccccccgccggcaccccctgcgccagcgacatcagaagcagcagcctgaccctgagctggtacggcagcagctacgacggcggcagcgccgtgcagagctacagcatcgagatctgggacagcgccaacaagacctggaaggagctggccacctgcagaagcaccagcttcaacgtgcaggacctgctgcccgaccacgagtacaagttcagagtgagagccatcaacgtgtacggcaccagcgagcccagccaggagagcgagctgaccaccgtgggcgagaagcccgaggagcccaaggacgaggtggaggtgagcgacgacgacgagaaggagcccgaggtggactacagaaccgtgaccatcaacaccgagcagaaggtgagcgacttctacgacatcgaggagagactgggcagcggcaagttcggccaggtgttcagactggtggagaagaagaccagaaaggtgtgggccggcaagttcttcaaggcctacagcgccaaggagaaggagaacatcagacaggagatcagcatcatgaactgcctgcaccaccccaagctggtgcagtgcgtggacgccttcgaggagaaggccaacatcgtgatggtgctggagatcgtgagcggcggcgagctgttcgagagaatcatcgacgaggacttcgagctgaccgagagagagtgcatcaagtacatgagacagatcagcgagggcgtggagtacatccacaagcagggcatcgtgcacctggacctgaagcccgagaacatcatgtgcgtgaacaagaccggcaccagaatcaagctgatcgacttcggcctggccagaagactggagaacgccggcagcctgaaggtgctgttcggcacccccgagttcgtggcccccgaggtgatcaactacgagcccatcggctacgccaccgacatgtggagcatcggcgtgatctgctacatcctggtgagcggcctgagccccttcatgggcgacaacgacaacgagaccctggccaacgtgaccagcgccacctgggacttcgacgacgaggccttcgacgagatcagcgacgacgccaaggacttcatcagcaacctgctgaagaaggacatgaagaacagactggactgcacccagtgcctgcagcacccctggctgatgaaggacaccaagaacatggaggccaagaagctgagcaaggacagaatgaagaagtacatggccagaagaaagtggcagaagaccggcaacgccgtgagagccatcggcagactgagcagcatggccatgatcagcggcctgagcggcagaaagagcagcaccggcagccccaccagccccctgaacgccgagaagctggagagcgaggaggacgtgagccaggccttcctggaggccgtggccgaggagaagccccacgtgaagccctacttcagcaagaccatcagagacctggaggtggtggagggcagcgccgccagattcgactgcaagatcgagggctaccccgaccccgaggtggtgtggttcaaggacgaccagagcatcagagagagcagacacttccagatcgactacgacgaggacggcaactgcagcctgatcatcagcgacgtgtgcggcgacgacgacgccaagtacacctgcaaggccgtgaacagcctgggcgaggccacctgcaccgccgagctgatcgtggagaccatggaggagggcgagggcgagggcgaggaggaggaggagtag

SEQ ID NO: 230133 - DNA, 2145 bp, Artificial Sequence
  derived and/or modified sequence
atgaagagcagaagacccaagagcagcctgccccccgtgctgggcaccgagagcgacgccaccgtgaagaagaagcccgcccccaagaccccccccaaggccgccatgcccccccagatcatccagttccccgaggaccagaaggtgagagccggcgagagcgtggagctgttcggcaaggtgaccggcacccagcccatcacctgcacctggatgaagttcagaaagcagatccaggagagcgagcacatgaaggtggagaacagcgagaacggcagcaagctgaccatcctggccgccagacaggagcactgcggctgctacaccctgctggtggagaacaagctgggcagcagacaggcccaggtgaacctgaccgtggtggacaagcccgacccccccgccggcaccccctgcgccagcgacatcagaagcagcagcctgaccctgagctggtacggcagcagctacgacggcggcagcgccgtgcagagctacagcatcgagatctgggacagcgccaacaagacctggaaggagctggccacctgcagaagcaccagcttcaacgtgcaggacctgctgcccgaccacgagtacaagttcagagtgagagccatcaacgtgtacggcaccagcgagcccagccaggagagcgagctgaccaccgtgggcgagaagcccgaggagcccaaggacgaggtggaggtgagcgacgacgacgagaaggagcccgaggtggactacagaaccgtgaccatcaacaccgagcagaaggtgagcgacttctacgacatcgaggagagactgggcagcggcaagttcggccaggtgttcagactggtggagaagaagaccagaaaggtgtgggccggcaagttcttcaaggcctacagcgccaaggagaaggagaacatcagacaggagatcagcatcatgaactgcctgcaccaccccaagctggtgcagtgcgtggacgccttcgaggagaaggccaacatcgtgatggtgctggagatcgtgagcggcggcgagctgttcgagagaatcatcgacgaggacttcgagctgaccgagagagagtgcatcaagtacatgagacagatcagcgagggcgtggagtacatccacaagcagggcatcgtgcacctggacctgaagcccgagaacatcatgtgcgtgaacaagaccggcaccagaatcaagctgatcgacttcggcctggccagaagactggagaacgccggcagcctgaaggtgctgttcggcacccccgagttcgtggcccccgaggtgatcaactacgagcccatcggctacgccaccgacatgtggagcatcggcgtgatctgctacatcctggtgagcggcctgagccccttcatgggcgacaacgacaacgagaccctggccaacgtgaccagcgccacctgggacttcgacgacgaggccttcgacgagatcagcgacgacgccaaggacttcatcagcaacctgctgaagaaggacatgaagaacagactggactgcacccagtgcctgcagcacccctggctgatgaaggacaccaagaacatggaggccaagaagctgagcaaggacagaatgaagaagtacatggccagaagaaagtggcagaagaccggcaacgccgtgagagccatcggcagactgagcagcatggccatgatcagcggcctgagcggcagaaagagcagcaccggcagccccaccagccccctgaacgccgagaagctggagagcgaggaggacgtgagccaggccttcctggaggccgtggccgaggagaagccccacgtgaagccctacttcagcaagaccatcagagacctggaggtggtggagggcagcgccgccagattcgactgcaagatcgagggctaccccgaccccgaggtggtgtggttcaaggacgaccagagcatcagagagagcagacacttccagatcgactacgacgaggacggcaactgcagcctgatcatcagcgacgtgtgcggcgacgacgacgccaagtacacctgcaaggccgtgaacagcctgggcgaggccacctgcaccgccgagctgatcgtggagaccatggaggagggcgagggcgagggcgaggaggaggaggagtag

SEQ ID NO: 230134 - DNA, 5538 bp, Artificial Sequence
  derived and/or modified sequence
atgggtgatgttaagcttgtggccagtagccacatcagcaagacgagcctgagtgtggacccttcccgagtggattcaatgcctcttacggaagcccctgcgttcattctgccaccacgaaatctatgcattaaggagggcgctaccgctaagtttgaaggccgggtgagggggtacccggagccacaagtgacatggcaccgcaacggccagcctatcacatcgggagggaggtttctcctcgactgtggcatacggggcacctttagcctcgtgattcacgcagtgcacgaggaagaccgtggaaaatatacgtgcgaggcgacaaatggctcaggcgcacgccaggtgaccgtcgagttgactgttgaaggctcttttgccaagcagctcggccaacctgtggtatcaaaaactctgggcgaccgtttcagcgcccctgccgtcgaaaccagacccagcatttggggagagtgcccccccaaattcgccactaaattgggtagagtggtggtgaaggagggacagatgggcagattttcttgcaagattacgggcagaccacagccgcaagttacttggctgaaggggaatgtccctctgcagcctagcgccagggtgagcgttagcgaaaaaaatggaatgcaggtcctagagattcacggagtcaaccaggatgacgttggcgtatatacatgcctagtagtgaacgggtccggcaaagcaagtatgtcagccgagctgagcatccagggactcgactccgcgaacaggagcttcgtgcgcgagacaaaggccaccaacagcgatgtaagaaaagaggtcaccaatgttatttcgaaagaaagcaaattagattcactggaggccgcagcgaaatctaaaaactgcagctctccacagcggggagggagccctccctgggctgccaactcacagcctcagccccctagggagagtaagctggagagctgcaaagactcgcctcggactgcaccacagaccccagtgctccaaaaaacatcgagcagcataacactgcaggcagcccgcgttcaaccagagccgcgcgccccgggcctaggcgttctcagtcctagtggagaggagagaaagcggccagcccctcccaggcccgcgacattcccaacaaggcagccaggactgggatcccaagacgtagtgtcaaaggcagcgaatagacgtattccaatggagggacagagagacagcgctttccctaagttcgagtccaagcctcaaagccaggaagtcaaggaaaaccagacggttaaattcaggtgtgagggactggccgtgatggaggttgctccaagcttttcttcggtacttaaggattgcgccgtgatcgagggacaggattttgtgctccagtgtagcgttcgagggaccccggttccccgtattacttggctactcaacggtcagcctatccagtatgcacgcagtacgtgcgaggccggcgtggcggagctgcatattcaggatgctcttcccgaggaccacggcacatacacctgcctggcggagaatgcgctgggacaggtgagctgctcagcgtgggttaccgtacatgagaagaaaagtagccggaagagtgaataccttttacccgtggcgccctccaaacctactgcccccattttcctgcagggactgagtgatctgaaggtgatggatggctcgcaggttacaatgacggtccaagtcagcggaaaccctccaccagaggtcatctggctgcataatggcaacgagatacaggagtctgaagattttcatttcgagcagagaggaacacagcactccctgtgcatacaagaggtctttccagaagataccggcacatacacgtgcgaagcctggaatagtgctggtgaagtacggactcaggcagttctgactgtacaagagcctcacgacggcacacaaccttggttcattagcaagccaagatccgttaccgctagcctcggtcaatcagtgctgatctcgtgcgcaatcgcaggcgatcccttccccaccgttcattggctccgcgacggaaaggccctgtgcaaggacactggccattttgaggtgctgcagaacgaagacgtcttcacactggtgctgaaaaaggttcagccgtggcacgccggtcagtacgagattctgctgaagaatcgggtgggcgagtgttcttgtcaagtgtccctaatgttacagaactcatcagcccgggccctcccaagaggaagagaacctgccagttgtgaagacctctgcggaggaggggtaggagcggatgggggagggagtgacagatacggaagtctacgcccagggtggccagctcggggccagggttggctagaggaggaagatggtgaggacgttcgtggtgtgctgaagcgcagagttgaaactaggcaacacaccgaggaggccattcgccagcaggaagtcgagcagctggacttcagagatctccttgggaagaaagtttcaacaaaaacgttgtcagaggacgacttaaaagagatccctgccgagcagatggacttcagggccaacctgcaacgacaggtaaaaccaaagacagtaagtgaagaggagcggaaagtgcacagcccgcaacaggtggactttcgctcagtacttgctaagaaaggcactagtaaaacccccgttcctgagaaagtccccccccccaagcctgccactccagatttcagatcagtactcggggggaaaaaaaagctgcctgcggaaaacggcagctcctcagctgaaactctaaatgcgaaagctgtggaatcctctaagcccttgtcaaatgctcagccttctgggcccttgaaaccagttgggaacgccaagcccgctgagacgctcaagcctatggggaacgctaaacccgctgaaactttgaaacctatgggcaacgcaaagccagatgagaatctgaaatccgccagtaaggaggaactgaagaaggacgtcaagaacgacgtgaattgcaagaggggccacgctggaaccactgataacgaaaaaagatccgagtctcagggtactgcccctgcctttaagcaaaaactacaagatgtacatgttgccgaaggaaagaagctgttactccagtgccaggtgtcctccgatccacctgcgactatcatttggaccctcaacgggaaaacattgaagactactaagtttatcattttgtcgcaagagggtagcctctgttcagtaagcatagaaaaagccctccccgaggacaggggcttatataagtgcgtggcaaaaaacgacgcaggacaagctgagtgctcctgccaggtcacagtagacgatgctccagccagcgagaatacaaaggctcccgaaatgaagtctcggcggcccaagtcatccctgccgccagtcctaggcaccgagagcgacgcgactgtcaaaaaaaagcccgcaccaaaaacgcctcccaaagctgcaatgcccccacagattattcagtttcccgaagaccaaaaggtgagagctggcgagtctgtcgagttatttggcaaggtcacaggaactcagcctataacctgcacgtggatgaagtttcggaaacagatccaagaaagcgagcatatgaaggtggaaaactctgaaaatggctctaagttaactatactcgcagcaaggcaggaacactgcgggtgttacacactgctagtggaaaacaagttgggcagtagacaggcacaagtaaatctgaccgtcgtagataagcctgacccaccagctgggaccccatgcgcctcagatattagaagctccagtctgacactgtcctggtatggctcgtcttatgacggggggagcgccgtgcaaagctattctatcgagatctgggattcggctaacaagacttggaaggaattggcaacgtgtcgtagtacttcgtttaatgtacaggatctgctgccagatcacgagtacaagttccgcgtgagagccatcaatgtttatggcacgagcgaaccgagtcaggagtccgagctaacaacagtgggggaaaagcctgaagaacccaaagacgaggtggaggtatccgacgatgacgagaaagagcccgaagtcgactatcgcactgttaccataaacactgagcaaaaggtcagcgatttctacgatatcgaggagcgtcttggctccgggaagttcggacaagtgtttcggctcgtggaaaagaaaaccaggaaagtatgggctggtaaattttttaaggcttacagcgccaaggaaaaagaaaatatacggcaggagatctctattatgaattgcctgcaccacccgaaactggtacaatgtgtcgatgccttcgaggagaaggccaacatcgtaatggtgctagaaattgttagtggaggggagctgtttgagcgcatcattgatgaggactttgaattaaccgagagggagtgcataaaatacatgcggcagattagtgagggagtagaatacattcataaacagggcattgtgcacctggacctgaaacctgagaatattatgtgtgttaataaaacaggcacaagaatcaagctgatcgattttggcctcgctcggaggctcgagaacgccggttctctaaaggtgctgttcgggacacctgagtttgttgcgccagaggtgatcaactatgaacccatcgggtatgcgaccgatatgtggagcattggggtgatttgctacatcttggtaagtggattgagccctttcatgggcgataatgacaatgaaaccctagctaacgttacttctgccacatgggacttcgacgacgaggcgttcgatgaaatttccgacgatgcaaaggacttcatcagcaatctgttgaaaaaggatatgaaaaatagattagactgtactcagtgtctgcagcatccttggctgatgaaagacaccaaaaatatggaagctaagaagctgtccaaagatcggatgaagaaatatatggctcggaggaaatggcaaaaaacaggaaatgcggtgagggccattggccgcctaagctctatggccatgataagcggcctgagcgggcgcaagtcctctaccgggtcccctacctcccccttaaatgctgaaaaactggagagtgaagaggacgtatcccaggcatttctcgaggctgtggctgaagaaaaacctcacgtaaaaccttatttttccaagacgattcgggatctggaggtggtggaaggctcggccgctcgctttgattgtaagattgagggttatcccgacccagaagtggtatggtttaaggatgatcaatctatcagggagagtaggcacttccagattgattacgatgaggacggaaattgctctctgattattagcgacgtctgcggggatgacgatgcaaagtatacatgcaaggctgtgaactccctcggggaggccacctgtacggccgagttaattgtggagactatggaagagggggaaggcgaaggcgaggaggaggaagagtag

SEQ ID NO: 230135 - DNA, 2145 bp, Artificial Sequence
  derived and/or modified sequence
atgaaatcccggcgtccgaagtccagtttacctcccgtgcttggtacggagtctgacgccaccgtgaaaaaaaaacctgctcccaaaacacctcccaaagcggcaatgcccccacagatcatccagttcccagaggaccagaaagtgagggcaggggaaagcgttgaactcttcggaaaggtgacgggcactcagcctatcacgtgcacctggatgaagttcagaaagcagatacaggagtccgagcacatgaaagtggagaatagtgaaaatggcagcaagttaacaatactggccgcgagacaggaacactgcggctgttatacgttattggtggagaataagctgggctcacggcaggcccaggtgaacctgactgtggtagataagcccgacccaccagccggcacaccctgtgctagcgacattaggtcatcttctctgactctcagctggtacgggtcatcctacgacggaggttccgcggtgcagtcctactcaatagaaatctgggatagtgccaataagacctggaaggaactggcgacttgcaggtcaaccagtttcaacgttcaggacctcttgcctgaccacgaatataaattcagagtgcgggccatcaatgtatatggaacttctgagccttctcaggaaagcgaattaactacagtcggcgaaaagcccgaggagcccaaggacgaagttgaggtctctgatgacgatgagaaagagcccgaggtcgactatcgtaccgtaacaattaataccgagcaaaaggtttcggatttctatgatattgaggagaggcttggtagtggtaagttcggacaggtctttcgcctggtcgagaaaaagaccaggaaagtgtgggccggaaaattttttaaagcatatagcgccaaggagaaagagaacatccgccaagagatcagcatcatgaactgtcttcaccaccctaaactggtccagtgcgtagatgcattcgaagagaaagcaaatatcgtcatggtcctcgagattgtgtcgggaggtgaactgtttgaaagaatcatagacgaggattttgaactgactgagcgggagtgcatcaagtacatgaggcagattagcgagggagtagagtacatccacaaacaggggatcgtccatctggatctgaagccagaaaacatcatgtgcgtgaataagactggaacccgcataaagctgattgatttcggcctagctcgacggctggagaacgcgggatcgctgaaagtcctgttcggaacccccgaattcgtcgcaccggaagtgattaattatgaacctattggctacgccacggacatgtggagcatcggagtcatttgttatatcctagtcagcggcctaagcccttttatgggcgacaacgacaacgagacactggcaaatgtgacttctgctacttgggacttcgatgacgaagcatttgatgaaatctccgatgacgctaaggattttatatctaatctgctgaaaaaggacatgaagaaccgtctggattgtacacagtgtctgcaacacccgtggcttatgaaagataccaagaacatggaggccaaaaagctcagtaaagatagaatgaagaagtacatggcacggcgcaaatggcagaagaccggaaatgctgtcagggctatagggcggctgtcatctatggccatgatatccgggctcagcggccgtaaaagttctaccggtagtcctacatcacctctcaacgcggagaagctggagagcgaggaggacgtgtcccaggctttcctggaagctgttgcagaagaaaaaccccatgtgaagccatacttttctaagacaatcagggatttggaagtggtcgagggaagcgccgccagatttgattgcaagattgaaggctacccagaccccgaggtggtctggtttaaggatgaccaatctattagagagtcgagacactttcagatcgactatgacgaggacggcaactgtagcctgatcatctcagacgtctgcggcgacgatgatgcaaaatatacctgcaaggccgtcaacagtctgggagaagctacttgtactgcagaattaatagttgaaaccatggaagaaggcgagggtgagggtgaggaggaggaggagtag

SEQ ID NO: 230136 - DNA, 5538 bp, Artificial Sequence
  derived and/or modified sequence
atgggagatgtgaagctggtggccagcagccacatcagcaagaccagcctgtctgtggaccccagccgggtggacagcatgcccctgacagaggccccagccttcatcctgccccccaggaacctgtgcatcaaggagggcgccacagccaagtttgagggccgggtgcggggctacccagagccccaggtgacctggcacagaaatggccagcccatcaccagcggcggccgcttcctgctggactgtggcatccggggcaccttcagcctggtgattcatgctgtgcatgaagaagatcggggcaagtacacctgtgaggccaccaacggcagcggggcccggcaggtgacagtggagctgactgtggagggcagctttgccaagcagctgggccagcctgtggtgtccaagaccctgggggaccgcttcagcgccccagctgtggagacccggcccagcatctggggcgagtgcccccccaagtttgccaccaagctgggccgggtggtggtgaaggagggccagatgggccgcttcagctgcaagatcaccggccggccccagccccaggtgacctggctgaagggaaatgtgcccctgcagcccagcgcccgggtgtctgtgtctgagaagaatggcatgcaggtgctggagatccatggagtgaaccaggatgatgtgggcgtgtacacctgcctggtggtgaatggaagtggcaaggcctccatgtctgctgagctgagcatccagggcctggacagcgccaacagaagctttgtgcgggagaccaaggccaccaacagtgatgtgaggaaggaggtgaccaacgtcatcagcaaggagagcaagctggacagcctggaggccgccgccaagagcaagaactgcagcagcccccagagaggaggcagccccccctgggccgccaacagccagccccagcccccccgggagagcaagctggagagctgcaaggacagccccaggacagccccccagacccctgtgctgcagaagaccagcagcagcatcaccctgcaggccgcccgggtgcagcctgagccccgggcccctggcctgggcgtgctgagccccagcggggaggagaggaagaggcctgccccacccaggcctgccaccttccccacccggcagcccggcctgggcagccaggatgtggtgtccaaggccgccaacagacgcatccccatggagggccagagggacagcgccttccccaagtttgagagcaagccccagagccaggaggtgaaggagaaccagacagtgaagttccgctgtgagggcctggccgtgatggaggtggcccccagcttcagctctgtgctgaaggactgtgctgtgattgagggccaggactttgtgctgcagtgcagcgtgcggggcacccctgtgccccgcatcacctggctgctgaatggccagcccatccagtatgcccggagcacctgtgaggccggcgtggccgagctgcacatccaggatgccctgcctgaagatcatggcacctacacctgcctggctgaaaatgccctgggccaggtgtcctgcagcgcctgggtgacagtgcatgagaagaagagcagcaggaagtctgagtacctgctgcctgtggcccccagcaagcccacagcccccatcttcctgcagggcctgagtgacctgaaggtgatggatggcagccaggtgaccatgacagtgcaggtgtctggcaaccccccacctgaggtgatctggctgcacaatggaaatgagatccaggagagcgaggacttccactttgagcagaggggcacccagcacagcctgtgcatccaggaggtgtttcctgaggacaccggcacctacacctgtgaggcctggaacagcgctggggaggtgaggacccaggccgtgctgactgtgcaggagccccatgatggcacccagccctggttcatcagcaagcccaggtctgtgacagccagcctgggccagagcgtgctgatcagctgtgccatcgccggggaccccttccccaccgtgcactggctgagagatggcaaggccctgtgcaaggacaccggccactttgaggtgctgcagaatgaagatgtgttcaccctggtgctgaagaaggtgcagccctggcacgccggccagtatgagatcctgctgaagaacagagtgggagaatgtagctgccaggtgtccctgatgctgcagaacagcagcgcccgggccctgccccggggccgggagcccgccagctgtgaggacctgtgtggcggcggcgtgggcgcagatggcggcggcagtgacagatatggcagcctgcggcccggctggccagcccggggccagggctggctggaggaggaggatggagaagatgtgcggggcgtgctgaagagaagagtggagacccggcagcacacagaggaggccatccggcagcaggaggtggagcagctggacttccgggacctgctgggcaagaaggtgtccaccaagaccctgtctgaagatgacctgaaggagatcccagctgagcagatggacttccgggccaacctgcagaggcaggtgaagcccaagacagtgtctgaggaggagaggaaggtgcacagcccccagcaggtggacttccgctctgtgctggccaagaagggcaccagcaagacccctgtgcctgagaaggtgcccccacccaagccagccaccccagacttccgctctgtgctgggcggcaagaagaagctgcctgcagaaaatggcagcagcagcgctgagaccctgaatgccaaggctgtggagagcagcaagcccctgagcaatgcccagcccagcggccccctgaagcctgtgggcaatgccaagccagctgagaccctgaagcccatgggaaatgccaagccagctgagaccctgaagcccatgggaaatgccaagccagatgagaacctgaagagcgccagcaaggaggagctgaagaaggatgtgaagaatgatgtgaactgcaagaggggccatgctggcaccacagacaatgagaagaggtctgagagccagggcacagccccagccttcaagcagaagctgcaggatgtgcacgtggccgagggcaagaagctgctgctgcagtgccaggtgtccagtgaccccccagccaccatcatctggaccctgaatggcaagaccctgaagaccaccaagttcatcatcctgagccaggagggcagcctgtgcagcgtgtccattgagaaggccctgcctgaggaccggggcctgtacaagtgtgtggccaagaatgatgctggccaggctgaatgtagctgccaggtgacagtggatgatgccccagccagcgagaacaccaaggcccctgagatgaagagcagaagacccaagagcagcctgccccctgtgctgggcacagaaagtgatgccaccgtgaagaagaagccagcccccaagaccccacccaaggccgccatgccaccccagatcatccagtttcctgaggaccagaaggtgcgggccggggagagcgtggagctgtttgggaaggtgacaggcacccagcccatcacctgcacctggatgaagttcaggaagcagatccaggagagcgagcacatgaaggtggagaacagtgaaaatggcagcaagctgaccatcctggccgcccggcaggagcactgcggctgctacaccctgctggtggagaacaagctgggcagccggcaggcccaggtgaacctgactgtggtggacaagccagaccccccagctggcaccccctgtgccagtgacatccgcagcagcagcctgaccctgtcctggtacggcagcagctatgatggcggcagcgctgtgcagagctacagcattgagatctgggacagcgccaacaagacctggaaggagctggccacctgccgcagcaccagcttcaacgtgcaggacctgctgcctgaccacgagtacaagttccgggtgcgggccatcaacgtgtatggcaccagcgagcccagccaggagagcgagctgaccaccgtgggggagaagccagaggagcccaaggatgaggtggaggtgtctgatgatgatgagaaggagcctgaggtggactacagaacagtgaccatcaacacagagcagaaggtgtctgacttctatgacatcgaggagcggctgggcagcggcaagtttggccaggtgttccggctggtggagaagaagaccaggaaggtgtgggccggcaagttcttcaaggcctacagcgccaaggagaaggagaacatccggcaggagatcagcatcatgaactgcctgcaccaccccaagctggtgcagtgtgtggatgcctttgaggagaaggccaacatcgtgatggtgctggagatcgtgtctggaggagagctgtttgagcgcatcattgatgaggactttgagctgacagagcgggagtgcatcaagtacatgaggcagatcagcgagggcgtggagtacatccacaagcagggcatcgtgcacctggacctgaagccagagaacatcatgtgtgtgaacaagacaggcacccgcatcaagctgattgactttggcctggcccggcggctggagaatgccggcagcctgaaggtgctgtttggcaccccagagtttgtggcccctgaggtgatcaactatgagcccatcggctacgccacagacatgtggagcattggagtcatctgctacatcctggtgtctggcctgagccccttcatgggagacaatgacaatgagaccctggccaacgtgaccagcgccacctgggactttgatgatgaggcctttgatgagatcagtgatgatgccaaggacttcatcagcaacctgctgaagaaggacatgaagaaccggctggactgcacccagtgcctgcagcacccctggctgatgaaggacaccaagaacatggaggccaagaagctgagcaaggacaggatgaagaagtacatggcccggaggaagtggcagaagacaggaaatgctgtgcgggccatcggccgcctgagctccatggccatgatcagcggcctgagcggcaggaagagcagcacaggcagccccaccagccccctgaatgctgagaagctggagagtgaagaagatgtgtcccaggccttcctggaggccgtggccgaggagaagccccacgtgaagccctacttcagcaagaccatccgggacctggaggtggtggagggcagcgctgccaggtttgactgcaagattgagggctacccagaccctgaggtggtgtggttcaaggatgaccagagcatccgggagagccgccacttccagattgattatgatgaagatggcaactgcagcctcatcatcagtgatgtgtgtggagatgatgatgccaagtacacctgcaaggctgtgaacagcctgggggaggccacctgcacagctgagctgattgtggagaccatggaggagggggagggggagggggaggaggaggaggagtag

SEQ ID NO: 230137 - DNA, 2145 bp, Artificial Sequence
  derived and/or modified sequence
atgaagagccggcggcccaagagcagcctgccccctgtgctgggcacagaaagtgatgccaccgtgaagaagaagccagcccccaagaccccacccaaggccgccatgccaccccagatcatccagtttcctgaggaccagaaggtgcgggccggggagagcgtggagctgtttgggaaggtgacaggcacccagcccatcacctgcacctggatgaagttcaggaagcagatccaggagagcgagcacatgaaggtggagaacagtgaaaatggcagcaagctgaccatcctggccgcccggcaggagcactgcggctgctacaccctgctggtggagaacaagctgggcagccggcaggcccaggtgaacctgactgtggtggacaagccagaccccccagctggcaccccctgtgccagtgacatccgcagcagcagcctgaccctgtcctggtacggcagcagctatgatggcggcagcgctgtgcagagctacagcattgagatctgggacagcgccaacaagacctggaaggagctggccacctgccgcagcaccagcttcaacgtgcaggacctgctgcctgaccacgagtacaagttccgggtgcgggccatcaacgtgtatggcaccagcgagcccagccaggagagcgagctgaccaccgtgggggagaagccagaggagcccaaggatgaggtggaggtgtctgatgatgatgagaaggagcctgaggtggactacagaacagtgaccatcaacacagagcagaaggtgtctgacttctatgacatcgaggagcggctgggcagcggcaagtttggccaggtgttccggctggtggagaagaagaccaggaaggtgtgggccggcaagttcttcaaggcctacagcgccaaggagaaggagaacatccggcaggagatcagcatcatgaactgcctgcaccaccccaagctggtgcagtgtgtggatgcctttgaggagaaggccaacatcgtgatggtgctggagatcgtgtctggaggagagctgtttgagcgcatcattgatgaagattttgagctgacagaaagagagtgcatcaagtacatgaggcagatcagcgagggcgtggagtacatccacaagcagggcatcgtgcacctggacctgaagccagagaacatcatgtgtgtgaacaagacaggcacccgcatcaagctgattgactttggcctggcccggcggctggagaatgccggcagcctgaaggtgctgtttggcaccccagagtttgtggcccctgaggtgatcaactatgagcccatcggctacgccacagacatgtggagcattggagtcatctgctacatcctggtgtctggcctgagccccttcatgggagacaatgacaatgagaccctggccaacgtgaccagcgccacctgggactttgatgatgaggcctttgatgagatcagtgatgatgccaaggacttcatcagcaacctgctgaagaaggacatgaagaaccggctggactgcacccagtgcctgcagcacccctggctgatgaaggacaccaagaacatggaggccaagaagctgagcaaggacaggatgaagaagtacatggcccggaggaagtggcagaagacaggaaatgctgtgcgggccatcggccgcctgagctccatggccatgatcagcggcctgagcggcaggaagagcagcacaggcagccccaccagccccctgaatgctgagaagctggagagcgaggaggatgtgtcccaggccttcctggaggccgtggccgaggagaagccccacgtgaagccctacttcagcaagaccatccgggacctggaggtggtggagggcagcgctgccaggtttgactgcaagattgagggctacccagaccctgaggtggtgtggttcaaggatgaccagagcatccgggagagccgccacttccagattgattatgatgaagatggcaactgcagcctcatcatcagtgatgtgtgtggagatgatgatgccaagtacacctgcaaggctgtgaacagcctgggggaggccacctgcacagctgagctgattgtggagaccatggaggagggggagggggagggggaggaggaggaggagtag

SEQ ID NO: 230138 - DNA, 5538 bp, Artificial Sequence
  derived and/or modified sequence
atgggcgacgtgaagctggtggccagcagccacatcagcaagaccagtctgtcagtcgacccgtctagggttgactcaatgcccctcactgaagcccctgcctttatactccctccacggaacctgtgcattaaggagggggctactgcaaagttcgagggacgcgttaggggctacccggaaccacaggtcacttggcaccggaacggacagcctataacatctgggggacgcttccttctggattgtggaatccgcggaacgttcagtctggtcatacatgctgtccatgaagaagatcgcggcaagtacacctgcgaagcaactaatggctctggcgcaagacaggtgacagtcgaattgactgttgagggctcctttgccaaacagcttggccaacctgttgtctccaaaactctcggggatcgtttctcagccccggccgtggagaccagaccgagcatctggggcgagtgccctcccaagtttgcaactaaactcggccgcgtggtggtgaaagagggacagatgggacggtttagttgcaaaattacgggccgccctcagcctcaagttacctggctgaagggtaatgtgccattacagcctagcgcccgggtgagtgttagcgagaagaatggcatgcaagtgctcgagatccacggagtgaaccaggacgacgtaggggtctacacttgtctggtggtgaatggctctggcaaggcgagcatgtctgcagagcttagcattcaagggctagacagcgcaaataggtcgttcgtgcgagagacaaaggccaccaactcagatgtgcgcaaagaagtgacgaatgtgatctctaaggagtccaagctcgatagcttggaagcggcagcaaagtccaaaaactgcagctccccacaaagggggggatcccctccatgggccgccaacagccagccgcaaccgccccgcgagtccaagctcgagtcatgtaaggatagccctcgaacagcccctcagacgccagtgctgcagaagaccagctcttcgatcactttacaggcggctagagtgcagcctgagccaagggcccctggacttggagtactgtctccgtcaggagaagaacgtaaacgccccgcgccaccccgacctgcaacatttcccactcgacaacccgggttaggttcccaggatgtggtcagtaaggccgctaacagacgaattcctatggaagggcagcgagattctgcttttcccaagtttgaaagcaagcctcagtctcaggaagtcaaggagaaccagaccgtaaagttcaggtgcgagggactcgccgtgatggaggtcgcccctagtttctcgtctgttttgaaggattgcgctgtgatcgaggggcaggactttgtgctgcagtgtagcgtcaggggcaccccagttccgcggataacctggctcctgaatgggcaaccaatccagtacgcccgctcaacatgcgaagctggcgtagctgagcttcatattcaagacgcactgcctgaggatcatggtacatacacctgccttgctgagaacgccctaggccaagtttcctgttcggcttgggtgactgtgcacgagaaaaagtccagtcgcaagagcgagtatcttctgcccgtcgctcctagtaagcctaccgctcccatttttttacaggggctttctgatttgaaagtaatggacgggagccaagtcaccatgacagtccaggttagtggtaaccccccacctgaggtaatctggttgcataacgggaatgagattcaggaatctgaggatttccacttcgaacagagaggtactcagcatagtctttgtattcaggaagtctttccggaggataccggaacttatacttgtgaggcttggaacagcgcaggcgaagttagaacccaggccgttctgacagtccaggagcctcatgacggcacacagccgtggttcattagtaagccccgtagtgtaaccgcatctctggggcaatctgtgctgattagttgtgcaattgccggtgacccctttccaaccgtccactggttgagggacgggaaagccctgtgcaaagatacagggcatttcgaggtgctgcaaaacgaagatgtattcaccctggtgctgaagaaagtgcagccttggcatgcgggacagtacgaaattcttctcaagaacagagtgggagaatgtagctgtcaagtgtcactgatgttgcagaactcgagcgctagagcactccctcgaggacgagagcctgctagttgcgaggatctttgtggtggaggggtgggagcagatggcggaggaagtgataggtatggaagcctgcgccccgggtggcctgctcggggacaagggtggctggaagaagaggacggcgaggatgttagaggggtcttgaagcgcagggttgagaccaggcagcataccgaggaagccattcgacaacaagaggtagagcagttggatttccgcgacctgctgggaaagaaggtgagcacaaaaactcttagcgaggatgacttaaaggagatcccagccgagcaaatggatttccgggcaaacttacagagacaagtgaagccaaagaccgtgagtgaggaggaaaggaaagttcattcaccgcagcaggtggacttcaggtccgtgctggccaagaagggaacttccaagacaccagtccccgagaaagtccctccacctaaaccagcgactcctgatttccgatccgtgctgggtggaaagaagaagctgcccgcggaaaatggctcttctagtgccgagacactcaacgctaaagcagttgagagcagtaaaccgctgagcaatgctcaaccttcaggacctctgaagcccgtgggcaacgcgaaacccgccgaaaccctgaaaccaatgggcaacgccaagcccgcagagacactcaagccaatgggtaatgctaagccagatgagaatctcaagtcagcctctaaggaagagctgaagaaggacgtgaagaatgacgtgaattgcaagaggggacacgctggtacaactgacaatgagaagcggtctgagtcccaggggacagccccagccttcaagcagaagttgcaggatgttcatgtggccgaggggaaaaaactgctattacagtgtcaggtgagttcggaccctcccgctaccattatctggaccctaaatggtaaaaccctaaagacaacgaagttcatcatattgtcccaggagggttccctttgtagcgtgagtatcgagaaggcactgcctgaagacagaggcttgtataaatgcgttgctaagaacgacgccgggcaggccgaatgcagctgtcaagtcactgtcgacgatgccccagcatctgaaaataccaaggccccagagatgaagtccagacgacctaagtcttccttgcctccagtgctcggcacagaatccgacgccaccgtgaagaagaaacctgctcccaagacaccccctaaagcagctatgcctcctcaaataatccagttccctgaggatcagaaagtgagggccggggaatcagtggaactgttcggcaaagtgaccggaacacaacccattacttgtacctggatgaagttccggaaacagatccaggagtccgagcacatgaaagttgagaactcagagaacggaagtaaactcacaatcctggctgcccggcaggaacactgtgggtgctatactctgctggtggaaaacaaattaggctccagacaggcacaagttaacctgactgtcgtcgataaaccagatcctcctgctggcactccgtgcgcatccgacatcagaagttccagtctcaccctctcatggtacgggagtagctacgacggaggttccgccgtgcaaagttacagcattgaaatctgggactccgccaacaagacatggaaggagctcgcaacatgtaggtccacctcctttaatgttcaggacctactgcccgatcatgagtacaagttccgggtgcgggcaataaacgtatacggcacgtccgagcccagccaggaatccgagttaacgactgtgggcgaaaagccagaagagcccaaggacgaggttgaggtgagtgacgacgacgagaaagagcccgaagtcgattaccgcacagttaccattaatactgaacagaaggtgtcggacttttacgatattgaggagcgcctggggtccggaaagttcggtcaggtgtttagactggtggagaagaaaactagaaaggtctgggccggcaagttctttaaggcctactcagcaaaggagaaggaaaacattcgccaggaaatctccattatgaattgtctgcatcatcccaaactggtgcagtgcgtggatgcgttcgaggaaaaagcaaacatcgtgatggtcctcgaaatagtgagtggaggtgaactgtttgaaaggatcattgacgaggactttgagttaactgaacgggagtgcattaagtacatgaggcaaatttcagaaggagtggaatatatccataagcagggaatcgtgcacttggatcttaagccagaaaacattatgtgcgtgaacaagactggcacgagaatcaaactgatcgatttcgggttggctcgccgtcttgaaaacgcaggctcgttaaaggtactgtttggcacccccgaattcgtcgcccctgaagtgatcaattatgaacccatcggctacgctaccgacatgtggagtattggcgttatatgttacatcttggtgagcggcctaagccccttcatgggggataatgataacgagaccttagccaatgttacctctgctacttgggatttcgacgacgaagcctttgacgaaatctctgatgatgccaaggatttcatttctaatctgctgaagaaagacatgaaaaatcgcctggactgcacacaatgccttcagcacccttggctcatgaaggataccaaaaacatggaggccaaaaagctcagcaaggaccggatgaagaagtacatggcccggcgaaagtggcagaagacaggcaacgctgttcgagcaattgggagactctcaagcatggctatgataagcggtctttcaggcaggaaatcgagcacaggttccccaacatctcccctgaatgctgagaagttggaaagtgaggaggatgtctctcaagccttcctcgaagccgtggcagaggagaagccacacgtgaaaccctatttcagcaagacaatccgcgaccttgaagtggtggaaggttccgccgcgaggttcgattgcaagatcgaagggtatcccgatcccgaggtcgtttggtttaaagatgaccaatctattagggagagccgccacttccagattgattacgatgaagatggaaactgctccctgattataagcgacgtatgcggagatgatgacgccaagtacacttgtaaagccgtgaactctctgggcgaggctacctgcaccgcggagttaatcgtcgagactatggaggagggcgagggcgagggggaggaggaggaagagtag

SEQ ID NO: 230139 - DNA, 2145 bp, Artificial Sequence
  derived and/or modified sequence
atgaagagccggcggcccaagagcagcctgccccccgtgctgggcacagagagcgatgccaccgtgaagaagaagccagcccctaagacccctccaaaggcggctatgccgccacaaattatccagtttccggaagaccagaaggttagggccggcgagtcagtagaactgtttgggaaggtaaccggaactcagcctatcacttgtacttggatgaagttccgcaagcaaatccaggagagcgaacatatgaaagtcgagaactcagaaaatggttccaagttaacgatccttgcagcccggcaggagcattgtggctgctacaccctgctggtggagaacaaactgggatcgaggcaagcccaggtcaatctgacagtagtggataaacctgatcctcctgcaggcacaccttgtgcctccgatatcagaagcagttcgctcaccctgtcatggtacgggtccagttatgacgggggtagcgctgtacagtcttattccattgaaatttgggactcggcgaacaagacttggaaagagcttgccacctgcagatctacgagttttaatgttcaggacctactgcctgatcacgaatacaagtttagggtacgagccatcaacgtgtatgggacaagcgagccttcccaagagtctgagctaaccaccgtgggcgaaaaaccagaggagcctaaagatgaagtggaagttagcgatgacgacgagaaagaacccgaagttgactatcgtaccgtcacaataaacaccgaacagaaagtctccgatttttatgatatagaggaaagattgggatctggaaaattcggccaggtgttcaggttggttgaaaagaagactaggaaggtttgggccggcaaattctttaaggcatacagcgccaaagaaaaggagaatattcgacaggagatatctatcatgaactgcttacaccatcccaaactggttcagtgtgttgacgccttcgaggagaaagccaacattgtgatggtactggaaatagtgagcggtggagagctatttgagagaattatagacgaggactttgagctcacagagagagagtgcatcaagtatatgagacagatttcagaaggggtcgaatatattcataagcaaggcatcgtacatctcgacctcaaacccgaaaacatcatgtgtgttaacaaaaccggcactagaataaagctgattgacttcggactggcccgtcggctggagaacgcaggaagcctgaaggtcctgttcggaacccctgaattcgtcgccccagaggttattaattatgaacccatcggatatgctacggacatgtggtccattggcgtgatatgttacatcttagtgtcggggctgtccccgttcatgggagataacgacaacgaaacacttgccaacgtgacgtctgcgacttgggatttcgacgacgaagccttcgacgagatcagtgatgacgctaaggacttcattagcaatcttctgaagaaagatatgaagaaccgacttgactgtacacagtgcctccaacatccctggttgatgaaagatacgaaaaatatggaagccaaaaagttgtccaaagatcgcatgaagaagtatatggcccgtcggaagtggcagaagacgggcaatgctgtccgcgccattgggaggctgtcatctatggcaatgatttccggcctgtcaggaaggaaaagttctacagggagcccaaccagccctttaaatgctgaaaagctggaatcagaggaggacgtgtcacaggcctttttggaagctgtggcagaggagaaaccccatgtgaaaccatacttttctaaaacaatcagagatctggaggtcgtcgaaggcagcgctgcccgcttcgactgtaagatagagggttacccagatcctgaagttgtgtggtttaaggatgaccaaagtatccgggagtccaggcattttcagattgactacgatgaagacggaaattgttctttaattatctctgatgtgtgcggggacgacgatgccaaatatacttgcaaggccgtcaattcattaggcgaggctacttgcactgccgaactaattgtggaaaccatggaagaaggtgaaggcgagggcgaagaggaggaggaatag

SEQ ID NO: 230140 - DNA, 5892 bp, Artificial Sequence
  derived and/or modified sequence
ggtcggcagcagggcgctgagcgagctcggagcccgcgctgtgcgcctgcggccggggcgccccgccgagcgccggtgccccggctcccgggccgccttcgccgcgcgggaaggattcttcaaaattaacagaaaccaattcgggccagctgaagagaaaaaataaaggtggctcccggctgcctctgctgcagttcagagcaacttcaggagcttcccagccgagagcttcaggacgcctttcctgtcccactggcccagttgccacaacaaacaacagagaagacggtgaccatgggggatgtgaagctggttgcctcgtcacacatttccaaaacctccctcagtgtggatccctcaagagttgactccatgcccctgacagaggcccctgctttcattttgccccctcggaacctctgcatcaaagaaggagccaccgccaagttcgaagggcgggtccggggttacccagagccccaggtgacatggcacagaaacgggcaacccatcaccagcgggggccgcttcctgctggattgcggcatccgggggactttcagccttgtgattcatgctgtccatgaggaggacaggggaaagtatacctgtgaagccaccaatggcagtggtgctcgccaggtgacagtggagttgacagtagaaggaagttttgcgaagcagcttggtcagcctgttgtttccaaaaccttaggggatagattttcagctccagcagtggagacccgtcctagcatctggggggagtgcccaccaaagtttgctaccaagctgggccgagttgtggtcaaagaaggacagatgggacgattctcctgcaagatcactggccggccccaaccgcaggtcacctggctcaagggaaatgttccactgcagccgagtgcccgtgtgtctgtgtctgagaagaacggcatgcaggttctggaaatccatggagtcaaccaagatgacgtgggagtgtacacgtgcctggtggtgaacgggtcggggaaggcctcgatgtcagctgaactttccatccaaggtttggacagtgccaataggtcatttgtgagagaaacaaaagccaccaattcagatgtcaggaaagaggtgaccaatgtaatctcaaaggagtcgaagctggacagtctggaggctgcagccaaaagcaagaactgctccagcccccagagaggtggctccccaccctgggctgcaaacagccagcctcagcccccaagggagtccaagctggagtcatgcaaggactcgcccagaacggccccgcagaccccggtccttcagaagacttccagctccatcaccctgcaggccgcaagagttcagccggaaccaagagcaccaggcctgggggtcctatcaccttctggagaagagaggaagaggccagctcctccccgtccagccaccttccccaccaggcagcctggcctggggagccaagatgttgtgagcaaggctgctaacaggagaatccccatggagggccagagggattcagcattccccaaatttgagagcaagccccaaagccaggaggtcaaggaaaatcaaactgtcaagttcagatgtgaagggcttgccgtgatggaggtggccccctccttctccagtgtcctgaaggactgcgctgttattgagggccaggattttgtgctgcagtgctccgtacgggggaccccagtgccccggatcacttggctgctgaatgggcagcccatccagtacgctcgctccacctgcgaggccggcgtggctgagctccacatccaggatgccctgccggaggaccatggcacctacacctgcctagctgagaatgccttggggcaggtgtcctgcagcgcctgggtcaccgtccatgaaaagaagagtagcaggaagagtgagtaccttctgcctgtggctcccagcaagcccactgcacccatcttcctgcagggcctctctgatctcaaagtcatggatggaagccaggtcactatgactgtccaagtgtcagggaatccaccccctgaagtcatctggctgcacaatgggaatgagatccaagagtcagaggacttccactttgaacagagaggaactcagcacagcctttgtatccaggaagtgttcccggaggacacgggcacgtacacctgcgaggcctggaacagcgctggagaggtccgcacccaggccgtgctcacggtacaagagcctcacgatggcacccagccctggttcatcagtaagcctcgctcagtgacagcctccctgggccagagtgtcctcatctcctgcgccatagctggtgacccctttcctaccgtgcactggctcagagatggcaaagccctctgcaaagacactggccacttcgaggtgcttcagaatgaggacgtgttcaccctggttctaaagaaggtgcagccctggcatgccggccagtatgagatcctgctcaagaaccgggttggcgaatgcagttgccaggtgtcactgatgctacagaacagctctgccagagcccttccacgggggagggagcctgccagctgcgaggacctctgtggtggaggagttggtgctgatggtggtggtagtgaccgctatgggtccctgaggcctggctggccagcaagagggcagggttggctagaggaggaagacggcgaggacgtgcgaggggtgctgaagaggcgcgtggagacgaggcagcacactgaggaggcgatccgccagcaggaggtggagcagctggacttccgagacctcctggggaagaaggtgagtacaaagaccctatcggaagacgacctgaaggagatcccagccgagcagatggatttccgtgccaacctgcagcggcaagtgaagccaaagactgtgtctgaggaagagaggaaggtgcacagcccccagcaggtcgattttcgctctgtcctggccaagaaggggacttccaagacccccgtgcctgagaaggtgccaccgccaaaacctgccaccccggattttcgctcagtgctgggtggcaagaagaaattaccagcagagaatggcagcagcagtgccgagaccctgaatgccaaggcagtggagagttccaagcccctgagcaatgcacagccttcagggcccttgaaacccgtgggcaacgccaagcctgctgagaccctgaagccaatgggcaacgccaagcctgccgagaccctgaagcccatgggcaatgccaagcctgatgagaacctgaaatccgctagcaaagaagaactcaagaaagacgttaagaatgatgtgaactgcaagagaggccatgcagggaccacagataatgaaaagagatcagagagccaggggacagccccagccttcaagcagaagctgcaagatgttcatgtggcagagggcaagaagctgctgctccagtgccaggtgtcttctgaccccccagccaccatcatctggacgctgaacggaaagaccctcaagaccaccaagttcatcatcctctcccaggaaggctcactctgctccgtctccatcgagaaggcactgcctgaggacagaggcttatacaagtgtgtagccaagaatgacgctggccaggcggagtgctcctgccaagtcaccgtggatgatgctccagccagtgagaacaccaaggccccagagatgaaatcccggaggcccaagagctctcttcctcccgtgctaggaactgagagtgatgcgactgtgaaaaagaaacctgcccccaagacacctccgaaggcagcaatgccccctcagatcatccagttccctgaggaccagaaggtacgcgcaggagagtcagtggagctgtttggcaaagtgacaggcactcagcccatcacctgtacctggatgaagttccgaaagcagatccaggaaagcgagcacatgaaggtggagaacagcgagaatggcagcaagctcaccatcctggccgcgcgccaggagcactgcggctgctacacactgctggtggagaacaagctgggcagcaggcaggcccaggtcaacctcactgtcgtggataagccagaccccccagctggcacaccttgtgcctctgacattcggagctcctcactgaccctgtcctggtatggctcctcatatgatgggggcagtgctgtacagtcctacagcatcgagatctgggactcagccaacaagacgtggaaggaactagccacatgccgcagcacctctttcaacgtccaggacctgctgcctgaccacgaatataagttccgtgtacgtgcaatcaacgtgtatggaaccagtgagccaagccaggagtctgaactcacaacggtaggagagaaacctgaagagccgaaggatgaagtggaggtgtcagatgatgatgagaaggagcccgaggttgattaccggacagtgacaatcaatactgaacaaaaagtatctgacttctacgacattgaggagagattaggatctgggaaatttggacaggtctttcgacttgtagaaaagaaaactcgaaaagtctgggcagggaagttcttcaaggcatattcagcaaaagagaaagagaatatccggcaggagattagcatcatgaactgcctccaccaccctaagctggtccagtgtgtggatgcctttgaagaaaaggccaacatcgtcatggtcctggagatcgtgtcaggaggggagctgtttgagcgcatcattgacgaggactttgagctgacggagcgtgagtgcatcaagtacatgcggcagatctcggagggagtggagtacatccacaagcagggcatcgtgcacctggacctcaagccggagaacatcatgtgtgtcaacaagacgggcaccaggatcaagctcatcgactttggtctggccaggaggctggagaatgcggggtctctgaaggtcctctttggcaccccagaatttgtggctcctgaagtgatcaactatgagcccatcggctacgccacagacatgtggagcatcggggtcatctgctacatcctagtcagtggcctttcccccttcatgggagacaacgataacgaaaccttggccaacgttacctcagccacctgggacttcgacgacgaggcattcgatgagatctccgacgatgccaaggatttcatcagcaatctgctgaagaaagatatgaaaaaccgcctggactgcacgcagtgccttcagcatccatggctaatgaaagataccaagaacatggaggccaagaaactctccaaggaccggatgaagaagtacatggcaagaaggaaatggcagaaaacgggcaatgctgtgagagccattggaagactgtcctctatggcaatgatctcagggctcagtggcaggaaatcctcaacagggtcaccaaccagcccgctcaatgcagaaaaactagaatctgaagaagatgtgtcccaagctttccttgaggctgttgctgaggaaaagcctcatgtaaaaccctatttctctaagaccattcgcgatttagaagttgtggagggaagtgctgctagatttgactgcaagattgaaggatacccagaccccgaggttgtctggttcaaagatgaccagtcaatcagggagtcccgccacttccagatagactacgatgaggacgggaactgctctttaattattagtgatgtttgcggggatgacgatgccaagtacacctgcaaggctgtcaacagtcttggagaagccacctgcacagcagagctcattgtggaaacgatggaggaaggtgaaggggaaggggaagaggaagaagagtgaaacaaagccagagaaaagcagtttctaagtcatattaaaaggactatttctctaaaactc

SEQ ID NO: 230141 - DNA, 2337 bp, Artificial Sequence
  derived and/or modified sequence
aacaaacaagtgtccgagctggcaggacgacccagcagggtcagccgtgaggaggagggagcagagcgaggtccgtgtgggagacttcctagaggagatgctccagccagtgagaacaccaaggccccagagatgaaatcccggaggcccaagagctctcttcctcccgtgctaggaactgagagtgatgcgactgtgaaaaagaaacctgcccccaagacacctccgaaggcagcaatgccccctcagatcatccagttccctgaggaccagaaggtacgcgcaggagagtcagtggagctgtttggcaaagtgacaggcactcagcccatcacctgtacctggatgaagttccgaaagcagatccaggaaagcgagcacatgaaggtggagaacagcgagaatggcagcaagctcaccatcctggccgcgcgccaggagcactgcggctgctacacactgctggtggagaacaagctgggcagcaggcaggcccaggtcaacctcactgtcgtggataagccagaccccccagctggcacaccttgtgcctctgacattcggagctcctcactgaccctgtcctggtatggctcctcatatgatgggggcagtgctgtacagtcctacagcatcgagatctgggactcagccaacaagacgtggaaggaactagccacatgccgcagcacctctttcaacgtccaggacctgctgcctgaccacgaatataagttccgtgtacgtgcaatcaacgtgtatggaaccagtgagccaagccaggagtctgaactcacaacggtaggagagaaacctgaagagccgaaggatgaagtggaggtgtcagatgatgatgagaaggagcccgaggttgattaccggacagtgacaatcaatactgaacaaaaagtatctgacttctacgacattgaggagagattaggatctgggaaatttggacaggtctttcgacttgtagaaaagaaaactcgaaaagtctgggcagggaagttcttcaaggcatattcagcaaaagagaaagagaatatccggcaggagattagcatcatgaactgcctccaccaccctaagctggtccagtgtgtggatgcctttgaagaaaaggccaacatcgtcatggtcctggagatcgtgtcaggaggggagctgtttgagcgcatcattgacgaggactttgagctgacggagcgtgagtgcatcaagtacatgcggcagatctcggagggagtggagtacatccacaagcagggcatcgtgcacctggacctcaagccggagaacatcatgtgtgtcaacaagacgggcaccaggatcaagctcatcgactttggtctggccaggaggctggagaatgcggggtctctgaaggtcctctttggcaccccagaatttgtggctcctgaagtgatcaactatgagcccatcggctacgccacagacatgtggagcatcggggtcatctgctacatcctagtcagtggcctttcccccttcatgggagacaacgataacgaaaccttggccaacgttacctcagccacctgggacttcgacgacgaggcattcgatgagatctccgacgatgccaaggatttcatcagcaatctgctgaagaaagatatgaaaaaccgcctggactgcacgcagtgccttcagcatccatggctaatgaaagataccaagaacatggaggccaagaaactctccaaggaccggatgaagaagtacatggcaagaaggaaatggcagaaaacgggcaatgctgtgagagccattggaagactgtcctctatggcaatgatctcagggctcagtggcaggaaatcctcaacagggtcaccaaccagcccgctcaatgcagaaaaactagaatctgaagaagatgtgtcccaagctttccttgaggctgttgctgaggaaaagcctcatgtaaaaccctatttctctaagaccattcgcgatttagaagttgtggagggaagtgctgctagatttgactgcaagattgaaggatacccagaccccgaggttgtctggttcaaagatgaccagtcaatcagggagtcccgccacttccagatagactacgatgaggacgggaactgctctttaattattagtgatgtttgcggggatgacgatgccaagtacacctgcaaggctgtcaacagtcttggagaagccacctgcacagcagagctcattgtggaaacgatggaggaaggtgaaggggaaggggaagaggaagaagagtgaaacaaagccagagaaaagcagtttctaagtcatattaaaaggactatttctctaaaactc

SEQ ID NO: 230142 - DNA, 5537 bp, Artificial Sequence
  derived and/or modified sequence
atgggggacgtaaagcttgtggcatcttctcatatctcaaaaacttcattgtcagttgacccttccagggtcgactccatgcctctcaccgaagccccagcatttatcctgccacccagaaatctctgtatcaaagagggggcaacagccaagtttgaaggtcgtgttcggggataccccgaaccacaggtgacctggcacaggaacggacagcctatcacgtctggtggacgcttccttctcgattgtggaatcagaggcacattcagtctggtgatccatgcggtgcatgaagaggacaggggtaaatatacatgtgaggccacaaacggttcaggtgcaagacaagtgaccgtcgaattaactgtagagggatctttcgccaaacaactcggtcagcccgtagtgtctaaaacactaggggaccgctttagcgcccctgctgtcgagacccggccatctatctggggagagtgcccccctaagttcgccactaagctgggcagagtggtcgttaaagagggccagatgggccgattttcctgcaagattaccggcaggccacagccccaggttacatggcttaagggaaacgtgcctcttcagccgtccgcgcgagtcagcgtcagtgagaaaaacggtatgcaggtcttggagatccatggcgttaatcaggacgatgtgggagtctatacgtgcttagtggttaacggctccggcaaggcatccatgagtgcggaactcagtatacaggggttggacagtgctaaccggtctttcgtgagagaaactaaagctacaaattccgacgttagaaaggaggtgacgaacgtgatctcaaaggaatctaagctggattctctggaggctgccgcaaagtctaagaactgctcaagtccccagcgaggcggttcacctccctgggccgctaatagccagccccagcctcccagggaaagcaaacttgagtcttgtaaagacagtccgaggaccgcccctcagactcctgttctgcagaaaacttcttcctctatcacccttcaggcggctcgcgtccagcccgaacctcgggctcctggcctaggtgtgctgagtccctctggggaggagcgtaagcgacctgctccccctcgcccagcaacatttcctacaaggcagccaggactaggaagccaggacgtggtctccaaggctgctaataggaggattcccatggagggtcagagggattctgcctttcctaagtttgagtctaaaccccaaagccaggaagtcaaggaaaatcagaccgtgaagtttaggtgtgaaggtttggcagtgatggaagtcgccccttctttcagttccgtgctcaaagattgcgcggtcatcgaaggccaggattttgtgctgcagtgctcagtcagaggtacaccagtccccaggatcacctggttgttgaacggacagccaatccagtacgcccgttcgacatgcgaagccggtgtggctgaattgcatatccaagatgcccttcctgaagaccacggtacttatacatgcttagccgagaatgcactggggcaagttagctgttcagcctgggttactgtgcacgaaaagaagagtagccgtaaatccgagtacctcctaccagtggccccttcaaagccaaccgcacctatctttcttcagggcttgagtgacttaaaggttatggacgggagtcaggtaaccatgacagtgcaggtcagcggaaacccccctcccgaggtaatctggctccataatgggaacgagattcaagaatcagaggacttccacttcgagcagcgtggcacccagcactcgttatgtatccaggaggtgttcccggaggatacaggaacctacacgtgtgaagcctggaactctgcaggggaagtgagaacccaggctgttctgacagttcaggagccgcacgacggaacccagccgtggttcatttccaaacccagaagcgtgaccgcctcccttgggcagagcgttttgatcagctgcgcaatcgctggtgaccctttccccactgttcactggctgagagacggaaaggcgctttgtaaggacacagggcattttgaagtactgcaaaacgaagacgtattcaccctggtgctgaagaaagtacaaccctggcacgccggtcagtatgaaatcctcctgaagaacagagtgggcgaatgtagctgccaggtgagcctcatgctgcagaattcgtctgccagagcgctcccacgaggcagagagcccgctagctgcgaggacctctgtggtgggggtgtgggagcggacggaggcggatctgatagatatgggagcctgcggccaggctggcctgctaggggacagggctggctcgaggaagaggacggggaggatgtgagaggcgtgttgaagagacgcgtggagacacggcagcacacagaagaggccataagacagcaagaggtagagcagctggatttccgcgacctattaggaaaaaaagtaagtacgaaaactctttccgaagacgatttgaaggagatcccggctgaacagatggacttccgggcaaaccttcagcgtcaagtaaagcctaagacagtgtctgaagaagagcgcaaagtgcactccccacagcaggttgacttccggagcgtactagccaagaagggaaccagcaagacacccgtccccgaaaaggttccacccccaaagcccgcaacacctgattttcgctcggtgttgggaggaaaaaagaaactgcccgcagagaatggtagttcttcagctgagacattgaacgcaaaagctgtcgaaagctccaagcctctgagcaatgcccaaccgagcgggcctctcaagccagtgggaaacgccaagcctgcagagactctcaaacccatgggcaatgccaaacccgctgagaccttgaagcctatgggcaatgctaagccagatgaaaacttgaaaagtgcatcaaaggaagaacttaagaaagacgtgaaaaacgatgttaattgcaaaaggggccacgcaggaacaacagacaacgagaagagaagtgaaagccaggggaccgccccagctttcaagcaaaagttacaggatgtgcacgttgctgagggaaaaaaactgcttttgcagtgtcaagtctcaagcgatccccctgccaccatcatttggaccctgaacggcaaaaccctcaaaaccaccaagtttatcatcctgagtcaagaaggcagcctctgttccgtttcaatcgagaaggcgctccctgaagataggggcttgtacaaatgcgtcgcaaagaatgacgctggtcaagcagagtgttcttgccaagtgacagtggatgatgcccctgcaagcgaaaataccaaggcaccggagatgaagtcccgccgtcctaagtcctccttgccacctgtgttgggtactgagtccgatgcaaccgttaaaaaaaaacccgctccgaaaactcctccaaaggcagccatgccacctcaaatcattcaatttcctgaggaccagaaagtcagagccggtgagtccgtcgaactctttggaaaggtgactggcacgcaacccatcacttgcacttggatgaagttcagaaaacagatacaggagtcagagcatatgaaggtggaaaatagtgagaatgggtcgaaacttacaatcttagctgccaggcaggagcactgtggttgttatacactgttagtggagaataagctagggagccgacaggcccaagtgaacctaactgttgtggacaaaccagaccccccagccggtaccccatgtgcgtccgatatccgctcaagttctctgactttaagttggtacgggagttcctacgacggaggttctgccgttcagagctactctatcgagatctgggacagtgctaacaagacctggaaagagctggcaacctgcaggagcacctcttttaacgtgcaggacctgctgcctgatcatgagtataaatttcgggtccgagcaatcaatgtgtatggaacctccgagccatcccaagagagcgaacttactactgtcggagaaaaacctgaagagccaaaagatgaggttgaagtgtccgacgacgatgaaaaggagcccgaagtcgattatcgcacagtcaccatcaacactgagcagaaagtttcagatttttatgacatcgaggaacgcctcgggtctggcaagtttgggcaagttttccgactggtcgaaaaaaaaacccggaaggtgtgggccggtaagttctttaaggcatactctgccaaggaaaaagaaaatattcgccaggaaatcagcataatgaactgcctgcaccatccaaagttggttcaatgcgttgacgcttttgaagaaaaggccaacatcgtcatggtgctggagattgtgtccggaggcgagctcttcgagcgcatcatcgacgaagattttgagttaaccgagagagagtgcattaaatacatgagacagatctctgagggagtggaatacatccacaagcagggcatagtccaccttgacctaaaacctgaaaatattatgtgcgtcaacaagacagggacaagaattaagctgattgacttcggtttggctcgacgcctcgagaacgccggttccctaaaagtcctgttcggcactccagagtttgtggcgcctgaggtcatcaattatgaacccatcggatacgccacggatatgtggagtattggtgtgatctgctatatccttgtttcaggcctgagcccgtttatgggagacaacgataacgaaaccctcgcgaacgtgacatctgccacttgggacttcgatgacgaagccttcgacgagatatctgacgatgccaaggacttcatttccaatctcttaaagaaggatatgaaaaatcgactggattgcactcagtgtctgcagcacccatggctgatgaaagataccaaaaatatggaagctaaaaaactgtccaaggaccgaatgaagaagtatatggccaggcggaagtggcagaagaccggcaacgcagtgcgagcaattggcaggcttagcagtatggccatgatcagcggcttgtccggcaggaaatcgagcacaggttctcccacatcccctctgaatgcagagaagctcgagagcgaagaggacgtctcacaggcattcctggaggcagtcgcggaggagaaacctcacgtaaagccctatttttccaagacgatccgggacctcgaagtggttgaaggaagcgccgcacggtttgactgcaagatcgaaggttatccagacccggaagtcgtgtggtttaaggacgaccagtctatcagagagtcacggcattttcagatcgattatgacgaagacggaaactgctccctaattattagtgatgtgtgcggggatgacgatgcaaagtacacatgtaaggccgtgaacagtcttggggaagccacatgcaccgccgagttgatcgtggagactatggaagaaggtgagggggaaggcgaggaggaggaggagta

SEQ ID NO: 230143 - DNA, 2145 bp, Artificial Sequence
  derived and/or modified sequence
atgaagtctaggagacccaagtcaagcttaccgccagtcctgggtaccgagagtgacgcaaccgtgaagaagaagcccgcaccgaagaccccccctaaggcagcgatgcctcctcagataatccaatttccagaggatcagaaagtcagggccggagagtcagtggagctcttcggcaaagtcaccggaacacaacctattacttgcacctggatgaaatttaggaagcagattcaggagagtgaacacatgaaggttgagaacagcgagaacggctcgaaattgacaatcctggcagctagacaggagcactgcggatgttataccctcctggtggagaacaagctgggttctcgacaagcccaggtgaaccttactgtggtggataaacccgatccccctgccggaactccctgcgcaagcgacattaggtcatcaagcttgacactgtcctggtacggatcatcgtacgacggaggctctgccgtacagtcatatagcattgagatatgggattccgccaataaaacctggaaggaactggctacttgtagatcgaccagtttcaatgttcaggatcttttgccagaccacgaatacaagtttcgggtcagagccattaatgtttacggtacgagcgaaccttctcaggagagtgagctgacgaccgtcggggagaaacccgaggaacccaaagacgaggtcgaagtgagtgacgatgacgaaaaagagccggaggtggattatagaaccgtgactattaatactgaacaaaaagtgagcgacttttatgatattgaagaacgtctgggcagcggcaagtttgggcaggtgttcagacttgtcgaaaaaaagaccaggaaagtctgggcgggaaaattcttcaaggcctactcggctaaggagaaggagaatattagacaggaaattagtatcatgaattgcttacatcaccccaagctagtacagtgcgtcgatgctttcgaagagaaagctaatatcgttatggtactcgaaattgtgagcggtggagagctgttcgagagaatcatcgatgaagatttcgaacttactgagagggagtgcatcaagtacatgaggcagattagtgaaggtgtcgaatacatccacaagcaggggatcgtccacctggatctgaaacccgaaaacattatgtgtgtgaataagacggggacccgcatcaaactgattgatttcgggctggcgaggcggctagaaaacgctggatccctgaaggttttatttggcaccccagagttcgtggccccagaagtcatcaactacgagccaatcggatatgcaaccgacatgtggagtattggcgtcatatgctacatcttggtatctggattatctccttttatgggggacaatgacaatgagactcttgccaacgttacatctgctacttgggactttgatgatgaggcattcgatgaaatcagcgatgacgccaaagacttcattagtaacctgctgaagaaagatatgaagaatcggctggactgtacacagtgtctccaacatccatggctgatgaaagacacaaagaatatggaggccaagaaactgtctaaagaccgaatgaagaagtacatggccagacgcaaatggcaaaaaacagggaacgcggtgagagctatcggtcgactttcttccatggccatgataagcgggctgtcgggacgcaaaagcagcacaggatcccccacctccccactgaacgcagagaagctcgaaagcgaagaggatgtgagtcaggccttcctggaggccgttgctgaggaaaaaccccacgttaagccatactttagcaagactatcagggacctggaggtggtggagggctctgcggctaggttcgactgcaaaattgaagggtatccagatccggaagtcgtgtggttcaaggacgatcagagcatccgggagtcccgccattttcagatcgattatgatgaggacggcaactgctcactaatcatcagcgatgtgtgtggggatgacgatgccaagtatacgtgtaaagccgtgaacagccttggcgaggccacatgcacagccgaactgattgtcgagaccatggaggaaggtgagggcgagggcgaagaggaagaagagtag

SEQ ID NO: 230144 - protein, 1863 aa, Artificial Sequence
  derived and/or modified sequence
MGDVKLVASSHISKTSLSVDPSRVDSMPLTEAPAFILPPRNLCIKEGATAKFEGRVRGYPEPQVTWHRNGQPITSGGRFLLDCGIRGTFSLVIHAVHEEDRGKYTCEATNGSGARQVTVELTVEGSFAKQLGQPVVSKTLGDRFSAPAVETRPSIWGECPPKFATKLGRVVVKEGQMGRFSCKITGRPQPQVTWLKGNVPLQPSARVSVSEKNGMQVLEIHGVNQDDVGVYTCLVVNGSGKASMSAELSIQGLDSANRSFVRETKATNSDVRKEVTNVISKESKLDSLEAAAKSKNCSSPQRGGSPPWAANSQPQPPRESKLESCKDSPRTAPQTPVLQKTSSSITLQAARVQPEPRAPGLGVLSPSGEERKRPAPPRPATFPTRQPGLGSQDVVSKAANRRIPMEGQRDSAFPKFESKPQSQEVKENQTVKFRCEVSGIPKPEVAWFLEGTPVRRQEGSIEVYEDAGSHYLCLLKARTRDSGTYSCTASNAQGQLSCSWTLQVERLAVMEVAPSFSSVLKDCAVIEGQDFVLQCSVRGTPVPRITWLLNGQPIQYARSTCEAGVAELHIQDALPEDHGTYTCLAENALGQVSCSAWVTVHEKKSSRKSEYLLPVAPSKPTAPIFLQGLSDLKVMDGSQVTMTVQVSGNPPPEVIWLHNGNEIQESEDFHFEQRGTQHSLCIQEVFPEDTGTYTCEAWNSAGEVRTQAVLTVQEPHDGTQPWFISKPRSVTASLGQSVLISCAIAGDPFPTVHWLRDGKALCKDTGHFEVLQNEDVFTLVLKKVQPWHAGQYEILLKNRVGECSCQVSLMLQNSSARALPRGREPASCEDLCGGGVGADGGGSDRYGSLRPGWPARGQGWLEEEDGEDVRGVLKRRVETRQHTEEAIRQQEVEQLDFRDLLGKKVSTKTLSEDDLKEIPAEQMDFRANLQRQVKPKTVSEEERKVHSPQQVDFRSVLAKKGTSKTPVPEKVPPPKPATPDFRSVLGGKKKLPAENGSSSAETLNAKAVESSKPLSNAQPSGPLKPVGNAKPAETLKPMGNAKPAETLKPMGNAKPDENLKSASKEELKKDVKNDVNCKRGHAGTTDNEKRSESQGTAPAFKQKLQDVHVAEGKKLLLQCQVSSDPPATIIWTLNGKTLKTTKFIILSQEGSLCSVSIEKALPEDRGLYKCVAKNDAGQAECSCQVTVDDAPASENTKAPEMKSRRPKSSLPPVLGTESDATVKKKPAPKTPPKAAMPPQIIQFPEDQKVRAGESVELFGKVTGTQPITCTWMKFRKQIQESEHMKVENSENGSKLTILAARQEHCGCYTLLVENKLGSRQAQVNLTVVDKPDPPAGTPCASDIRSSSLTLSWYGSSYDGGSAVQSYSIEIWDSANKTWKELATCRSTSFNVQDLLPDHEYKFRVRAINVYGTSEPSQESELTTVGEKPEEPKDEVEVSDDDEKEPEVDYRTVTINTEQKVSDFYDIEERLGSGKFGQVFRLVEKKTRKVWAGKFFKAYSAKEKENIRQEISIMNCLHHPKLVQCVDAFEEKANIVMVLEIVSGGELFERIIDEDFELTERECIKYMRQISEGVEYIHKQGIVHLDLKPENIMCVNKTGTRIKLIDFGLARRLENAGSLKVLFGTPEFVAPEVINYEPIGYATDMWSIGVICYILNRLDCTQCLQHPWLMKDTKNMEAKKLSKDRMKKYMARRKWQKTGNAVRAIGRLSSMAMISGLSGRKSSTGSPTSPLNAEKLESEEDVSQAFLEAVAEEKPHVKPYFSKTIRDLEVVEGSAARFDCKIEGYPDPEVVWFKDDQSIRESRHFQIDYDEDGNCSLIISDVCGDDDAKYTCKAVNSLGEATCTAELIVETMEEGEGEGEEEEE

SEQ ID NO: 230145 - DNA, 5592 bp, Artificial Sequence
  derived and/or modified sequence
atgggcgacgtgaagctggtggccagcagccacatcagcaagaccagcctgagcgtggaccccagcagagtggacagcatgcccctgaccgaggcccccgccttcatcctgccccccagaaacctgtgcatcaaggagggcgccaccgccaagttcgagggcagagtgagaggctaccccgagccccaggtgacctggcacagaaacggccagcccatcaccagcggcggcagattcctgctggactgcggcatcagaggcaccttcagcctggtgatccacgccgtgcacgaggaggacagaggcaagtacacctgcgaggccaccaacggcagcggcgccagacaggtgaccgtggagctgaccgtggagggcagcttcgccaagcagctgggccagcccgtggtgagcaagaccctgggcgacagattcagcgcccccgccgtggagaccagacccagcatctggggcgagtgcccccccaagttcgccaccaagctgggcagagtggtggtgaaggagggccagatgggcagattcagctgcaagatcaccggcagaccccagccccaggtgacctggctgaagggcaacgtgcccctgcagcccagcgccagagtgagcgtgagcgagaagaacggcatgcaggtgctggagatccacggcgtgaaccaggacgacgtgggcgtgtacacctgcctggtggtgaacggcagcggcaaggccagcatgagcgccgagctgagcatccagggcctggacagcgccaacagaagcttcgtgagagagaccaaggccaccaacagcgacgtgagaaaggaggtgaccaacgtgatcagcaaggagagcaagctggacagcctggaggccgccgccaagagcaagaactgcagcagcccccagagaggcggcagccccccctgggccgccaacagccagccccagccccccagagagagcaagctggagagctgcaaggacagccccagaaccgccccccagacccccgtgctgcagaagaccagcagcagcatcaccctgcaggccgccagagtgcagcccgagcccagagcccccggcctgggcgtgctgagccccagcggcgaggagagaaagagacccgccccccccagacccgccaccttccccaccagacagcccggcctgggcagccaggacgtggtgagcaaggccgccaacagaagaatccccatggagggccagagagacagcgccttccccaagttcgagagcaagccccagagccaggaggtgaaggagaaccagaccgtgaagttcagatgcgaggtgagcggcatccccaagcccgaggtggcctggttcctggagggcacccccgtgagaagacaggagggcagcatcgaggtgtacgaggacgccggcagccactacctgtgcctgctgaaggccagaaccagagacagcggcacctacagctgcaccgccagcaacgcccagggccagctgagctgcagctggaccctgcaggtggagagactggccgtgatggaggtggcccccagcttcagcagcgtgctgaaggactgcgccgtgatcgagggccaggacttcgtgctgcagtgcagcgtgagaggcacccccgtgcccagaatcacctggctgctgaacggccagcccatccagtacgccagaagcacctgcgaggccggcgtggccgagctgcacatccaggacgccctgcccgaggaccacggcacctacacctgcctggccgagaacgccctgggccaggtgagctgcagcgcctgggtgaccgtgcacgagaagaagagcagcagaaagagcgagtacctgctgcccgtggcccccagcaagcccaccgcccccatcttcctgcagggcctgagcgacctgaaggtgatggacggcagccaggtgaccatgaccgtgcaggtgagcggcaaccccccccccgaggtgatctggctgcacaacggcaacgagatccaggagagcgaggacttccacttcgagcagagaggcacccagcacagcctgtgcatccaggaggtgttccccgaggacaccggcacctacacctgcgaggcctggaacagcgccggcgaggtgagaacccaggccgtgctgaccgtgcaggagccccacgacggcacccagccctggttcatcagcaagcccagaagcgtgaccgccagcctgggccagagcgtgctgatcagctgcgccatcgccggcgaccccttccccaccgtgcactggctgagagacggcaaggccctgtgcaaggacaccggccacttcgaggtgctgcagaacgaggacgtgttcaccctggtgctgaagaaggtgcagccctggcacgccggccagtacgagatcctgctgaagaacagagtgggcgagtgcagctgccaggtgagcctgatgctgcagaacagcagcgccagagccctgcccagaggcagagagcccgccagctgcgaggacctgtgcggcggcggcgtgggcgccgacggcggcggcagcgacagatacggcagcctgagacccggctggcccgccagaggccagggctggctggaggaggaggacggcgaggacgtgagaggcgtgctgaagagaagagtggagaccagacagcacaccgaggaggccatcagacagcaggaggtggagcagctggacttcagagacctgctgggcaagaaggtgagcaccaagaccctgagcgaggacgacctgaaggagatccccgccgagcagatggacttcagagccaacctgcagagacaggtgaagcccaagaccgtgagcgaggaggagagaaaggtgcacagcccccagcaggtggacttcagaagcgtgctggccaagaagggcaccagcaagacccccgtgcccgagaaggtgcccccccccaagcccgccacccccgacttcagaagcgtgctgggcggcaagaagaagctgcccgccgagaacggcagcagcagcgccgagaccctgaacgccaaggccgtggagagcagcaagcccctgagcaacgcccagcccagcggccccctgaagcccgtgggcaacgccaagcccgccgagaccctgaagcccatgggcaacgccaagcccgccgagaccctgaagcccatgggcaacgccaagcccgacgagaacctgaagagcgccagcaaggaggagctgaagaaggacgtgaagaacgacgtgaactgcaagagaggccacgccggcaccaccgacaacgagaagagaagcgagagccagggcaccgcccccgccttcaagcagaagctgcaggacgtgcacgtggccgagggcaagaagctgctgctgcagtgccaggtgagcagcgacccccccgccaccatcatctggaccctgaacggcaagaccctgaagaccaccaagttcatcatcctgagccaggagggcagcctgtgcagcgtgagcatcgagaaggccctgcccgaggacagaggcctgtacaagtgcgtggccaagaacgacgccggccaggccgagtgcagctgccaggtgaccgtggacgacgcccccgccagcgagaacaccaaggcccccgagatgaagagcagaagacccaagagcagcctgccccccgtgctgggcaccgagagcgacgccaccgtgaagaagaagcccgcccccaagaccccccccaaggccgccatgcccccccagatcatccagttccccgaggaccagaaggtgagagccggcgagagcgtggagctgttcggcaaggtgaccggcacccagcccatcacctgcacctggatgaagttcagaaagcagatccaggagagcgagcacatgaaggtggagaacagcgagaacggcagcaagctgaccatcctggccgccagacaggagcactgcggctgctacaccctgctggtggagaacaagctgggcagcagacaggcccaggtgaacctgaccgtggtggacaagcccgacccccccgccggcaccccctgcgccagcgacatcagaagcagcagcctgaccctgagctggtacggcagcagctacgacggcggcagcgccgtgcagagctacagcatcgagatctgggacagcgccaacaagacctggaaggagctggccacctgcagaagcaccagcttcaacgtgcaggacctgctgcccgaccacgagtacaagttcagagtgagagccatcaacgtgtacggcaccagcgagcccagccaggagagcgagctgaccaccgtgggcgagaagcccgaggagcccaaggacgaggtggaggtgagcgacgacgacgagaaggagcccgaggtggactacagaaccgtgaccatcaacaccgagcagaaggtgagcgacttctacgacatcgaggagagactgggcagcggcaagttcggccaggtgttcagactggtggagaagaagaccagaaaggtgtgggccggcaagttcttcaaggcctacagcgccaaggagaaggagaacatcagacaggagatcagcatcatgaactgcctgcaccaccccaagctggtgcagtgcgtggacgccttcgaggagaaggccaacatcgtgatggtgctggagatcgtgagcggcggcgagctgttcgagagaatcatcgacgaggacttcgagctgaccgagagagagtgcatcaagtacatgagacagatcagcgagggcgtggagtacatccacaagcagggcatcgtgcacctggacctgaagcccgagaacatcatgtgcgtgaacaagaccggcaccagaatcaagctgatcgacttcggcctggccagaagactggagaacgccggcagcctgaaggtgctgttcggcacccccgagttcgtggcccccgaggtgatcaactacgagcccatcggctacgccaccgacatgtggagcatcggcgtgatctgctacatcctgaacagactggactgcacccagtgcctgcagcacccctggctgatgaaggacaccaagaacatggaggccaagaagctgagcaaggacagaatgaagaagtacatggccagaagaaagtggcagaagaccggcaacgccgtgagagccatcggcagactgagcagcatggccatgatcagcggcctgagcggcagaaagagcagcaccggcagccccaccagccccctgaacgccgagaagctggagagcgaggaggacgtgagccaggccttcctggaggccgtggccgaggagaagccccacgtgaagccctacttcagcaagaccatcagagacctggaggtggtggagggcagcgccgccagattcgactgcaagatcgagggctaccccgaccccgaggtggtgtggttcaaggacgaccagagcatcagagagagcagacacttccagatcgactacgacgaggacggcaactgcagcctgatcatcagcgacgtgtgcggcgacgacgacgccaagtacacctgcaaggccgtgaacagcctgggcgaggccacctgcaccgccgagctgatcgtggagaccatggaggagggcgagggcgagggcgaggaggaggaggagtag

SEQ ID NO: 230146 - DNA, 5592 bp, Artificial Sequence
  derived and/or modified sequence
atgggagacgtgaaactagtggccagtagccacatttcaaagacttcgctgtctgtggatccctctcgtgtagattcaatgcctctgacagaagcacctgccttcattttaccaccgaggaacctctgcatcaaggagggtgccaccgccaagtttgaaggcagagtgcggggataccctgagccccaggttacctggcataggaacgggcaaccgattacgtctgggggaaggtttctgcttgactgtgggattaggggaacttttagcttagtgattcacgcagttcacgaggaggaccgtggaaagtacacctgtgaagccaccaacggaagcggtgctcgtcaggtgactgtggaactgacagtggaaggatcattcgccaagcagctcggacagcccgtggtgtcaaaaacacttggagatcgattttcagcccccgcggtggaaacccggccgagtatttggggggaatgtcctccgaaattcgcgactaagctgggccgcgtagtggtgaaagagggccaaatggggagattctcctgcaagataactggtcgtccacaaccacaggtaacatggctcaaggggaacgtcccccttcaaccctctgcccgagtgagcgtgtccgaaaagaacggaatgcaggtcttggagattcacggcgtgaaccaggacgatgtgggagtttatacatgcctggttgttaacggctctgggaaggcctctatgtctgcagagctctccatccagggactagacagcgctaaccgcagctttgtccgcgaaacaaaagccactaactcggacgtcaggaaggaggtgacaaacgtcattagcaaggagagcaaacttgattctctagaggccgctgctaagtccaagaattgttcatccccccaacgcggagggtcacccccctgggcggcgaacagtcaacctcagcccccgagggagtctaaacttgaaagttgcaaggattctccacgcacagcgcctcagacgccggtcctgcagaaaaccagttcaagtattaccctgcaggcggcgagggtacagcccgagccacgtgccccggggcttggagttctgagcccttctggagaggagagaaagcgcccagctccacctagacctgcaacttttccgactagacagcccggcctggggagtcaggacgtagtctccaaagcagctaacagaagaattcccatggagggtcaaagggatagtgcgttccctaagttcgagtcgaagccacagtcccaggaagtgaaggaaaatcagacagttaaatttaggtgcgaagtaagcggcatacctaagccggaagttgcctggtttctggagggcacgcccgtgcgccgccaagaaggctccatagaagtatacgaggatgctggatcacattatctttgcctgttgaaagcccgcactagggatagcggcacatacagctgcactgcttctaatgctcagggccaactttcatgctcatggacgctgcaggtcgagcgtttggccgtgatggaggtggccccatctttcagtagcgtgctgaaggattgtgccgtcatagagggtcaggatttcgttctccagtgctcggttagaggtacacctgtaccacggatcacctggctgttgaatggccagccgatccagtacgcccggagtacatgcgaggctggggtggcagagctgcatattcaggacgcacttcccgaggaccatggcacatacacctgcctggcagagaatgctctcgggcaggtttcatgtagtgcctgggtgaccgtgcacgagaaaaaaagttctcgcaagtccgaatacctgcttccagttgctccctccaagcccactgccccgatattcctgcaaggcctcagtgaccttaaagttatggatggtagccaggtgactatgacggtccaggtcagcgggaacccaccccccgaagtgatttggctgcataatggcaacgaaatccaagagtccgaagatttccacttcgaacagcgcggtacccagcacagtctctgcatccaagaagtctttcccgaggacactggaacctacacgtgtgaggcgtggaactcagctggggaagtgcggacacaggcagtcctgactgtacaagagcctcatgacggtactcagccttggttcatatcaaagccccggtcagtcaccgcatcactgggccagtccgtgctgattagctgtgccattgcaggcgatcccttcccaactgtgcattggctgagagacggcaaagctctgtgcaaggatactggacattttgaagtactgcaaaacgaagacgtgtttaccctggtactgaagaaggtacagccctggcacgcagggcaatatgaaatactgctgaagaatcgtgtaggcgaatgttcgtgtcaggtgtcactgatgctgcaaaatagcagtgcccgggctctaccaagggggcgtgagccagcctcgtgtgaagacctgtgcggagggggggtcggcgcagatggaggagggagcgatagatatggctcactgcggcccgggtggcccgctcggggccaggggtggttagaggaagaggatggagaggacgtgcgcggcgtgttaaaacggagggtggaaaccagacagcacacagaggaggccatcaggcagcaggaagtagagcagctggatttcagagatttactcgggaagaaggtgtctacgaagacgctcagtgaagacgacctcaaggaaatacccgcagaacagatggattttcgcgcgaacctgcagcgccaggtcaagccaaagaccgtcagcgaggaggagcggaaagttcactcgccacaacaggtggacttcagatccgtgctagcaaaaaagggaactagcaaaactcccgtgcctgagaaggtgccccctcccaaaccagcgacccccgacttccgttctgtgcttggtggcaagaaaaaactcccagccgagaacggctcaagctccgcggaaaccctgaacgcaaaagccgtggaatcctctaagcctctgtcaaatgctcagccatctggccctttaaaaccagtcggtaacgcaaaaccagctgaaacgttaaaacctatgggtaatgcaaaacctgctgagaccctaaagccaatggggaacgctaaacctgatgagaacctcaaaagtgccagtaaggaagagctgaagaaggacgtgaagaatgatgtcaattgcaagcgaggccacgccggaaccaccgacaacgagaagcggtccgaaagtcaagggactgccccagcctttaaacagaagctgcaagatgtgcatgttgctgaggggaagaaactgctgttgcagtgtcaagtctccagcgaccctcctgccacgataatctggacgctcaacggcaagacacttaaaacaaccaagttcattatcctcagtcaggaaggctccctttgcagtgtctccatagagaaggccctgccagaagaccgtggactttataaatgcgtggccaaaaacgacgccggccaagccgaatgcagctgtcaggttactgtggatgatgcaccagcatccgaaaacaccaaggccccagaaatgaaaagcagaaggcccaagtctagtcttcctcccgtcctgggtactgaatctgatgctacggtgaaaaaaaagcccgcccccaaaacaccaccaaaagctgccatgccgcctcagataattcaattccccgaggatcaaaaggtaagggccggcgagtccgttgaactgtttggaaaagtgactgggacccaaccaatcacttgcacctggatgaagttcagaaagcagatccaggagagtgagcatatgaaagttgagaatagtgagaacggctctaagctgacgatactcgcggcaagacaagagcattgcggatgctacaccttactggtggagaacaaactgggtagcaggcaagcacaggtaaacctgactgtcgtggacaagcccgaccctcctgccggcacaccctgcgcttctgacattcgctctagttccctgacactgagttggtatggatcaagttacgacggagggtcagccgtgcagagctactcaatcgagatctgggatagcgccaataagacctggaaggagctggcgacatgtagatctacatcgtttaacgtccaggaccttcttcccgatcacgagtataaattccgagtaagagcaataaatgtctacggtacctctgaaccctcccaggagtccgaactaactacggtgggagagaaacctgaggaacccaaagatgaggttgaagtaagcgacgacgacgagaaagaacccgaagtggactatcggaccgtgaccatcaatactgagcaaaaggtgtctgatttctatgacattgaagagcgactgggctccggaaagttcggccaggtgtttaggttggtggagaagaagacccggaaggtatgggcggggaagtttttcaaggcctactctgctaaggagaaggagaatatcagacaggaaatttctataatgaactgcctgcatcatccaaagttggtacaatgtgtagatgcatttgaagagaaggctaatattgtcatggtattggagatcgtgtccggaggggagctgtttgagcggatcatcgatgaagactttgaactgacagaacgtgaatgcatcaagtacatgagacagatcagtgagggtgttgagtatatccataagcagggtatcgtccacctggatctgaaaccggaaaacatcatgtgtgttaataagactggcaccagaattaagcttatcgattttggcctggctaggagactagaaaacgctgggtctttgaaagtattattcggtactccagagttcgtcgctccggaggttatcaactatgagcctatcggctatgccactgacatgtggagtataggagttatctgttatatccttaaccggctagattgtactcagtgcttgcaacacccctggctcatgaaggacacaaagaacatggaagcaaaaaagctgtctaaggataggatgaagaagtacatggcccggaggaagtggcagaaaacaggcaatgcggttcgagccattggtagactatccagtatggcgatgatatccgggttgtccggtaggaagtccagtaccgggagcccaactagccctctaaacgctgagaaattggagtccgaggaagatgtatcccaagcttttcttgaagccgtcgccgaagaaaagccacacgtcaagccatatttcagcaaaacaatcagagatctggaggtcgtcgagggcagcgcggcccgttttgattgtaaaattgagggatatccagatcccgaggtggtgtggttcaaggatgatcaatccatacgcgagagtcggcacttccagatcgattatgacgaggatgggaattgttcacttatcatttcagatgtatgcggagacgatgacgccaagtacacttgtaaggctgtgaattccctcggcgaagccacttgtacggcagagctcatcgttgaaacaatggaagaaggtgaaggtgagggagaggaagaagaggagtag

SEQ ID NO: 230147 - DNA, 5592 bp, Artificial Sequence
  derived and/or modified sequence
atgggcgacgtgaagctggtggcctcgtcccacatctccaaaacaagccttagcgttgacccctcccgggtggatagcatgcccctgacagaggctccagctttcatccttccacctcgtaacctctgcatcaaagagggagcgacagcgaagttcgagggtcgcgtacgcggctaccctgaaccacaggtgacttggcatagaaacggccagcccattactagcggaggcagattcctgttggactgcggaatacgtggaactttttccctggtgatacacgcggtccacgaggaggaccgcggaaaatacacttgtgaggccaccaacgggtcaggggcgaggcaagtgactgtggaactgaccgtggaagggtctttcgctaagcagttgggacaacctgtcgtgagtaaaacactcggggacaggtttagcgccccggcggtggagacaagaccctctatttggggggaatgtccaccaaaattcgcaaccaaactcggccgggtggtagtgaaagagggccagatgggacggtttagttgtaagattaccgggaggccccagccacaggtcacttggcttaaaggcaatgtgccactccaacctagtgcacgggtgtctgtgtcagaaaaaaatggaatgcaggtactggagatccacggcgtaaatcaggatgatgtgggagtgtatacgtgcttggtcgttaacggcagcggtaaagcatctatgtccgcagaactgagcattcagggcttagactctgcaaacaggagttttgttcgggaaaccaaggctaccaacagtgatgttcggaaagaggtgaccaacgtaatctcaaaagagagtaaactggactcactggaggcggcagcaaagtctaagaactgcagttctcctcagagaggcgggtcacctccatgggccgccaattcccaaccgcagcctccacgcgagtcaaaactggaaagctgcaaagacagtccccgcacagcgccgcagacccctgtcctgcagaagacaagttcctcgataacgctccaggctgcgagggttcagcctgaaccccgcgctccggggctaggtgtcctctcaccttccggagaggaacgaaagcggcccgctccgcctcggcctgcaacatttcctacacgccagcccgggttaggatctcaagatgtcgtcagcaaggcggccaatcgccggatccccatggaggggcagcgagattccgctttcccgaagtttgaaagtaaaccccagtcacaagaggtgaaagaaaatcagacagtgaagttcaggtgtgaggttagcggtattcccaagcccgaggtggcatggtttctggaggggactcctgtccgaagacaagagggcagtattgaagtgtacgaggacgccggcagtcactatctgtgccttctgaaggcccggacgcgggactcaggcacctattcatgtaccgcctccaatgcacagggccagctctcatgctcttggacactgcaggtcgaacgactggcagtcatggaagtggctccatcatttagctcagtgctcaaggactgcgctgtgattgaaggtcaagatttcgtcttacaatgttccgtcagggggaccccagtgccgagaatcacatggctgttgaacggtcagcctattcaatatgcccggagtacttgtgaggctggagtggccgaactccatattcaagacgctctcccagaggaccatggcacttacacctgtcttgccgaaaacgctctggggcaggtgtcctgctctgcctgggttacagtccacgagaagaagtcctcccgcaagtctgaatacttgttgcccgtagcccctagcaagcctacagccccgattttccttcagggactctcagacctgaaagtcatggatggctcccaagtgacaatgacagttcaggtctcaggaaacccacctccagaggtgatctggctgcacaacggcaatgagatccaggagtcagaagacttccacttcgaacagcggggcactcagcattcattgtgcatccaagaagtgttccctgaggacactggcacttacacctgcgaagcatggaattctgccggcgaggtccgcacacaggctgtgcttactgtgcaggaaccccatgacggcacacaaccatggtttatttccaagcctcgatctgtgacagcgagtctgggacagtcagtgctgatttcctgcgccattgcaggtgatcctttccctacagtccactggctccgcgacggaaaagccctgtgcaaagacactggccatttcgaagtgctccaaaatgaggacgtattcacacttgtgctaaagaaagtgcagccttggcacgccgggcagtatgaaattctgctgaaaaacagggttggagagtgcagctgtcaggtgtcactcatgttgcagaattcatccgctagagcactcccacgcggcagggagccagcatcttgcgaggatctgtgcggaggaggggttggggcagacgggggtggatccgacaggtacggaagcctgagacctgggtggccagctagagggcaagggtggctggaagaggaggacggtgaagacgtgcggggtgtccttaaacgtcgggtcgaaactcggcagcatactgaggaagcgatccggcagcaagaggtagagcagttagactttagggatctcctgggaaaaaaggtctctactaagaccctttcagaggacgatctcaaggaaatccccgctgaacagatggattttagggctaacctacagaggcaggtcaaaccaaagacggtcagtgaagaagagcgcaaggtccatagcccacagcaggttgatttccgcagtgttctggctaagaagggaaccagcaaaacgccagtccctgaaaaagttccacccccaaaaccagctacccctgattttaggtccgtcctcggaggcaaaaaaaaacttccagctgaaaacggtagcagttccgccgagacactaaatgccaaggcagtcgagtctagtaagccattgtctaacgctcaacctagtgggccccttaaacccgtgggcaacgccaagcctgccgagacattgaagcccatgggcaatgctaagcccgcggaaaccctgaaaccaatggggaatgcaaagcccgatgagaaccttaagtcagccagcaaggaagaactgaagaaggacgtgaagaatgatgtcaattgcaagcggggccacgccgggaccaccgacaatgagaagcgctccgaatcccaggggacagctccggcttttaaacagaaactgcaggacgtgcatgtagccgaaggcaaaaagttgctgttgcaatgtcaggtctcatctgatcctcctgccacgattatttggacactaaacgggaaaactctgaaaactacaaaattcatcatcctgtcccaggaaggaagcctgtgttcggtgagcatcgaaaaggcgctgcccgaggatcgcgggctctacaagtgcgtagccaaaaatgacgcgggccaagccgagtgttcatgccaggtcaccgtggacgatgccccggcaagcgagaataccaaagcaccagaaatgaagtctagacgaccaaagagctccttacctcccgtcctcggaactgagtccgacgcaaccgtgaagaagaagcccgcccccaagacccctcccaaagccgcaatgccccctcagattatacagtttccagaagatcaaaaggtgagggctggtgagagcgttgaactgttcgggaaagttacagggacacaacctataacttgtacctggatgaagtttaggaaacagatccaagagtcagagcacatgaaagtggaaaacagcgaaaacggaagcaagcttaccatattggcagcccgccaagagcattgcggatgttacactctcctcgtggaaaacaaacttggtagtaggcaggcccaagtcaatctgacggtcgtagataaacctgacccccctgccggcactccatgtgcttccgacatcaggtcatcgtctttgacactgagctggtacggaagttcttacgatggaggatctgcagtccagtcatattctattgagatatgggactccgcgaacaagacatggaaagagcttgcgacgtgcagatccacctcatttaacgtacaggacctgctgccggaccacgaatacaaattccgcgtgagagcaattaatgtttacgggacgtccgaaccatcacaggagagcgaactgaccacagtgggcgagaagcccgaggaaccaaaggatgaggtggaggtgagtgacgatgatgagaaggagccggaggtggactataggaccgtgacgattaacacagaacagaaggtttcagatttctacgacatcgaggagcggttggggagtggcaaattcggccaggtttttcggctggttgaaaagaagaccaggaaggtgtgggctggcaagttttttaaagcctactcggctaaagagaaagaaaatatccgccaggagatttccatcatgaattgtcttcaccatcccaaactggtccagtgcgttgacgctttcgaggagaaggccaacattgtgatggtgctggagatagtctccgggggggagctctttgagagaatcattgacgaggacttcgagcttaccgaacgcgagtgcataaagtacatgcgccagatttctgaaggggtggagtatattcacaagcaaggcatcgtgcatctggatttaaagccagagaacatcatgtgtgtcaacaagacgggaacacgaattaagctgattgacttcggcttggctagacgtctagagaatgccggctctctcaaggtcctgtttggcactccagagttcgtggccccagaagtgataaactacgaacccattgggtacgcgacagacatgtggagcatcggggtgatttgctacatactgaatcggctcgactgcacacagtgcttgcagcatccctggctgatgaaggacacaaagaatatggaggctaagaagctgagtaaagatcggatgaaaaaatatatggccagaaggaaatggcagaaaaccggaaatgcagtgcgagccatcgggaggctttcttccatggctatgatttccgggctctcgggacggaagtcctcaaccggaagccctacttccccgctgaacgctgaaaaattggagagcgaggaagacgtaagccaagcttttcttgaggcagtcgccgaggagaagccacacgttaagccttatttcagtaaaacaatcagagacctcgaggtggttgagggctccgccgctcggttcgattgcaagatcgaaggctacccagatccggaggtcgtgtggtttaaagacgatcaaagtatccgcgagagccggcacttccagattgactacgatgaggacggcaattgctccctcattataagcgacgtctgcggggatgatgatgccaaatacacatgtaaagccgtgaactctctgggggaagccacatgtactgcggaattgatagtcgaaaccatggaggagggggaaggggaaggggaggaggaggaggaatag

SEQ ID NO: 230148 - DNA, 5592 bp, Artificial Sequence
  derived and/or modified sequence
atgggagatgtgaagctggtggccagcagccacatcagcaagaccagcctgtctgtggaccccagccgggtggacagcatgcccctgacagaggccccagccttcatcctgccccccaggaacctgtgcatcaaggagggcgccacagccaagtttgagggccgggtgcggggctacccagagccccaggtgacctggcacagaaatggccagcccatcaccagcggcggccgcttcctgctggactgtggcatccggggcaccttcagcctggtgattcatgctgtgcatgaagaagatcggggcaagtacacctgtgaggccaccaacggcagcggggcccggcaggtgacagtggagctgactgtggagggcagctttgccaagcagctgggccagcctgtggtgtccaagaccctgggggaccgcttcagcgccccagctgtggagacccggcccagcatctggggcgagtgcccccccaagtttgccaccaagctgggccgggtggtggtgaaggagggccagatgggccgcttcagctgcaagatcaccggccggccccagccccaggtgacctggctgaagggaaatgtgcccctgcagcccagcgcccgggtgtctgtgtctgagaagaatggcatgcaggtgctggagatccatggagtgaaccaggatgatgtgggcgtgtacacctgcctggtggtgaatggaagtggcaaggcctccatgtctgctgagctgagcatccagggcctggacagcgccaacagaagctttgtgcgggagaccaaggccaccaacagtgatgtgaggaaggaggtgaccaacgtcatcagcaaggagagcaagctggacagcctggaggccgccgccaagagcaagaactgcagcagcccccagagaggaggcagccccccctgggccgccaacagccagccccagcccccccgggagagcaagctggagagctgcaaggacagccccaggacagccccccagacccctgtgctgcagaagaccagcagcagcatcaccctgcaggccgcccgggtgcagcctgagccccgggcccctggcctgggcgtgctgagccccagcggggaggagaggaagaggcctgccccacccaggcctgccaccttccccacccggcagcccggcctgggcagccaggatgtggtgtccaaggccgccaacagacgcatccccatggagggccagagggacagcgccttccccaagtttgagagcaagccccagagccaggaggtgaaggagaaccagacagtgaagttccgctgtgaggtgtctggcatccccaagccagaggtggcctggttcctggagggcacccctgtgcggcggcaggagggcagcattgaggtgtatgaagatgctggcagccactacctgtgcctgctgaaggcccggacccgggacagcggcacctacagctgcacagccagcaatgcccagggccagctgagctgctcctggaccctgcaggtggagcggctggccgtgatggaggtggcccccagcttcagctctgtgctgaaggactgtgccgtcatcgagggccaggactttgtgctgcagtgcagcgtgcggggcacccctgtgccccgcatcacctggctgctgaatggccagcccatccagtatgcccggagcacctgtgaggccggcgtggccgagctgcacatccaggatgccctgcctgaggaccacggcacctacacctgcctggccgagaatgccctgggccaggtgtcctgcagcgcctgggtgacagtgcatgagaagaagagcagcaggaagtctgagtacctgctgcctgtggcccccagcaagcccacagcccccatcttcctgcagggcctgagtgacctgaaggtgatggatggcagccaggtgaccatgacagtgcaggtgtctggcaaccccccacctgaggtgatctggctgcacaatggaaatgagatccaggagagcgaggacttccactttgagcagaggggcacccagcacagcctgtgcatccaggaggtgtttcctgaggacaccggcacctacacctgtgaggcctggaacagcgctggggaggtgaggacccaggccgtgctgactgtgcaggagccccatgatggcacccagccctggttcatcagcaagcccaggtctgtgacagccagcctgggccagagcgtgctgatcagctgtgccatcgccggggaccccttccccaccgtgcactggctgagagatggcaaggccctgtgcaaggacaccggccactttgaggtgctgcagaatgaagatgtgttcaccctggtgctgaagaaggtgcagccctggcatgctggccagtatgagatcctgctgaagaacagagtgggggagtgcagctgccaggtgtccctgatgctgcagaacagcagcgcccgggccctgccccggggccgggagcccgccagctgtgaggacctgtgtggcggcggcgtgggcgcagatggcggcggcagtgacagatatggcagcctgcggcccggctggccagcccggggccagggctggctggaggaggaggatggagaagatgtgcggggcgtgctgaagagaagagtggagacccggcagcacacagaggaggccatccggcagcaggaggtggagcagctggacttccgggacctgctgggcaagaaggtgtccaccaagaccctgtctgaagatgacctgaaggagatcccagctgagcagatggacttccgggccaacctgcagaggcaggtgaagcccaagacagtgtctgaggaggagaggaaggtgcacagcccccagcaggtggacttccgctctgtgctggccaagaagggcaccagcaagacccctgtgcctgagaaggtgcccccacccaagccagccaccccagacttccgctctgtgctgggcggcaagaagaagctgcctgcagaaaatggcagcagcagcgctgagaccctgaatgccaaggctgtggagagcagcaagcccctgagcaatgcccagcccagcggccccctgaagcctgtgggcaatgccaagccagctgagaccctgaagcccatgggaaatgccaagccagctgagaccctgaagcccatgggaaatgccaagccagatgagaacctgaagagcgccagcaaggaggagctgaagaaggatgtgaagaatgatgtgaactgcaagaggggccacgccggcaccacagacaatgagaagaggtctgagagccagggcacagccccagccttcaagcagaagctgcaggatgtgcacgtggccgagggcaagaagctgctgctgcagtgccaggtgtccagtgaccccccagccaccatcatctggaccctgaatggcaagaccctgaagaccaccaagttcatcatcctgagccaggagggcagcctgtgcagcgtgtccattgagaaggccctgcctgaagatcggggcctgtacaagtgtgtggccaagaatgatgctggccaggccgagtgcagctgccaggtgacagtggatgatgccccagccagcgagaacaccaaggcccctgagatgaagagccggcggcccaagagcagcctgccccctgtgctgggcacagaaagtgatgccaccgtgaagaagaagccagcccccaagaccccacccaaggccgccatgccaccccagatcatccagtttcctgaggaccagaaggtgcgggccggggagagcgtggagctgtttgggaaggtgacaggcacccagcccatcacctgcacctggatgaagttcaggaagcagatccaggagagcgagcacatgaaggtggagaacagtgaaaatggcagcaagctgaccatcctggccgcccggcaggagcactgcggctgctacaccctgctggtggagaacaagctgggcagccggcaggcccaggtgaacctgactgtggtggacaagccagaccccccagctggcaccccctgtgccagtgacatccgcagcagcagcctgaccctgtcctggtacggcagcagctatgatggcggcagcgctgtgcagagctacagcattgagatctgggacagcgccaacaagacctggaaggagctggccacctgccgcagcaccagcttcaacgtgcaggacctgctgcctgaccacgagtacaagttccgggtgcgggccatcaacgtgtatggcaccagcgagcccagccaggagagcgagctgaccaccgtgggggagaagccagaggagcccaaggatgaggtggaggtgtctgatgatgatgagaaggagcctgaggtggactacagaacagtgaccatcaacacagagcagaaggtgtctgacttctatgacatcgaggagcggctgggcagcggcaagtttggccaggtgttccggctggtggagaagaagaccaggaaggtgtgggccggcaagttcttcaaggcctacagcgccaaggagaaggagaacatccggcaggagatcagcatcatgaactgcctgcaccaccccaagctggtgcagtgtgtggatgcctttgaggagaaggccaacatcgtgatggtgctggagatcgtgtctggaggagagctgtttgagcgcatcattgatgaagattttgagctgacagaaagagagtgcatcaagtacatgaggcagatcagcgagggcgtggagtacatccacaagcagggcatcgtgcacctggacctgaagccagagaacatcatgtgtgtgaacaagacaggcacccgcatcaagctgattgactttggcctggcccggcggctggagaatgccggcagcctgaaggtgctgtttggcaccccagagtttgtggcccctgaggtgatcaactatgagcccatcggctacgccacagacatgtggagcattggagtcatctgctacatcctgaaccggctggactgcacccagtgcctgcagcacccctggctgatgaaggacaccaagaacatggaggccaagaagctgagcaaggacaggatgaagaagtacatggcccggaggaagtggcagaagacaggaaatgctgtgcgggccatcggccgcctgagctccatggccatgatcagcggcctgagcggcaggaagagcagcacaggcagccccaccagccccctgaatgctgagaagctggagagtgaagaagatgtgtcccaggccttcctggaggccgtggccgaggagaagccccacgtgaagccctacttcagcaagaccatccgggacctggaggtggtggagggcagcgctgccaggtttgactgcaagattgagggctacccagaccctgaggtggtgtggttcaaggatgaccagagcatccgggagagccgccacttccagattgattatgatgaagatggcaactgcagcctcatcatcagtgatgtgtgtggagatgatgatgccaagtacacctgcaaggctgtgaacagcctgggggaggccacctgcacagctgagctgattgtggagaccatggaggagggggagggggagggggaggaggaggaggagtag

SEQ ID NO: 230149 - DNA, 5592 bp, Artificial Sequence
  derived and/or modified sequence
atgggcgacgtgaagctggtggccagcagccacatcagcaagacctctctttccgtcgacccctcaagggtggacagcatgccactcaccgaagccccggcgtttatcctgccacctcggaatctgtgtatcaaagaaggtgctacggcaaagtttgagggccgtgtgcgagggtacccagagccacaggtcacatggcaccgaaacggacagcctataacctctggaggcagattcctgcttgactgtggcataaggggcacgttcagcctggtgatccacgcagtgcacgaggaagaccgcggtaaatacacatgcgaggctactaacggtagcggagctcggcaggttaccgtcgagctcaccgtggaggggtccttcgccaaacagttaggtcagcctgtggtgtccaagacactaggcgataggttctctgctccggcagtggagacccgcccctccatttggggggagtgtccaccaaagttcgctactaagctcgggcgcgtcgtggtcaaggaaggacagatggggagattctcctgtaaaatcactggccgaccacaaccccaagtaacgtggctgaagggcaacgtgccactgcagccaagtgcacgtgtgagcgtgtccgaaaaaaacggtatgcaggtgcttgaaatacatggtgttaaccaagacgacgtaggggtctatacatgtctagtcgtcaacgggagcgggaaagcaagcatgtctgctgaactctccatccagggcctcgattcagccaatagaagtttcgttagagaaacaaaggctacaaactccgatgtgcggaaggaggtaaccaacgtgattagtaaagaatcaaagctcgactccctcgaggccgcggcaaagagtaaaaattgctctagcccacagagaggtgggtcacctccttgggccgccaattcccagccccaaccaccaagggagagcaaactcgaaagctgcaaggattcaccacggacggccccccagacaccggtactacagaagacttcctcttcaatcaccctgcaggctgcaagggtccaacccgaaccaagggcccccggcttaggggtcttgtctccatccggtgaggagcgcaagcggccggccccaccaaggcccgccacctttcctactaggcagcctggactcggaagccaggacgtggtctccaaggccgccaacagacggattccgatggagggacaaagagactccgctttcccaaaattcgaatcaaagccccagtcccaggaagtaaaagaaaaccaaactgttaaattccgctgtgaggtgagtggaatacccaaacctgaggtcgcttggttcttagaagggactcccgtgagacggcaggagggctcaattgaggtgtacgaagacgctgggagccactacttgtgtttgctgaaggcccgcacacgcgattctggaacatacagttgcactgcgtcgaatgcccaagggcagttatcctgctcatggaccttgcaggtggagcgccttgcagtgatggaagtggcgccttccttttcatcagttctaaaggactgcgctgtcatcgaagggcaggatttcgtgctccagtgcagcgtgcgagggacccccgttccaaggattacatggctactgaacggtcagccaatccagtacgctaggtccacctgcgaagcaggggtggccgagctccacattcaggacgccctgcctgaggatcacgggacctatacctgtctcgccgagaacgcactcgggcaggtgagctgctctgcttgggtcactgtgcacgagaagaagagttcacgaaagagcgagtacctgctgcctgtggcaccctcaaagcccaccgcaccaattttcctacaggggctgtcagatcttaaggtgatggacggctcgcaggtaactatgacagtccaggtctcaggaaaccctccgcctgaagtaatttggctgcacaacggcaatgaaatccaagagtccgaagacttccactttgagcagcgtggtacacagcattccctttgcatccaggaggtgtttcccgaggacactgggacctatacctgcgaggcatggaattccgccggagaggttaggacgcaggctgtgttgaccgtccaagagccccatgatggtacccagccgtggttcattagcaaacctagatccgtcacagcttcgcttggccagtctgtgctcatctcctgcgccatcgctggtgatccattcccaaccgtgcattggttgagagatggtaaagccctgtgtaaagacacaggtcacttcgaggtactacagaacgaggacgtcttcacccttgtcttgaagaaggtacaaccttggcatgcaggacagtatgagatactcctgaagaacagggtcggagaatgtagctgtcaggtttcactcatgcttcagaacagcagtgcccgggctctccctcgaggcagagagcccgcgtcctgcgaagatctatgtggcggaggcgtgggagctgatggtgggggtagcgatcggtacggatccttgcgccctggatggcccgcgcggggacagggatggctcgaggaggaagatggggaagacgttcgaggagtgctgaaaagacgggtggagacccggcagcacactgaggaggctatccggcaacaggaggtcgagcagttggattttcgggatctcttgggaaagaaagtgtccacaaaaacattgtctgaggacgatctcaaagaaatccccgctgaacagatggattttcgcgccaatctgcagagacaggtcaagccaaaaacagtatccgaggaagaacggaaagtgcacagtcctcaacaggtcgattttagaagcgtgctggcaaaaaaaggaacatcgaaaactcccgtgcctgagaaagtgcctcccccaaaaccagccactcccgatttccggtctgtccttggaggaaaaaagaaactgcctgcagagaatggctctagcagcgccgaaacactgaatgcgaaggccgtagaatcgagtaaaccattgagcaatgcccaaccttctgggcccttaaagccagtcggaaacgctaaacccgctgagacactcaagcccatgggtaatgccaaaccagccgagacactcaagcctatgggcaatgccaaaccagacgagaacctgaaaagtgccagtaaggaagagctcaaaaaggatgtgaaaaacgatgtcaactgtaaacggggccacgccggaaccactgataatgaaaagagatcagagtcgcagggaacggctcccgccttcaaacagaagctccaagacgtgcatgtggcagagggcaagaaattactgctgcagtgtcaggtttcttccgacccaccagcaaccatcatctggactttgaatggaaaaaccctaaaaaccacgaagttcataatactgtcacaggaggggtccctgtgcagcgtgtctatagaaaaagctctgccggaagaccgtggtctgtacaagtgtgttgccaagaatgacgccggccaggctgaatgtagctgtcaggtaaccgtggatgacgcccccgctagcgaaaacaccaaagcgcccgaaatgaaatctcgcaggccaaagtctagcctgccccccgtgctcggcacggagtccgatgctactgtcaaaaagaaacccgctccaaaaacaccacccaaagcggccatgccgccacagattattcagttccccgaggaccaaaaagtgagggcgggagaatccgttgaattgttcggtaaggttacagggacacagccaatcacttgcacttggatgaaatttcgaaaacagatccaggaatccgagcacatgaaagtcgagaattcagaaaatggtagtaagctcacaattcttgccgctcgacaagagcactgtggttgttatacattactggtggagaataagcttggatctagacaggcccaggttaatctgacagttgttgataagcccgaccccccggccgggacaccatgcgcgtctgatattcgcagctcatccctcacactctcttggtacgggagcagctacgacgggggctctgcggtacaatcatactcgatagaaatatgggactcagcgaacaaaacatggaaagaacttgcaacatgcaggagcaccagcttcaatgttcaggacctcctgcccgatcacgaatacaaattcagagtcagggccattaatgtctacgggacctcagaaccttcacaggagagcgagcttaccactgtcggtgaaaaacccgaggagcctaaagacgaagttgaggttagcgatgacgatgaaaaggagccagaggtcgattacaggacggtgaccatcaatacagaacagaaagttagcgacttttacgacatcgaagagcggctcggctctgggaaatttggtcaggtctttaggctggttgaaaaaaagacacggaaagtgtgggcagggaaattctttaaggcctactcagcgaaagagaaggaaaacatccgccaagagatctcaatcatgaactgccttcatcatccaaagctcgtccagtgcgttgacgcattcgaggagaaggcgaacattgtgatggtcttagagatagttagcggcggcgagctgtttgaaagaatcattgacgaagatttcgagctgaccgagcgagaatgtatcaaatacatgcggcagatctctgagggcgtggagtacattcataaacagggaattgtgcatctagatcttaaacctgagaacataatgtgtgtcaacaaaactgggactcgcatcaagcttatcgatttcggcctggctaggaggctagaaaatgcaggcagtctgaaggttttgtttggcaccccggagtttgtggccccggaggtcatcaattacgagccaatcggctacgcgacggatatgtggtcaatcggggtaatttgctacatactgaatcggctggactgcacacaatgcttacagcatccgtggctcatgaaagataccaagaatatggaggctaagaagctatccaaagacagaatgaagaaatacatggcaagaagaaagtggcagaaaaccggcaacgctgtccgggccattgggcgactttctagtatggctatgatcagtgggctaagtggccggaagtcctccaccggctctcctacctcccccctgaacgctgagaagcttgaatcagaggaggacgtttcccaggcatttctcgaggctgtggccgaggaaaagccccacgttaaaccctactttagtaaaacaataagggatcttgaagtagtcgagggaagtgctgctagatttgactgtaaaatcgagggttaccccgaccccgaagtggtgtggtttaaagacgatcagtccattagagagagcagacactttcagattgactacgacgaagacgggaattgcagcttaattataagtgacgtatgcggtgatgatgacgcgaaatacacttgcaaagcggttaacagccttggagaagctacctgcacagccgaactaatagtggagacgatggaggaaggggaaggcgagggagaggaggaggaggaatag

SEQ ID NO: 230150 - DNA, 5592 bp, Artificial Sequence
  derived and/or modified sequence
atgggcgacgtgaagctggtggccagcagccacatcagcaagaccagtctgagcgtggacccctctcgcgtggactctatgcccctgaccgaggccccagctttcatcctaccccctaggaatttatgtattaaggaaggtgcgacagcaaagtttgagggccgtgttcgcgggtatcctgagccccaagtcacctggcatcggaatggtcagccaatcacaagcggcggaagattcctgctggattgcggtattcggggcaccttcagcctggttatccatgctgttcacgaggaggaccgggggaagtacacttgcgaagcaacaaatggcagcggagctcgccaggtaacagttgaactcacagtcgagggctcattcgccaagcagttaggccagcctgtggtgtccaagacactgggggatcgattctctgccccagctgtcgagacccgaccaagcatttggggcgagtgcccgcctaagtttgcaacgaagttaggaagagtagtggttaaagagggtcagatgggccggttttcttgcaaaatcaccggcagacctcagccgcaggtgacttggcttaagggaaacgtgcccttgcagccctccgctagggtgagcgtaagcgaaaaaaatgggatgcaggtgcttgagatccacggcgtaaatcaagacgatgtgggcgtctacacctgccttgttgtgaatggatccggcaaggcatctatgtccgccgagttgtctattcaagggctggattcagccaaccgaagcttcgtgcgggagacaaaagcaacaaatagcgacgtccggaaagaggtcaccaatgtaatttctaaggaatcaaagcttgacagcctggaagcagctgctaagagcaagaactgctcctccccacagagaggcggatcccccccttgggctgctaatagtcaaccacagccccctagagaatccaaattggagtcctgtaaagatagcccacggaccgctcctcagacgcccgtgctgcagaagacctcctcctcaatcacactccaggcagctcgggtacagcctgagccaagagcccccggcctcggcgtgttaagcccctccggagaagagcggaagcggccagccccacctcggccagccacctttcctacgcggcagccaggcctgggttctcaggatgtggtctcaaaggccgcgaataggaggattcccatggagggccagcgagattccgcttttcctaagttcgagagcaagccccaatctcaggaggtgaaggaaaaccaaacggtaaaattccgatgtgaagtgagtggtatccctaagcccgaggtagcctggttcctggaaggaactcccgtgcgccgacaagaggggtccattgaggtctatgaggatgccgggtcacattacctgtgtctgctgaaagctcggacacgggactctggcacatatagctgtaccgcatccaatgcccagggccaactctcttgtagttggacacttcaggtcgaaaggctcgccgtgatggaagtggctccaagcttttccagtgtgctgaaggactgcgctgtgattgagggccaggactttgtcttgcagtgcagcgtgagaggtactcccgtgccacggattacctggctgctgaatggccagcctatccagtatgcccgttccacctgtgaagcaggcgtcgcagagcttcatatacaggacgcgttgcctgaggaccatggaacctatacgtgtctcgcagaaaacgcacttgggcaggtttcgtgcagcgcctgggttacagtacatgagaaaaagtcctctcgaaaatccgaatacctgctcccagttgcccccagtaagccaacagcaccgatcttcctccagggcctctctgacctaaaggtgatggatggatctcaagtaactatgacagtccaggtctccggaaacccgccgcctgaggtcatctggctccacaatggcaatgaaattcaggaatctgaggacttccacttcgagcagagggggacccagcacagcctctgcatccaggaggtgttccccgaagacacaggaacctacacctgtgaagcatggaacagcgcgggtgaagttagaactcaggctgtgctcacagtgcaagaacctcacgacggcacacagccctggttcatttccaaaccacgctctgttaccgcatctctcggccaaagcgtgctcatctcctgcgctattgccggcgatcctttccctactgtccattggctaagagacgggaaggccttgtgcaaggacaccgggcatttcgaagtgttacagaatgaagacgtcttcactctggtactcaagaaagtccaaccatggcacgccgggcagtacgaaatcctcctgaagaatagagtcggggaatgctcttgccaggtgagtctgatgctgcaaaactctagtgcgcgcgcgctccccagagggagggagcctgcctcttgcgaagatttgtgcggtggaggagttggggccgacggtggaggctcagatagatacggcagcctgaggcccggatggcctgctagagggcaaggctggctggaagaggaggatggggaggacgtgaggggcgtgttgaagaggagagtggagacccgacaacatacagaagaggcaatccggcaacaggaggtggagcagctagattttagagaccttctggggaagaaagtctcaaccaaaacactatccgaggatgacttaaaggaaattccggcagagcagatggatttccgggccaatttacagaggcaagtgaagccaaagactgtgagcgaggaggagcgtaaggtgcacagcccacaacaggtggactttaggtctgtcctagctaaaaaaggaacgagcaaaactccggtgcccgagaaagttccaccaccaaagcctgcaacacccgactttcgttccgttctcggagggaaaaaaaaactaccggccgaaaacggcagctcttctgccgaaactctgaatgccaaggctgtggagtcctctaaaccactatctaacgcccaaccctctggacccttaaaacccgtcggcaatgcgaagcctgccgaaacactgaaacctatggggaatgcaaagcctgccgaaactctgaagcctatgggcaacgcaaagcctgatgagaacctcaagtccgcctccaaagaggagttgaagaaagatgtgaagaacgatgtgaactgtaagcgaggacatgcaggcaccaccgataatgagaagcggagcgagagtcagggcacagcccctgcttttaagcagaaactacaggacgtgcacgtggcagagggcaaaaaactccttctgcaatgtcaggtgtcttctgatccaccagcaaccatcatttggactttgaatggcaagacacttaaaaccacaaaattcatcatcctgtcccaagagggcagcctgtgcagcgtgagcattgaaaaagcgttgccagaggaccgaggcctgtataaatgtgtcgctaagaatgacgctggccaagctgaatgctcctgtcaggtgacagtggatgacgctcccgcctcagaaaatacaaaggcacctgagatgaagtcaagacgtcccaagtcttcactgcctcccgtccttggaaccgagagcgacgcaaccgtgaaaaagaagccagcacccaagaccccgccaaaggctgccatgccccctcagatcatccaattccccgaggaccagaaagtgcgggccggcgagagcgtggaactgttcggcaaagttactggtactcaacctattacatgtacttggatgaagttccggaagcaaattcaggaaagtgaacacatgaaagtcgaaaactccgaaaacggcagcaagctaaccatactggccgctcgtcaagagcactgcgggtgctacactttgcttgtcgaaaataagttggggagtaggcaggcccaagtcaatcttactgttgtggataaacctgacccccctgcgggaaccccatgtgcttccgacatccgctcaagctctttaaccctctcgtggtacggttcctcctatgatggaggtagtgccgtgcagtcttacagtatcgagatttgggatagtgctaacaaaacatggaaggaactggccacatgccggagcacgagctttaatgtccaggaccttctacccgatcacgagtacaaatttagggtgcgggcaattaacgtgtatggtacctcggaacccagtcaggaatccgagttgacgaccgtgggcgaaaaacctgaagagcctaaggatgaggttgaggtgtcagatgatgacgagaaagagccagaggtggactatcggacggtcactattaatacagagcagaaggtgtctgatttttatgatattgaggagcgtctgggcagtgggaagtttggccaagtgtttaggctcgtggagaagaagactcggaaggtttgggcaggaaagttctttaaggcctactccgccaaggaaaaggaaaacattcggcaagaaatcagtattatgaactgcctgcaccaccccaagctggtccagtgcgttgacgctttcgaggaaaaggccaacatcgtgatggtcctggagattgtatccggaggagagctttttgaaaggattatcgatgaggattttgagctgactgaacgagagtgtattaagtatatgaggcaaatcagcgaaggcgtggagtatattcacaagcaagggattgtccacctggatctaaagcctgaaaacatcatgtgtgtaaacaagactgggactagaataaagcttattgatttcggtctagccaggcgactcgagaatgccgggtccctgaaagtgttgtttgggacacctgagttcgttgcccccgaggttatcaactatgagcctatcggctacgctacagatatgtggtctattggcgtgatatgttacatcctgaaccgacttgactgtacgcagtgcctgcagcatccatggctgatgaaggatacaaaaaatatggaggccaagaagctctccaaggatcggatgaagaaatacatggccagaaggaagtggcagaaaaccggtaatgcagttcgtgcaatcggccggctatcctcaatggctatgatctccggactgtccggccgcaagtcatcaacaggttctcctacatccccactgaatgccgagaagcttgagtctgaggaagacgtttctcaggcttttctggaggccgtcgccgaggagaagcctcacgtgaagccctacttcagtaaaaccatacgggatctggaggtggttgaagggtctgcagctcgctttgactgtaaaatagagggataccctgaccctgaagtcgtatggttcaaagacgatcagtccattcgcgagagcagacattttcagatcgattatgacgaggacggaaattgttccctgattattagcgacgtgtgtggggacgatgacgccaagtacacttgcaaagccgttaactccttgggcgaggccacctgcacagccgagttgattgtagagaccatggaggaaggcgaaggtgaaggggaggaggaagaggagtag

SEQ ID NO: 230151 - DNA, 7681 bp, Artificial Sequence
  derived and/or modified sequence
ggcgctgagcgagctcggagcccgcgctgtgcgcctgcggccggggcgccccgccgagcgccggtgccccggctcccgggccgccttcgccgcgcgggaaggattcttcaaaattaacagaaaccaattcgggccagctgaagagaaaaaataaaggtggctcccggctgcctctgctgcagttcagagcaacttcaggagcttcccagccgagagcttcaggacgcctttcctgtcccactggcccagttgccacaacaaacaacagagaagacggtgaccatgggggatgtgaagctggttgcctcgtcacacatttccaaaacctccctcagtgtggatccctcaagagttgactccatgcccctgacagaggcccctgctttcattttgccccctcggaacctctgcatcaaagaaggagccaccgccaagttcgaagggcgggtccggggttacccagagccccaggtgacatggcacagaaacgggcaacccatcaccagcgggggccgcttcctgctggattgcggcatccgggggactttcagccttgtgattcatgctgtccatgaggaggacaggggaaagtatacctgtgaagccaccaatggcagtggtgctcgccaggtgacagtggagttgacagtagaaggaagttttgcgaagcagcttggtcagcctgttgtttccaaaaccttaggggatagattttcagctccagcagtggagacccgtcctagcatctggggggagtgcccaccaaagtttgctaccaagctgggccgagttgtggtcaaagaaggacagatgggacgattctcctgcaagatcactggccggccccaaccgcaggtcacctggctcaagggaaatgttccactgcagccgagtgcccgtgtgtctgtgtctgagaagaacggcatgcaggttctggaaatccatggagtcaaccaagatgacgtgggagtgtacacgtgcctggtggtgaacgggtcggggaaggcctcgatgtcagctgaactttccatccaaggtttggacagtgccaataggtcatttgtgagagaaacaaaagccaccaattcagatgtcaggaaagaggtgaccaatgtaatctcaaaggagtcgaagctggacagtctggaggctgcagccaaaagcaagaactgctccagcccccagagaggtggctccccaccctgggctgcaaacagccagcctcagcccccaagggagtccaagctggagtcatgcaaggactcgcccagaacggccccgcagaccccggtccttcagaagacttccagctccatcaccctgcaggccgcaagagttcagccggaaccaagagcaccaggcctgggggtcctatcaccttctggagaagagaggaagaggccagctcctccccgtccagccaccttccccaccaggcagcctggcctggggagccaagatgttgtgagcaaggctgctaacaggagaatccccatggagggccagagggattcagcattccccaaatttgagagcaagccccaaagccaggaggtcaaggaaaatcaaactgtcaagttcagatgtgaagtttccgggattccaaagcctgaagtggcctggttcctggaaggcacccccgtgaggagacaggaaggcagcattgaggtttatgaagatgctggctcccattacctctgcctgctgaaagcccggaccagggacagtgggacatacagctgcactgcttccaacgcccaaggccagctgtcctgtagctggaccctccaagtggaaaggcttgccgtgatggaggtggccccctccttctccagtgtcctgaaggactgcgctgttattgagggccaggattttgtgctgcagtgctccgtacgggggaccccagtgccccggatcacttggctgctgaatgggcagcccatccagtacgctcgctccacctgcgaggccggcgtggctgagctccacatccaggatgccctgccggaggaccatggcacctacacctgcctagctgagaatgccttggggcaggtgtcctgcagcgcctgggtcaccgtccatgaaaagaagagtagcaggaagagtgagtaccttctgcctgtggctcccagcaagcccactgcacccatcttcctgcagggcctctctgatctcaaagtcatggatggaagccaggtcactatgactgtccaagtgtcagggaatccaccccctgaagtcatctggctgcacaatgggaatgagatccaagagtcagaggacttccactttgaacagagaggaactcagcacagcctttgtatccaggaagtgttcccggaggacacgggcacgtacacctgcgaggcctggaacagcgctggagaggtccgcacccaggccgtgctcacggtacaagagcctcacgatggcacccagccctggttcatcagtaagcctcgctcagtgacagcctccctgggccagagtgtcctcatctcctgcgccatagctggtgacccctttcctaccgtgcactggctcagagatggcaaagccctctgcaaagacactggccacttcgaggtgcttcagaatgaggacgtgttcaccctggttctaaagaaggtgcagccctggcatgccggccagtatgagatcctgctcaagaaccgggttggcgaatgcagttgccaggtgtcactgatgctacagaacagctctgccagagcccttccacgggggagggagcctgccagctgcgaggacctctgtggtggaggagttggtgctgatggtggtggtagtgaccgctatgggtccctgaggcctggctggccagcaagagggcagggttggctagaggaggaagacggcgaggacgtgcgaggggtgctgaagaggcgcgtggagacgaggcagcacactgaggaggcgatccgccagcaggaggtggagcagctggacttccgagacctcctggggaagaaggtgagtacaaagaccctatcggaagacgacctgaaggagatcccagccgagcagatggatttccgtgccaacctgcagcggcaagtgaagccaaagactgtgtctgaggaagagaggaaggtgcacagcccccagcaggtcgattttcgctctgtcctggccaagaaggggacttccaagacccccgtgcctgagaaggtgccaccgccaaaacctgccaccccggattttcgctcagtgctgggtggcaagaagaaattaccagcagagaatggcagcagcagtgccgagaccctgaatgccaaggcagtggagagttccaagcccctgagcaatgcacagccttcagggcccttgaaacccgtgggcaacgccaagcctgctgagaccctgaagccaatgggcaacgccaagcctgccgagaccctgaagcccatgggcaatgccaagcctgatgagaacctgaaatccgctagcaaagaagaactcaagaaagacgttaagaatgatgtgaactgcaagagaggccatgcagggaccacagataatgaaaagagatcagagagccaggggacagccccagccttcaagcagaagctgcaagatgttcatgtggcagagggcaagaagctgctgctccagtgccaggtgtcttctgaccccccagccaccatcatctggacgctgaacggaaagaccctcaagaccaccaagttcatcatcctctcccaggaaggctcactctgctccgtctccatcgagaaggcactgcctgaggacagaggcttatacaagtgtgtagccaagaatgacgctggccaggcggagtgctcctgccaagtcaccgtggatgatgctccagccagtgagaacaccaaggccccagagatgaaatcccggaggcccaagagctctcttcctcccgtgctaggaactgagagtgatgcgactgtgaaaaagaaacctgcccccaagacacctccgaaggcagcaatgccccctcagatcatccagttccctgaggaccagaaggtacgcgcaggagagtcagtggagctgtttggcaaagtgacaggcactcagcccatcacctgtacctggatgaagttccgaaagcagatccaggaaagcgagcacatgaaggtggagaacagcgagaatggcagcaagctcaccatcctggccgcgcgccaggagcactgcggctgctacacactgctggtggagaacaagctgggcagcaggcaggcccaggtcaacctcactgtcgtggataagccagaccccccagctggcacaccttgtgcctctgacattcggagctcctcactgaccctgtcctggtatggctcctcatatgatgggggcagtgctgtacagtcctacagcatcgagatctgggactcagccaacaagacgtggaaggaactagccacatgccgcagcacctctttcaacgtccaggacctgctgcctgaccacgaatataagttccgtgtacgtgcaatcaacgtgtatggaaccagtgagccaagccaggagtctgaactcacaacggtaggagagaaacctgaagagccgaaggatgaagtggaggtgtcagatgatgatgagaaggagcccgaggttgattaccggacagtgacaatcaatactgaacaaaaagtatctgacttctacgacattgaggagagattaggatctgggaaatttggacaggtctttcgacttgtagaaaagaaaactcgaaaagtctgggcagggaagttcttcaaggcatattcagcaaaagagaaagagaatatccggcaggagattagcatcatgaactgcctccaccaccctaagctggtccagtgtgtggatgcctttgaagaaaaggccaacatcgtcatggtcctggagatcgtgtcaggaggggagctgtttgagcgcatcattgacgaggactttgagctgacggagcgtgagtgcatcaagtacatgcggcagatctcggagggagtggagtacatccacaagcagggcatcgtgcacctggacctcaagccggagaacatcatgtgtgtcaacaagacgggcaccaggatcaagctcatcgactttggtctggccaggaggctggagaatgcggggtctctgaaggtcctctttggcaccccagaatttgtggctcctgaagtgatcaactatgagcccatcggctacgccacagacatgtggagcatcggggtcatctgctacatcctaaaccgcctggactgcacgcagtgccttcagcatccatggctaatgaaagataccaagaacatggaggccaagaaactctccaaggaccggatgaagaagtacatggcaagaaggaaatggcagaaaacgggcaatgctgtgagagccattggaagactgtcctctatggcaatgatctcagggctcagtggcaggaaatcctcaacagggtcaccaaccagcccgctcaatgcagaaaaactagaatctgaagaagatgtgtcccaagctttccttgaggctgttgctgaggaaaagcctcatgtaaaaccctatttctctaagaccattcgcgatttagaagttgtggagggaagtgctgctagatttgactgcaagattgaaggatacccagaccccgaggttgtctggttcaaagatgaccagtcaatcagggagtcccgccacttccagatagactacgatgaggacgggaactgctctttaattattagtgatgtttgcggggatgacgatgccaagtacacctgcaaggctgtcaacagtcttggagaagccacctgcacagcagagctcattgtggaaacgatggaggaaggtgaaggggaaggggaagaggaagaagagtgaaacaaagccagagaaaagcagtttctaagtcatattaaaaggactatttctctaaaactcaaaaaaaaaaaaaaaactcaagatagtaaaagcacctagtgtgatagattatcggttaggtcatttgtgggttgattcttcagaaacagcagttgatacctagcagcgttattgatgggcattaatctatgttagttggcaccttaagatactagtgcagctagatttcatttagggaaatcaccagtaacttgactgaccaattgattttagagagaaagtaaccaaaccaaatatttatctgggcaaagtcataaattctccacttgaatgcgctcatgaaaaataaggccaaaacaagagttctgggccacagctcagcccagagggttcctggggatgggaggcctctctctccccaccccctgactctagagaactgggttttctcccagtactccagcaattcatttctgaaagcagttgagccactttattccaaagtacactgcagatgttcaaactctccatttctctttccccttccacctgccagttttgctgactctcaacttgtcatgagtgtaagcattaaggacattatgcttcttcgattctgaagacaggtccctgctcatggatgactctggcttccttaggaaaatatttttcttccaaaatcagtaggaaatctaaacttatcccctctttgcagatgtctagcagcttcagacatttggttaagaacccatgggaaaaaaaaaatccttgctaatgtggtttcctttgtaaaccaggattcttatttgtgctgttatagaatatcagctctgaacgtgtggtaaagatttttgtgtttgaatataggagaaatcagtttgctgaaaagttagtcttaattatctattggccacgatgaaacagatttcaactgataaagagctggagaactccatgtactttggaatctcctccaagatagccagagtttaatacatcttcattctcaacactctccaaagaacttgacctaccttatgggttccatatttttcttcttaaatgtgcatcaatcatgccttgcccccaacctttaaatatattcttagacctggtaaatgcactcagacttgcgtctttaggaatttttaactttctttcactacattggcacttaaattttttctttataaagctttttgaaggtcataaacaaagaccataattgatgatagacctaatacatttcctctgtgtgtgtgtgtaacattccaaatactttttttttcttttccactgtttgtaaggtgcaacaatttaatatttttaagggactttttaagagttccttaagaaccaatttaaaattacttcagtgcaatcctacacagtatcaacattagaattttgatattagtcttatgttatcttccattctatttttatctgctttttgctgctagtttcaaactgccagtatttttccttttgcttttaaaatagttacaatatttttcatgatagccacagtattgccacagtttattataataaagggtttttatttgatttagcgcattcaaagcttttttctatcacttttgtgttcagaatataacctttgtgtgcgtgtatgttgtgtgtgtgcatgtgtggcgtatatgtgtgttacaggttaatgccttcttggaattgtgttaatgttctcttggtttattatgccatcagaatggtaaatgagaacactacaactgtagtcagctcacaatttttaaataaaggataccacagtgcatgctgtttgttc

SEQ ID NO: 230152 - DNA, 10027 bp, Artificial Sequence
  derived and/or modified sequence
ggctccccgcgccgcccggtcggcagcagggcgctgagcgagctcggagcccgcgctgtgcgcctgcggccggggcgccccgccgagcgccggtgccccggctcccgggccgccttcgccgcgcgggaaggattcttcaaaattaacagaaaccaattcgggccagctgaagagaaaaaataaagcatttcttccttctgatggggcaagactctctctggaatggggctcttatgacctacagtcaaacaaggtggctcccggctgcctctgctgcagttcagagcaacttcaggagcttcccagccgagagcttcaggacgcctttcctgtcccactggcccagttgccacaacaaacaacagagaagacggtgaccatgggggatgtgaagctggttgcctcgtcacacatttccaaaacctccctcagtgtggatccctcaagagttgactccatgcccctgacagaggcccctgctttcattttgccccctcggaacctctgcatcaaagaaggagccaccgccaagttcgaagggcgggtccggggttacccagagccccaggtgacatggcacagaaacgggcaacccatcaccagcgggggccgcttcctgctggattgcggcatccgggggactttcagccttgtgattcatgctgtccatgaggaggacaggggaaagtatacctgtgaagccaccaatggcagtggtgctcgccaggtgacagtggagttgacagtagaaggaagttttgcgaagcagcttggtcagcctgttgtttccaaaaccttaggggatagattttcagctccagcagtggagacccgtcctagcatctggggggagtgcccaccaaagtttgctaccaagctgggccgagttgtggtcaaagaaggacagatgggacgattctcctgcaagatcactggccggccccaaccgcaggtcacctggctcaagggaaatgttccactgcagccgagtgcccgtgtgtctgtgtctgagaagaacggcatgcaggttctggaaatccatggagtcaaccaagatgacgtgggagtgtacacgtgcctggtggtgaacgggtcggggaaggcctcgatgtcagctgaactttccatccaaggtttggacagtgccaataggtcatttgtgagagaaacaaaagccaccaattcagatgtcaggaaagaggtgaccaatgtaatctcaaaggagtcgaagctggacagtctggaggctgcagccaaaagcaagaactgctccagcccccagagaggtggctccccaccctgggctgcaaacagccagcctcagcccccaagggagtccaagctggagtcatgcaaggactcgcccagaacggccccgcagaccccggtccttcagaagacttccagctccatcaccctgcaggccgcaagagttcagccggaaccaagagcaccaggcctgggggtcctatcaccttctggagaagagaggaagaggccagctcctccccgtccagccaccttccccaccaggcagcctggcctggggagccaagatgttgtgagcaaggctgctaacaggagaatccccatggagggccagagggattcagcattccccaaatttgagagcaagccccaaagccaggaggtcaaggaaaatcaaactgtcaagttcagatgtgaagtttccgggattccaaagcctgaagtggcctggttcctggaaggcacccccgtgaggagacaggaaggcagcattgaggtttatgaagatgctggctcccattacctctgcctgctgaaagcccggaccagggacagtgggacatacagctgcactgcttccaacgcccaaggccagctgtcctgtagctggaccctccaagtggaaaggcttgccgtgatggaggtggccccctccttctccagtgtcctgaaggactgcgctgttattgagggccaggattttgtgctgcagtgctccgtacgggggaccccagtgccccggatcacttggctgctgaatgggcagcccatccagtacgctcgctccacctgcgaggccggcgtggctgagctccacatccaggatgccctgccggaggaccatggcacctacacctgcctagctgagaatgccttggggcaggtgtcctgcagcgcctgggtcaccgtccatgaaaagaagagtagcaggaagagtgagtaccttctgcctgtggctcccagcaagcccactgcacccatcttcctgcagggcctctctgatctcaaagtcatggatggaagccaggtcactatgactgtccaagtgtcagggaatccaccccctgaagtcatctggctgcacaatgggaatgagatccaagagtcagaggacttccactttgaacagagaggaactcagcacagcctttgtatccaggaagtgttcccggaggacacgggcacgtacacctgcgaggcctggaacagcgctggagaggtccgcacccaggccgtgctcacggtacaagagcctcacgatggcacccagccctggttcatcagtaagcctcgctcagtgacagcctccctgggccagagtgtcctcatctcctgcgccatagctggtgacccctttcctaccgtgcactggctcagagatggcaaagccctctgcaaagacactggccacttcgaggtgcttcagaatgaggacgtgttcaccctggttctaaagaaggtgcagccctggcatgccggccagtatgagatcctgctcaagaaccgggttggcgaatgcagttgccaggtgtcactgatgctacagaacagctctgccagagcccttccacgggggagggagcctgccagctgcgaggacctctgtggtggaggagttggtgctgatggtggtggtagtgaccgctatgggtccctgaggcctggctggccagcaagagggcagggttggctagaggaggaagacggcgaggacgtgcgaggggtgctgaagaggcgcgtggagacgaggcagcacactgaggaggcgatccgccagcaggaggtggagcagctggacttccgagacctcctggggaagaaggtgagtacaaagaccctatcggaagacgacctgaaggagatcccagccgagcagatggatttccgtgccaacctgcagcggcaagtgaagccaaagactgtgtctgaggaagagaggaaggtgcacagcccccagcaggtcgattttcgctctgtcctggccaagaaggggacttccaagacccccgtgcctgagaaggtgccaccgccaaaacctgccaccccggattttcgctcagtgctgggtggcaagaagaaattaccagcagagaatggcagcagcagtgccgagaccctgaatgccaaggcagtggagagttccaagcccctgagcaatgcacagccttcagggcccttgaaacccgtgggcaacgccaagcctgctgagaccctgaagccaatgggcaacgccaagcctgccgagaccctgaagcccatgggcaatgccaagcctgatgagaacctgaaatccgctagcaaagaagaactcaagaaagacgttaagaatgatgtgaactgcaagagaggccatgcagggaccacagataatgaaaagagatcagagagccaggggacagccccagccttcaagcagaagctgcaagatgttcatgtggcagagggcaagaagctgctgctccagtgccaggtgtcttctgaccccccagccaccatcatctggacgctgaacggaaagaccctcaagaccaccaagttcatcatcctctcccaggaaggctcactctgctccgtctccatcgagaaggcactgcctgaggacagaggcttatacaagtgtgtagccaagaatgacgctggccaggcggagtgctcctgccaagtcaccgtggatgatgctccagccagtgagaacaccaaggccccagagatgaaatcccggaggcccaagagctctcttcctcccgtgctaggaactgagagtgatgcgactgtgaaaaagaaacctgcccccaagacacctccgaaggcagcaatgccccctcagatcatccagttccctgaggaccagaaggtacgcgcaggagagtcagtggagctgtttggcaaagtgacaggcactcagcccatcacctgtacctggatgaagttccgaaagcagatccaggaaagcgagcacatgaaggtggagaacagcgagaatggcagcaagctcaccatcctggccgcgcgccaggagcactgcggctgctacacactgctggtggagaacaagctgggcagcaggcaggcccaggtcaacctcactgtcgtggataagccagaccccccagctggcacaccttgtgcctctgacattcggagctcctcactgaccctgtcctggtatggctcctcatatgatgggggcagtgctgtacagtcctacagcatcgagatctgggactcagccaacaagacgtggaaggaactagccacatgccgcagcacctctttcaacgtccaggacctgctgcctgaccacgaatataagttccgtgtacgtgcaatcaacgtgtatggaaccagtgagccaagccaggagtctgaactcacaacggtaggagagaaacctgaagagccgaaggatgaagtggaggtgtcagatgatgatgagaaggagcccgaggttgattaccggacagtgacaatcaatactgaacaaaaagtatctgacttctacgacattgaggagagattaggatctgggaaatttggacaggtctttcgacttgtagaaaagaaaactcgaaaagtctgggcagggaagttcttcaaggcatattcagcaaaagagaaagagaatatccggcaggagattagcatcatgaactgcctccaccaccctaagctggtccagtgtgtggatgcctttgaagaaaaggccaacatcgtcatggtcctggagatcgtgtcaggaggggagctgtttgagcgcatcattgacgaggactttgagctgacggagcgtgagtgcatcaagtacatgcggcagatctcggagggagtggagtacatccacaagcagggcatcgtgcacctggacctcaagccggagaacatcatgtgtgtcaacaagacgggcaccaggatcaagctcatcgactttggtctggccaggaggctggagaatgcggggtctctgaaggtcctctttggcaccccagaatttgtggctcctgaagtgatcaactatgagcccatcggctacgccacagacatgtggagcatcggggtcatctgctacatcctaaaccgcctggactgcacgcagtgccttcagcatccatggctaatgaaagataccaagaacatggaggccaagaaactctccaaggaccggatgaagaagtacatggcaagaaggaaatggcagaaaacgggcaatgctgtgagagccattggaagactgtcctctatggcaatgatctcagggctcagtggcaggaaatcctcaacagggtcaccaaccagcccgctcaatgcagaaaaactagaatctgaagaagatgtgtcccaagctttccttgaggctgttgctgaggaaaagcctcatgtaaaaccctatttctctaagaccattcgcgatttagaagttgtggagggaagtgctgctagatttgactgcaagattgaaggatacccagaccccgaggttgtctggttcaaagatgaccagtcaatcagggagtcccgccacttccagatagactacgatgaggacgggaactgctctttaattattagtgatgtttgcggggatgacgatgccaagtacacctgcaaggctgtcaacagtcttggagaagccacctgcacagcagagctcattgtggaaacgatggaggaaggtgaaggggaaggggaagaggaagaagagtgaaacaaagccagagaaaagcagtttctaagtcatattaaaaggactatttctctaaaactcaaaaaaaaaaaaaaaactcaagatagtaaaagcacctagtgtgatagattatcggttaggtcatttgtgggttgattcttcagaaacagcagttgatacctagcagcgttattgatgggcattaatctatgttagttggcaccttaagatactagtgcagctagatttcatttagggaaatcaccagtaacttgactgaccaattgattttagagagaaagtaaccaaaccaaatatttatctgggcaaagtcataaattctccacttgaatgcgctcatgaaaaataaggccaaaacaagagttctgggccacagctcagcccagagggttcctggggatgggaggcctctctctccccaccccctgactctagagaactgggttttctcccagtactccagcaattcatttctgaaagcagttgagccactttattccaaagtacactgcagatgttcaaactctccatttctctttccccttccacctgccagttttgctgactctcaacttgtcatgagtgtaagcattaaggacattatgcttcttcgattctgaagacaggtccctgctcatggatgactctggcttccttaggaaaatatttttcttccaaaatcagtaggaaatctaaacttatcccctctttgcagatgtctagcagcttcagacatttggttaagaacccatgggaaaaaaaaaatccttgctaatgtggtttcctttgtaaaccaggattcttatttgtgctgttatagaatatcagctctgaacgtgtggtaaagatttttgtgtttgaatataggagaaatcagtttgctgaaaagttagtcttaattatctattggccacgatgaaacagatttcaactgataaagagctggagaactccatgtactttggaatctcctccaagatagccagagtttaatacatcttcattctcaacactctccaaagaacttgacctaccttatgggttccatatttttcttcttaaatgtgcatcaatcatgccttgcccccaacctttaaatatattcttagacctggtaaatgcactcagacttgcgtctttaggaatttttaactttctttcactacattggcacttaaattttttctttataaagctttttgaaggtcataaacaaagaccataattgatgatagacctaatacatttcctctgtgtgtgtgtgtaacattccaaatactttttttttcttttccactgtttgtaaggtgcaacaatttaatatttttaagggactttttaagagttccttaagaaccaatttaaaattacttcagtgcaatcctacacagtatcaacattagaattttgatattagtcttatgttatcttccattctatttttatctgctttttgctgctagtttcaaactgccagtatttttccttttgcttttaaaatagttacaatatttttcatgatagccacagtattgccacagtttattataataaagggtttttatttgatttagcgcattcaaagcttttttctatcacttttgtgttcagaatataacctttgtgtgcgtgtatgttgtgtgtgtgcatgtgtggcgtatatgtgtgttacaggttaatgccttcttggaattgtgttaatgttctcttggtttattatgccatcagaatggtaaatgagaacactacaactgtagtcagctcacaatttttaaataaaggataccacagtgcatgctgtttgttcaatctttgcagacttctctttctttccatgctaccagttgtaaaggacacagctatatcctggaaatgaaaaacaaacactgtggtgcctagatgtgaagaactggcttatgtggttgtgttttgctatggaacagaatgatttaggaagttcttgtttatataggtagccgaatttacacatttagttcaaaatttctcttgagcatcagcttagtactatatcaatcattctagaaggatatcttatagagcaggtgtccccaacccccggtaagtagcctgttaggaaccaggtcacacataaggaggttagcagtgggcaagtgagcaaagcatcatctatatttacagccgatccccattgctcgcattaccgcctgagctctgcctcctgtcagatcagcggcagcatcaggttctctcaggaacgaactctattgtgaactgctcatgtgagggatctaggtttcacgctccttatgagaatctaacacctgatgatctgtcactgtctcccatcacccctagatgggacagtctagttgcaggaaaacaagctcagggcttccactgattctacattatgatgagttgtatacttattttatattataataaaatatattattacaatgtaataataatagaaataaaatgcacaatacatgtaatgtgcttgaataatcccaaaaccaccccctctcctggtccatggaaaaactgtcttccatgaaagtggtccctggtgccaaaaaggttagggaccactgttacagagtatcaggtcctcaagatgctaaaatctatatgacatttttaacatgtgacattatcatcatcatcatcatcatcatcactgatgatactatttaccagggcatggtttgaattggtgactttggtgcagttcattattggcagccaaatgctttatccataccttcatattgaagaatttgttatcaggaaactaccagtcctgctttacaggaagtctgttatcagatatcagatggcaagttccccatgtcttcagatgttcaaacaatattgtggatggtctagaaagagtttaagacatgctgttaaatgtagggctagataattctctgattctttgatgtagtctggaaagaaacaatccattgtccagttaataaatatttagtgttttcatttttaagacactcacaatccacaaatgtccctaacaatttattatttttaaagaaaatgactttttattccttgctagtgaaaaatgtacaatttatatgctgcactgagaaaaataacagatatactttcttccattcattttcatcccaaacatataaaaaataatccattgattgttccttgcattgcatatcttattaaaagatatttcctacatgcaactaataagacatgctgactgttgtcagctctaaatttatgtaaagattttttatttttgttaaaatgtttgaaatttgctttttgctccacacctcacctgtttttgataaatctgtgctaataagtacataggaggtaataaataattgagttgtgagaaacccaattctccatttttcaagaaaacacaagtagcactactctctttatcccttgggactccttcctgtaatttgaaagggggggctaatgttggtggcagttgttgctaaggatctctgcacagagttagggcttcactctcggcttcctggttagatggggccatgtgactagtcctagtcagtgagctgtgaccagaagtgatgtatgtaccctcgggaccagagcatttatgtgctggtacaagcctctccataatgacgggcaacacatgagatggtggctgctgcagccatctgggtctctagccaacccaaaatggggacataacacaagcaagaaataaacatttgttcttataaatcaccaagattttggggttctcagtggctgcaacataacctagactatcctgatacaggcttatcaccatgttctggatgtgtggtgaccaggatggtagccactactcacaagtggctatttaaatttaagttactttaaaaaataaaataaaaaattcagttcctcagttgtatgagttacatttcaaatgctcgacagtcacatgtacatcacttttcaaattatgtgaaattaaaactgaaaagcttgtgtgaaagtctagagagtatggtctatagtttcatcaattgtattggataatatagtctcgatactcaa

SEQ ID NO: 230153 - DNA, 5591 bp, Artificial Sequence
  derived and/or modified sequence
atgggagacgtcaagctggttgcaagtagtcacatctcgaaaacaagtctgagcgtcgacccttcccgcgttgactctatgcccctcactgaagctccagccttcattcttccacccagaaatctgtgtataaaagagggcgcaaccgcgaagttcgagggccgagtgaggggatatccagaaccgcaagtgacctggcataggaacgggcagccgatcaccagcggcggacgctttctgttggattgtggtattagaggtacttttagccttgtgatccacgcggtacatgaggaggataggggcaaatacacctgcgaagctacaaatggctcaggagccagacaggtgacagttgagctcactgtcgaaggttctttcgctaagcaactgggccagcccgtcgtttcaaagactttaggtgacaggttctctgcccctgcagtcgaaacccgccctagtatctggggggagtgccctcccaaattcgcaacaaagctgggcagagtggttgtgaaggaggggcagatggggaggttctcgtgcaaaatcactggcagaccccagccacaagtaacttggcttaaagggaatgtgcctctccagccatccgcaagagtctccgtgtcagaaaagaacgggatgcaggtgttagaaattcacggcgttaatcaggacgacgtgggcgtctacacatgtctcgtggtgaatgggagcgggaaagcatctatgtccgctgagctgtcaatccaaggtttagatagcgcgaatcgctcattcgtgagggagaccaaagctaccaattcggacgtgcgcaaagaggtcactaatgttataagcaaggagtctaagctcgactccctggaagcggctgctaagagcaaaaactgttccagcccccagcggggtggctctccaccttgggcggctaactctcaaccacagccccctcgggagtccaaattggagagctgtaaagacagtccccgtaccgccccacagactccagtattacaaaaaacgtcctccagtatcactctgcaggccgctagggtgcaacccgagcccagggctccagggctcggcgtgcttagtccatccggagaggagcgaaagaggcctgcaccgcctcgccctgccacattccctacacggcagccgggactgggctcgcaggatgtggtgtccaaggccgctaaccgcagaatccctatggagggccaacgcgactccgccttccccaagttcgaatctaaaccccagtctcaggaagtcaaagagaatcaaacagtgaaattccgttgcgaagtttcaggtataccgaagcccgaagtagcttggttccttgagggcaccccagtccgcaggcaggaaggctctatcgaggtctatgaagacgcaggcagccactacctctgtttgttgaaagcgaggacgagggattcaggcacctatagctgtacagcaagcaatgcccaaggtcagctaagctgttcttggaccttacaggtcgaacgtctcgccgtgatggaagtagctccttccttcagtagtgtcctcaaggactgtgccgtaatcgagggccaggatttcgtgctgcagtgctctgtgagaggtactccagtccccagaataacctggctgctcaacggccagccaatccaatacgcaagaagcacctgcgaggccggagtggctgaactgcacattcaagacgcccttcctgaggaccacgggacatatacctgtctggccgagaacgccctcggccaggtgagttgttctgcatgggtaacggtgcacgagaaaaagagctccaggaaatctgagtacctgctgcccgttgcaccctcaaagcccacggccccaatttttcttcaagggctgtcggatctgaaggtgatggacggatctcaggtgactatgacagttcaagtgagtggcaaccctccaccagaggtcatatggttgcataacgggaacgagatccaagagagcgaggatttccacttcgaacaacgagggactcagcactccctgtgcatccaggaggtattccctgaggacactggtacttacacctgcgaggcatggaatagtgcaggcgaggtgaggactcaggcagtcctgacggtgcaggagccacatgacggcactcagccctggttcatttccaaaccgaggtctgtcactgcgtcactggggcaaagtgtgctaatttcatgtgcaattgcgggagacccgttccctaccgtccactggcttcgtgatggcaaggctctgtgtaaggacacaggccactttgaagtcttgcagaacgaggatgtattcaccctcgtgctcaagaaggttcagccttggcatgccggtcagtacgaaattctgttgaaaaatagggtgggcgaatgcagctgtcaagtctccttgatgctgcagaattcgagcgcgagagccctaccacggggacgggagcctgcgtcttgtgaagacctttgtgggggaggggtgggggctgacggaggaggcagcgacaggtatggttcgttgaggcccggatggccagctcggggtcagggctggctggaggaggaagacggagaagacgttagaggcgtgctcaaacggagagtcgagacacgccagcatactgaggaggcaattcgccaacaggaagtggaacagctggacttcagagatctgctgggtaagaaagtgtctacaaagacactctctgaggacgatctgaaagaaatcccagctgagcagatggactttagagccaatctccaaagacaggtcaagcctaagactgtatccgaggaggagcggaaggttcatagtccgcaacaggttgatttcagaagtgtgttagctaaaaaaggaacctccaagaccccagtacctgaaaaagttccccctcctaagcctgccacccccgacttccggtcagtgttgggcggaaagaagaagttaccagccgaaaatggatcgtcctcagcggagaccttgaacgccaaagcagtggagtcctcaaagcccctaagcaatgcacagcccagcggacccctgaagcccgtaggtaacgccaagcctgccgagactctgaaacccatgggcaatgctaaaccagctgaaacactgaaaccaatgggaaacgccaagcccgacgaaaacctcaaatccgcctccaaagaagaactgaaaaaagatgtgaagaacgatgtcaattgcaagcgcggtcacgccggaactactgataatgagaagaggagcgagtcccaggggactgccccagccttcaagcagaaactgcaggacgttcatgtggcagagggaaagaagctgctcctgcagtgtcaggttagctcagatcctcccgcaactatcatctggactctgaatgggaagacattgaaaaccactaagttcataatcctatctcaggagggctccctgtgttccgtctccatcgagaaagctctccccgaagatagggggctgtacaagtgtgtggcaaagaacgacgcaggacaggctgagtgctcttgccaggtgacggtagatgatgctcctgcttcggaaaacaccaaagccccagaaatgaagagccggagacctaagagcagcctccctcctgtgcttggtaccgaatccgacgcaacagtgaaaaagaagccagcaccaaaaactccccctaaggcagcgatgcctccacagatcatccagtttccagaagatcagaaagtacgggctggagagagcgtagagctgtttggaaaggtcacaggaacccagcctatcacgtgtacctggatgaagttcaggaagcagatacaggagagcgagcatatgaaggtggagaatagtgagaacgggagcaagcttactatcttagccgcaagacaggagcactgtggatgctatactctgctggtggagaacaagctggggtcacgtcaggcgcaagtcaatctgaccgtcgtggataagcccgatcctcccgcaggcacaccctgcgcatccgacatcaggagctctagcctgacactgagctggtatgggtcttcatacgacggcggaagcgctgtccagtcgtatagtatagaaatctgggatagtgcaaacaagacgtggaaggaactggcaacctgcagatccacctctttcaatgtgcaggacctgctacccgatcatgagtataaatttagggttagagctattaacgtttacggcacaagcgagccgagccaggaatctgagctaacaaccgtgggagagaaacccgaggagcctaaggacgaggtcgaagtctcagatgatgatgaaaaggaaccagaggtcgattaccgtactgtcacaattaacacagaacagaaggtctccgatttctatgacatagaggagcgcctggggtctggcaagtttggccaagtttttaggctggtcgaaaagaaaaccagaaaagtatgggccggaaaattctttaaggcctattctgccaaggagaaggagaacatacgtcaggagatatcgataatgaattgtctgcatcaccccaagctggtacaatgcgtggacgcttttgaggaaaaagccaatatcgttatggtgttagaaatcgtgtcagggggagagttgttcgagcgcatcatagacgaggatttcgagttaaccgagagggagtgcatcaaatatatgcgccagatttccgaaggggtggagtacattcataagcagggaatcgtgcacttagatctgaagcccgaaaacatcatgtgtgttaataagactggaaccaggatcaaacttattgacttcggcttggcgagaagattggaaaatgctggcagcctgaaggtactttttgggacccccgaatttgttgcccctgaggtgatcaattacgaaccaatcggctacgccacagacatgtggtcaataggggtgatatgttatattctgaatcggctagattgtacccagtgtctccagcacccttggctcatgaaggacacaaaaaatatggaggccaaaaaactgtcgaaagaccgaatgaagaagtacatggccaggagaaagtggcagaagaccggaaatgcagtccgagctatagggaggttatccagcatggcaatgataagtggactaagcggcagaaagtcaagcaccggaagccccacttcccctcttaatgccgagaagctggaatctgaagaggatgtttctcaggccttcctagaggctgtggctgaagagaaacctcacgttaaaccctacttttcaaagacaatcagagacctcgaagtggtcgaaggcagcgctgcgagatttgattgtaaaatcgaagggtacccggaccctgaggtggtctggtttaaggacgatcagtcaattcgagaatcccgccacttccagatcgactatgatgaagatggcaattgcagcctaatcatttctgacgtgtgtggcgatgacgacgccaagtacacatgcaaagccgtgaattctctgggcgaagctacctgcacggctgaattgatcgtggagacaatggaagagggcgaaggagaaggagaagaagaggaggaata

SEQ ID NO: 230154 - DNA, 5591 bp, Artificial Sequence
  derived and/or modified sequence
atgggagacgtgaaattggttgcgtccagtcatatttcgaaaacgtcactgagcgtagacccatcccgcgtggactccatgcctctgactgaagcgccagccttcatactgccccctagaaacttgtgcattaaagaaggcgctaccgccaaatttgaaggcagagtaagaggttacccagagccgcaggttacatggcacaggaacggccaacctatcacaagtggcggacgatttttactggactgcggcattcgtggcacattctcattggtcattcacgctgtgcatgaagaggacagaggaaagtacacatgtgaggccaccaacggtagtggcgctaggcaggtgactgtcgagctgaccgtcgagggcagcttcgctaagcagttgggccagcccgtggtctctaaaacattgggcgatcgcttttcggcccctgctgtggagactcgccctagcatttggggcgagtgtcctccaaaattcgccacaaaactcggaagagtcgtggtcaaggagggccagatgggccgattttcctgtaagatcacagggcgtccccagccacaagtcacttggctgaagggcaacgtgccactccaaccctctgcccgagtgtctgtatctgaaaaaaatgggatgcaggtgctcgaaatccacggcgtgaaccaggacgacgtgggggtgtacacgtgtctcgtggtgaacggctctgggaaggccagtatgtcagcagagctatccatccagggtcttgattcagcaaaccgttcctttgtcagggaaacaaaggcaactaattccgacgtccggaaagaggtcacaaacgtgatcagtaaagagtccaaacttgacagcctggaagccgctgccaagtctaaaaactgttcttcaccacagagagggggttcacccccttgggctgcaaattctcagccccagccacctagagaatccaaattagaatcatgcaaggattccccgagaaccgcaccacagacgccagtgttgcaaaaaacctcttcttcaatcactctgcaggcagcaagagtccagccagaaccgagggctcccggactcggcgtcctgtccccctcaggagaggaacgcaaacggcctgcacccccacgccctgccacatttcctacaaggcagccgggactggggagccaagacgtcgtgtcgaaagctgccaaccggagaatccccatggagggccaaagggactctgcatttcccaagttcgagtcgaaacctcagagccaagaggtgaaggaaaaccagactgtcaaatttaggtgcgaggttagcggtattcccaagcctgaggttgcctggttcttagagggcacaccggtcaggcgacaggaaggctcgatcgaagtgtacgaggatgccggtagtcattacctttgcctcttaaaagcacgcacccgcgactccggcacatattcctgcacggcctcaaacgcccagggccagctctcatgttcttggactcttcaggtagagcgtttggcagtaatggaagtggctcctagcttttcctcagtcctcaaggattgcgccgtgatcgagggccaggatttcgtgttgcaatgttctgtgcgcggaacaccggtccctaggatcacctggcttttgaacggccaaccaatccagtacgcacgctccacctgcgaggccggagtggccgagctgcatatccaggacgctctgccagaagaccatgggacttatacatgtttagccgagaatgctcttggacaagttagctgtagcgcgtgggtgactgtacatgagaagaagagtagccggaagtccgagtacttgcttcccgttgccccatcaaaacctaccgcaccgattttcctgcaaggcttgagcgaccttaaggtaatggatggttcccaggttaccatgacggtacaggtatcaggcaacccccctcctgaagtcatctggctgcataacgggaacgagatacaggaatcagaggacttccactttgaacagcggggtacccaacactctctctgtatccaagaggtctttcccgaagataccggcacctacacctgtgaggcctggaattcggccggtgaggttcgcacgcaggccgtcctgactgtccaggaaccccacgatggaacccaaccctggttcatttccaaacctaggagcgtcacagccagccttggccagtctgtgctgatctcctgcgccattgctggtgatccatttccaaccgtgcactggctccgtgatggaaaagctctttgcaaagataccggccacttcgaggtgctgcagaacgaagatgtgttcaccctggtcctcaagaaggttcagccctggcatgccggtcagtatgaaatactccttaagaacagggtcggtgaatgcagttgccaggtctccttgatgctccagaattcatcagctcgggctctgccaagggggcgagagccagccagttgcgaagatttatgtgggggtggggtgggtgcagatgggggaggatccgataggtatggcagcctcaggcccggatggcccgctcgcggtcagggttggttagaagaggaggatggcgaggatgttcgcggtgtattaaagaggcgtgttgagacgcgccagcacacagaagaggctatccgtcagcaagaagtggaacagctggacttccgagacctcctgggaaagaaagtgtctacaaaaactttgtccgaagacgatttgaaagagatacccgcagagcagatggactttcgcgcaaatctccagcggcaggtcaagccaaaaaccgtctctgaagaagaacgtaaggtgcatagtcctcagcaggtcgacttccgctctgtactcgctaagaaaggaacatccaagacacctgtcccagaaaaggtgcctcctcccaagccggcaacccccgatttcagatctgtcctggggggaaaaaaaaagctgcccgctgagaatggttctagctccgcagagactttgaatgctaaagcagtcgagtcatccaagccgctgtcaaacgcacaaccaagcggcccacttaagcctgtggggaacgccaaacctgccgagacacttaagcccatgggcaacgcaaagcccgcagagaccctgaagcctatgggaaacgcaaagccagatgaaaacctgaagtctgcgtcaaaggaggagcttaagaaggatgtgaagaacgatgttaattgcaagagagggcatgccggtacaacggataacgaaaagaggagtgaaagtcagggtacggcgcctgcgtttaagcagaagctccaggacgtccatgtggctgaggggaaaaagcttctccttcagtgccaagtgtcatcagatcctccagccacaatcatatggactcttaacgggaagacactgaaaacaactaagttcatcatcctgtcccaagagggcagcctctgctcagtttccattgagaaggctctgcccgaagaccgcggattatacaaatgcgtcgctaaaaacgatgccggacaggctgaatgcagttgccaagttacagttgacgacgctccagccagtgaaaatactaaggcacccgagatgaaaagccgcaggcccaagtcctctctcccccctgttctgggtaccgagtcggatgctactgtgaagaagaagcctgctcccaaaacaccaccgaaggcagctatgcctcctcaaataattcagtttcccgaagaccagaaggttagggccggagagtccgtggagctattcggcaaggttacggggacgcaacccatcacatgcacctggatgaaatttcgcaagcagatccaggagtcagaacacatgaaggtggagaatagcgagaatgggtctaagttgacaatcctcgcagcaaggcaggaacactgtggttgttacactctgcttgttgaaaataagctgggctccaggcaagctcaggtcaatctaaccgtggttgataagcccgatcctccagctgggacaccgtgcgcctctgatatccggtcatcgagcctcaccctgtcatggtacggtagttcttacgatggcggatccgctgttcagtcatattcaatcgagatctgggattccgctaataaaacctggaaagagcttgccacatgcaggtcgacgagctttaacgttcaggacctgctgccagatcacgaatataagttcagggtccgggctatcaacgtctacggtacctcggaaccgtctcaggagagtgaactgacaacagtaggcgagaagcccgaagagccaaaggacgaagtcgaggtttctgacgatgacgagaaagagccggaggtggattaccgtaccgttacaataaacactgagcaaaaggtgagcgacttttatgacattgaagaaaggctcggctcaggaaaattcgggcaggtgttcaggctggtggaaaagaagactagaaaggtgtgggccggaaagttttttaaggcttacagcgcaaaagagaaagaaaatatccgacaggaaataagcatcatgaactgcctgcaccaccccaagcttgtccagtgcgtggacgccttcgaagaaaaagctaacattgttatggtacttgagatagtctccggaggagaactgtttgaaagaataatagatgaggactttgaactcacagagagagagtgcataaaatatatgcgccagatttccgagggggttgaatatatccacaaacagggaattgtacacctggatcttaaacctgagaatattatgtgtgtgaacaagaccggcactagaattaagctcatcgacttcggtctcgccagacgtctcgaaaatgcagggtctctcaaggtgttatttggcacgcccgaatttgtcgctccagaagtgataaactacgaaccaattggctacgcaaccgacatgtggagcataggagtgatttgttatatcctcaatcggctcgattgtacacagtgcctgcagcacccttggctgatgaaggacacaaaaaacatggaggcaaaaaagctcagcaaggaccgaatgaagaaatacatggccaggcggaagtggcagaagacaggcaacgcggttagagcaattggcagactctcttctatggccatgatctccggtctgagcggacgcaagtcttcaacaggctcgcccacctcaccacttaatgcggaaaagctcgagtcagaggaggacgtgagccaggcctttttggaggccgtggccgaggaaaagcctcacgtaaagccatacttctcaaagactatcagagacctagaggttgtggaagggtcagccgcacgctttgattgcaaaattgaaggttacccggatccggaggtggtgtggtttaaagatgatcaaagcatcagggaatctcggcacttccagatcgattacgacgaagacggtaactgtagtctgatcatcagcgacgtgtgcggagatgatgatgccaagtacacttgtaaagccgtgaactctctgggggaagcgacctgtacggccgaattgatcgtagagacaatggaagagggtgagggggagggagaagaagaggaggagta

SEQ ID NO: 230155 - DNA, 231 bp, Artificial Sequence
  derived and/or modified sequence
atgggcgacgtgaagctggtggccagcagccacatcagcaagaccagcctgagcgtggaccccagcagagtggacagcatgcccctgaccgaggcccccgccttcatcctgccccccagaaacctgtgcatcaaggagggcgccaccgccaagttcgagggcagagtgagaggctaccccgagccccaggtgacctggcacagaaacggccagcccatcaccagcggctag

SEQ ID NO: 230156 - DNA, 231 bp, Artificial Sequence
  derived and/or modified sequence
atgggagatgtaaagctcgttgcaagttcacacatctctaagacttcactttccgttgatccatcaagagtggatagcatgcctctgacagaagcccctgctttcatactccccccccggaatttgtgtatcaaggagggtgctactgcaaagttcgaagggcgcgtgcgggggtatccagaaccgcaagtcacatggcacagaaatggccagcctatcacaagcgggtag

SEQ ID NO: 230157 - DNA, 231 bp, Artificial Sequence
  derived and/or modified sequence
atgggagatgtgaagctggtggccagcagccacatcagcaagaccagcctgtctgtggaccccagccgggtggacagcatgcccctgacagaggccccagccttcatcctgccccccaggaacctgtgcatcaaggagggcgccacagccaagtttgagggccgggtgcggggctacccagagccccaggtgacctggcacagaaatggccagcccatcaccagcggctag

SEQ ID NO: 230158 - DNA, 231 bp, Artificial Sequence
  derived and/or modified sequence
atgggcgacgtgaagctggtggccagcagccacatcagcaagacctcactcagcgtcgatccctcccgagtggactcaatgcctctcactgaggcgcccgctttcattctgcctccaaggaacctgtgtatcaaagagggagcaaccgctaagttcgagggccgggtaaggggctaccccgagccgcaggtcacctggcaccggaacgggcagcccattacgtccgggtag

SEQ ID NO: 230159 - DNA, 1557 bp, Artificial Sequence
  derived and/or modified sequence
taaaaacctgtgagcttccacccctggctcccccaggactccattgagagcctctgcagtggcagccagaggtttcaaaggtcaccccagctgggcggattagaacaacagatctcccggaccgggtgaagttggctgctcagcggaaggcaaattgcaccatctgcgagcagagtcagaacaaaagccccttaactttttcggtctggccctgggctctgtggcgcccggcactccttcggtctccattcttggctggaccttggacaggaacctctgcagtacggtggtggtgaagtgtggctgcctcgcatcctgactcatgtgagagctgccgaggaagaagctgcggtaagaccatgggggatgtgaagctggttgcctcgtcacacatttccaaaacctccctcagtgtggatccctcaagagttgactccatgcccctgacagaggcccctgctttcattttgccccctcggaacctctgcatcaaagaaggagccaccgccaagttcgaagggcgggtccggggttacccagagccccaggtgacatggcacagaaacgggcaacccatcaccagcgggggccgcttcctgctggattgcggcatccgggggactttcagccttgtgattcatgctgtccatgaggaggacaggggaaagtatacctgtgaagccaccaatggcagtggtgctcgccaggtgacagtggagttgacagtagaaggaagttttgcgaagcagcttggtcagcctgttgtttccaaaaccttaggggatagattttcagctccagcagtggagacccgtcctagcatctggggggagtgcccaccaaagtttgctaccaagctgggccgagttgtggtcaaagaaggacagatgggacgattctcctgcaagatcactggccggccccaaccgcaggtcacctggctcaagggaaatgttccactgcagccgagtgcccgtgtgtctgtgtctgagaagaacggcatgcaggttctggaaatccatggagtcaaccaagatgacgtgggagtgtacacgtgcctggtggtgaacgggtcggggaaggcctcgatgtcagctgaactttccatccaaggtatcgaccagtggacggctagtgcagaacgatccctgcctggtgccgcaccctcctagaggagctgcttgttcactgcgcacctgtgtgtgtatacacctggcccactcacacacccaggcactccccaggggcaggtgagaacttcccaaatctcagaagatgttctcagttgcactattcaaattttaaggtcctcccaacaaacccatgaggtagatcctgtttgaattcctattttactgatggggaagtgaaagcatagagagttgttggagtgtttcatccaatatcactgcattcagcgcagagttgctgcatggccggggaggacctccctaaccaatcccccttcccctcctcctggttcagggaatccaccccctgaagtcatctggctgcacaatgggaatgagatccaagagtcagaggacttccactttg

SEQ ID NO: 230160 - DNA, 231 bp, Artificial Sequence
  derived and/or modified sequence
atgggtgatgttaaactggtggcgtcttcccatatctccaaaacatcactgtcggttgacccatcacgggtggacagcatgcctctgactgaggccccagctttcatcctgccccctcggaatctgtgcatcaaagaaggtgcaaccgctaagttcgagggacgcgtgagggggtaccccgaaccccaggttacatggcaccgcaatggccagccaataacatcaggatag

SEQ ID NO: 230161 - protein, 154 aa, Artificial Sequence
  derived and/or modified sequence
MAMISGLSGRKSSTGSPTSPLNAEKLESEEDVSQAFLEAVAEEKPHVKPYFSKTIRDLEVVEGSAARFDCKIEGYPDPEVVWFKDDQSIRESRHFQIDYDEDGNCSLIISDVCGDDDAKYTCKAVNSLGEATCTAELIVETMEEGEGEGEEEEE

SEQ ID NO: 230162 - DNA, 465 bp, Artificial Sequence
  derived and/or modified sequence
atggccatgatcagcggcctgagcggcagaaagagcagcaccggcagccccaccagccccctgaacgccgagaagctggagagcgaggaggacgtgagccaggccttcctggaggccgtggccgaggagaagccccacgtgaagccctacttcagcaagaccatcagagacctggaggtggtggagggcagcgccgccagattcgactgcaagatcgagggctaccccgaccccgaggtggtgtggttcaaggacgaccagagcatcagagagagcagacacttccagatcgactacgacgaggacggcaactgcagcctgatcatcagcgacgtgtgcggcgacgacgacgccaagtacacctgcaaggccgtgaacagcctgggcgaggccacctgcaccgccgagctgatcgtggagaccatggaggagggcgagggcgagggcgaggaggaggaggagtag

SEQ ID NO: 230163 - DNA, 465 bp, Artificial Sequence
  derived and/or modified sequence
atggccatgatcagcggcctgtcaggtcgcaagagcagcaccggcagtccaaccagtccgttaaacgcggagaagctggagagtgaggaggacgtgtcccaagctttcctcgaggcagtcgctgaggagaaacctcatgtcaagccttacttctccaagaccatcagggacctcgaggttgtcgagggaagcgcagccagatttgactgtaagattgaggggtatcctgaccccgaagtcgtgtggttcaaggatgatcagagcatacgagagtcaagacatttccagattgactatgacgaagatggaaattgctctttaatcatttccgatgtatgcggcgacgatgacgccaagtatacctgcaaggctgtgaacagtctcggggaagcaacttgcactgcagaattaatcgtcgaaaccatggaagagggtgaaggggaaggggaggaagaggaagagtag

SEQ ID NO: 230164 - DNA, 465 bp, Artificial Sequence
  derived and/or modified sequence
atggccatgatcagcggcctgagcggcaggaagagcagcacaggcagccccaccagccccctgaatgctgagaagctggagagcgaggaggatgtgtcccaggccttcctggaggccgtggccgaggagaagccccacgtgaagccctacttcagcaagaccatccgggacctggaggtggtggagggcagcgctgccaggtttgactgcaagattgagggctacccagaccctgaggtggtgtggttcaaggatgaccagagcatccgggagagccgccacttccagattgattatgatgaagatggcaactgcagcctcatcatcagtgatgtgtgtggagatgatgatgccaagtacacctgcaaggctgtgaacagcctgggggaggccacctgcacagctgagctgattgtggagaccatggaggagggggagggggagggggaggaggaggaggagtag

SEQ ID NO: 230165 - DNA, 465 bp, Artificial Sequence
  derived and/or modified sequence
atggccatgatcagcggcctgagcggccggaagagcagcaccggctctccgacctctccgctcaacgccgagaaactggagtccgaggaagatgtgtcccaggcctttctggaagctgtggctgaggaaaagccacacgtgaagccatacttctcaaaaactatcagagaccttgaagtagtcgagggcagcgcggcgcggtttgattgtaaaattgaagggtatcccgatccagaggtcgtctggtttaaagatgaccaatccatccgggagagtcgccacttccagattgattacgacgaggatggcaactgcagcctcatcatctccgatgtgtgcggcgatgacgacgccaagtacacgtgcaaggccgtgaactccttaggagaggcaacatgcaccgcagagttgatcgtagaaactatggaggagggagagggcgagggagaggaagaggaggaatag

SEQ ID NO: 230166 - DNA, 7282 bp, Artificial Sequence
  derived and/or modified sequence
catgaaaggatgtaacacgcaccaagatgtataaactatccggatagttctccatagccatgggtgtgtatggatagaacggacctggtcgcaaccagagttggatgtgattatgaggaaatgctcccaggtgcaggagtttgaattaggtgtggaacctcagtcagaatacagagaagaggactgcacaggtggaggagaaggcacagaggtgggagccggacccattccggctgggcttggctggacaggagcagagtcttttagctggatactcaagggacccaggggcattgagactttgcctgggtggcaaagaaaagggaaatcactgtgttggaggcaactggaacactggtcatttaccacaccaggtgactaaatcacagttgcctcagaaagtagagtgtcactcagaggttgaaagagggagcaaaggcgaatgggggccacaagtgtggagtttaagtgaccaccatcctgagcacatatcagctgtgctcctccaccatggaagtcagttcctggctacacccctcatgggaaggtgggtctccaggcctccctcaagtgcaaggtgagttgaaacatctgtagctgcttaccttttggtgccactaggatctgagtagcaaatattctttttaaaaatgtgggggaggatctacaaagtcaaagtcagctgtattaataatcctgtagccagcaggtctcaaagaaatatttctggaaaggatagggaagctgatgtcagggcggggcagtcctcagagcagtgagtctaagtggatattgcttggctgaggctataggttaaggggcagccttatcacctgggaacatctgcagatgaactaaagccaggaggatgcctaaacccaggggctaggagcagagaagagatgaggaaacaggagaggaggcaaagggaatttttcagttaaatcagtcagggaatcatagtggtgctgatttttttttttttttttaaagagacagggtctcatgctgtcacccaggctggagggcaatggtacaatcatagcttactgcagtctcaacctcgtgggctcaagcaatcttctcgactcggcctcctgagtagctgggactacaggcatatgccaccagaccggctaatatttttttttctcctttggtagaaacagggtctcactatgttgcctagactagtcttgaactcctggcctcaagcgatgctgctgcgttggctgcccgaagtgttgagtgcccagcctatgctgatattttaatcaatttttttttcttcttgtttacggcattattagccatagggttttctggaagggcgggggaagaaaagggtagaattcagagaatgaaccttaattttatattttagtatagatggcgacatttggaaatgatttttccacaaaattgcacacaaaagttgtccacaaaaattccattcaacaagtagtttccctgaagagtagcttccctggtaacagctctaaccatttcatgttacgttgctccctcaggaaaacgttttctgcattttaactgcaatcaccagggccttagctccccttggaatatgagggttccctcttgcagcagccaaggttctgtgcagtggggtggagtgggctgtgggcgggggcagagggagaggggaagatcaggctcaggtggcccagaactctctgcagctgtgccagagaaggcaccttcttgttattctggtgtggttttcataaaaagccctagaaggaatgaagtgacatgggaacaaatccctacaagcaaagctaggctgggtatagatgactaatcatattactcatcttggaatcaagttattccgaaagaaggtatattttaaatttatattaaaagaattttacaaagatatgttggaaaggtgtagcaatgggggcaggtaggttgagcagattaacagggtttccgcatgcacactggaagcaaaagactagacatcagaggcccttaggtagccatctttattttctgggaaccataaagaccccagcagtatggaccaagggcattaggggagaaaacactggactcagtatagcacggagtattcttggccatcccatttggatggtatgcactgctcaggggaaactgtagtcttggggctactggtatatatggggggctttgatgggtaaccagcttgctgtatgtatgtcagggaatgtcttagtattggtgccaaaagaccctaatcctgggaaactccacaagcctgcctgggcaagccaggatggctggccccacaagctctccaaggggcagggaatttgtgctgcatgaaggaggctggtgcagatactgctcaccagcgacacaggaacccagcctgggcaattgccctcaagcaagaaaaagggagaaattacaaaatcaaaacttggcgatcttgatgttccaaaaatttccaaaggtctttggtcagtaaagcaacaaccaattgtcagctcaaaggcataaaactggaagactagaacatactgatatattcatttctagttctgacaaataacttcctcggcaattttttttcacaaatcaattcccaaatatttttctatgttttagaaattatatgctggatatctccatcttttagaaaagttctccctatgtgagacatatttatttgttaatatatttactacttcctctgaaatactataactcttttgtttcctcattctgatagcttcattttagtcattttgttatgaaataaaatctggaagaaaaaagacatcgtctcgccacaccacacaggtgaagacagtcctcatcagtcccaatcctgatgtctggaattggggagcccatgggctcaaggcgggtgttccttgctacacatttatggatataaaccagagtcgttctgtagaggtctggaactgcaggaagattagaatcttctgctcccaggctactgaggcccagagaggggaactgacttgcacaaggtctcccagcaattagggttagagaactaacctgtcccttgttgggaatgaaccctctgggtttagaggctcctagcccaggacaaaccaatctgtgttggataaagggaatggagagcagagaagggccgagtctgagaatcgggttgattaggaagcaggctggtctgacattgactacgtagggagggctgccatggctggtaccacctcttacctgttcctgagggcagggtaacctcccatgggaagagctgggtctctctctctctacactttgtctagcacaacaaacaggttgaaccagtaacatctcccagaagagcatgaaaggttgccacgtggcctgagcctgcagaggcattctccgcagggccacacggtggttctgcgcacagttaagttgttcagttttcatctctcaccatcttcccctcctcatcacctccacctggggctgcgtggattctgttcagcgacccagcctcactgtggtggcagaggccagaaacatacccacaccatacagtgtgatgtgtgtgagaagggatggccaggggacagagcaaggtgaaatgtctgtccaaagtgcatgagagcagtctgcagcaaggatggcaggaggcatgacagtaaggtcatcccgctcactgcagtaggtctcctctttaaccatacacacacgcacacaattttctgtatgtttccttagcacccagaagttattcactttcaaaatgatcagtctttttactgaagcttactggctttccaactagtcctaaattgtgaggctttactgaagtacttgagcatgtgaagtgaactgaggaggaaaatggctttgccggcagagtttgagatgcaacgagtacaagccatttgcctatgaagaggctgtttcctccctctctcagggaggacaagtagccagtctgtggtgacatctgttgtctagatgcacagcttttcgatgcctaaaaaagatgctttgggtgcaggggtggaaagacttggttgtgccttagttttcttatcttagtcattcctgttaaccttagaaaaaaggtgaaaaacttactgaaagataagaaacaataagacacaattgtacattattagggatcctatgcttggtagaattttcgcaatgtaaataaattacatctcaagttctgatccttttcagcagaaattctttcctctcccaagtctagtcactgagaagcaaagtgccgttgccttttatttcttcaatgcttctttttggtgcctgaatgcacaccaaggaagagctcctctccagagcttcactgcatcatagacttgtgcaggggccagccagagtgtttctcaaaatcttttaagtctctgaattataaacagagctaaatgggaccttggagatcatcttgtccagccccctcctagagaaggagactgaagctcagagtggttaagtgacttgcccaaggtcaacaggatgctgtgttattattattatgattatttttgcatcaggacttgtgggatctgtagtaactattctcttggccaattataatcacatcactggcattgttttacgagaaatagccccgctaggcccagtcagcaataagtctttggagctgtctcagcctgcagttgctttatataaaccatcccttttatgggagttgaagcactgtatgaaaagggtttttgtctcatgttgaccttgtttagtcacattaacgcacacatcagttccaggccccattccattctctgaacatcttctgacacactgacagtgctgagcagagcaaggttgggttcgctcctctggcagaacctcggctctcaggaggtccttgttccagggaacagctgcttctctggggctgggctctactccctgcagcccctcgcactacccagctggaaccagggacaacgcctgagtccaaccctcgtgtctattttccagaaaacgggcaatgctgtgagagccattggaagactgtcctctatggcaatgatctcagggctcagtggcaggaaatcctcaacagggtcaccaaccagcccgctcaatgcagaaaaactagaatctgaagaagatgtgtcccaagctttccttgaggctgttgctgaggaaaagcctcatgtaaaaccctatttctctaagaccattcgcgatttagaagttgtggagggaagtgctgctagatttgactgcaagattgaaggatacccagaccccgaggttgtctggttcaaagatgaccagtcaatcagggagtcccgccacttccagatagactacgatgaggacgggaactgctctttaattattagtgatgtttgcggggatgacgatgccaagtacacctgcaaggctgtcaacagtcttggagaagccacctgcacagcagagctcattgtggaaacgatggaggaaggtgaaggggaaggggaagaggaagaagagtgaaacaaagccagagaaaagcagtttctaagtcatattaaaaggactatttctctaaaactcaaaaaaaaaaaaaaaactcaagatagtaaaagcacctagtgtgatagattatcggttaggtcatttgtgggttgattcttcagaaacagcagttgatacctagcagcgttattgatgggcattaatctatgttagttggcaccttaagatactagtgcagctagatttcatttagggaaatcaccagtaacttgactgaccaattgattttagagagaaagtaaccaaaccaaatatttatctgggcaaagtcataaattctccacttgaatgcgctcatgaaaaataaggccaaaacaagagttctgggccacagctcagcccagagggttcctggggatgggaggcctctctctccccaccccctgactctagagaactgggttttctcccagtactccagcaattcatttctgaaagcagttgagccactttattccaaagtacactgcagatgttcaaactctccatttctctttccccttccacctgccagttttgctgactctcaacttgtcatgagtgtaagcattaaggacattatgcttcttcgattctgaagacaggtccctgctcatggatgactctggcttccttaggaaaatatttttcttccaaaatcagtaggaaatctaaacttatcccctctttgcagatgtctagcagcttcagacatttggttaagaacccatgggaaaaaaaaaatccttgctaatgtggtttcctttgtaaaccaggattcttatttgtgctgttatagaatatcagctctgaacgtgtggtaaagatttttgtgtttgaatataggagaaatcagtttgctgaaaagttagtcttaattatctattggccacgatgaaacagatttcaactgataaagagctggagaactccatgtactttggaatctcctccaagatagccagagtttaatacatcttcattctcaacactctccaaagaacttgacctaccttatgggttccatatttttcttcttaaatgtgcatcaatcatgccttgcccccaacctttaaatatattcttagacctggtaaatgcactcagacttgcgtctttaggaatttttaactttctttcactacattggcacttaaattttttctttataaagctttttgaaggtcataaacaaagaccataattgatgatagacctaatacatttcctctgtgtgtgtgtgtaacattccaaatactttttttttcttttccactgtttgtaaggtgcaacaatttaatatttttaagggactttttaagagttccttaagaaccaatttaaaattacttcagtgcaatcctacacagtatcaacattagaattttgatattagtcttatgttatcttccattctatttttatctgctttttgctgctagtttcaaactgccagtatttttccttttgcttttaaaatagttacaatatttttcatgatagccacagtattgccacagtttattataataaagggtttttatttgatttagcgcattcaaagcttttttctatcacttttgtgttcagaatataacctttgtgtgcgtgtatgttgtgtgtgtgcatgtgtggcgtatatgtgtgttacaggttaatgccttcttggaattgtgttaatgttctcttggtttattatgccatcagaatggtaaatgagaacactacaactgtagtcagctcacaatttttaaataaaggataccacagtgca

SEQ ID NO: 230167 - DNA, 465 bp, Artificial Sequence
  derived and/or modified sequence
atggcaatgataagcgggctttcaggacggaagagcagcacaggctctccaacctcccccctgaacgccgaaaagttagagtcagaagaagatgtctcgcaggccttcttggaggcagtggccgaggagaaaccgcacgtgaagccatacttcagcaagactatcagggacctcgaggtggtggagggcagcgccgcacggtttgattgcaaaatcgaaggttacccagatcctgaggtcgtgtggttcaaggacgatcaatctattcgagagtcgcgtcacttccagattgactatgatgaggacggcaattgcagcctgatcatcagcgatgtctgtggggacgacgatgccaagtacacatgcaaggcagtgaactccttgggggaggccacctgtacggccgagcttattgttgagacaatggaagagggagagggagaaggggaagaggaagaagaatag

SEQ ID NO: 230168 - protein, 368 aa, Artificial Sequence
  derived and/or modified sequence
MATAERRALGIGFQWLSLATLVLICAGQGGRREDGGPACYGGFDLYFILDKSGSVLHHWNEIYYFVEQLAHKFISPQLRMSFIVFSTRGTTLMKLTEDREQIRQGLEELQKVLPGGDTYMHEGFERASEQIYYENRQGYRTASVIIALTDGELHEDLFFYSEREANRSRDLGAIVYCVGVKDFNETQLARIADSKDHVFPVNDGFQALQGIIHSILKKSCIEILAAEPSTICAGESFQVVVRGNGFRHARNVDRVLCSFKINDSVTLNEKPFSVEDTYLLCPAPILKEVGMKAALQVSMNDGLSFISSSVIITTTHCSDGSILAIALLILFLLLALALLWWFWPLCCTVIIKEVPPPPAEESEENKIK

SEQ ID NO: 230169 - DNA, 1107 bp, Artificial Sequence
  derived and/or modified sequence
atggccacggccgagaggagagcccttggcattggttttcagtggctgtcacttgcaaccctcgtccttatatgtgccgggcagggtggacgacgggaggacggaggcccagcatgttacggaggcttcgatctgtactttatcctggataaatctggaagtgtactgcaccactggaacgaaatctactacttcgtcgaacagctcgcacacaaatttatttcgccccagctccgcatgtcattcatagtcttttctaccagaggaacaacccttatgaagcttactgaggatcgagagcaaattcggcaagggctggaggagctgcagaaagttctacctggtggtgacacatacatgcacgaaggcttcgagcgggcatcggaacagatatactacgagaaccggcagggttatcggacggccagtgtcatcattgccttaactgacggggagctgcatgaggatctgttcttctatagtgaacgtgaagccaatcggtctcgggatttgggggctattgtgtactgtgtgggtgtaaaggattttaacgagacacaactcgcacggatagccgatagtaaggatcatgtgtttccagtgaacgacggctttcaggcactacaagggataatccacagtatccttaaaaagtcgtgcatagagattctggccgccgagccaagtactatatgcgccggggagtcctttcaggttgttgttaggggaaatgggtttcgccacgcccgcaacgtagacagagtgctctgctcatttaagattaacgattcggttaccttgaacgagaagccttttagcgttgaggacacctacctactgtgcccagcccctattctgaaggaggtcggcatgaaagcggctctacaagtgtctatgaacgacgggctgagcttcattagctcctctgtgatcattactaccactcattgttccgacggtagcattttggccatcgccctactgatcctgtttcttttgttggccctggctttgctttggtggttttggcctctatgctgtaccgtaataatcaaggaggtaccaccaccacctgcggaagagagcgaagaaaataagatcaagtag

SEQ ID NO: 230170 - DNA, 1107 bp, Artificial Sequence
  derived and/or modified sequence
atggccacagctgagcggcgggccctgggcatcggcttccagtggctgagcctggccaccctggtgctgatctgtgccggccagggcggcagaagagaagatggcggccctgcctgctacggcggctttgacctgtacttcatcctggacaagagcggctctgtgctgcaccactggaatgagatctactactttgtggagcagctggcccacaagttcatcagcccccagctgaggatgtccttcatcgtgttcagcacccggggcaccaccctgatgaagctgacagaagatcgggagcagatccggcagggcctggaggagctgcagaaggtgctgcccggcggggacacctacatgcatgagggctttgagcgggccagcgagcagatctactatgagaaccggcagggctacagaacagccagcgtcatcatcgccctgacagatggagagctgcatgaagatctcttcttctacagcgagcgggaggccaacagaagccgggacctgggcgccatcgtgtactgtgtgggcgtgaaggacttcaatgagacccagctggccagaattgctgacagcaaggaccacgtgtttcctgtgaatgatggcttccaggccctgcagggcatcatccacagcatcctgaagaagagctgcatcgagatcctggccgctgagcccagcaccatctgtgccggggagagcttccaggtggtggtgagaggaaatggcttcagacatgccagaaatgtggacagagtgctgtgcagcttcaagatcaatgacagcgtgaccctgaatgagaagcccttctctgtggaggacacctacctgctgtgcccagcccccatcctgaaggaggtgggcatgaaggccgccctgcaggtgtccatgaatgatggcctgtccttcatcagcagcagcgtcatcatcaccaccacccactgcagtgatggcagcatcctggccatcgccctgctgatcctcttcctgctgctggccctggccctgctgtggtggttctggcccctgtgctgcaccgtcatcatcaaggaggtgcccccacctcctgctgaggagagcgaggagaacaagatcaagtag

SEQ ID NO: 230171 - DNA, 1107 bp, Artificial Sequence
  derived and/or modified sequence
atggccaccgccgagcggcgggccctgggcatcggcttccagtggctctcactagcaacattggtgcttatctgcgccggtcagggtggccgtcgcgaggatggaggtccagcgtgctatgggggttttgacctgtattttattttggataaatcgggaagcgtcctccaccactggaatgagatatattattttgtcgagcaattagctcataaatttatctcaccacagctgaggatgtcatttatcgtgttctctacccggggtaccacgctgatgaagctcactgaggatcgggaacaaattcggcagggcctggaagaactgcagaaggtgctgcctggtggtgatacctatatgcacgaaggctttgaacgtgcctctgaacagatctactacgagaacaggcaaggctacaggaccgcatctgttatcatcgctctgacagatggcgaattgcatgaagatctgtttttctatagcgagagagaagccaatcggagtcgtgatctgggggctattgtgtactgcgttggggtgaaagatttcaatgagacacagctggcacgaattgctgactctaaagatcatgtgtttcctgtaaacgacgggttccaggcgctgcagggcattattcactccattctgaagaagtcttgcatcgagatcttagcagctgagccctctactatctgcgcaggagagagcttccaggtcgtggtcagaggcaatggcttccgccacgcccgcaacgtggaccgcgtcctctgcagctttaaaataaatgattcagtgaccttgaacgagaagcctttcagcgtagaggatacgtacctcctctgcccagccccaattcttaaggaggtcggcatgaaagccgccttacaagtctccatgaatgatgggctcagcttcatcagcagctccgtaataattaccacgacacattgcagcgacggttctattctggcaatagcactgctcattctgttcctgctgctcgcattggcgctgctgtggtggttctggcctttgtgttgtaccgtgattattaaagaggtgcctcccccgcctgccgaagagagcgaagaaaacaaaatcaaatag

SEQ ID NO: 230172 - DNA, 1107 bp, Artificial Sequence
  derived and/or modified sequence
atggctacggcagaaagaagggcgttaggaattggctttcagtggctgagtctagcaactcttgtactgatttgtgctggccagggaggaagacgagaggacggaggccctgcgtgctacggcggatttgacctgtattttattctggacaagtctggttcggtcctccatcactggaatgagatttactacttcgtggaacagttggcccacaaatttatctccccccagctcagaatgagtttcatcgtcttttctacccggggtacaactctgatgaaactgacagaagatcgggaacagattagacaaggactggaagagctgcagaaagtgctcccaggaggcgacacctacatgcatgagggtttcgaaagagccagtgagcaaatctactacgaaaacagacaggggtatcggaccgcctcagttattatcgcacttactgacggagagctgcatgaagatctcttcttttattcagaaagggaggctaaccgctccagagacctgggagccattgtttactgtgttggtgtgaaagattttaacgagacccagctggcccgtatcgcggattccaaggatcatgtatttcccgttaatgatggcttccaagcgctgcagggcattatccattcaatactgaaaaagagttgcattgaaattctcgcagctgaacccagcaccatctgtgccggagaatcatttcaggtggtagtgagggggaatggctttagacatgcaagaaatgtcgatcgtgtcctttgcagctttaagataaacgattctgtcactctcaacgagaaacccttttctgtggaggatacttaccttctgtgccctgccccaattctcaaggaagttggcatgaaggctgcactgcaggtgtccatgaatgatggtctgtccttcattagttcctcagtgataatcacaaccacacattgcagcgatgggtccattctggctatcgccttgctgatcctgttcctgctgcttgccctggcactgctgtggtggttctggcctctgtgttgcacagttattattaaggaagtaccacctccccctgcagaagaatccgaggaaaacaagatcaagtag

SEQ ID NO: 230173 - DNA, 1384 bp, Artificial Sequence
  derived and/or modified sequence
aggacccgcgaggaagggcccgcggatggcgcgtccctgagggtcgtggcgagttcgcggagcgtgggaaggagcggaccctgctctccccgggctgcgggccatggccacggcggagcggagagccctcggcatcggcttccagtggctctctttggccactctggtgctcatctgcgccgggcaagggggacgcagggaggatgggggtccagcctgctacggcggatttgacctgtacttcattttggacaaatcaggaagtgtgctgcaccactggaatgaaatctattactttgtggaacagttggctcacaaattcatcagcccacagttgagaatgtcctttattgttttctccacccgaggaacaaccttaatgaaactgacagaagacagagaacaaatccgtcaaggcctagaagaactccagaaagttctgccaggaggagacacttacatgcatgaaggatttgaaagggccagtgagcagatttattatgaaaacagacaagggtacaggacagccagcgtcatcattgctttgactgatggagaactccatgaagatctctttttctattcagagagggaggctaataggtctcgagatcttggtgcaattgtttactgtgttggtgtgaaagatttcaatgagacacagctggcccggattgcggacagtaaggatcatgtgtttcccgtgaatgacggctttcaggctctgcaaggcatcatccactcaattttgaagaagtcctgcatcgaaattctagcagctgaaccatccaccatatgtgcaggagagtcatttcaagttgtcgtgagaggaaacggcttccgacatgcccgcaacgtggacagggtcctctgcagcttcaagatcaatgactcggtcacactcaatgagaagcccttttctgtggaagatacttatttactgtgtccagcgcctatcttaaaagaagttggcatgaaagctgcactccaggtcagcatgaacgatggcctctcttttatctccagttctgtcatcatcaccaccacacactgttctgacggttccatcctggccatcgccctgctgatcctgttcctgctcctagccctggctctcctctggtggttctggcccctctgctgcactgtgattatcaaggaggtccctccaccccctgccgaggagagtgaggaaaataaaataaaataacaagaagaagaaagaaagaaatcccacagaaacagataacctaacacagcccgtgcaacgtattttatacaatgctctgaaaatcatagtctcaatctagacagtcttttcctctagttccctgtattcaaatcccagtgtctaacattcaataaatagctatatgaaatcaaa

SEQ ID NO: 230174 - DNA, 1107 bp, Artificial Sequence
  derived and/or modified sequence
atggccaccgccgagagaagagccctgggcatcggcttccagtggctgagcctggccaccctggtgctgatctgcgccggccagggcggcagaagagaggacggcggccccgcctgctacggcggcttcgacctgtacttcatcctggacaagagcggcagcgtgctgcaccactggaacgagatctactacttcgtggagcagctggcccacaagttcatcagcccccagctgagaatgagcttcatcgtgttcagcaccagaggcaccaccctgatgaagctgaccgaggacagagagcagatcagacagggcctggaggagctgcagaaggtgctgcccggcggcgacacctacatgcacgagggcttcgagagagccagcgagcagatctactacgagaacagacagggctacagaaccgccagcgtgatcatcgccctgaccgacggcgagctgcacgaggacctgttcttctacagcgagagagaggccaacagaagcagagacctgggcgccatcgtgtactgcgtgggcgtgaaggacttcaacgagacccagctggccagaatcgccgacagcaaggaccacgtgttccccgtgaacgacggcttccaggccctgcagggcatcatccacagcatcctgaagaagagctgcatcgagatcctggccgccgagcccagcaccatctgcgccggcgagagcttccaggtggtggtgagaggcaacggcttcagacacgccagaaacgtggacagagtgctgtgcagcttcaagatcaacgacagcgtgaccctgaacgagaagcccttcagcgtggaggacacctacctgctgtgccccgcccccatcctgaaggaggtgggcatgaaggccgccctgcaggtgagcatgaacgacggcctgagcttcatcagcagcagcgtgatcatcaccaccacccactgcagcgacggcagcatcctggccatcgccctgctgatcctgttcctgctgctggccctggccctgctgtggtggttctggcccctgtgctgcaccgtgatcatcaaggaggtgccccccccccccgccgaggagagcgaggagaacaagatcaagtag

SEQ ID NO: 230175 - protein, 106 aa, Artificial Sequence
  derived and/or modified sequence
MSSLSEYAFRMSRLSARLFGEVTRPTNSKSMKVVKLFSELPLAKKKETYDWYPNHHTYAELMQTLRFLGLYRDEHQDFMDEQKRLKKLRGKEKPKKGEGKRAAKRK

SEQ ID NO: 230176 - protein, 112 aa, Artificial Sequence
  derived and/or modified sequence
MSSLSEYAFRMSRLSARLFGEVTRPTNSKSMKVVKLFSELPLAKKKETYDWYPNHHTYAELMQTLRFLGLYRDEHQDFMDEQKRLKKLRGKEKPKKGEGKRAAKRKKKKKKR

SEQ ID NO: 230177 - DNA, 321 bp, Artificial Sequence
  derived and/or modified sequence
atgagtagtctctcagaatacgcgtttcgcatgtcccgcctcagcgcgaggctgttcggggaagttacacgcccaaccaattcaaagtcaatgaaagtggtcaagctgttctccgaactcccattagctaagaagaaggaaacctacgactggtacccaaatcaccatacctacgccgagctgatgcagaccttacgattcctgggcctgtacagagacgaacatcaagattttatggacgaacagaaaagacttaaaaagttgcgaggaaaagaaaaaccaaaaaagggcgaaggtaagcgggccgctaagagaaaatag

SEQ ID NO: 230178 - DNA, 321 bp, Artificial Sequence
  derived and/or modified sequence
atgtcgtccttaagtgagtatgcgttccgtatgtctaggctgagtgccagactgtttggggaggttactcggccgacaaatagtaaaagcatgaaggttgtcaagttattttctgagcttccactggccaaaaagaaagaaacatatgactggtatcctaatcaccatacatacgccgaactgatgcagaccttaagattcctcggcctttatagagatgaacaccaggacttcatggacgagcagaagagactgaagaaacttcggggaaaggagaaacccaagaaaggggagggtaaacgagccgcaaagcgaaagtag

SEQ ID NO: 230179 - DNA, 321 bp, Artificial Sequence
  derived and/or modified sequence
atgagcagcctatcagagtacgcctttagaatgagcagattgtcagctcggctgttcggcgaggttacccgccccaccaatagcaagtcaatgaaggtagtgaaactctttagcgagttacccctcgcaaaaaagaaagagacttacgattggtaccctaatcaccacacatatgccgagctgatgcagacactcagatttcttggcctgtatcgggacgagcaccaggacttcatggatgaacaaaaacgcctcaagaagctgagggggaaagaaaagccgaagaaaggcgaaggaaaaagagcagctaagcgcaagtag

SEQ ID NO: 230180 - DNA, 321 bp, Artificial Sequence
  derived and/or modified sequence
atgtccagccttagtgaatacgcgtttcgaatgtcccggctttctgcccggctgttcggggaggtcactcggccgactaacagcaagagcatgaaagtggtgaaactttttagtgagttgccactggctaaaaagaaagaaacttatgattggtacccaaaccatcacacttatgccgagctcatgcagacattacgatttttggggttataccgcgatgagcatcaggacttcatggatgagcagaaaaggctgaagaaattgaggggaaaggagaagcctaagaagggcgaaggcaagagagccgcaaagcgcaagtag

SEQ ID NO: 230181 - DNA, 339 bp, Artificial Sequence
  derived and/or modified sequence
atgtcttctctgagcgaatacgccttccgcatgagtaggttgtctgctcgactctttggcgaggtcacccggccaactaatagtaaatctatgaaagtggttaagctcttctccgagctgccactcgctaagaaaaaagagacttatgattggtatcctaaccaccacacgtatgcggagttaatgcagacccttcgtttcctcgggctgtatcgcgacgagcatcaggattttatggacgagcagaagagactcaagaaactgcggggtaaagaaaagcccaaaaaaggcgaaggcaagagagccgctaagagaaaaaaaaagaagaaaaagaggtag

SEQ ID NO: 230182 - DNA, 321 bp, Artificial Sequence
  derived and/or modified sequence
atgagcagcctgtctgaatatgccttcaggatgagccggctgagcgcccggctgtttggagaggtgacccggcccaccaacagcaagtccatgaaggtggtgaagctgttcagcgagctgcccctggccaagaagaaggagacctatgactggtaccccaaccaccacacctatgcagagctgatgcagaccctgcgcttcctgggcctgtacagagatgagcaccaggacttcatggatgagcagaagaggctgaagaagctgcggggcaaggagaagcccaagaagggggagggcaagagagctgccaagaggaagtag

SEQ ID NO: 230183 - DNA, 339 bp, Artificial Sequence
  derived and/or modified sequence
atgagcagcctgtctgaatatgccttcaggatgagccggctgagcgcccggctgtttggagaggtgacccggcccaccaacagcaagtccatgaaggtggtgaagctgttcagcgagctgcccctggccaagaagaaggagacctatgactggtaccccaaccaccacacctatgcagagctgatgcagaccctgcgcttcctgggcctgtacagagatgagcaccaggacttcatggatgagcagaagaggctgaagaagctgcggggcaaggagaagcccaagaagggggagggcaagagagctgccaagaggaagaagaagaagaagaagaggtag

SEQ ID NO: 230184 - DNA, 690 bp, Artificial Sequence
  derived and/or modified sequence
gcgcgagcttggagccgggtagagggcgggccttccgggacgagggcgcgtgggtgaggaaggtcaggtctaggaactctaactccttgccactcaagaaatgtcctccctttcagaatatgccttccgcatgtctcgtctcagtgcccggctatttggtgaagtcaccaggcctactaattccaagtctatgaaagtggtgaaactgtttagtgaactgcccttggccaagaagaaggagacttatgattggtatccaaatcaccacacttacgctgaactcatgcagacgctccgatttcttggactctacagagatgagcatcaggattttatggatgagcaaaaacgactaaagaagcttcgtggaaaggagaaaccaaagaaaggagaagggaaaagagcagcaaaaaggaaatagtgttggtccctcaagagggagactttcttcctcagtggcggagagaagaaagtgcatttattgtctttccacctattggaggaatgtcatcttcctaaatgaagtttatttggaggaacacagtcatctccttggtgaaatctaatccggttacattgtggctggtttcttgaacacattctaactgtgcaaaattatcttggccttggccgtgtaatgtgaggtttacctgattctctaatgaaataaatacctaagttattgtttga

SEQ ID NO: 230185 - DNA, 853 bp, Artificial Sequence
  derived and/or modified sequence
gcaattactctcttccatattggttaacagtagaaggctcagtttctctgctcatcacacggccttcggcactgtagctttgggtggtgggctgcagattaattttgtaaccaccttaagaaaaatacggaactctaactccttgccactcaagaaatgtcctccctttcagaatatgccttccgcatgtctcgtctcagtgcccggctatttggtgaagtcaccaggcctactaattccaagtctatgaaagtggtgaaactgtttagtgaactgcccttggccaagaagaaggagacttatgattggtatccaaatcaccacacttacgctgaactcatgcagacgctccgatttcttggactctacagagatgagcatcaggattttatggatgagcaaaaacgactaaagaagcttcgtggaaaggagaaaccaaagaaaggagaagggaaaagagcagcaaaaaggaaatagtgttggtccctcaagagggagactttcttcctcagtggcggagagaagaaagtgcatttattgtctttccacctattggaggaatgtcatcttcctaaatgaagtttatttggaggaacacagtcatctccttggtgaaatctaatccggttacattgtggctggtttcttgaacacattctaactgtgcaaaattatcttggccttggccgtgtaatgtgaggtttacctgattctctaatgaaataaatacctaagttattgtttgatgatttgtttggggtgggatgggatgctgggggaatggaggggaaacctcattaagtgagcatcctatagtgtcctcatttctcccttcttgcttactgactcaccc

SEQ ID NO: 230186 - DNA, 744 bp, Artificial Sequence
  derived and/or modified sequence
attcccaccaaaacatactaccgaaccgtgcatgcccttccaggagagccagacctttctaactctccccagcccaccacctccccgggtcctccgcacaggcggcggcgctagccttactgcgcaggcgccaggaactctaactccttgccactcaagaaatgtcctccctttcagaatatgccttccgcatgtctcgtctcagtgcccggctatttggtgaagtcaccaggcctactaattccaagtctatgaaagtggtgaaactgtttagtgaactgcccttggccaagaagaaggagacttatgattggtatccaaatcaccacacttacgctgaactcatgcagacgctccgatttcttggactctacagagatgagcatcaggattttatggatgagcaaaaacgactaaagaagcttcgtggaaaggagaaaccaaagaaaggagaagggaaaagagcagcaaaaaggaaatagtgttggtccctcaagagggagactttcttcctcagtggcggagagaagaaagtgcatttattgtctttccacctattggaggaatgtcatcttcctaaatgaagtttatttggaggaacacagtcatctccttggtgaaatctaatccggttacattgtggctggtttcttgaacacattctaactgtgcaaaattatcttggccttggccgtgtaatgtgaggtttacctgattctctaatgaaataaatacctaagttat

SEQ ID NO: 230187 - DNA, 688 bp, Artificial Sequence
  derived and/or modified sequence
agattgttcttgatgaactgaatgcagctaatacattttcagtgccgttgatgcctctatgactccgtaaaataatcggaactctaactccttgccactcaagaaatgtcctccctttcagaatatgccttccgcatgtctcgtctcagtgcccggctatttggtgaagtcaccaggcctactaattccaagtctatgaaagtggtgaaactgtttagtgaactgcccttggccaagaagaaggagacttatgattggtatccaaatcaccacacttacgctgaactcatgcagacgctccgatttcttggactctacagagatgagcatcaggattttatggatgagcaaaaacgactaaagaagcttcgtggaaaggagaaaccaaagaaaggagaagggaaaagagcagcaaaaaggaaatagtgttggtccctcaagagggagactttcttcctcagtggcggagagaagaaagtgcatttattgtctttccacctattggaggaatgtcatcttcctaaatgaagtttatttggaggaacacagtcatctccttggtgaaatctaatccggttacattgtggctggtttcttgaacacattctaactgtgcaaaattatcttggccttggccgtgtaatgtgaggtttacctgattctctaatgaaataaatacctaagttat

SEQ ID NO: 230188 - DNA, 402 bp, Artificial Sequence
  derived and/or modified sequence
ccgggacgagggcgcgtgggtgaggaaggtcaggtctaggaactctaactccttgccactcaagaaatgtcctccctttcagaatatgccttccgcatgtctcgtctcagtgcccggctatttggtgaagtcaccaggcctactaattccaagtctatgaaagtggtgaaactgtttagtgaactgcccttggccaagaagaaggagacttatgattggtatccaaatcaccacacttacgctgaactcatgcagacgctccgatttcttggactctacagagatgagcatcaggattttatggatgagcaaaaacgactaaagaagcttcgtggaaaggagaaaccaaagaaaggagaagggaaaagagcagcaaaaagaaaaaaaaaaaaaaaaaagaga

SEQ ID NO: 230189 - DNA, 321 bp, Artificial Sequence
  derived and/or modified sequence
atgagcagcctgagcgagtacgccttccggatgagccggctgagcgcccgattgttcggggaagtcactcggcccactaacagtaagagtatgaaagttgtgaagctgttttcggaactgcccttagccaagaaaaaagaaacctatgactggtacccgaaccatcatacctatgcggagctgatgcagaccttgagatttctcggcctgtaccgggatgagcaccaagactttatggacgagcagaagcggctcaagaagctgcgggggaaggaaaagccaaaaaaaggcgaaggaaagagagccgcgaagcggaaatag

SEQ ID NO: 230190 - DNA, 321 bp, Artificial Sequence
  derived and/or modified sequence
atgagcagcctgagcgagtacgccttccggatgagccggctgagcgcaaggctttttggagaggtgacacgcccaactaacagtaagtcaatgaaggtcgtcaagttattcagcgaactacccctcgctaagaagaaagagacttacgactggtaccccaaccatcacacctacgccgagctgatgcagactctgaggtttttaggtctgtatcgggatgagcaccaggacttcatggacgagcagaagaggctgaaaaagttgaggggtaaagaaaagccaaagaagggagaaggcaaacgagcagctaaaagaaaatag

SEQ ID NO: 230191 - DNA, 321 bp, Artificial Sequence
  derived and/or modified sequence
atgagcagcctgagcgagtacgccttccggatgagccggctgagcgcccggctctttggtgaagttacccggcccacaaactcaaaaagcatgaaagtggtaaagctgttcagcgagcttcctctggcaaaaaaaaaggagacatacgactggtatccgaaccatcatacctatgccgagcttatgcaaaccttgaggttcctcgggctgtacagggacgagcaccaggactttatggatgaacagaagcgccttaaaaagttaagaggaaaggaaaaaccaaagaaaggggaggggaaacgtgccgcaaaaaggaagtag

SEQ ID NO: 230192 - DNA, 321 bp, Artificial Sequence
  derived and/or modified sequence
atgagcagcctgagcgagtacgccttccggatgagccggctgagcgcacgtttgttcggagaagtgacgagacctactaattccaagagtatgaaggtcgttaagttgttttccgagctacccctcgccaagaaaaaagagacttatgactggtatcctaatcaccatacgtacgcagagcttatgcagacattgaggtttttagggctgtaccgggacgaacatcaggactttatggacgaacagaagcgattgaaaaaacttagaggcaaagagaagcccaagaagggcgagggcaaacgtgcagccaaacgaaagtag

SEQ ID NO: 230193 - DNA, 339 bp, Artificial Sequence
  derived and/or modified sequence
atgagcagcctgagcgagtacgccttccggatgagccggctgagcgctaggctgttcggcgaagtcaccagaccgaccaatagtaaatctatgaaagttgttaaactgttctcagagctgccccttgctaaaaaaaaggagacctacgactggtacccaaaccatcatacttacgctgagctgatgcagacccttcggtttttagggttgtaccgcgatgagcaccaggacttcatggatgagcagaagagacttaagaagctgcgggggaaagaaaaaccaaagaagggcgagggcaagcgggctgctaagcggaaaaaaaaaaagaaaaaacgttag

SEQ ID NO: 230194 - DNA, 321 bp, Artificial Sequence
  derived and/or modified sequence
atgtcgtccttgtccgaatatgcgtttaggatgtcgcgccttagcgctcgcctattcggcgaggtgacaagacccacaaatagcaaatctatgaaggttgtgaaactgtttagcgagctgcctctggcaaagaaaaaagagacctatgattggtacccaaaccaccatacctatgccgaactgatgcagacgttgagattccttggcctgtatcgagatgaacaccaggatttcatggatgagcaaaaaagactcaaaaagttgcggggaaaagaaaaacctaaaaagggcgaagggaagcgggcagcaaaacgcaagtag

SEQ ID NO: 230195 - DNA, 321 bp, Artificial Sequence
  derived and/or modified sequence
atgagctcattgtccgagtacgcatttaggatgagtagactgtccgcgaggctcttcggggaggtcacacggcctaccaactcaaaatcaatgaaggttgtgaagctgtttagcgagctcccactggcaaagaagaaggaaacctacgactggtaccccaatcaccacacctacgcagagttgatgcagactctgagatttctcggcctgtatcgggatgaacaccaagattttatggatgagcagaaacgtttaaaaaaactacgcggaaaggagaagcccaaaaagggggaagggaaacgagccgctaaaagaaagtag

SEQ ID NO: 230196 - DNA, 321 bp, Artificial Sequence
  derived and/or modified sequence
atgagctctttgtccgagtacgcatttcggatgtcccgcctctccgctcggctatttggcgaggtgaccaggcctaccaattctaagagcatgaaagttgtgaagttgttcagcgaattaccgttagctaaaaagaaggagacctacgactggtacccaaaccaccatacctatgcggagcttatgcagacactccggtttctgggactatatagggacgaacaccaggatttcatggatgagcagaagcgattaaagaaattgcgcggaaaggaaaaaccaaagaagggagaaggtaagagggcagcaaaacgaaagtag

SEQ ID NO: 230197 - DNA, 321 bp, Artificial Sequence
  derived and/or modified sequence
atgagcagtctgtccgaatacgcgttcaggatgagtaggctgagcgcccgtctatttggggaggtcactcggcctacgaacagtaaatccatgaaggtggtcaagctttttagtgagctacccctggccaaaaaaaaagagacgtacgactggtatccaaaccaccatacctacgcagagttaatgcaaacactgcgctttcttggtttgtatcgtgatgagcatcaagacttcatggatgaacagaagcgactgaagaagctaagaggcaaggagaagcctaagaaaggggaggggaaaagggctgccaagcggaagtag

SEQ ID NO: 230198 - DNA, 339 bp, Artificial Sequence
  derived and/or modified sequence
atgtccagtctgtcagaatacgccttccggatgtctcgcttgtccgcacgactgttcggagaggtgactcgacccacgaatagcaagagcatgaaggttgtaaaactctttagtgagctccccctggcgaagaaaaaggaaacttacgactggtatccaaaccaccatacctatgccgaattgatgcaaacgttgaggttcctgggactgtatagagacgagcatcaggacttcatggacgaacagaagcggctcaaaaagctgcgcggaaaagaaaagccgaagaaaggggaaggcaaacgggctgctaagcgtaaaaaaaagaaaaagaagcgatag

SEQ ID NO: 230199 - DNA, 321 bp, Artificial Sequence
  derived and/or modified sequence
atgagcagcctgagcgagtacgccttcagaatgagcagactgagcgccagactgttcggcgaggtgaccagacccaccaacagcaagagcatgaaggtggtgaagctgttcagcgagctgcccctggccaagaagaaggagacctacgactggtaccccaaccaccacacctacgccgagctgatgcagaccctgagattcctgggcctgtacagagacgagcaccaggacttcatggacgagcagaagagactgaagaagctgagaggcaaggagaagcccaagaagggcgagggcaagagagccgccaagagaaagtag

SEQ ID NO: 230200 - DNA, 339 bp, Artificial Sequence
  derived and/or modified sequence
atgagcagcctgagcgagtacgccttcagaatgagcagactgagcgccagactgttcggcgaggtgaccagacccaccaacagcaagagcatgaaggtggtgaagctgttcagcgagctgcccctggccaagaagaaggagacctacgactggtaccccaaccaccacacctacgccgagctgatgcagaccctgagattcctgggcctgtacagagacgagcaccaggacttcatggacgagcagaagagactgaagaagctgagaggcaaggagaagcccaagaagggcgagggcaagagagccgccaagagaaagaagaagaagaagaagagatag

SEQ ID NO: 230201 - protein, 420 aa, Artificial Sequence
  derived and/or modified sequence
MNEKWDTNSSENWHPIWNVNDTKHHLYSDINITYVNYYLHQPQVAAIFIISYFLIFFLCMMGNTVVCFIVMRNKHMHTVTNLFILNLAISDLLVGIFCMPITLLDNIIAGWPFGNTMCKISGLVQGISVAASVFTLVAIAVDRFQCVVYPFKPKLTIKTAFVIIMIIWVLAITIMSPSAVMLHVQEEKYYRVRLNSQNKTSPVYWCREDWPNQEMRKIYTTVLFANIYLAPLSLIVIMYGRIGISLFRAAVPHTGRKNQEQWHVVSRKKQKIIKMLLIVALLFILSWLPLWTLMMLSDYADLSPNELQIINIYIYPFAHWLAFGNSSVNPIIYGFFNENFRRGFQEAFQLQLCQKRAKPMEAYALKAKSHVLINTSNQLVQESTFQNPHGETLLYRKSAEKPQQELVMEELKETTNSSEI

SEQ ID NO: 230202 - DNA, 1263 bp, Artificial Sequence
  derived and/or modified sequence
atgaacgagaagtgggacaccaacagcagcgagaactggcaccccatctggaacgtgaacgacaccaagcaccacctgtacagcgacatcaacatcacctacgtgaactactacctgcaccagccccaggtggccgccatcttcatcatcagctacttcctgatcttcttcctgtgcatgatgggcaacaccgtggtgtgcttcatcgtgatgagaaacaagcacatgcacaccgtgaccaacctgttcatcctgaacctggccatcagcgacctgctggtgggcatcttctgcatgcccatcaccctgctggacaacatcatcgccggctggcccttcggcaacaccatgtgcaagatcagcggcctggtgcagggcatcagcgtggccgccagcgtgttcaccctggtggccatcgccgtggacagattccagtgcgtggtgtaccccttcaagcccaagctgaccatcaagaccgccttcgtgatcatcatgatcatctgggtgctggccatcaccatcatgagccccagcgccgtgatgctgcacgtgcaggaggagaagtactacagagtgagactgaacagccagaacaagaccagccccgtgtactggtgcagagaggactggcccaaccaggagatgagaaagatctacaccaccgtgctgttcgccaacatctacctggcccccctgagcctgatcgtgatcatgtacggcagaatcggcatcagcctgttcagagccgccgtgccccacaccggcagaaagaaccaggagcagtggcacgtggtgagcagaaagaagcagaagatcatcaagatgctgctgatcgtggccctgctgttcatcctgagctggctgcccctgtggaccctgatgatgctgagcgactacgccgacctgagccccaacgagctgcagatcatcaacatctacatctaccccttcgcccactggctggccttcggcaacagcagcgtgaaccccatcatctacggcttcttcaacgagaacttcagaagaggcttccaggaggccttccagctgcagctgtgccagaagagagccaagcccatggaggcctacgccctgaaggccaagagccacgtgctgatcaacaccagcaaccagctggtgcaggagagcaccttccagaacccccacggcgagaccctgctgtacagaaagagcgccgagaagccccagcaggagctggtgatggaggagctgaaggagaccaccaacagcagcgagatctag

SEQ ID NO: 230203 - DNA, 1263 bp, Artificial Sequence
  derived and/or modified sequence
atgaacgaaaagtgggataccaactcatctgagaattggcatcctatttggaacgtgaacgacacaaagcaccatctttactccgacattaatataacttacgttaactactacctacatcagccccaggtggcagcaatctttatcatctcgtatttcctgatatttttcctatgcatgatggggaatacggtggtctgtttcatagtgatgcggaataagcacatgcacacggtcacaaacctttttatcttgaaccttgccatatccgacctgctcgtaggaatcttttgtatgcctatcactttattggacaacatcatagctgggtggccctttggaaacaccatgtgcaaaatctctggcctcgtgcagggaatcagcgttgccgcatctgtcttcacgttggtggcaattgcagtcgatcggtttcagtgcgtcgtgtatccattcaagccaaagctaacaatcaagacggcttttgtgataatcatgattatttgggtgctggccattactatcatgagcccgtctgcagtgatgttgcacgtgcaggaagaaaagtattatcgtgtgaggttgaactcgcagaacaaaaccagtccagtgtactggtgccgcgaagactggcccaatcaggaaatgcgcaaaatttatactactgtgctgttcgcaaacatctacctcgcacccctttccctaatcgtaataatgtatgggaggattggcataagcctctttcgcgctgccgttcctcatacagggaggaagaaccaggagcaatggcatgtcgtgtctagaaaaaaacaaaagatcatcaaaatgctgttgatcgttgctttattgtttatcctctcctggttgcccctgtggacactgatgatgctgtctgattacgctgatctcagtcctaatgagctccagatcatcaacatctacatctacccgtttgctcactggctcgcctttgggaattcgagcgtaaatcctataatctatggcttttttaatgagaattttcgacgggggtttcaggaggcattccagctgcaactttgccaaaagcgggctaaacctatggaggcgtacgccttgaaagccaagtcccacgtcctcatcaataccagcaaccagttggtccaggagtctacgttccaaaacccgcacggcgagacattactgtacaggaaatctgccgaaaagcctcagcaggagctggtgatggaagagttaaaggagactacaaatagcagcgaaatctag

SEQ ID NO: 230204 - DNA, 1263 bp, Artificial Sequence
  derived and/or modified sequence
atgaatgagaagtgggacaccaacagcagcgagaactggcaccccatctggaatgtgaatgacaccaagcaccacctgtacagcgacatcaacatcacctacgtgaactactacctgcaccagccccaggtggccgccatcttcatcatctcctacttcctgatcttcttcctgtgcatgatgggcaacacagtggtgtgcttcatcgtgatgaggaacaagcacatgcacacagtgaccaacctcttcatcctgaacctggccatcagtgacctgctggtgggcatcttctgcatgcccatcaccctgctggacaacatcatcgccggctggccctttggaaacaccatgtgcaagatcagcggcctggtgcagggcatctctgtggccgccagcgtcttcaccctggtggccatcgctgtggaccgcttccagtgtgtggtgtaccccttcaagcccaagctgaccatcaagacagcctttgtgatcatcatgatcatctgggtgctggccatcaccatcatgagccccagcgctgtgatgctgcacgtgcaggaggagaagtactacagagtgcggctgaacagccagaacaagaccagccctgtgtactggtgccgggaggactggcccaaccaggagatgaggaagatctacaccaccgtgctgtttgccaacatctacctggcccccctgagcctgattgtcatcatgtatggccgcatcggcatcagcctcttccgggctgctgtgccccacacaggcaggaagaaccaggagcagtggcacgtggtgtccaggaagaagcagaagatcatcaagatgctgctgattgtggccctgctcttcatcctgtcctggctgcccctgtggaccctgatgatgctgagtgactatgctgacctgagccccaatgagctgcagatcatcaacatctacatctacccctttgcccactggctggcctttggaaacagctctgtgaaccccatcatctacggcttcttcaatgaaaacttcagaagaggcttccaggaggccttccagctgcagctgtgccagaagagggccaagcccatggaggcctatgccctgaaggccaagagccacgtgctgatcaacaccagcaaccagctggtgcaggagagcaccttccagaacccccatggagagaccctgctgtacaggaagtctgctgagaagccccagcaggagctggtgatggaggagctgaaggagaccaccaacagcagcgagatctag

SEQ ID NO: 230205 - DNA, 1234 bp, Artificial Sequence
  derived and/or modified sequence
atgaatagcttcttcggaaccccagcggccagctggtgcctcctggaaagtgacgtctcatctgcaccggacaaggaggcggggagggagcgcagagcactcagcgtccagcagcgcggcgggccagcctggagcggaagcctggagtggagcaggcagtccgcgggggacagacgtcggctgggattgagccggcagactgcgaaaagtagctggagccggagcagggacagaacctgttgctgcagacgggcttggtggattctggttcctgccgccgacagggctcgccgggagaggatggccatttggaaacacgatgtgcaagatcagtggattggtccagggaatatctgtcgcagcttcagtctttacgttagttgcaattgctgtagataggttccagtgtgtggtctacccttttaaaccaaagctcactatcaagacagcgtttgtcattattatgatcatctgggtcctagccatcaccattatgtctccatctgcagtaatgttacatgtgcaagaagaaaaatattaccgagtgagactcaactcccagaataaaaccagtccagtctactggtgccgggaagactggccaaatcaggaaatgaggaagatctacaccactgtgctgtttgccaacatctacctggctcccctctccctcattgtcatcatgtatggaaggattggaatttcactcttcagggctgcagttcctcacacaggcaggaagaaccaggagcagtggcacgtggtgtccaggaagaagcagaagatcattaagatgctcctgattgtggccctgctttttattctctcatggctgcccctgtggactctaatgatgctctcagactacgctgacctttctccaaatgaactgcagatcatcaacatctacatctacccttttgcacactggctggcattcggcaacagcagtgtcaatcccatcatttatggtttcttcaacgagaatttccgccgtggtttccaagaagctttccagctccagctctgccaaaaaagagcaaagcctatggaagcttatgccctaaaagctaaaagccatgtgctcataaacacatctaatcagcttgtccaggaatctacatttcaaaaccctcatggggaaaccttgctttataggaaaagtgctgaaaaaccccaacaggaattagtgatggaagaattaaaagaaactactaacagcagtgagatttaa

SEQ ID NO: 230206 - DNA, 1263 bp, Artificial Sequence
  derived and/or modified sequence
atgaacgagaagtgggacaccaacagcagcgagaactggcaccccatttggaacgtgaacgataccaagcaccatctgtactctgatattaacatcacttacgtgaactactatctacaccagccccaagtcgccgccattttcataatctcgtactttctcatcttctttctgtgtatgatggggaatacagtggtgtgttttatcgttatgcgcaataaacacatgcacaccgtaacaaatctgttcatattgaacctggccatctccgatctcctcgtcggtatcttttgtatgcccataacccttctggacaatatcattgcaggatggcctttcggtaatacaatgtgtaaaatttctgggctggtgcagggcatctccgtggcggccagcgttttcacactggtggccattgcagtcgatcgctttcagtgcgtggtctaccccttcaaacccaaactcactattaagaccgctttcgtgatcatcatgattatttgggtgcttgctatcacaataatgtccccttcggctgtgatgctgcatgttcaggaggagaaatactatagagtcagactgaactctcagaataagacatcacctgtctactggtgtcgggaagactggccaaaccaagagatgcggaagatctacacaacagtactctttgccaacatttacctcgcccctctttctttgatagttatcatgtatggccgaattggcatcagcctgttccgggcagccgtacctcatactggacgaaagaatcaggaacagtggcacgtcgtgtcccgcaagaagcagaaaatcatcaagatgctgctgatagtggctcttttgtttattctgtcatggctccctctgtggaccctcatgatgctttcagattacgcagacttatctccaaacgagttacagattattaacatttatatatacccctttgcccattggctcgcatttgggaatagcagtgtgaaccctataatctacggtttctttaacgaaaacttcaggcgggggttccaggaggcttttcagctgcagctgtgtcaaaaacgagcaaagcctatggaagcatatgcacttaaggctaaaagccacgtcctcatcaatacttctaaccagctggtgcaggagtctacattccagaatcctcatggcgagacactcctgtaccgcaagtccgccgaaaaaccacagcaggagctggtgatggaagagctcaaggaaaccacaaactcctcggaaatctag

SEQ ID NO: 230207 - DNA, 1263 bp, Artificial Sequence
  derived and/or modified sequence
atgaacgaaaaatgggatactaactcctcggagaattggcaccctatctggaatgtgaatgacacgaagcaccacttatactccgatatcaacatcacatatgtcaactactatttgcatcaaccgcaggtggccgcaattttcataatctcttactttctcatcttcttcctttgtatgatggggaacaccgtggtgtgctttatcgtaatgcgaaataagcacatgcatacggtgaccaatctgtttattctgaacctggccatttctgatctgctggtcggcatcttctgtatgccaatcacgctgttggataatataatagccggttggcctttcggaaacactatgtgcaaaatcagcggcctcgtacaaggtatatccgtagcagccagcgtctttaccctggtagctattgccgtggataggttccaatgcgttgtttacccattcaaaccgaagttaaccattaagactgcctttgtaatcattatgattatctgggtgctcgccattactatcatgagccctagcgccgtgatgctgcatgtgcaggaagaaaagtactatcgggtccgacttaatagccagaacaagacatctccggtttattggtgccgagaagattggcctaaccaggagatgcgaaaaatctacaccacagtactgtttgctaacatctacttggctcctttgtcactgattgtgatcatgtacggacgcatcggaatctctttatttcgcgcagcagttcctcacaccggccgaaagaaccaggagcagtggcacgtcgtctctcgaaagaagcagaagatcatcaagatgctgctgattgtcgccctgctcttcatcctgtcatggttgccactatggacattaatgatgctaagcgattacgccgaccttagtccaaacgaactgcaaattatcaatatctatatttatccatttgcgcactggctcgccttcggaaatagcagcgtgaacccaatcatctatggatttttcaatgaaaattttcggcgtggttttcaggaggcattccagctgcagctgtgtcaaaaaagagccaagcctatggaagcctacgctcttaaggccaagtcacatgtgctgatcaacactagtaatcagttggtccaggagtcaacctttcagaacccccacggtgagactcttctgtataggaaatcagccgagaagccgcagcaggaactggtcatggaggagcttaaggagacaaccaacagttcagagatttag

SEQ ID NO: 230208 - protein, 529 aa, Artificial Sequence
  derived and/or modified sequence
MALKWTSVLLLIHLGCYFSSGSCGKVLVWTGEYSHWMNMKTILKELVQRGHEVTVLASSASILFDPNDAFTLKLEVYPTSLTKTEFENIIMQQVKRWSDIQKDSFWLYFSQEQEILWEFHDIFRNFCKDVVSNKKVMKKLQESRFDIIFADAFFPCGELLAALLNIPFVYSLCFTPGYTIERHSGGLIFPPSYIPVVMSKLSDQMTFMERVKNMIYVLYFDFWFQMCDMKKWDQFYSEVLGRPTTLFETMGKADIWLMRNSWSFQFPHPFLPNIDFVGGLHCKPAKPLPKEMEEFVQSSGENGVVVFSLGSVISNMTAERANVIATALAKIPQKVLWRFDGNKPDALGLNTRLYKWIPQNDLLGLPKTRAFITHGGANGIYEAIYHGIPMVGIPLFWDQPDNIAHMKAKGAAVRLDFHTMSSTDLLNALKTVINDPSYKENVMKLSIIQHDQPVKPLHRAVFWIEFVMCHKGAKHLRVAARDLTWFQYHSLDVIGFLLACVATVIFVVTKFCLFCFWKFARKGKKGKRD

SEQ ID NO: 230209 - DNA, 1590 bp, Artificial Sequence
  derived and/or modified sequence
atggccctgaagtggaccagcgtgctgctgctgatccacctgggctgctacttcagcagcggcagctgcggcaaggtgctggtgtggaccggcgagtacagccactggatgaacatgaagaccatcctgaaggagctggtgcagagaggccacgaggtgaccgtgctggccagcagcgccagcatcctgttcgaccccaacgacgccttcaccctgaagctggaggtgtaccccaccagcctgaccaagaccgagttcgagaacatcatcatgcagcaggtgaagagatggagcgacatccagaaggacagcttctggctgtacttcagccaggagcaggagatcctgtgggagttccacgacatcttcagaaacttctgcaaggacgtggtgagcaacaagaaggtgatgaagaagctgcaggagagcagattcgacatcatcttcgccgacgccttcttcccctgcggcgagctgctggccgccctgctgaacatccccttcgtgtacagcctgtgcttcacccccggctacaccatcgagagacacagcggcggcctgatcttcccccccagctacatccccgtggtgatgagcaagctgagcgaccagatgaccttcatggagagagtgaagaacatgatctacgtgctgtacttcgacttctggttccagatgtgcgacatgaagaagtgggaccagttctacagcgaggtgctgggcagacccaccaccctgttcgagaccatgggcaaggccgacatctggctgatgagaaacagctggagcttccagttcccccaccccttcctgcccaacatcgacttcgtgggcggcctgcactgcaagcccgccaagcccctgcccaaggagatggaggagttcgtgcagagcagcggcgagaacggcgtggtggtgttcagcctgggcagcgtgatcagcaacatgaccgccgagagagccaacgtgatcgccaccgccctggccaagatcccccagaaggtgctgtggagattcgacggcaacaagcccgacgccctgggcctgaacaccagactgtacaagtggatcccccagaacgacctgctgggcctgcccaagaccagagccttcatcacccacggcggcgccaacggcatctacgaggccatctaccacggcatccccatggtgggcatccccctgttctgggaccagcccgacaacatcgcccacatgaaggccaagggcgccgccgtgagactggacttccacaccatgagcagcaccgacctgctgaacgccctgaagaccgtgatcaacgaccccagctacaaggagaacgtgatgaagctgagcatcatccagcacgaccagcccgtgaagcccctgcacagagccgtgttctggatcgagttcgtgatgtgccacaagggcgccaagcacctgagagtggccgccagagacctgacctggttccagtaccacagcctggacgtgatcggcttcctgctggcctgcgtggccaccgtgatcttcgtggtgaccaagttctgcctgttctgcttctggaagttcgccagaaagggcaagaagggcaagagagactag

SEQ ID NO: 230210 - DNA, 1590 bp, Artificial Sequence
  derived and/or modified sequence
atggctctgaaatggacgtccgtgcttctcttaattcaccttgggtgttatttctcctccggttcatgcggaaaggtcctggtttggaccggcgaatatagccattggatgaatatgaagaccatcctgaaggaactcgtccagaggggtcacgaagtcaccgtgttagcatccagtgctagtattctgttcgatccaaatgatgcctttacccttaaactggaagtctaccctacatcgctgacaaagaccgaattcgagaacataataatgcagcaggtcaagaggtggtcagacattcagaaagactccttttggctctacttttctcaggagcaggagattctgtgggagtttcacgatatcttccggaacttctgcaaagacgttgtaagcaacaaaaaagtaatgaaaaagctgcaagagagcagatttgacatcatttttgctgacgcattctttccatgtggggaactgttagcggccttgttgaacataccctttgtctacagcttgtgcttcaccccggggtatactattgaaaggcacagtggcgggttgatttttcccccgtcctacatccccgtggtgatgagtaagcttagcgatcagatgacattcatggaaagggtgaagaacatgatttatgttctttatttcgatttctggttccagatgtgtgatatgaaaaagtgggaccagttctactctgaggtcctcggccggcccacgactcttttcgaaaccatgggaaaagccgacatctggctaatgaggaatagttggagctttcagtttccacatccgtttttgcccaatattgattttgtgggaggcctacactgcaaacctgcaaagccgctgccgaaagagatggaggaattcgttcagtcttccggcgaaaatggggtcgtagttttctccctggggtcagtcatttcaaacatgaccgccgaaagggctaacgtgattgctaccgctctcgccaagatcccacagaaagtgctgtggcgatttgacggcaataaacctgacgcactcgggctgaacactcggctgtacaaatggatcccccagaatgatctcctgggactcccgaaaactagagccttcattactcacggcggcgccaatggtatttacgaagcaatttaccatggcattcccatggtgggcattcctctgttctgggaccagcccgataacattgcccacatgaaagcgaagggggctgcagtgagactggatttccataccatgtcaagcactgatttactgaatgctttaaagactgtgattaacgacccctcatacaaagaaaacgtgatgaagctgagcattattcagcacgaccagcccgtgaaaccactgcatagagcggtgttttggatcgaatttgttatgtgtcacaagggcgcaaaacacctgagagtcgcagcaagagatctgacgtggtttcagtatcacagtttagatgtgatcgggttcctgctggcctgcgtggcgacagtgatcttcgtggtgactaaattctgcctgttttgcttttggaaatttgcccggaagggtaaaaagggcaagcgggactag

SEQ ID NO: 230211 - DNA, 1590 bp, Artificial Sequence
  derived and/or modified sequence
atggccctgaagtggacctctgtgctgctgctgatccacctgggctgctacttcagcagcggcagctgtgggaaggtgctggtgtggacaggagagtacagccactggatgaacatgaagaccatcctgaaggagctggtgcagaggggccacgaggtgacagtgctggccagcagcgccagcatcctgtttgaccccaatgatgccttcaccctgaagctggaggtgtaccccaccagcctgaccaagacagaatttgagaacatcatcatgcagcaggtgaagcgctggagcgacatccagaaggacagcttctggctgtacttcagccaggagcaggagatcctgtgggagttccatgacatcttcaggaacttctgcaaggatgtggtgagcaacaagaaggtgatgaagaagctgcaggagagcagatttgacatcatctttgctgatgccttcttcccctgtggggagctgctggccgccctgctgaacatcccctttgtgtacagcctgtgcttcaccccaggctacaccatcgagcggcacagcggcggcctcatcttcccccccagctacatccctgtggtgatgagcaagctgagtgaccagatgaccttcatggagcgggtgaagaacatgatctacgtgctgtactttgacttctggttccagatgtgtgacatgaagaagtgggaccagttctacagcgaggtgctgggccggcccaccaccctgtttgagaccatgggcaaggctgacatctggctgatgagaaattcctggagcttccagttcccccaccccttcctgcccaacatcgactttgtgggcggcctgcactgcaagccagccaagcccctgcccaaggagatggaggagtttgtgcagagcagtggagaaaatggagtggtggtgttcagcctgggcagcgtcatcagcaacatgacagctgagcgggccaacgtcatcgccacagccctggccaagatcccccagaaggtgctgtggaggtttgatggcaacaagccagatgccctgggcctgaacacccggctgtacaagtggatcccccagaatgacctgctgggcctgcccaagacccgggccttcatcacccacggcggggccaacggcatctatgaggccatctaccacggcatccccatggtgggcatccccctcttctgggaccagcctgacaacatcgcccacatgaaggccaagggagctgctgtgcggctggacttccacaccatgagcagcacagacctgctgaatgccctgaagacagtcatcaatgaccccagctacaaggaaaatgtgatgaagctgagcatcatccagcacgaccagcctgtgaagcccctgcacagagctgtgttctggattgaatttgtgatgtgccacaagggggccaagcacctgcgggtggccgcccgggacctgacctggttccagtaccacagcctggatgtgattggcttcctgctggcctgtgtggccaccgtcatctttgtggtgaccaagttctgcctcttctgcttctggaagtttgccaggaagggcaagaagggcaagagggactag

SEQ ID NO: 230212 - DNA, 1590 bp, Artificial Sequence
  derived and/or modified sequence
atggccctgaagtggaccagcgtgctgctgctgatccacctgggctgttacttttcctcaggaagttgcggcaaggttctcgtctggactggagaatacagccactggatgaatatgaagactattctcaaagagctcgtacagcgcggtcacgaggtgacggtcctcgcaagctctgcatctatactctttgatcctaacgatgcgtttacgctgaagttggaagtgtaccctaccagtctgaccaaaacggagttcgaaaatatcattatgcagcaggttaagcgttggagtgacatccagaaagactcattctggctttacttcagccaagagcaagaaatcctctgggagtttcacgatatattccggaacttctgcaaggacgtcgtgagcaataagaaagtcatgaagaagctgcaggaatccaggtttgatatcatctttgctgacgcttttttcccctgcggcgaattattggccgctctgctgaatataccattcgtttattcgttgtgcttcacacctgggtatactatcgaaaggcactctgggggtctgatctttccaccgtcctatattccagttgttatgtctaagctgtccgatcaaatgaccttcatggagcgcgtgaagaatatgatctacgtactgtacttcgatttctggtttcaaatgtgtgacatgaagaagtgggaccagttttacagcgaggttttgggacggccaacaacgctattcgaaacaatggggaaggccgacatctggctcatgagaaattcatggagctttcagtttcctcatccttttttaccgaacatcgatttcgtaggggggttacattgcaagcctgctaaacccctgcctaaggaaatggaggagttcgtgcagtcatctggggagaatggagtcgtggtgtttagtctgggctcagtcatctcgaacatgactgcagaacgggccaatgtcatcgccactgccctggccaagatcccccagaaagtcttatggagattcgacggtaacaaaccggacgctctcggcttgaatacccggctttataagtggatccctcagaatgatctgctgggactgcctaagacgcgcgctttcataactcacggaggggctaatggtatctatgaggcaatttaccacggtattccgatggtggggattcctctgttctgggaccagcctgacaacatcgcacacatgaaagctaagggggccgctgtgcgtcttgacttccataccatgagctctaccgaccttctgaacgccctcaagacagttattaacgacccgagttataaagaaaatgtgatgaagctgagtataattcagcacgaccagcccgtcaagccacttcatagagctgtgttctggatcgagttcgtgatgtgccataagggagccaagcatctgagggtggccgctagagacctgacatggtttcagtaccactctctcgatgtcattggattcttgctcgcctgcgtggccacggttatctttgtggttactaagttttgtcttttctgcttttggaagttcgcgcgaaagggcaagaaggggaaacgggattag

SEQ ID NO: 230213 - DNA, 1590 bp, Artificial Sequence
  derived and/or modified sequence
atggctttaaagtggacgagcgtgctgctgctgattcacttggggtgctatttctcctctgggagttgtggcaaggtactcgtgtggaccggcgagtattcacattggatgaacatgaagacgatccttaaggaactggtgcagcgaggccatgaggtgactgtgcttgcatcatctgcatcaattttgtttgatccgaacgacgcttttacactcaaattagaggtgtatcctacaagcctgacaaaaaccgaattcgagaatataattatgcagcaggtgaagagatggtcggatatccagaaagactcattttggctctatttttcccaggaacaagagatactgtgggagttccatgatatttttagaaatttttgcaaagacgtggtcagtaacaagaaggttatgaaaaaactgcaagagagcagattcgatatcatctttgcggacgctttcttcccatgtggggagctgcttgccgcactgcttaacatcccattcgtgtactcgctctgtttcacacccggttacaccatcgaacgccattccgggggactgattttcccacctagctacattcctgtggtgatgtcaaaactcagtgaccagatgacttttatggaaagagtaaaaaacatgatttacgtgctttacttcgatttttggttccaaatgtgcgacatgaagaagtgggaccagttctactcagaggtactgggtaggccaactactctgttcgagactatgggcaaggcagatatttggttgatgcgtaatagttggtctttccagttcccccacccgtttctgcccaatatcgatttcgtgggaggcttacattgcaagccagccaagcctcttcctaaggaaatggaggagttcgtacagagcagcggagaaaacggcgttgtcgtctttagcctgggctctgtgatttctaacatgactgctgagcgggctaatgtgatcgcgactgcactggctaaaattccccaaaaggtactgtggaggtttgatggtaacaagcccgacgccctagggttgaacactagattgtacaaatggatcccccagaacgaccttctgggactgcccaagacgcgcgcttttattacacatggaggggcaaacggaatttacgaagccatctatcatggcatcccaatggtcggcattcctctcttctgggaccagccagataatatcgctcatatgaaagccaaaggtgctgcggttcgcctcgactttcacaccatgtctagcacggatcttcttaatgccctgaaaacagtgatcaacgatcctagctataaggaaaatgtcatgaagctgagtataattcagcacgatcagccggtgaagcccctgcacagggcagtgttctggatcgagttcgttatgtgccataagggcgctaaacacctacgagtggccgctcgagatttgacctggtttcagtatcatagcctggatgtgattggatttttgttagcatgtgtcgccaccgtcatttttgtcgtgacaaagttctgccttttctgtttctggaagtttgcacgcaagggaaaaaagggtaaacgcgactag

SEQ ID NO: 230214 - DNA, 1833 bp, Artificial Sequence
  derived and/or modified sequence
ggatggctctgaagtggacttcagttcttctgctgatacatctcggttgttactttagctctgggagttgtggaaaggtgctggtgtggaccggtgaatacagccattggatgaatatgaagacaatcctgaaagagcttgttcagagaggtcatgaggtgactgtactggcatcttcagcttccattctttttgatcccaatgacgcattcactcttaaactcgaagtttatcctacatctttaactaaaactgaatttgagaatatcatcatgcaacaggttaagagatggtcagacattcaaaaagatagcttttggttatatttttcacaagaacaagaaatcctgtgggaatttcatgacatatttagaaacttctgtaaagatgtagtttcaaataagaaagttatgaaaaaactacaagagtcaagatttgacatcatttttgcagatgctttttttccttgtggtgagctgctggctgcgctacttaacataccgtttgtgtacagtctctgcttcactcctggctacacaattgaaaggcacagtggaggactgattttccctccttcctacatacctgttgttatgtcaaaattaagtgatcaaatgactttcatggagagggtaaaaaacatgatctatgtgctttattttgacttttggttccaaatgtgtgatatgaagaagtgggatcagttttacagtgaagttttaggaagacccactaccttatttgagacaatggggaaagctgacatatggcttatgcgaaactcctggagttttcaatttcctcatccattcttaccaaacattgattttgttggaggactccactgcaaacctgccaaacccctacctaaggaaatggaggaatttgtacagagctctggtgaaaatggtgttgtggtgttttctctggggtcagtgataagtaacatgacagcagaaagggccaacgtaattgcaacagcccttgccaagatcccacaaaaggttctgtggagatttgatgggaataaaccagatgccttaggtctcaatactcggctgtataagtggataccccagaatgaccttctaggtcttccaaaaaccagagcttttataactcatggtggagccaatggcatctatgaggcaatctaccatgggatccctatggtaggcattccattgttttgggatcaacctgataacattgctcacatgaaggccaagggagcagctgttagactggacttccacacaatgtcgagtacagacctgctgaatgcactgaagacagtaattaatgatccttcatataaagagaatgttatgaaattatcaataattcaacatgatcaaccagtaaagcccctgcatcgagcagtcttctggattgaatttgtgatgtgccacaaaggagccaaacaccttcgagttgcagcccgtgacctcacctggttccagtaccactctttggatgtgattgggtttctgctggcctgtgtggcaactgtgatatttgtcgtcacaaagttttgtctgttttgtttctggaagtttgctagaaaagggaagaagggaaaaagagattagttatgtctgacatttgaagctggaaaaccagatagatgggttgacatcagtttattccagcaagaaagaaaagattgttatgcaagatttctttcttcctgtgacaaaaaaaaaaacttttcaaaatctaccttgtcaagtaaaaatttgtttttcagagatttaccacccaggtaatggttagaaatattctgtggcaatgaagaaaacactagggaaaataaaaaataatataaagcca

SEQ ID NO: 230215 - protein, 200 aa, Artificial Sequence
  derived and/or modified sequence
MGRLHCTEDPVPEAVGGDMQQLNQLGAQQFSALTEVLFHFLTEPKEVERFLAQLSEFATTNQISLGSLRSIVKSLLLVPNGALKKSLTAKQVQADFITLGLSEEKATYFSEKWKQNAPTLARWAIGQTLMINQLIDMEWKFGVTSGSSELEKVGSIFLQLKLVVKKGNQTENVYIELTLPQFYSFLHEMERVRTSMECFC

SEQ ID NO: 230216 - DNA, 603 bp, Artificial Sequence
  derived and/or modified sequence
atgggcagactgcactgcaccgaggaccccgtgcccgaggccgtgggcggcgacatgcagcagctgaaccagctgggcgcccagcagttcagcgccctgaccgaggtgctgttccacttcctgaccgagcccaaggaggtggagagattcctggcccagctgagcgagttcgccaccaccaaccagatcagcctgggcagcctgagaagcatcgtgaagagcctgctgctggtgcccaacggcgccctgaagaagagcctgaccgccaagcaggtgcaggccgacttcatcaccctgggcctgagcgaggagaaggccacctacttcagcgagaagtggaagcagaacgcccccaccctggccagatgggccatcggccagaccctgatgatcaaccagctgatcgacatggagtggaagttcggcgtgaccagcggcagcagcgagctggagaaggtgggcagcatcttcctgcagctgaagctggtggtgaagaagggcaaccagaccgagaacgtgtacatcgagctgaccctgccccagttctacagcttcctgcacgagatggagagagtgagaaccagcatggagtgcttctgctag

SEQ ID NO: 230217 - DNA, 1900 bp, Artificial Sequence
  derived and/or modified sequence
gtgatgctggggtgatgctgatgcccttccaaggttgagacctagtctctactctgatgtcagctctccgagagacactctggcctgctttgttcccttccctgtccccagtgtctggcatcgagtaggctgccataaatatctctggagtgcatagtaacagtgatgatgataatagcagctagccattgattgaagacctcttgtgtgccggtctctgcgttaaacatttctggaggcttaactcatttaaggagctaccccagccatcattttctcagatggtgaaactgaggttcagagaggccaagcgccgtacccaaaggtcactcagcgggagagctggcaggaaacctcgcgtctgccggtgccggcgccgcccctgcccctccccggagcccggcggccgcgcgtgtccgcggccctgcgagggctccccggctccggacagcccagggcggccgggggaggagtgcgctgcgacggccgtggcgaaagtgcggttgtggatgcgcggagaggccggcagcggtggcagcggcagcggaggaggaagctgagcagggcggcggcggcggtggaacctgcggggctggggcgcgcgccatgggccgcctgcactgcactgaggacccggtgccggaggccgtgggcggcgacatgcagcagctgaaccagctgggcgcgcagcagttctcagccctgacagaggtgcttttccacttcctaactgagccaaaagaggtggaaagatttctggctcagctctctgaatttgccaccaccaatcagatcagtcttggctccctcagaagcatcgtgaaaagcctccttctggttccaaatggtgctttgaagaagagtctcacagccaagcaggtccaggcggatttcataactctgggtcttagtgaggagaaagccacttacttttctgaaaagtggaagcagaatgctcccacccttgctcgatgggccataggtcagactctgatgattaaccagctcatagatatggagtggaaatttggagtgacatctgggagcagcgaattggagaaagtgggaagtatatttttacaactaaagttggtggttaagaaaggaaatcaaaccgaaaatgtgtatatagaattaaccttgcctcagttctacagcttcctgcacgagatggagcgagtcagaaccagcatggagtgtttctgctgatttctgtccctgcatctcccctggccccgttccctgccctcctcccttccctgggtgactgctctgagaggcacttcactcacaggcctgtgggatgctccatggggccctgctggctccatggggcccaggtgcaaagggtttctgaaaaacagcaggattaagtactgaaagagcccaacacaattaccctgtaaactctctgttagggcaaccaccaccacctgtcttccaggacacatttttagatactctgacaggccactgcatctcagattcaggggagaaaataagttgtcacctccccttcaaagttccagagtaaacaaatggtgccatcattcaagataacatgctgatcaccctcctcccaaaaagcaagagcttgtttatggctgaggaatcggcggattgtctgaatgacacatatacagagcccccacggatttctgcacactctgggtctgtgctggtggaacattgccaatcagttcttaatgaggcacctgtgtgtaaatacatgcttggtcttctctgcagagaactgaggctaaactctgtccctacttctggttttgccctgtcatgtcgtaacgaggtgggccttttgaggccattttagtttgagttcgagccaaccacctctgttggttagatgatgaataaaaaggttctgaagaaaaggtctgga

SEQ ID NO: 230218 - DNA, 603 bp, Artificial Sequence
  derived and/or modified sequence
atggggaggctgcattgcacagaggaccccgttcccgaagcagtcggcggggacatgcagcaactgaatcagctcggcgcgcagcaatttagtgcgttgaccgaggtcctgtttcattttctgacggaaccaaaagaagtggaacgctttttggcccagctcagcgagtttgcgactaccaatcagatttcacttggaagcttgcgcagtattgtgaagagccttctgctcgtaccaaatggagccctaaaaaagagtctcactgccaagcaggtccaagctgattttatcaccctgggccttagcgaggagaaggctacctatttcagtgagaaatggaagcagaacgctcccacactcgcgcggtgggcaattggtcagactcttatgataaaccagttgatcgacatggagtggaagtttggcgtgacatccgggtccagcgaactggagaaagtggggtctatctttctgcagctcaaactggtcgttaaaaaaggaaatcagaccgagaacgtatatattgagctgactttaccccagttttactcattcttgcacgaaatggagagagtgagaaccagtatggagtgtttttgctag

SEQ ID NO: 230219 - DNA, 603 bp, Artificial Sequence
  derived and/or modified sequence
atgggccgcctgcactgcacagaggaccctgtgcctgaggccgtgggcggggacatgcagcagctgaaccagctgggcgcccagcagttcagcgccctgacagaggtgctcttccacttcctgacagagcccaaggaggtggagcgcttcctggcccagctgtctgaatttgccaccaccaaccagatcagcctgggcagcctgcggagcatcgtgaagagcctgctgctggtgcccaacggggccctgaagaagagcctgacagccaagcaggtgcaggccgacttcatcaccctgggcctgtctgaggagaaggccacctacttcagcgagaagtggaagcagaatgcccccaccctggcccgctgggccatcggccagaccctgatgatcaaccagctgattgacatggagtggaagtttggagtgaccagcggcagcagcgagctggagaaggtgggcagcatcttcctgcagctgaagctggtggtgaagaagggcaaccagacagaaaatgtgtacatcgagctgaccctgccccagttctacagcttcctgcacgagatggagcgggtgaggacctccatggagtgcttctgctag

SEQ ID NO: 230220 - DNA, 603 bp, Artificial Sequence
  derived and/or modified sequence
atgggccggctgcactgcaccgaggaccccgtgcccgaggccgtggggggagacatgcagcagttaaaccaacttggggcccagcagttctctgccctcacagaggtcctgttccacttccttacggagccaaaggaggttgagcggttcctggcacagctaagtgaatttgccactaccaatcagatttcactcggctcgctgcggagcatcgtgaagagcctactgctcgtgccaaatggggccctgaagaagtccctaactgccaaacaggtgcaagctgactttatcacattagggctcagcgaggagaaagccacttacttcagcgagaagtggaagcagaatgcccctacactagcaagatgggccataggccagacccttatgatcaatcagctgatcgatatggaatggaaatttggcgtgacttccgggagttccgaactcgagaaggtaggatctatatttctccagctgaagctggttgtcaaaaaaggcaaccaaaccgagaatgtatacattgagctaactctgccacagttctatagcttcctgcatgagatggagagagttcggacgagcatggaatgtttttgttag

SEQ ID NO: 230221 - DNA, 603 bp, Artificial Sequence
  derived and/or modified sequence
atgggacgcctgcactgtacagaagacccagttcccgaggctgtgggtggggatatgcagcagttgaaccaattaggggctcaacagttcagtgcactaactgaggtcctatttcacttcttaacagaacctaaggaagtggaaagattcctagcgcaactgtcagagtttgctacgacaaaccaaatttcccttggcagtctgcgcagcatcgttaaatcgctgctgctagtgcccaacggcgctctgaagaagtctctcaccgcaaagcaggtccaggccgatttcatcacgttgggattatcagaggagaaagccacttatttctctgaaaagtggaaacaaaacgctcctactctcgcccgatgggcgatcgggcagacgctgatgattaaccagctgatcgacatggaatggaaatttggtgtaacatcgggatctagcgagctggaaaaggtgggatctatttttctgcagctgaagctcgtcgttaagaagggaaatcagacagaaaacgtctatattgagctgaccctgccccagttctactccttcctccacgaaatggagagagtaagaacaagcatggagtgtttctgctag

SEQ ID NO: 230222 - protein, 453 aa, Artificial Sequence
  derived and/or modified sequence
MQARALLLAALAALALAREPPAAPCPARCDVSRCPSPRCPGGYVPDLCNCCLVCAASEGEPCGGPLDSPCGESLECVRGLCRCRWSHAVCGTDGHTYANVCALQAASRRALQLSGTPVRQLQKGACPLGLHQLSSPRYKFNFIADVVEKIAPAVVHIELFLRHPLFGRNVPLSSGSGFIMSEAGLIITNAHVVSSNSAAPGRQQLKVQLQNGDSYEATIKDIDKKSDIATIKIHPKKKLPVLLLGHSADLRPGEFVVAIGSPFALQNTVTTGIVSTAQREGRELGLRDSDMDYIQTDAIINYGNSGGPLVNLDGEVIGINTLKVTAGISFAIPSDRITRFLTEFQDKQIKDWKKRFIGIRMRTITPSLVDELKASNPDFPEVSSGIYVQEVAPNSPSQRGGIQDGDIIVKVNGRPLVDSSELQEAVLTESPLLLEVRRGNDDLLFSIAPEVVM

SEQ ID NO: 230223 - DNA, 1362 bp, Artificial Sequence
  derived and/or modified sequence
atgcaggctagagccctcctgttggccgcgctagctgctcttgccctggcacgggaacctccagcggctccatgcccagcccgatgtgacgtgagcaggtgtcccagcccgcgctgcccaggcgggtacgtgcctgatctctgtaattgctgtctcgtgtgcgcagcctctgagggagaaccctgtggcggacctctcgacagcccatgtggggagtcgctggagtgtgtgagaggtttatgtaggtgtaggtggagccacgccgtatgtggcaccgacgggcacacctatgccaatgtgtgcgccctgcaggcggccagtcggcgggcactgcagttatcggggacccccgtacgacaactgcagaaaggagcttgtcctcttggacttcaccaactctcctccccgcgctacaagtttaatttcatagctgatgtcgtcgaaaaaatagcacccgcggttgtccacatagaactgttcctcaggcaccctctgtttgggcggaatgtgcccttgtcttcaggatctggtttcattatgagcgaagcagggttgatcatcaccaatgcccacgttgtatcttcgaacagcgcggctcccgggaggcagcagctcaaagtacagttacagaatggggactcatatgaggctactataaaggacatagacaagaaaagcgatatcgcaacaataaagatccatcctaagaagaagttgccagtcttactcctgggtcactcggccgacctgcgccccggcgaatttgtcgtcgccatcgggtccccatttgcgcttcagaataccgtcacgaccggaattgtgtctacagcccagagggagggcagggaacttgggctcagggactcagatatggactacatccagaccgatgccattattaattacggcaactccgggggccctctcgtcaacctggacggtgaggtaatcggaataaataccctcaaagtgaccgccggcatctcattcgccatcccctctgaccggataacacgatttctgactgaattccaagacaagcagatcaaggactggaagaagagattcattggtataagaatgaggacgattaccccaagtctggtggacgaactcaaggcatcaaacccggacttcccggaggtttcctcgggtatttacgtgcaggaggtggctccaaactcccctagccaacgcggagggatccaggacggggacataattgtgaaggtgaatggtcggccgctggtcgattccagtgaactgcaggaggctgtgttgaccgagagtccattgctcttggaggtcaggcgggggaacgacgacttgctgttttctatagcccccgaggtggtgatgtag

SEQ ID NO: 230224 - DNA, 2541 bp, Artificial Sequence
  derived and/or modified sequence
gggagctggtccctgcgctccctgcgccctggggatgcccctgccgccctgacgcccgccagcctgagccaccggcgcatgtgaccgcgcgtccgccccagtcccatccgtaggcgcccggcgcccggccccgcagcggcctcgttgtccccgccggcccccgcccggtctcccgcgctgccacccgccgccggccctgccgccatgcaggcgcgagcgctgctcctggccgcgttggccgcgctggcgctggcccgggagccccctgcggcgccgtgtcccgcgcgctgcgacgtgtcgcggtgtcccagcccccgctgccccggcggctacgtgcccgacctctgcaactgctgcctggtgtgcgccgccagcgagggcgagccctgtggcggccctctggactcgccttgcggcgagagcctggagtgcgtgcgcggcctatgccgctgccgctggtcgcacgccgtgtgtggcaccgacgggcacacctatgccaacgtgtgcgcgctgcaggcggccagccgccgcgcgctgcagctctccgggacgcccgtgcgccagctgcagaagggcgcctgcccgttgggtctccaccagctgagcagcccgcgctacaagttcaacttcattgctgacgtggtggagaagatcgcaccagccgtggtccacatagagctcttcctgagacacccgctgtttggccgcaacgtgcccctgtccagcggttctggcttcatcatgtcagaggccggcctgatcatcaccaatgcccacgtggtgtccagcaacagtgctgccccgggcaggcagcagctcaaggtgcagctacagaatggggactcctatgaggccaccatcaaagacatcgacaagaagtcggacattgccaccatcaagatccatcccaagaaaaagctccctgtgttgttgctgggtcactcggccgacctgcggcctggggagtttgtggtggccatcggcagtcccttcgccctacagaacacagtgacaacgggcatcgtcagcactgcccagcgggagggcagggagctgggcctccgggactccgacatggactacatccagacggatgccatcatcaactacgggaactccgggggaccactggtgaacctggatggcgaggtcattggcatcaacacgctcaaggtcacggctggcatctcctttgccatcccctcagaccgcatcacacggttcctcacagagttccaagacaagcagatcaaagactggaagaagcgcttcatcggcatacggatgcggacgatcacaccaagcctggtggatgagctgaaggccagcaacccggacttcccagaggtcagcagtggaatttatgtgcaagaggttgcgccgaattcaccttctcagagaggcggcatccaagatggtgacatcatcgtcaaggtcaacgggcgtcctctagtggactcgagtgagctgcaggaggccgtgctgaccgagtctcctctcctactggaggtgcggcgggggaacgacgacctcctcttcagcatcgcacctgaggtggtcatgtgaggggcgcattcctccagcgccaagcgtcagagcctgcagacaacggagggcagcgcccccccgagatcaggacgaaggaccaccgtcggtcctcagcagggcggcagcctcctcctggctgtccggggcagagcggaggctgggcttggccaggggcccgaatttccgcctggggagtgttggatccacatcccggtgccggggagggaagcccaacatccccttgtacagatgatcctgaaagtcacttccaagttctccggatattcacaaaactgccttccatggaggtcccctcctctcctagcttcccgcctctgcccctgtgaacacccatctgcagtatcccctgctcctgcccctcctactgcaggtctgggctgccaagcttcttcccccctgacaaacgcccacctgacctgaggccccagcttccctctgccctaggacttaccaagctgtagggccagggctgctgcctgccagcctggggtccctggaggacaggtcacatctgatccctttggggtgcgggggtggggtccagcccagagcaggcactgagtgaatgccccctggctgcggagctgagccccgccctgccatgaggttttcctccccaggcaggcaggaggccgcggggagcacgtggaaagttggctgctgcctggggaagcttctcctccccaaggcggccatggggcagcctgcagaggacagtggacgtggagctgcggggtgtgaggactgagccggcttccccttcccacgcagctctgggatgcagcagccgctcgcatggaagtgccgcccagaggcatgcaggctgctgggcaccaccccctcatccagggaacgagtgtgtctcaaggggcatttgtgagctttgctgtaaatggattcccagtgttgcttgtactgtatgtttctctactgtatggaaaataaagtttacaagcacacggttctcagcca

SEQ ID NO: 230225 - DNA, 1362 bp, Artificial Sequence
  derived and/or modified sequence
atgcaggcccgggccctgctgctggccgccctggccgccctggccctggcccgggagcccccagctgccccctgcccagcccgctgtgatgtgagccgctgccccagcccccgctgccctgggggctacgtgcctgacctgtgcaactgctgcctggtgtgtgccgccagcgagggggagccctgtggcggccccctggacagcccctgtggggagagcctggagtgtgtgcggggcctgtgccgctgccgctggagccatgctgtgtgtggcacagatggccacacctacgccaacgtgtgtgccctgcaggccgccagccggcgggccctgcagctgagcggcacccctgtgcggcagctgcagaagggggcctgccccctgggcctgcaccagctgagcagcccccgctacaagttcaacttcatcgcagatgtggtggagaagatcgccccagctgtggtgcacatcgagctgttcctgcggcaccccctgtttggaagaaatgtgcccctgagcagcggcagcggcttcatcatgtctgaggccggcctcatcatcaccaatgcccacgtggtgagcagcaacagcgctgcccctggccggcagcagctgaaggtgcagctgcagaatggagacagctatgaggccaccatcaaggacatcgacaagaagagtgacatcgccaccatcaagatccaccccaagaagaagctgcctgtgctgctgctgggccacagcgctgacctgcggcctggagaatttgtggtggccatcggcagcccctttgccctgcagaacacagtgaccactggaattgtgtccacagcccagcgggagggccgggagctgggcctgcgggacagcgacatggactacatccagacagatgccatcatcaactacggcaacagcggcggccccctggtgaacctggatggagaggtgattggcatcaacaccctgaaggtgacagctggcatcagctttgccatccccagcgaccgcatcacccgcttcctgacagagttccaggacaagcagatcaaggactggaagaagcgcttcatcggcatccgcatgaggaccatcacccccagcctggtggatgagctgaaggccagcaacccagacttccctgaggtgagcagcggcatctacgtgcaggaggtggcccccaacagccccagccagaggggcggcatccaggatggagacatcatcgtgaaggtgaatggccggcccctggtggacagcagcgagctgcaggaggccgtgctgacagagagccccctgctgctggaggtgagaagaggaaatgatgacctgctcttcagcatcgcccctgaggtggtgatgtag

SEQ ID NO: 230226 - DNA, 1362 bp, Artificial Sequence
  derived and/or modified sequence
atgcaggcccgggccctgctgctggccgccctggccgccctggccctcgcccgggagcctccagcggcaccatgccctgcaagatgtgatgtaagccgatgtccatcgccccgatgtccaggcgggtatgtgccagatctgtgcaactgttgtcttgtctgcgccgcttcggaaggcgaaccatgtgggggacctctcgactctccttgtggggaaagtctcgagtgtgtgcgtgggctgtgtaggtgccggtggagccacgccgtttgcggaaccgacgggcacacttatgcaaacgtgtgcgctttgcaggcagcgagtcggagggcattgcagctatcaggcacccctgtcaggcaactgcagaagggggcgtgccctctcggacttcaccaactgtcaagccccaggtataagttcaacttcatcgcagatgtggtggaaaaaatcgcccccgcagtcgtacatattgaactcttcctgcgacaccccctcttcggtaggaacgtgcccctctcctccggctcagggtttatcatgagtgaggctgggttgattatcacaaacgcccacgtggtgagttcaaattccgccgcccccggaagacagcagctgaaggtgcagctgcagaacggcgactcgtatgaggccaccattaaagatattgataaaaagagcgatattgcaacgattaagatccacccaaagaagaagctacctgtcttgctcctgggtcattctgctgaccttagaccaggcgagttcgtagtcgccatcggtagccccttcgcactccagaataccgtgacaacaggcatagtgagtacggcccaaagggagggcagagagctgggattgcgagacagtgatatggattacattcaaaccgatgctataattaactatggaaactcaggcggcccgctggtgaacctggatggagaagtgatcggcatcaataccctcaaggtgactgccggaattagcttcgccatcccatccgatagaatcacaaggtttcttaccgagttccaggacaagcaaataaaggattggaagaaaagatttataggcatccggatgagaaccatcacaccttcccttgttgacgaactgaaggctagcaaccctgattttccagaggtcagcagcggaatctacgtccaggaggtggccccgaatagcccctcacaacggggcgggatacaggatggagatatcatagtgaaggttaacggacgccccctggtggacagtagcgagcttcaggaggccgtgcttacagagtctccactgctgctggaggttagacggggcaacgacgacctccttttctctatagcccccgaggtagtaatgtag

SEQ ID NO: 230227 - DNA, 1362 bp, Artificial Sequence
  derived and/or modified sequence
atgcaggcacgggctctcctcttagctgctttggctgctctagcactagctagagaaccccctgcagccccatgtcctgctcggtgtgacgtgtcaagatgccctagccctcggtgtcccggtgggtacgtgcctgatctttgtaactgttgcctggtctgcgccgcttctgaaggggagccctgtggcggtccactcgatagtccttgcggggagagcctggaatgcgtgcggggactctgccggtgcaggtggagccacgctgtgtgcgggacagacggtcatacatacgcaaacgtgtgtgccctgcaagctgcttctagacgggcattacagttgagcggaacacctgtcagacagctccagaagggggcttgtcccctgggcctgcaccagttatcatcccctcgatacaagttcaatttcatagctgatgtcgtagaaaaaatcgctcccgcagtggtccatattgagctctttctcaggcatccccttttcggtcggaatgtgcccctttcatcagggtccggatttatcatgagcgaagcaggtctcattatcactaacgcccacgtggttagttctaacagcgctgcacctggaagacagcagctaaaggtgcagctccagaatggcgactcctacgaagctaccatcaaggatatagataagaagagcgatattgcgaccattaaaatacaccccaagaaaaagttgcccgttctgttactcggtcattccgccgacctgcgtcccggagaattcgtggtggccattggtagtcccttcgctctacagaataccgtgacaacgggcatcgtgagtacagcccagcgggaggggagggaactaggcctccgagacagcgatatggactacatacagacagacgccatcattaactatggcaattctgggggaccactggtgaacttagacggtgaagttatcggcatcaacacgcttaaggtgaccgcagggatctcgtttgccatcccaagcgatcggatcacacgctttctcactgaatttcaggacaaacagattaaggactggaaaaagaggttcataggaattcggatgcgaaccatcacgccaagcctggtggatgaacttaaagctagcaacccagattttcctgaggtgagctccggcatctatgtgcaggaggtggcccctaattcacctagccagcgagggggaattcaagacggtgatatcatcgtcaaggttaatgggaggccgctagtcgactccagtgaacttcaggaagctgtgttaaccgagtctcctctactactggaggttcgaaggggtaacgatgacctgctgttttccattgcccctgaggtggtcatgtag

SEQ ID NO: 230228 - DNA, 1362 bp, Artificial Sequence
  derived and/or modified sequence
atgcaggccagagccctgctgctggccgccctggccgccctggccctggccagagagccccccgccgccccctgccccgccagatgcgacgtgagcagatgccccagccccagatgccccggcggctacgtgcccgacctgtgcaactgctgcctggtgtgcgccgccagcgagggcgagccctgcggcggccccctggacagcccctgcggcgagagcctggagtgcgtgagaggcctgtgcagatgcagatggagccacgccgtgtgcggcaccgacggccacacctacgccaacgtgtgcgccctgcaggccgccagcagaagagccctgcagctgagcggcacccccgtgagacagctgcagaagggcgcctgccccctgggcctgcaccagctgagcagccccagatacaagttcaacttcatcgccgacgtggtggagaagatcgcccccgccgtggtgcacatcgagctgttcctgagacaccccctgttcggcagaaacgtgcccctgagcagcggcagcggcttcatcatgagcgaggccggcctgatcatcaccaacgcccacgtggtgagcagcaacagcgccgcccccggcagacagcagctgaaggtgcagctgcagaacggcgacagctacgaggccaccatcaaggacatcgacaagaagagcgacatcgccaccatcaagatccaccccaagaagaagctgcccgtgctgctgctgggccacagcgccgacctgagacccggcgagttcgtggtggccatcggcagccccttcgccctgcagaacaccgtgaccaccggcatcgtgagcaccgcccagagagagggcagagagctgggcctgagagacagcgacatggactacatccagaccgacgccatcatcaactacggcaacagcggcggccccctggtgaacctggacggcgaggtgatcggcatcaacaccctgaaggtgaccgccggcatcagcttcgccatccccagcgacagaatcaccagattcctgaccgagttccaggacaagcagatcaaggactggaagaagagattcatcggcatcagaatgagaaccatcacccccagcctggtggacgagctgaaggccagcaaccccgacttccccgaggtgagcagcggcatctacgtgcaggaggtggcccccaacagccccagccagagaggcggcatccaggacggcgacatcatcgtgaaggtgaacggcagacccctggtggacagcagcgagctgcaggaggccgtgctgaccgagagccccctgctgctggaggtgagaagaggcaacgacgacctgctgttcagcatcgcccccgaggtggtgatgtag

SEQ ID NO: 230229 - protein, 407 aa, Artificial Sequence
  derived and/or modified sequence
MDSPCQPQPLSQALPQLPGSSSEPLEPEPGRARMGVESYLPCPLLPSYHCPGVPSEASAGSGTPRATATSTTASPLRDGFGGQDGGELRPLQSEGAAALVTKGCQRLAAQGARPEAPKRKWAEDGGDAPSPSKRPWARQENQEAEREGGMSCSCSSGSGEASAGLMEEALPSAPERLALDYIVPCMRYYGICVKDSFLGAALGGRVLAEVEALKRGGRLRDGQLVSQRAIPPRSIRGDQIAWVEGHEPGCRSIGALMAHVDAVIRHCAGRLGSYVINGRTKAMVACYPGNGLGYVRHVDNPHGDGRCITCIYYLNQNWDVKVHGGLLQIFPEGRPVVANIEPLFDRLLIFWSDRRNPHEVKPAYATRYAITVWYFDAKERAAAKDKYQLASGQKGVQVPVSQPPTPT

SEQ ID NO: 230230 - DNA, 3928 bp, Artificial Sequence
  derived and/or modified sequence
gtgtgagtcccatgtgcttggtgggaggcgctgtgtgagaatgtacagggcaggaggaaacatagcagggctggggtgcagaggaggcccagagcagtgcactccagtctgcaggtactgcactgggcactggggagaccaacctggccccaggggcttccctgtggctgccttccagggcagtactaggtaaacaggtgcctgtgctgatgccatgttgctaggagtggaacggacaatcagccggagtactcaaggtgacccttggtctctgaatcctgaataacaaagagggtcagaaggaagagtgtcccaggccagtgctgaggccttgtggtggcgatgagctcagcctgttgaggcatggagcagagtgatgggagaggcacatgaggttgggggcctttgaggctgtggttgggaatttgtattttctcaggatggagtgaagacctggagaggaggggctctggctgctgtgtggggatgaattgtgggaagagggtgcagcactggaccccttccctgccacccatccacgtgcatcatcagtgtaatctctgattggattcctaattggggaggtcttgcccatctctagtcagtaactcactgtttctaagcctcctggaccatggcccaattcttctcccagtgaggtggttgctcagagtgccgacccttccatagggagtgagcagtgcaaagaaggtgccccctcctgaaccttgaagtgtagccattagggttttccctggggggccttctcactaattgtactctggtgctgccagagagaaggttgtcagcttcccactgctaggtggcagtagatggtggcagccctctctttccagggcaaggtctggtggatgaggtgcacatggttaatgcagagcagcttaacatccaccacagagggtgagccctgggataatgtgttgggaggcgtcctggggagggtgaggattgaagcagcccagtctgctgtggcgtgcgtgcttggcaagcatcctgttgtggcagtggccactgatgtttgatcgtgaatgtttatcttgggactgtcttgctgggccgggcccataggtgtagctgagcattcgtggggaatggacgccagcagagttgtaccagggcagagaggtcagggcagagaggtcaagacagatggtccgggctggggagaagttgaagggtccttgtgccagtcctcccctttttgtgtgctacctcatcttgccactgcagtgactttgggcagagggtgggacagggaccttttaaaatttttaaatggcatttcagcctgtgctccagttctccatgtggcaggcactgtgctggctgtcttcccagacacttgttatcttgttcacttgttccacaacaacctgtgaaatagctgtgagctccattggatccatggatgaggaacctgagaccaggaagtcacctgcctgatgccacagctcatgtggcagcactgagacttgaaccagggaattgtgtctgcagaagtggctgggccatttcctttacctctcagccacctttctgccagctccctgatgacaaacatcccggggccctggccacagcattgtagggctgggtcaggggagtggcaactgtcaggcagaggaaagaaccctgtagacagagaaaccaagccctgcaatgagtcctgttagatctccaggagttggggctccagaacctcccaagttatgttctcagagagattaattgctaccgctgtaaacagcagtgtttattacccctgctgtacacatcaggcagttgaggcccattcaggtgttggaactggctagggttacccagcaaattatccttggagttggaattaggtctttctattcagactgtagcttttggctcctgttcggaggtctatgggacagataatttagtggggattctttgtagtccagggcagcagttcttaacattgctgcatggtagaattacctgggaagctttaccaatttcaggcccttccttaggccaggtacttcagaacctcagagctccccagggggctccactccacagccaagggtaagaattcctggtctagggctgtgaggccacctccttgcacacctgaaaatgtttaaattggtattattctactgaaatggctgaggtggggtttggggtatcttgaaacaaatcaaactctgttactaattgagccctagctgggtgccaggccccaggtatgtgtgttgggagggagtgggctcttgaggcccaggagctgaggtttctgatagacttggggatgggattttggctgaaaaagaaagtcttttggggcaggagcttggaacccttgacccaaggagtcatggggaagatggggcaaggaggggtgggaaaataggtaattcatggctgcttctctaagatgtgcctgcctagccccagtaaacctacctccctccatccctgccaggccatggtggcgtgttacccaggcaacgggctcgggtacgtaaggcacgttgacaatccccacggcgatgggcgctgcatcacctgtatctattacctgaatcagaactgggacgttaaggtaggggtgagggtgagggtgagggtggcgctggggctagggctggggcgggggtggcgtgcgtccactccattttccactctcagcccagattctggcattctcctgtttctcttctcaacacacagcgggcagtgcgatctgccggctcttcctgggaaatggcacctcctcctctctagcggactgtgtggtgggaactcccctctttccgggaatggtgctgtctgcccagccccacccggccttgtaatgaacactttcccccttttcctgtctttagtagcttcctgcccatctccatggtgatgcagtctctgggttgtcattcactttgagagcccgaggggtgggagggagtgatgcaggcagacgctgcgcctcctagtgggctcccggggcaccgtgggaggcagcggctcctggccgtaccagctagcctcatcctttggcctgcccccaggtgcatggcggcctgctgcagatcttccctgagggccggcccgtggtagccaacatcgagccactctttgaccggttgctcattttctggtctgaccggcggaacccccacgaggtgaagccagcctatgccaccaggtacgccatcactgtctggtattttgatgccaaggagcgggcagcagccaaagacaagtatcagctagcatcaggacagaaaggtgtccaagtacctgtatcacagccgcctacgcccacctagtggccagtcccagagccgcatggcagacagcttaaatgacttcaggagagccctgggcctgtgctggctgctccttccctgccaccgctgctgcttctgactttgcctctgtcctgcctggtgtggagggctctgtctgttgctgaggaccaaggaggagaagagacctttgctgccccatcatgggggctggggttgtcacctggacagggggcagccgtggaggccaccgttaccaactgaagctgggggcctgggtcctaccctgtctggtcatgaccccattaggtatggagagctgggaggaggcattgtcacttcccaccaggatgcaggacttggggttgaggtgagtcatggcctcttgctggcaatggggtgggaggagtacccccaagtcctctcactcctccagcctggaatgtgaagtgactccccaacccctttggccatggcaggcaccttttggactgggctgccactgcttgggcagagtaaaaggtgccaggaggagcatgggtgtggaagtcctgtcagccaagaaataaaagtttacctcagagctgcaaaaaaaaaaaaaaaaaaaaaaaaaaaaaaaaaaa

SEQ ID NO: 230231 - DNA, 1224 bp, Artificial Sequence
  derived and/or modified sequence
atggattctccttgtcagccccagcctttatcccaggctctcccgcagctgccaggaagttctagcgagccgttagagccagagcctggcagagctcgcatgggcgtcgagagttacctaccttgccctctcctcccctcttatcattgtccaggggttccttctgaggcctcagcaggcagtggcactcctagagcgacagctacaagcacaaccgcatcaccactgagggacgggttcggcggacaggacggaggagaattgaggcccctgcaatccgagggcgccgccgccttagtgacaaaaggatgtcagagactcgcggcgcagggtgcccgacccgaggcacccaaaagaaaatgggcggaagacggcggggatgcacccagccctagtaaacgtccttgggcgaggcaagagaaccaagaagctgaaagggagggaggaatgtcctgtagctgtagttcaggaagtggagaggctagcgctgggctgatggaggaggcccttccaagcgctccagagcgactcgctctcgactacatagtgccctgcatgcgctattatggcatctgtgtaaaggattctttcttaggagctgcactgggaggaagggtactggcggaggtcgaggctctgaagcgggggggccgtctgcgcgatggacaactagtcagccagagggccatccccccacgatcaattaggggggaccaaatcgcttgggttgagggccacgaacccggctgcaggtccattggggcactcatggctcatgtggatgcggtaattcgtcattgtgccgggagattaggcagctacgtcatcaacggccgaacgaaagctatggtggcgtgctatccgggcaacggtctgggttacgttcggcatgttgacaatccccacggcgatgggcgatgcattacttgcatctactatctcaatcagaactgggacgtcaaggtgcacggtggcctgctgcagatcttccccgaaggtcgaccagtggttgcaaacatagaacccctattcgacagattgctcatcttctggagcgaccgacgtaacccacacgaagtaaagccagcatatgctacaagatacgccataaccgtttggtacttcgacgccaaggagcgcgctgctgccaaagataaataccagctggcaagcggacagaagggagttcaggtgcctgtttcgcaacccccgacccccacctag

SEQ ID NO: 230232 - DNA, 1224 bp, Artificial Sequence
  derived and/or modified sequence
atggactccccgtgtcagccgcagcccttatcacaggctcttccccagcttcccggctcaagctccgagcccctggagcccgagccagggagagctcggatgggtgtggaaagctaccttccttgccctctgctcccaagctaccactgccccggggtgccctccgaggcgtccgctggtagtggcactcctcgagccacggctaccagcaccaccgcctcccccctgagagatggattcggaggtcaggacggaggagaactccggccacttcagtcagagggtgcggcagctttggtgactaaagggtgtcagaggcttgccgcccagggcgcccggcccgaagcacccaagcgaaagtgggccgaggatgggggcgacgcaccctccccaagcaagagaccgtgggcgcggcaggaaaaccaagaggcagaaagggaggggggaatgtcttgtagctgctccagtggctcaggcgaagcatcagcaggactcatggaggaggcactgccttcagcacccgagcgattggctctggactacatagttccttgcatgagatattacggtatctgtgtgaaggactcattcctgggtgccgcactcgggggccgcgtgctcgctgaggttgaggccctaaaaaggggtggaagattacgagacgggcagctggtgagccagcgcgccataccaccaagatctattaggggggaccagattgcttgggtcgagggtcacgagcccggctgtcgttcgattggtgcgcttatggcacatgttgatgcagtaataagacactgcgcaggacggctgggatcctacgtcatcaatggacgcaccaaggccatggtggcttgctacccagggaacgggttaggctacgtccgccacgtcgataacccccacggcgacgggcggtgcattacttgtatctattaccttaaccagaattgggacgtaaaggtacacggcggactactccagattttcccagaagggagaccagtggtcgctaatatagaaccgttattcgaccggctgttgatcttctggtccgacagacgcaacccacacgaggtaaaaccagcttacgcaacccgctacgccattacagtgtggtacttcgatgccaaggagcgcgcagcggcaaaggataaatatcagctggccagcgggcagaaaggtgtgcaggtcccagtctctcagccccccactccgacatag

SEQ ID NO: 230233 - DNA, 1224 bp, Artificial Sequence
  derived and/or modified sequence
atggacagcccctgccagccccagcccctgagccaggccctgccccagctgcccggcagcagcagcgagcccctggagcctgagcccggccgggccaggatgggcgtggagagctacctgccctgccccctgctgcccagctaccactgccctggggtgcccagcgaggccagcgctggcagcggcaccccccgggccacagccaccagcaccacagccagccccctgagagatggctttggaggccaggacggcggggagctgcggcccctgcagagcgagggcgctgctgccctggtgaccaagggctgccagaggctggccgcccagggcgcccggcctgaggcccccaagaggaagtgggccgaggatggaggagatgcccccagccccagcaagaggccctgggcccggcaggagaaccaggaggccgagcgggagggcggcatgagctgcagctgcagcagcggcagcggggaggccagcgctggcctgatggaggaggccctgcccagcgcccctgagcggctggccctggactacatcgtgccctgcatgagatactacggcatctgtgtgaaggacagcttcctgggcgccgccctgggcggccgggtgctggccgaggtggaggccctgaagaggggcggccgcctgagagatggccagctggtgtcccagagggccatccccccaagaagcatccggggggaccagatcgcctgggtggagggccacgagcccggctgccgcagcattggagccctgatggcccacgtggatgctgtgatccgccactgtgccggccgcctgggcagctatgtgatcaatggaagaaccaaggccatggtggcctgctacccaggaaatggcctgggctacgtgagacatgtggacaacccccatggagatggccgctgcatcacctgcatctactacctgaaccagaactgggatgtgaaggtgcatggaggcctgctgcagatcttccctgagggccggcctgtggtggccaacatcgagcccctgtttgaccggctgctgatcttctggagcgacagaagaaacccccatgaggtgaagccagcctatgccaccaggtatgccatcaccgtgtggtactttgatgccaaggagagagctgctgccaaggacaagtaccagctggccagcggccagaagggcgtgcaggtgcctgtgtcccagccccccacccccacctag

SEQ ID NO: 230234 - DNA, 1224 bp, Artificial Sequence
  derived and/or modified sequence
atggacagcccctgccagccccagcccctgagccaggccctgccccagttgcctgggtcctcatctgaacccttagaacccgagcccgggcgggcacggatgggcgttgaaagctatcttccttgtccactgctgccttcataccactgccctggagtaccgagtgaggcttctgcaggcagcggtacaccacgcgcaactgccacttcaacaactgcctcccccctcagggacggatttggcggccaggacggcggagaactgcgccctcttcagagtgagggcgccgcggcactcgtgacaaagggatgtcagcgcctcgctgcccagggagctcgccccgaagctccaaaaaggaaatgggctgaagacggaggcgacgccccctctccatcaaagcgcccctgggccaggcaagaaaaccaggaggctgagagggaaggcgggatgagctgctcctgctcctcagggtctggggaggcaagcgcggggttgatggaggaggctcttccctcagcaccagaacgactagcactggactacatcgtgccttgtatgcgctactatgggatctgtgtgaaggattctttcctgggggccgcacttggaggcagagtgctcgctgaggtggaagccctcaaacgcggcggaaggcttagagacggccagctcgtctcccagagggcaatccccccacggagcattcgcggggaccaaatcgcatgggtcgaagggcatgaaccgggctgtcgcagtattggagctctcatggctcacgttgacgccgtgattagacactgtgccggaaggttaggcagttacgtgatcaacgggcggactaaagccatggttgcctgttaccctgggaatgggctgggctatgtcagacacgttgacaatccgcacggagatggccggtgcatcacctgcatttactatttgaatcagaactgggacgtcaaagtgcatggaggcctgctacagatctttcccgaaggaagacccgtggttgctaacatcgaacccctgtttgaccggcttctcatcttttggtcagatcgaagaaacccacacgaggttaaacctgcctacgctacacggtatgccatcaccgtgtggtacttcgatgccaaggaaagggccgccgccaaggacaaatatcagcttgccagtggacagaaaggcgtccaggtgcctgtatcgcagccacctacacctacttag

SEQ ID NO: 230235 - DNA, 1224 bp, Artificial Sequence
  derived and/or modified sequence
atggacagcccctgccagccccagcccctgagccaggccctgccccaacttcccgggtcctcaagcgaaccattagaacccgaacccggtagagcacgtatgggcgtggagtcatacttgccttgtcctttgctcccaagttatcactgcccaggggtaccttctgaggcatccgctggaagcgggaccccccgagccaccgctacaagtaccactgctagtccgttaagagatggtttcggcggacaggacggcggcgagctccgaccgctccagtcggaaggggccgctgcacttgtcacaaagggttgtcagcgcttggcagcccagggagccaggccagaagctccaaaacggaaatgggctgaggacgggggcgatgcgccctccccctctaagagaccatgggcccggcaagaaaaccaggaagcggagagggaggggggcatgtcttgtagctgtagcagcggatctggcgaggctagtgcaggtctcatggaagaagccctgccttcagctcctgagaggcttgctctggactacatagtcccttgtatgcgttactacgggatctgcgtgaaggactcgttcctgggcgcagctctgggaggtcgcgtcctcgcagaggtcgaggctctgaaacgcggaggaaggctccgtgacgggcagctggtgtcacaacgggcaattcctcctcgttctatcagaggagatcagatcgcctgggtggagggacatgagccgggatgtcgaagcattggggcccttatggcccacgtggacgctgtgatcaggcattgtgcaggacggcttggcagttacgtgattaacggtcgtaccaaggccatggtggcatgctacccagggaatgggctggggtatgtcagacacgtggacaaccctcacggagatgggagatgtatcacttgcatctactacttaaatcaaaattgggacgtcaaggtgcacggcggtctgctacaaatattccccgaaggtagacctgtggtggctaatatcgagccgctcttcgaccgtctcctgatcttttggtcggatcggcgcaatccacacgaggttaaacctgcctacgctacgaggtatgctattaccgtgtggtacttcgacgcaaaagagagagccgccgccaaagataagtatcagctggcatccggccagaagggggtgcaggtgcctgtgagtcaaccgcccacccccacttag

SEQ ID NO: 230236 - DNA, 1224 bp, Artificial Sequence
  derived and/or modified sequence
atggacagtccctgtcagccccagcctttaagtcaggctctaccacagctgccaggctcatcttcagaaccgctcgaacccgagcccggacgcgctcggatgggcgtggaaagttatctcccatgcccattgcttcctagctatcactgccctggggttcctagcgaagcctctgcagggagcggcacacccagagccacagctacctctaccactgccagcccacttcgagacgggtttggaggtcaggacggcggagaacttcgtcccctgcagtcagagggtgccgcagccctcgtcacgaaaggatgccagcgtcttgccgcacagggcgctagacccgaggctcctaagagaaagtgggcagaagatggaggagatgctccctccccatccaagaggccatgggcaagacaagagaaccaagaagccgaaagagaaggaggcatgagctgcagctgctcctcaggcagcggagaagcttccgccggtttgatggaggaggccttaccatccgcacccgagcgactggccctggattacatcgtaccttgcatgcggtattacgggatttgtgtaaaggactccttcctcggagccgctctgggcggacgggtgctggctgaggtggaggcactgaaaagagggggtagactgcgagacggtcagctagtaagtcagcgagccattccacccaggtcaataagaggcgaccaaattgcctgggtagagggccacgagcccggttgcaggtctattggggcacttatggcccacgtcgatgctgtgatcagacactgcgctggtcggttgggtagttatgtcattaatggcaggacaaaagctatggttgcctgctatcccggtaatggcctcgggtacgtgcgccacgtggacaacccgcacggggacggtcggtgtattacgtgtatttactatctgaatcagaattgggacgtcaaggttcacggcggattactccaaatattccccgagggacggcctgtcgtagctaacatcgagcccctctttgacagactgctgattttctggtctgaccggcgtaacccccacgaggtgaagcccgcatatgccacaagatacgctatcaccgtgtggtacttcgatgcaaaggagcgagccgcagccaaggacaaataccagctcgcttctgggcagaagggcgtccaggtcccagtgtcacaaccgcctacgccgacatag

SEQ ID NO: 230237 - DNA, 1224 bp, Artificial Sequence
  derived and/or modified sequence
atggattctccttgtcagcctcaaccgctctctcaggcgttaccacaattgccaggctccagttccgaaccccttgaacctgaaccagggagggctcgaatgggggtcgaatcatatctgccctgtccgttactgccatcctatcattgtcccggagttccatcggaggccagcgcaggttctggcacccccagggccaccgccaccagcactactgcttcaccgttacgcgatggtttcggaggacaggacggtggggagttgcgtcccctccaatccgagggggcagccgcactggtcaccaaaggttgccagaggcttgcagctcagggagctaggcccgaggccccaaagcgcaagtgggctgaagacggaggagacgccccatctccttcaaaacgcccttgggcacgacaggaaaatcaggaagctgagcgcgagggaggtatgtcctgctcatgcagttcaggctccggggaggcttcagctgggcttatggaggaggcactcccctccgctcctgaaaggcttgccctggactatattgtaccttgtatgcggtactacggcatatgcgtcaaagattctttccttggggctgctctagggggaagagtgctggcagaggtcgaagcactgaagcggggagggaggttgcgagatgggcagttggtgtcgcagagggcgattccccctcggtctatacgtggcgatcagatcgcttgggtcgaaggacacgaaccaggttgccgaagcataggagctctgatggcccatgtagatgccgtgatcaggcactgtgccggaaggctggggagctacgtgattaatggacgcacaaaagccatggttgcttgctaccctgggaatgggctgggctatgtaaggcacgttgataatccgcacggtgacggcaggtgcattacgtgtatttactatcttaatcaaaactgggacgttaaggtgcacggcggtctgctccagatctttcctgaaggccgtcctgtcgtggcgaatattgaacctctgtttgaccgcctcttgatcttctggtcagaccggagaaatcctcatgaggtgaaacctgcttacgcaacacgctacgctataaccgtgtggtacttcgacgccaaagaaagagcagcagccaaagataaatatcaattagcctctggacagaaaggcgttcaggtaccagtcagccagcctcctaccccaacatag

SEQ ID NO: 230238 - DNA, 1224 bp, Artificial Sequence
  derived and/or modified sequence
atggacagcccctgccagccccagcccctgagccaggccctgccccagctgcccggcagcagcagcgagcccctggagcccgagcccggcagagccagaatgggcgtggagagctacctgccctgccccctgctgcccagctaccactgccccggcgtgcccagcgaggccagcgccggcagcggcacccccagagccaccgccaccagcaccaccgccagccccctgagagacggcttcggcggccaggacggcggcgagctgagacccctgcagagcgagggcgccgccgccctggtgaccaagggctgccagagactggccgcccagggcgccagacccgaggcccccaagagaaagtgggccgaggacggcggcgacgcccccagccccagcaagagaccctgggccagacaggagaaccaggaggccgagagagagggcggcatgagctgcagctgcagcagcggcagcggcgaggccagcgccggcctgatggaggaggccctgcccagcgcccccgagagactggccctggactacatcgtgccctgcatgagatactacggcatctgcgtgaaggacagcttcctgggcgccgccctgggcggcagagtgctggccgaggtggaggccctgaagagaggcggcagactgagagacggccagctggtgagccagagagccatcccccccagaagcatcagaggcgaccagatcgcctgggtggagggccacgagcccggctgcagaagcatcggcgccctgatggcccacgtggacgccgtgatcagacactgcgccggcagactgggcagctacgtgatcaacggcagaaccaaggccatggtggcctgctaccccggcaacggcctgggctacgtgagacacgtggacaacccccacggcgacggcagatgcatcacctgcatctactacctgaaccagaactgggacgtgaaggtgcacggcggcctgctgcagatcttccccgagggcagacccgtggtggccaacatcgagcccctgttcgacagactgctgatcttctggagcgacagaagaaacccccacgaggtgaagcccgcctacgccaccagatacgccatcaccgtgtggtacttcgacgccaaggagagagccgccgccaaggacaagtaccagctggccagcggccagaagggcgtgcaggtgcccgtgagccagccccccacccccacctag

SEQ ID NO: 230239 - DNA, 2145 bp, Artificial Sequence
  derived and/or modified sequence
acgtgcccaccgggcgaggcggggcggggcgtcgcgcgcggtgggggcggggtatggcgcgctgtgcggcgcagggcggctggcacaaacggcggcgccggggccggaggaaaaagctcgccaccctgaagggtcccttcccaagcccttagggaccgcagaggacttggggaccagcaagcaacccccagggcacgagaagagctcttgctgtctgccctgcctcaccctgccccacgccaggcccggtggcccccagctgcatcaagtggaggcggaggaggaggcggaggagggtggcaccatgggcccgggcggtgccctccatgcccgggggatgaagacactgctgccatggacagcccgtgccagccgcagcccctaagtcaggctctccctcagttaccagggtcttcgtcagagcccttggagcctgagcctggccgggccaggatgggagtggagagttacctgccctgtcccctgctcccctcctaccactgtccaggagtgcctagtgaggcctcggcagggagtgggacccccagagccacagccacctctaccactgccagccctcttcgggacggttttggcgggcaggatggtggtgagctgcggccgctgcagagtgaaggcgctgcagcgctggtcaccaaggggtgccagcgattggcagcccagggcgcacggcctgaggcccccaaacggaaatgggccgaggatggtggggatgccccttcacccagcaaacggccctgggccaggcaagagaaccaggaggcagagcgggagggtggcatgagctgcagctgcagcagtggcagtggtgaggccagtgctgggctgatggaggaggcgctgccctctgcgcccgagcgcctggccctggactatatcgtgccctgcatgcggtactacggcatctgcgtcaaggacagcttcctgggggcagcactgggcggtcgcgtgctggccgaggtggaggccctcaaacggggtgggcgcctgcgagacgggcagctagtgagccagagggcgatcccgccgcgcagcatccgtggggaccagattgcctgggtggaaggccatgaaccaggctgtcgaagcattggtgccctcatggcccatgtggacgccgtcatccgccactgcgcagggcggctgggcagctatgtcatcaacgggcgcaccaaggccatggtggcgtgttacccaggcaacgggctcgggtacgtaaggcacgttgacaatccccacggcgatgggcgctgcatcacctgtatctattacctgaatcagaactgggacgttaaggtgcatggcggcctgctgcagatcttccctgagggccggcccgtggtagccaacatcgagccactctttgaccggttgctcattttctggtctgaccggcggaacccccacgaggtgaagccagcctatgccaccaggtacgccatcactgtctggtattttgatgccaaggagcgggcagcagccaaagacaagtatcagctagcatcaggacagaaaggtgtccaagtacctgtatcacagccgcctacgcccacctagtggccagtcccagagccgcatggcagacagcttaaatgacttcaggagagccctgggcctgtgctggctgctccttccctgccaccgctgctgcttctgactttgcctctgtcctgcctggtgtggagggctctgtctgttgctgaggaccaaggaggagaagagacctttgctgccccatcatgggggctggggttgtcacctggacagggggcagccgtggaggccaccgttaccaactgaagctgggggcctgggtcctaccctgtctggtcatgaccccattaggtatggagagctgggaggaggcattgtcacttcccaccaggatgcaggacttggggttgaggtgagtcatggcctcttgctggcaatggggtgggaggagtacccccaagtcctctcactcctccagcctggaatgtgaagtgactccccaacccctttggccatggcaggcaccttttggactgggctgccactgcttgggcagagtaaaaggtgccaggaggagcatgggtgtggaagtcctgtcagccaagaaataaaagtttacctcagagctgc

SEQ ID NO: 230240 - DNA, 2088 bp, Artificial Sequence
  derived and/or modified sequence
gctttcccctgcctgcctgtctctagtttctctcacatccctttttttttttcctttctctagccaccctgaagggtcccttcccaagcccttagggaccgcagaggacttggggaccagcaagcaacccccagggcacgagaagagctcttgctgtctgccctgcctcaccctgccccacgccaggcccggtggcccccagctgcatcaagtggaggcggaggaggaggcggaggagggtggcaccatgggcccgggcggtgccctccatgcccgggggatgaagacactgctgccatggacagcccgtgccagccgcagcccctaagtcaggctctccctcagttaccagggtcttcgtcagagcccttggagcctgagcctggccgggccaggatgggagtggagagttacctgccctgtcccctgctcccctcctaccactgtccaggagtgcctagtgaggcctcggcagggagtgggacccccagagccacagccacctctaccactgccagccctcttcgggacggttttggcgggcaggatggtggtgagctgcggccgctgcagagtgaaggcgctgcagcgctggtcaccaaggggtgccagcgattggcagcccagggcgcacggcctgaggcccccaaacggaaatgggccgaggatggtggggatgccccttcacccagcaaacggccctgggccaggcaagagaaccaggaggcagagcgggagggtggcatgagctgcagctgcagcagtggcagtggtgaggccagtgctgggctgatggaggaggcgctgccctctgcgcccgagcgcctggccctggactatatcgtgccctgcatgcggtactacggcatctgcgtcaaggacagcttcctgggggcagcactgggcggtcgcgtgctggccgaggtggaggccctcaaacggggtgggcgcctgcgagacgggcagctagtgagccagagggcgatcccgccgcgcagcatccgtggggaccagattgcctgggtggaaggccatgaaccaggctgtcgaagcattggtgccctcatggcccatgtggacgccgtcatccgccactgcgcagggcggctgggcagctatgtcatcaacgggcgcaccaaggccatggtggcgtgttacccaggcaacgggctcgggtacgtaaggcacgttgacaatccccacggcgatgggcgctgcatcacctgtatctattacctgaatcagaactgggacgttaaggtgcatggcggcctgctgcagatcttccctgagggccggcccgtggtagccaacatcgagccactctttgaccggttgctcattttctggtctgaccggcggaacccccacgaggtgaagccagcctatgccaccaggtacgccatcactgtctggtattttgatgccaaggagcgggcagcagccaaagacaagtatcagctagcatcaggacagaaaggtgtccaagtacctgtatcacagccgcctacgcccacctagtggccagtcccagagccgcatggcagacagcttaaatgacttcaggagagccctgggcctgtgctggctgctccttccctgccaccgctgctgcttctgactttgcctctgtcctgcctggtgtggagggctctgtctgttgctgaggaccaaggaggagaagagacctttgctgccccatcatgggggctggggttgtcacctggacagggggcagccgtggaggccaccgttaccaactgaagctgggggcctgggtcctaccctgtctggtcatgaccccattaggtatggagagctgggaggaggcattgtcacttcccaccaggatgcaggacttggggttgaggtgagtcatggcctcttgctggcaatggggtgggaggagtacccccaagtcctctcactcctccagcctggaatgtgaagtgactccccaacccctttggccatggcaggcaccttttggactgggctgccactgcttgggcagagtaaaaggtgccaggaggagcatgggtgtggaagtcctgtcagccaagaaataaaagtttacctcagagctgc

SEQ ID NO: 230241 - protein, 161 aa, Artificial Sequence
  derived and/or modified sequence
MLMPVHFLLLLLLLLGGPRTGLPHKFYKAKPIFSCLNTALSEAEKGQWEDASLLSKRSFHYLRSRDASSGEEEEGKEKKTFPISGARGGARGTRYRYVSQAQPRGKPRQDTAKSPHRTKFTLSLDVPTNIMNLLFNIAKAKNLRAQAAANAHLMAQIGRKK

SEQ ID NO: 230242 - DNA, 486 bp, Artificial Sequence
  derived and/or modified sequence
atgctgatgccagtccatttcctgttgctgctgctgttgttgctcgggggacccagaaccggccttccacacaaattctacaaggccaagcccatcttctcttgtctgaataccgctttaagcgaggcagagaagggacaatgggaggatgcgagcctgctcagtaaaaggtctttccattatcttcgcagtcgcgatgcctcgagcggtgaggaggaagagggcaaagagaaaaagacattcccgatttctggtgcccgtggcggagccagagggacgcgctacaggtacgtcagtcaggcacagcctcgtggaaaaccaagacaggatactgcgaagagcccccaccgaactaagttcactctcagtttggatgtgccgacaaacattatgaacctgttgttcaatattgccaaggctaagaacctgcgcgctcaggctgctgccaatgcgcatctcatggcccaaatcggtaggaagaagtag

SEQ ID NO: 230243 - DNA, 486 bp, Artificial Sequence
  derived and/or modified sequence
atgcttatgcccgtgcacttcctactcttgcttctcctactccttggaggacctcgtacaggcttacctcacaaattttataaagccaaacccatttttagttgcctgaacactgccttgtcagaggctgagaagggccaatgggaagacgctagcttgctgagcaaaagaagcttccattacctgagaagccgagatgccagcagtggcgaggaggaagaagggaaagagaaaaagactttccccataagtggcgctcggggaggagcacgcggaacccggtaccgatatgtatctcaagcgcaacctagagggaaacccagacaagatactgctaagtctcctcaccggaccaagtttaccctatcccttgatgtccccaccaatatcatgaacctccttttcaatatcgctaaggcaaagaacctgagggcccaggccgcagccaacgcacacttgatggcacaaatcggtagaaagaagtag

SEQ ID NO: 230244 - DNA, 486 bp, Artificial Sequence
  derived and/or modified sequence
atgttaatgcccgttcactttcttctgctcttacttttactgctgggcggaccccgaaccggtctcccacataagttctacaaggccaaacctattttctcttgtctgaacaccgctctcagcgaggccgagaaaggacaatgggaggatgcttccctgctttcaaaaaggtctttccactacctgagatcacgggatgcttcatccggagaagaagaggagggcaaagaaaaaaagacgtttccaatttctggggccaggggaggggccaggggcacaaggtatcgatacgtcagccaggcacagcctcgtggcaagcccagacaagataccgctaaatctccccatagaacaaaattcacgttgtccctcgatgtacccactaacattatgaatctgctgtttaacatcgccaaagctaaaaatctccgcgcccaggctgccgccaatgctcacctgatggcccaaattggaagaaaaaaatag

SEQ ID NO: 230245 - DNA, 486 bp, Artificial Sequence
  derived and/or modified sequence
atgctgatgcccgtgcacttcctgctgctgctgctgctgctgctgggcggccccagaaccggcctgccccacaagttctacaaggccaagcccatcttcagctgcctgaacaccgccctgagcgaggccgagaagggccagtgggaggacgccagcctgctgagcaagagaagcttccactacctgagaagcagagacgccagcagcggcgaggaggaggagggcaaggagaagaagaccttccccatcagcggcgccagaggcggcgccagaggcaccagatacagatacgtgagccaggcccagcccagaggcaagcccagacaggacaccgccaagagcccccacagaaccaagttcaccctgagcctggacgtgcccaccaacatcatgaacctgctgttcaacatcgccaaggccaagaacctgagagcccaggccgccgccaacgcccacctgatggcccagatcggcagaaagaagtag

SEQ ID NO: 230246 - DNA, 486 bp, Artificial Sequence
  derived and/or modified sequence
atgctaatgcccgtacactttctcttgcttcttctgctcttactagggggccctcgcactgggcttccccataagttttacaaagccaagcctattttctcctgtctcaacactgccctgtccgaagctgaaaagggtcagtgggaagacgcttccttattgagcaagagatcattccattacctgcggtctcgggacgcaagtagcggagaagaggaggaaggcaaagaaaagaaaacctttcctataagtggagcccgtggaggagcccggggcactagatatcggtacgttagccaggcccagcccaggggaaaaccacgccaggataccgccaagtcaccacaccgcacgaagttcaccctctcgctggacgtgccaaccaatatcatgaacctcctgtttaacatcgccaaggccaaaaatcttcgcgctcaggcggccgccaatgcacatttgatggcccagatcggtagaaagaagtag

SEQ ID NO: 230247 - DNA, 486 bp, Artificial Sequence
  derived and/or modified sequence
atgctgatgcctgtgcacttcctgctgctgctgctgctgctgctgggcggccccaggacaggcctgccccacaagttctacaaggccaagcccatcttcagctgcctgaacacagccctgtctgaggccgagaagggccagtgggaggatgccagcctgctgagcaagaggagcttccactacctgcggagcagagatgccagcagtggagaggaggaggagggcaaggagaagaagaccttccccatcagcggggcccggggcggggcccggggcacccgctaccgctacgtgtcccaggcccagccccggggcaagccccggcaggacacagccaagagcccccacaggaccaagttcaccctgagcctggatgtgcccaccaacatcatgaacctgctcttcaacatcgccaaggccaagaacctgcgggcccaggccgccgccaatgcccacctgatggcccagattggaaggaagaagtag

SEQ ID NO: 230248 - DNA, 714 bp, Artificial Sequence
  derived and/or modified sequence
gatccaccctgtgatctgtcacttttatatacacacaggggaggggaccgtttccatagagagggaatatcacagcccacttaggaacaataccggagaagcaggagccgagaccccggagcagccacaagttcatggggacgtgcacggggccgccctcctggccctgaagctgcgccggcctccctgagcgtttcgctgcggagggaagtccactctcggggagagatgctgatgccggtccacttcctgctgctcctgctgctgctcctggggggccccaggacaggcctcccccacaagttctacaaagccaagcccatcttcagctgcctcaacaccgccctgtctgaggctgagaagggccagtgggaggatgcatccctgctgagcaagaggagcttccactacctgcgcagcagagacgcctcttcgggagaggaggaggagggcaaagagaaaaagactttccccatctctggggccaggggtggagccagaggcacccggtacagatacgtgtcccaagcacagcccaggggaaagccacgccaggacacggccaagagtccccaccgcaccaagttcaccctgtccctcgacgtccccaccaacatcatgaacctcctcttcaacatcgccaaggccaagaacctgcgtgcccaggcggccgccaatgcccacctgatggcgcaaattgggaggaagaagtag

SEQ ID NO: 230249 - DNA, 486 bp, Artificial Sequence
  derived and/or modified sequence
atgctgatgcccgtgcacttcctgctgctgctgctgctgctgctgggcggcccccgcaccggactgccccataagttttacaaggccaagccgattttctcttgccttaatacagctttatctgaagcagagaaaggacagtgggaggatgcttccctcctgtctaagaggtcctttcactatctacgcagtagggacgctagcagcggtgaagaggaagaaggcaaagaaaaaaagaccttccccatatctggtgccagagggggtgctaggggaacccggtatcgatatgtgtcgcaagcccagcccagagggaagcctcggcaggatactgcaaagagcccacaccgcaccaagtttaccctgagtttggatgtgcccacaaatattatgaacttgctcttcaacatcgcaaaagcaaagaacctccgagctcaggctgcggccaacgcacacttaatggctcaaatcgggaggaaaaaatag

SEQ ID NO: 230250 - RNA, 486 nt, Artificial Sequence
  derived and/or modified sequence
augcuuaugcccgugcacuuccuacucuugcuucuccuacuccuuggaggaccucguacaggcuuaccucacaaauuuuauaaagccaaacccauuuuuaguugccugaacacugccuugucagaggcugagaagggccaaugggaagacgcuagcuugcugagcaaaagaagcuuccauuaccugagaagccgagaugccagcaguggcgaggaggaagaagggaaagagaaaaagacuuuccccauaaguggcgcucggggaggagcacgcggaacccgguaccgauauguaucucaagcgcaaccuagagggaaacccagacaagauacugcuaagucuccucaccggaccaaguuuacccuaucccuugauguccccaccaauaucaugaaccuccuuuucaauaucgcuaaggcaaagaaccugagggcccaggccgcagccaacgcacacuugauggcacaaaucgguagaaagaaguag

SEQ ID NO: 230251 - RNA, 486 nt, Artificial Sequence
  derived and/or modified sequence
auguuaaugcccguucacuuucuucugcucuuacuuuuacugcugggcggaccccgaaccggucucccacauaaguucuacaaggccaaaccuauuuucucuugucugaacaccgcucucagcgaggccgagaaaggacaaugggaggaugcuucccugcuuucaaaaaggucuuuccacuaccugagaucacgggaugcuucauccggagaagaagaggagggcaaagaaaaaaagacguuuccaauuucuggggccaggggaggggccaggggcacaagguaucgauacgucagccaggcacagccucguggcaagcccagacaagauaccgcuaaaucuccccauagaacaaaauucacguugucccucgauguacccacuaacauuaugaaucugcuguuuaacaucgccaaagcuaaaaaucuccgcgcccaggcugccgccaaugcucaccugauggcccaaauuggaagaaaaaaauag

SEQ ID NO: 230252 - protein, 554 aa, Artificial Sequence
  derived and/or modified sequence
MATSADSPSSPLGAEDLLSDSSEPPGLNQVSSEVTSQLYASLRLSRQAEATARAQLYLPSTSPPHEGLDGFAQELSRSLSVGLEKNLKKKDGSKHIFEMESVRGQLQTMLQTSRDTAYRDPLIPGAGSERREEDSFDSDSTATLLNTRPLQDLSPSSSAQALEELFPRYTSLRPGPPLNPPDFQGLRDALDSEHTRRKHCERHIQSLQTRVLELQQQLAVAVAADRKKDTMIEQLDKTLARVVEGWNRHEAERTEVLRGLQEEHQAAELTRSKQQETVTRLEQSLSEAMEALNREQESARLQQRERETLEEERQALTLRLEAEQQRCCVLQEERDAARAGQLSEHRELETLRAALEEERQTWAQQEHQLKEHYQALQEESQAQLEREKEKSQREAQAAWETQHQLALVQSEVRRLEGELDTARRERDALQLEMSLVQARYESQRIQLESELAVQLEQRVTERLAQAQESSLRQAASLREHHRKQLQDLSGQHQQELASQLAQFKVEMAEREERQQQVAEDYELRLLLLDPPAPGLRSPRRRRGGSGLCLPWPWP

SEQ ID NO: 230253 - protein, 903 aa, Artificial Sequence
  derived and/or modified sequence
MATSADSPSSPLGAEDLLSDSSEPPGLNQVSSEVTSQLYASLRLSRQAEATARAQLYLPSTSPPHEGLDGFAQELSRSLSVGLEKNLKKKDGSKHIFEMESVRGQLQTMLQTSRDTAYRDPLIPGAGSERREEDSFDSDSTATLLNTRPLQDLSPSSSAQALEELFPRYTSLRPGPPLNPPDFQGLRDALDSEHTRRKHCERHIQSLQTRVLELQQQLAVAVAADRKKDTMIEQLDKTLARVVEGWNRHEAERTEVLRGLQEEHQAAELTRSKQQETVTRLEQSLSEAMEALNREQESARLQQRERETLEEERQALTLRLEAEQQRCCVLQEERDAARAGQLSEHRELETLRAALEEERQTWAQQEHQLKEHYQALQEESQAQLEREKEKSQREAQAAWETQHQLALVQSEVRRLEGELDTARRERDALQLEMSLVQARYESQRIQLESELAVQLEQRVTERLAQAQESSLRQAASLREHHRKQLQDLSGQHQQELASQLAQFKVEMAEREERQQQVAEDYELRLAREQARVCELQSGNQQLEEQRVELVERLQAMLQAHWDEANQLLSTTLPPPNPPAPPAGPSSPGPQEPEKEERRVWTMPPMAVALKPVLQQSREARDELPGAPPVLCSSSSDLSLLLGPSFQSQHSFQPLEPKPDLTSSTAGAFSALGAFHPDHRAERPFPEEDPGPDGEGLLKQGLPPAQLEGLKNFLHQLLETVPQNNENPSVDLLPPKSGPLTVPSWEEAPQVPRIPPPVHKTKVPLAMASSLFRVPEPPSSHSQGSGPSSGSPERGGDGLTFPRQLMEVSQLLRLYQARGWGALPAEDLLLYLKRLEHSGTDGRGDNVPRRNTDSRLGEIPRKEIPSQAVPRRLATAPKTEKPPARKKSGHPAPSSMRSRGGVWR

SEQ ID NO: 230254 - DNA, 2712 bp, Artificial Sequence
  derived and/or modified sequence
atggccaccagcgccgacagccccagcagccccctgggcgccgaggacctgctgagcgacagcagcgagccccccggcctgaaccaggtgagcagcgaggtgaccagccagctgtacgccagcctgagactgagcagacaggccgaggccaccgccagagcccagctgtacctgcccagcaccagccccccccacgagggcctggacggcttcgcccaggagctgagcagaagcctgagcgtgggcctggagaagaacctgaagaagaaggacggcagcaagcacatcttcgagatggagagcgtgagaggccagctgcagaccatgctgcagaccagcagagacaccgcctacagagaccccctgatccccggcgccggcagcgagagaagagaggaggacagcttcgacagcgacagcaccgccaccctgctgaacaccagacccctgcaggacctgagccccagcagcagcgcccaggccctggaggagctgttccccagatacaccagcctgagacccggcccccccctgaacccccccgacttccagggcctgagagacgccctggacagcgagcacaccagaagaaagcactgcgagagacacatccagagcctgcagaccagagtgctggagctgcagcagcagctggccgtggccgtggccgccgacagaaagaaggacaccatgatcgagcagctggacaagaccctggccagagtggtggagggctggaacagacacgaggccgagagaaccgaggtgctgagaggcctgcaggaggagcaccaggccgccgagctgaccagaagcaagcagcaggagaccgtgaccagactggagcagagcctgagcgaggccatggaggccctgaacagagagcaggagagcgccagactgcagcagagagagagagagaccctggaggaggagagacaggccctgaccctgagactggaggccgagcagcagagatgctgcgtgctgcaggaggagagagacgccgccagagccggccagctgagcgagcacagagagctggagaccctgagagccgccctggaggaggagagacagacctgggcccagcaggagcaccagctgaaggagcactaccaggccctgcaggaggagagccaggcccagctggagagagagaaggagaagagccagagagaggcccaggccgcctgggagacccagcaccagctggccctggtgcagagcgaggtgagaagactggagggcgagctggacaccgccagaagagagagagacgccctgcagctggagatgagcctggtgcaggccagatacgagagccagagaatccagctggagagcgagctggccgtgcagctggagcagagagtgaccgagagactggcccaggcccaggagagcagcctgagacaggccgccagcctgagagagcaccacagaaagcagctgcaggacctgagcggccagcaccagcaggagctggccagccagctggcccagttcaaggtggagatggccgagagagaggagagacagcagcaggtggccgaggactacgagctgagactggccagagagcaggccagagtgtgcgagctgcagagcggcaaccagcagctggaggagcagagagtggagctggtggagagactgcaggccatgctgcaggcccactgggacgaggccaaccagctgctgagcaccaccctgcccccccccaacccccccgccccccccgccggccccagcagccccggcccccaggagcccgagaaggaggagagaagagtgtggaccatgccccccatggccgtggccctgaagcccgtgctgcagcagagcagagaggccagagacgagctgcccggcgccccccccgtgctgtgcagcagcagcagcgacctgagcctgctgctgggccccagcttccagagccagcacagcttccagcccctggagcccaagcccgacctgaccagcagcaccgccggcgccttcagcgccctgggcgccttccaccccgaccacagagccgagagacccttccccgaggaggaccccggccccgacggcgagggcctgctgaagcagggcctgccccccgcccagctggagggcctgaagaacttcctgcaccagctgctggagaccgtgccccagaacaacgagaaccccagcgtggacctgctgccccccaagagcggccccctgaccgtgcccagctgggaggaggccccccaggtgcccagaatccccccccccgtgcacaagaccaaggtgcccctggccatggccagcagcctgttcagagtgcccgagccccccagcagccacagccagggcagcggccccagcagcggcagccccgagagaggcggcgacggcctgaccttccccagacagctgatggaggtgagccagctgctgagactgtaccaggccagaggctggggcgccctgcccgccgaggacctgctgctgtacctgaagagactggagcacagcggcaccgacggcagaggcgacaacgtgcccagaagaaacaccgacagcagactgggcgagatccccagaaaggagatccccagccaggccgtgcccagaagactggccaccgcccccaagaccgagaagccccccgccagaaagaagagcggccaccccgcccccagcagcatgagaagcagaggcggcgtgtggagatag

SEQ ID NO: 230255 - DNA, 2712 bp, Artificial Sequence
  derived and/or modified sequence
atggcaactagcgcagacagccccagcagtccgctcggagcggaagatctgctttcagactcatccgagcctcccggtctgaaccaggtgagttccgaagtgacatcccagttgtacgccagcctcaggctgtcaaggcaggccgaggctacagcacgcgcccaactttacttgccctccacttcaccgcctcatgagggactcgatgggtttgcgcaagaactgagtagaagtttgagcgtgggattggagaagaacctgaaaaaaaaggatggatccaagcatatcttcgaaatggagagtgtaagaggccaactgcaaaccatgctgcagacttctcgcgacactgcttacagagatcccttgatccccggggccggttcagaaaggcgggaagaagattccttcgacagtgattccacggcaaccctgctcaacactaggcctttgcaggatttgagcccttcgtcctcagcacaagcgctcgaggaactgtttcccagatatacctctctgcggcccggacctcctctgaaccctcccgactttcaggggctccgggatgccctcgacagtgaacacacacggcgtaaacattgcgaaagacacatacagtcccttcagacccgggtcctcgagcttcagcagcagctcgcagtggcagtcgcagcggaccgaaaaaaggacacaatgatagagcaactcgacaagacactcgcacgggtcgtggaaggctggaacaggcacgaggctgaacgcacggaagtgctacgcggcctccaagaagagcatcaagctgctgaactgaccagatctaagcaacaggaaacggtaacgagactagaacaaagtctgtccgaggccatggaggccttgaaccgtgagcaggagtcagcgagactccaacagcgagagagagaaacacttgaggaagaacggcaggccctcacccttcgtttagaggcagagcagcagcgatgctgtgtgctgcaggaagagcgtgacgctgcgagggctgggcagctgtccgagcaccgagaactggaaaccttacgggctgcattggaggaagagcggcagacttgggctcagcaggagcaccagctgaaagagcattatcaagccctccaagaagagtcacaggctcaactggaacgcgagaaagaaaaaagccagagagaggcgcaggccgcatgggagactcagcaccagctggccctcgtgcagtctgaggtccgtaggttggaaggagaattggacaccgcccgccgagaaagagatgctttgcagttagagatgtcactggtgcaggcacgttacgagagtcagagaatccagctcgagtctgaactagcagtgcagttggaacagcgggtgacagagcggctggcccaggcacaggaatcatcgctaaggcaagctgcgtccttaagagagcatcaccgaaagcagcttcaggatctgtccgggcagcatcagcaggagctggctagccaactggctcagttcaaagttgaaatggccgagagggaagagcgccagcagcaggttgcagaggattatgaactgcgtctcgcccgggagcaggcgcgagtatgtgagcttcagtcaggtaatcaacagctggaggagcagcgggttgagttggtggagagacttcaggcaatgctccaggcccattgggatgaagccaaccagctgctgagtacaaccctgcctccccccaatccaccagcccctcctgctggcccctccagccctggccctcaagaaccagaaaaggaagagcgacgagtgtggacaatgcctccgatggctgtagctcttaaaccagttctgcagcaatcacgcgaagcccgggacgagctgcctggagctccaccagttctctgctccagctcgagtgacttgtctctgctgctgggcccctcctttcagagccagcattcattccagccgcttgaacctaagcccgacctgacaagcagcaccgctggggccttcagcgctctcggtgcctttcaccccgaccatagagccgaacgcccttttcctgaggaggacccaggaccggatggagagggcctgctgaaacaggggctccctcccgcacaactggaaggcttaaagaatttcttacaccagctgctggagacagtgccccagaataacgagaacccctcagtggacctactgccccccaaatccggcccactcacagtaccatcatgggaagaggccccgcaggtcccccggattcccccaccagtacacaaaactaaggtgcccctagcaatggccagttcattgttccgcgtacccgaaccaccgagctcccacagccaggggtccggcccgagctccggtagcccagagcggggaggggacggacttactttccctaggcagctaatggaagtgtcgcagctcctgaggctgtatcaagcgagagggtggggtgcactcccggcggaggacctactgttgtatctgaagaggttggaacatagtggaaccgatggcagaggggataatgtgccaaggcgtaacaccgattcaaggcttggtgagattccacggaaggagataccgagccaggcagtgccaaggcgcttagccactgcccctaagaccgaaaaacctcctgcaaggaaaaagagtggacatccggccccttcgtctatgcgaagcagagggggtgtatggcgatag

SEQ ID NO: 230256 - DNA, 2712 bp, Artificial Sequence
  derived and/or modified sequence
atggccaccagcgctgacagccccagcagccccctgggcgctgaggacctgctgagtgacagcagcgagcccccaggcctgaaccaggtgagcagcgaggtgaccagccagctgtatgccagcctgcggctgagccggcaggccgaggccacagcccgggcccagctgtacctgcccagcaccagcccccctcatgagggcctggatggctttgcccaggagctgagccgcagcctgtctgtgggcctggagaagaacctgaagaagaaggatggcagcaagcacatctttgagatggagagcgtgcggggccagctgcagaccatgctgcagaccagccgggacacagcctacagagaccccctcatccctggggccggcagcgagcggcgggaggaggacagctttgacagcgacagcacagccaccctgctgaacacccggcccctgcaggacctgagccccagcagcagcgcccaggccctggaggagctgttcccccgctacaccagcctgcggcccggcccccccctgaaccccccagacttccagggcctgagagatgccctggacagcgagcacaccaggaggaagcactgtgagcggcacatccagagcctgcagaccagggtgctggagctgcagcagcagctggccgtggccgtggccgctgacaggaagaaggacaccatgattgagcagctggacaagaccctggcccgggtggtggagggctggaacagacatgaagctgagaggacagaggtgctgcggggcctgcaggaggagcaccaggccgctgagctgaccaggagcaagcagcaggagaccgtgacccggctggagcagagcctgtctgaggccatggaggccctgaaccgggagcaggagagcgcccggctgcagcagcgggagcgggagaccctggaggaggagcggcaggccctgaccctgcggctggaggccgagcagcagcgctgctgcgtgctgcaggaggagagagatgctgcccgggccggccagctgtctgagcaccgggagctggagaccctgcgggccgccctggaggaggagcggcagacctgggcccagcaggagcaccagctgaaggagcactaccaggccctgcaggaggagagccaggcccagctggagcgggagaaggagaagagccagcgggaggcccaggccgcctgggagacccagcaccagctggccctggtgcagagcgaggtgcggcggctggagggggagctggacacagcccggcgggagagagatgccctgcagctggagatgagcctggtgcaggcccgctatgagagccagaggatccagctggagagcgagctggccgtgcagctggagcagagggtgacagagcggctggcccaggcccaggagagcagcctgcggcaggccgccagcctgcgggagcaccacaggaagcagctgcaggacctgagcggccagcaccagcaggagctggccagccagctggcccagttcaaggtggagatggccgagcgggaggagcggcagcagcaggtggctgaagattatgagctgcggctggcccgggagcaggcccgggtgtgtgagctgcagagcggcaaccagcagctggaggagcagagggtggagctggtggagcggctgcaggccatgctgcaggcccactgggatgaggccaaccagctgctgagcaccaccctgcccccacccaaccccccagcccccccagctggccccagcagccctggcccccaggagcctgagaaggaggagaggagagtgtggaccatgccacccatggctgtggccctgaagcctgtgctgcagcagagccgggaggccagagatgagctgcccggggcccctcctgtgctgtgcagcagcagcagtgacctgagcctgctgctgggccccagcttccagagccagcacagcttccagcccctggagcccaagccagacctgaccagcagcacagctggggccttcagcgccctgggcgccttccacccagaccacagagctgagcggcccttcccagaagaagatcctggcccagatggagagggcctgctgaagcagggcctgcccccagcccagctggagggcctgaagaacttcctgcaccagctgctggagaccgtgccccagaacaatgaaaaccccagcgtggacctgctgccccccaagagcggccccctgactgtgcccagctgggaggaggccccccaggtgccccgcatccccccacctgtgcacaagaccaaggtgcccctggccatggccagcagcctcttccgggtgcctgagccccccagcagccacagccagggcagcggccccagcagcggcagccctgagagaggaggagatggcctgaccttcccccggcagctgatggaggtgtcccagctgctgcggctgtaccaggcccggggctggggcgccctgcctgctgaggacctgctgctgtacctgaagaggctggagcacagcggcacagatggccgcggggacaacgtgcccaggaggaacacagacagccggctgggggagatccccaggaaggagatccccagccaggccgtgccccggcggctggccacagcccccaagacagagaagcccccagccaggaagaagagcggccacccagcccccagctccatgaggagcagaggaggagtgtggaggtag

SEQ ID NO: 230257 - DNA, 2712 bp, Artificial Sequence
  derived and/or modified sequence
atggccaccagcgccgacagccccagcagccccctgggcgccgaggaccttcttagtgacagttcagagcctccgggcctcaaccaggtctcttctgaagtcacgtctcaactctacgcgtctctgagattgtcacggcaggccgaagccacggcaagagcccagttgtacctgccctctacgtcccccccccacgagggcttagatgggttcgctcaggagctgtccaggtccctgtcagtgggcctggagaagaacctgaagaagaaagacggctctaagcatatcttcgagatggagtcagtcagaggacagcttcaaaccatgctacaaacaagcagagacacggcttatagagatcccctcatacctggcgctgggagtgagagacgggaagaggactcattcgacagtgacagtaccgccaccctgcttaataccaggccactccaggatctgtcaccgagtagctcagctcaggccttggaggagctatttcctagatacacctccctcagacccggcccacctctgaatccccccgattttcaaggactacgcgatgcgttggattcagaacatacccggcggaagcactgtgaaaggcatatccagagtctccaaacaagggtgctggagctgcagcagcagctggctgttgccgtggcagctgaccggaagaaggataccatgatcgagcagctcgataagacattggcgcgggtggtggagggttggaaccggcacgaggctgaaaggacagaggtattgcgcgggctccaggaggagcaccaggccgctgagcttactcgatcaaaacagcaggaaactgttactagactcgagcagagtctcagcgaagccatggaggcgttgaatcgcgagcaggaatctgctcgtttacaacagcgggagagagagaccctggaggaagaacgtcaggctctgacacttaggctggaagctgaacagcagcggtgttgcgtactacaagaggagagagatgccgcacgggccgggcagctgagcgaacaccgcgaactcgagaccctgcgggccgcactcgaggaagagcggcagacttgggctcagcaagagcaccagctgaaagagcattaccaagccctgcaggaggagtctcaggcacagctcgagcgggagaaggagaaatcccagcgtgaagcccaggccgcatgggagactcagcaccaactcgctttagttcaatcagaggtccggagactggagggtgaactagatactgctcgtagagaaagggatgccctccagctagagatgagcttggtgcaggccaggtacgaatctcagagaatacagctggagtccgagcttgctgtccaactagagcagcgcgtgaccgagaggcttgcacaggcacaggagtcctccctgcgtcaggctgcaagcctgagggagcaccacaggaaacagctgcaggatctgagcgggcagcaccaacaagaactggccagccagctggcccagttcaaggtcgagatggccgaacgtgaggaaaggcagcagcaagtggcagaagattatgagttaagattagcccgggaacaagcgagagtgtgtgagctgcaaagcggtaaccagcagttggaagagcagcgtgttgagctcgtggagcgtctccaagccatgctgcaagcccactgggacgaggctaatcagcttctctcaaccacactgcccccgcccaaccctcccgccccacctgcaggtcctagcagcccaggcccccaggaacccgagaaagaagagaggagagtgtggaccatgccccccatggccgtggcactgaaacccgtcctccagcagtccagagaagcacgcgacgagctgcccggcgctccgcccgttctgtgtagcagttcttctgaccttagtctgcttctcgggccatcctttcagagtcaacactcatttcaaccactggaacccaaaccagatctgactagctctactgcaggggcattttccgcacttggcgccttccaccccgatcatcgggctgagaggccctttccagaggaggaccctgggccggacggagaaggcctcctgaaacaaggacttcctccggcccagctcgaagggcttaagaactttcttcatcagctgctcgaaacagtgccgcagaacaatgaaaatccctcagtggacctgctgccccccaaaagtggtccattaaccgtcccgagttgggaagaggcgccacaggtgccaaggattcccccgccagtgcacaaaacgaaagtgcccttagccatggctagctctctcttccgggtgcccgagccccctagcagtcactcacagggatcaggtccaagctctgggtcccccgaaagaggaggcgacggactcacattccctcggcagctgatggaagtgagtcagctgctgcgcttgtaccaggccagaggctggggtgccttgcccgccgaagatctgcttctgtatctgaagcggttggagcattctggcaccgatggaagaggcgataatgtgccacggcgcaacactgatagtaggttaggtgaaattccacgcaaagaaattccctctcaagccgtacctaggcggctcgctacagctcccaagacagagaaaccccccgcgaggaaaaagtccggccatcctgcaccatctagcatgaggagcaggggaggcgtgtggcggtag

SEQ ID NO: 230258 - DNA, 2712 bp, Artificial Sequence
  derived and/or modified sequence
atggccacgagcgccgattcaccaagtagtcctctgggagcggaagacttactgtccgactctagtgaacccccagggctgaatcaggtctccagcgaggtgacgtcacagctgtacgctagtctaagactgtccagacaagcggaggccaccgcaagagcccagctctatctaccttccacttcgccaccacacgagggactagatggattcgcacaggaactgtcacgtagtctgtccgttggcttagagaagaatctcaagaagaaggacggctccaagcacatttttgaaatggagtccgtgcgtggccaactccagactatgctccaaacatctcgtgacacagcttatagagatccgctgatccccggtgcagggtcagaaaggcgtgaggaggactcctttgatagcgacagcacagctaccctgctcaatacgagaccactgcaggacctgtctccaagttccagcgcacaggcattggaggagctctttccaagatatacgtctctacgccctggcccacccctgaaccctcctgattttcaaggccttcgtgacgcgctggattcagagcatacccgtaggaagcattgtgagcgccacatacaatccctgcagactcgcgtgctggagctccagcaacagctcgctgtggccgttgctgctgaccgcaagaaagatacgatgatcgaacagctcgacaaaacgctggccagagttgtggagggttggaaccgacatgaggccgagagaacagaggttcttcggggtttgcaggaggagcatcaagccgcagagcttacacgctctaagcagcaagagactgtgaccaggctggagcaatccctgagcgaggcaatggaggcactgaatcgggagcaggagtctgcgcgactgcaacagcgcgagcgtgaaaccctggaggaggagcgtcaggcactcacactgcggttggaagcagagcagcagaggtgttgcgttctgcaggaggaacgagacgctgccagggcagggcagctgtcagagcatagagagctggagacattacgagccgcactggaggaagagagacaaacatgggcccagcaggagcaccagctgaaggagcactatcaggctctgcaagaggagagccaggcccagcttgaacgtgagaaggaaaagagtcagcgggaagcccaggccgcatgggagacccagcatcagttggccttagttcagagtgaagttcgcagactggagggtgagttagatacagctcgcagggagagggatgctttgcaactggaaatgtcgcttgtgcaagcacggtacgaaagccagcgtatacaactggagtctgagctcgctgttcagctcgaacagcgggttacagagcggctggctcaggctcaagagtcctctctaagacaggccgctagcctgagggagcaccacaggaaacagctacaagacttgagtggccaacatcagcaggagttggcgagccaactggcacaatttaaagtggagatggcggagagggaagagagacagcagcaggtggcagaagactatgaactccgccttgccagagaacaagctagggtgtgtgagcttcagagcggaaaccagcagctcgaagagcagcgggttgagctcgtggaaaggctgcaggcaatgcttcaggcccattgggatgaggcaaaccagctgcttagtaccaccctgccaccgcctaaccctccagcccctccagccggaccttccagccctggccctcaggagcccgaaaaggaagagcgcagagtgtggacaatgccaccaatggcggtggcacttaagcccgtcctacagcagtcacgtgaagcgagagacgaattaccaggcgcacccccagtcttgtgttcctctagctctgacttaagcctgttacttggcccaagttttcagagtcagcactccttccaaccactggagccgaagcccgatctgacatcttctactgcaggtgctttttcagccctgggggcattccaccctgaccatcgggcagagaggccttttccagaggaagaccctggaccggacggcgaagggttgcttaaacaagggctcccccctgctcagctggagggactcaaaaacttcctccaccaattgctggaaacagtgccacagaataacgagaacccatccgtggacctattgcctcccaagtctgggcctctgacagtcccatcctgggaagaggccccacaggtgccgagaatccctccgcctgttcacaaaactaaggtcccactggccatggcatcttcattattccgagtccctgagcccccaagctcccactcccaaggatctggaccttcttcaggctcccctgagcgcggaggcgatggactcacattccctcggcagcttatggaagtgtcacaattgctaaggctttaccaagcccgtggctggggagctcttcccgcagaagacctgctgctgtacctcaaacgactggaacattctggtaccgatgggagaggcgacaacgtcccccgaagaaatactgactctaggctgggagaaattcctcggaaagagatcccctctcaggcagtaccaaggcggctggccaccgcacccaaaaccgagaaaccaccagccagaaagaagtctggacatcctgcaccttcatccatgcgcagcagaggtggggtatggcgctag

SEQ ID NO: 230259 - DNA, 3705 bp, Artificial Sequence
  derived and/or modified sequence
gtggtctcgcgggcgggtgacgtcatcgaggcgagagaggcggagccgtggacagtgggcgggaggctgccaacggttttgagcgtagggggaggcgtgagagggggatctcaggggaggaggtcaatcgcttgccccccactttggcaaattggggactgaggactggaagggtggagagtaggcggaaccaggtggtcgtcggggcagaggatctcgggctaggcttgagggcggcgtgcttcttagggacgacttagggcgtgactgagggttcacaaggtttcttttggggtggtcgggagggagagattctagggaacaaggaagctcgctatggctttcttgccaggaggggtcgaagggaaagtacaagggagctggagctgaccctgggtagaacgggtgaagggatgggggagcgtgaggttccgccctctcttgagactggaaccaattgagggactagtagggcagggggacagaaattgggctcctagtggatttgggtccgtttccgttgggacgttttgggtgtgagaacttaagagctcagttgaccggggatagcctgtgccggagttgatctgcagcttccagcactcgtagtcgggaagaggagcttcagcagcgctgttgtcccacagtaggtcttctgtccgcacccgctctgcgctgcaccctcttaacgctgttcccaggagctggggaaagggatgcttttgcccactcccatggcccctggaactggtggaaacctttcctctaaccagaaagcctcgatatccttaattcaccaaggatccttggcgtggagtcttcctcccttctcccaagtctttctccgtgaacttttcctcctggactttgctaaagcagaacctcccagctctttgctgtctccggttgtctcttccctgtattcatggcaacatcagctgacagccccagttcacccctcggggcggaggatctcctgagtgattcatcagaaccccctgggctcaaccaagtgtcgtctgaagtgacctcccagctctatgcttctttgcgcctcagccggcaggcggaggccacggcccgagcccagctgtatttaccctccacctccccgcctcatgaagggttagacggcttcgcccaagaattgagtcgaagcttgtcagtcggattggaaaagaacttgaagaaaaaggatggttctaagcatatctttgagatggaaagtgttcggggtcagctccagaccatgctccaaacctcacgtgatacagcctatcgggatcctctcattcctggcgctggctcagagagacgggaagaggactcctttgacagtgatagcacagccaccttgctcaacacccggcccctgcaagacttgtctccatctagctcagcccaagccctggaggagctgtttccccgctacaccagccttcggccagggcctccactcaatcccccagattttcaggggctgagagatgcattggattcagagcatacccgccgcaagcattgtgagcgccatattcagagcctgcagacccgagtgttagagctacagcaacaattagccgtggctgtggctgccgaccgcaagaaagataccatgattgaacaactggacaagaccctggcccgtgtggtggagggctggaaccggcatgaggctgagcggacagaggttctcaggggacttcaagaggaacaccaggcagcagagctcaccagaagcaagcagcaggagacagtaacccgcctggaacaaagcctttctgaggccatggaggccctgaatcgtgagcaggaaagtgccagactgcagcaacgggaaagagagacactggaggaggaaaggcaagctctgactctgaggttggaggcagaacagcagcggtgctgtgtcctgcaggaagagcgggatgcagctcgggctgggcaactgagtgagcatcgagagttggagactcttcgggctgccctagaagaagaacggcagacctgggcccagcaagagcaccagcttaaggaacactaccaggcgctgcaggaggagagccaggctcagctggaaagggagaaggagaagagccagagggaagcccaggccgcctgggagacccagcaccagttggcattggtgcagtctgaggtgcggcggctggaaggagagctggatacagctcggagagagagagatgccctgcagctggaaatgagcttggtgcaggcccggtatgaaagccagcggatccagctggagtcggagctggctgtgcagctggagcagcgggtgacagagcggctggcgcaggctcaggagagcagcctacggcaagcagcctccctcagggaacatcacaggaagcagctgcaggacctgagtggacagcaccagcaggagctggccagtcagctagctcagttcaaggtggaaatggcagaacgagaggaacggcaacagcaggtggctgaggactacgagctcagactggcccgggagcaagcgcgagtgtgcgaactgcagagtgggaaccagcagctggaggagcagcgggtggagctggtggaaagactgcaggccatgctgcaggcccactgggatgaggccaaccagctgctcagcaccactctcccgccgcccaaccctccagctcctcctgctggaccctccagccccgggcctcaggagcccgagaaggaggagaggagggtctggactatgcctcccatggccgtggccctgaagcctgtattgcagcagagccgggaagcaagggacgagctacctggagcgcctcctgttctttgcagttcctcctcagatcttagcctcctgttgggcccctcttttcagagccagcattctttccagcccctggagcccaaaccagacctcacttcatccacagctggggccttctctgcacttggggccttccatcccgatcatagggcagaaaggccattccctgaggaagatcctggacctgacggggagggcctcctaaagcaagggctgccgcctgctcagctggagggcctcaagaattttttgcaccagttgctggagacagtgccccagaacaatgagaacccttctgtcgacctgttgccccctaagtctggtcctctgactgtcccatcttgggaggaagcccctcaagtgccacgtattccaccgcctgtccacaaaaccaaagttcccttagccatggcatccagtcttttccgggtccctgagcctccctcctcccattcacaaggcagtggtcccagcagtggttccccagagagaggtggagatgggcttacattcccaaggcagctgatggaggtgtctcaactgttgcgactctaccaggctcggggctggggggctctgcctgctgaggatctcctgctctacctgaagaggctggaacacagcgggactgatggccgaggggataatgtccccagaaggaacacagactcccgcttgggtgagatcccccggaaagagattccctcccaggctgtccctcgccgccttgctacagcccccaagactgaaaaacctcccgcacggaagaaaagtgggcaccctgccccgagtagcatgaggagccgggggggagtctggagatgagcccccctaccctctctcctctttgttctctcattgttgttattttaataaatgctcattagtctgta

SEQ ID NO: 230260 - protein, 446 aa, Artificial Sequence
  derived and/or modified sequence
MRAARRGLHCAGAERPRRRGRLWDSSGVPQRQKRPGPWRTQTQEQMSRDVCIHTWPCTYYLEPKRRWVTGQLSLTSLSLRFMTDSTGEILVSFPLSSIVEIKKEASHFIFSSITILEKGHAKHWFSSLRPSRNVVFSIIEHFWRELLLSQPGAVADASVPRTRGEELTGLMAGSQKRLEDTARVLHHQGQQLDSVMRGLDKMESDLEVADRLLTELESPAWWPFSSKLWKTPPETKPREDVSMTSCEPFGKEGILIKIPAVISHRTESHVKPGRLTVLVSGLEIHDSSSLLMHRFEREDVDDIKVHSPYEISIRQRFIGKPDMAYRLISAKMPEVIPILEVQFSKKMELLEDALVLRSARTSSPAEKSCSVWHAASGLMGRTLHREPPAGDQEGTALHLQTSLPALSEADTQELTQGFRPMSLSTQTVLVMLCSESAGALWRQRLS

SEQ ID NO: 230261 - protein, 464 aa, Artificial Sequence
  derived and/or modified sequence
MRAARRGLHCAGAERPRRRGRLWDSSGVPQRQKRPGPWRTQTQEQMSRDVCIHTWPCTYYLEPKRRWVTGQLSLTSLSLRFMTDSTGEILVSFPLSSIVEIKKEASHFIFSSITILEKGHAKHWFSSLRPSRNVVFSIIEHFWRELLLSQPGAVADASVPRTRGEELTGLMAGSQKRLEDTARVLHHQGQQLDSVMRGLDKMESDLEVADRLLTELESPAWWPFSSKLWKTPPETKPREDVSMTSCEPFGKEGILIKIPAVISHRTESHVKPGRLTVLVSGLEIHDSSSLLMHRFEREDVDDIKVHSPYEISIRQRFIGKPDMAYRLISAKMPEVIPILEVQFSKKMELLEDALVLRSARTSSPAEKSCSVWHAASGLMGRTLHREPPAGDQEGTALHLQTSLPALSEADTQELTQILRRMKGLALEAESELERQDEALDGVAAAVDRATLTIDKHNRRMKRLT

SEQ ID NO: 230262 - protein, 438 aa, Artificial Sequence
  derived and/or modified sequence
  misc_feature (1)..(1): Xaa can be any naturally occurring amino acid
XCAGAERPRRRGRLWDSSGVPQRQKRPGPWRTQTQEQMSRDVCIHTWPCTYYLEPKRRWVTGQLSLTSLSLRFMTDSTGEILVSFPLSSIVEIKKEASHFIFSSITILEKGHAKHWFSSLRPSRNVVFSIIEHFWRELLLSQPGAVADASVPRTRGEELTGLMAGSQKRLEDTARVLHHQGQQLDSVMRGLDKMESDLEVADRLLTELESPAWWPFSSKLWKTPPETKPREDVSMTSCEPFGKEGILIKIPAVISHRTESHVKPGRLTVLVSGLEIHDSSSLLMHRFEREDVDDIKVHSPYEISIRQRFIGKPDMAYRLISAKMPEVIPILEVQFSKKMELLEDALVLRSARTSSPAEKSCSVWHAASGLMGRTLHREPPAGDQEGTALHLQTSLPALSEADTQELTQGFRPMSLSTQTVLVMLCSESAGALWRQRLS

SEQ ID NO: 230263 - DNA, 1395 bp, Artificial Sequence
  derived and/or modified sequence
atgagagccgccagaagaggcctgcactgcgccggcgccgagagacccagaagaagaggcagactgtgggacagcagcggcgtgccccagagacagaagagacccggcccctggagaacccagacccaggagcagatgagcagagacgtgtgcatccacacctggccctgcacctactacctggagcccaagagaagatgggtgaccggccagctgagcctgaccagcctgagcctgagattcatgaccgacagcaccggcgagatcctggtgagcttccccctgagcagcatcgtggagatcaagaaggaggccagccacttcatcttcagcagcatcaccatcctggagaagggccacgccaagcactggttcagcagcctgagacccagcagaaacgtggtgttcagcatcatcgagcacttctggagagagctgctgctgagccagcccggcgccgtggccgacgccagcgtgcccagaaccagaggcgaggagctgaccggcctgatggccggcagccagaagagactggaggacaccgccagagtgctgcaccaccagggccagcagctggacagcgtgatgagaggcctggacaagatggagagcgacctggaggtggccgacagactgctgaccgagctggagagccccgcctggtggcccttcagcagcaagctgtggaagaccccccccgagaccaagcccagagaggacgtgagcatgaccagctgcgagcccttcggcaaggagggcatcctgatcaagatccccgccgtgatcagccacagaaccgagagccacgtgaagcccggcagactgaccgtgctggtgagcggcctggagatccacgacagcagcagcctgctgatgcacagattcgagagagaggacgtggacgacatcaaggtgcacagcccctacgagatcagcatcagacagagattcatcggcaagcccgacatggcctacagactgatcagcgccaagatgcccgaggtgatccccatcctggaggtgcagttcagcaagaagatggagctgctggaggacgccctggtgctgagaagcgccagaaccagcagccccgccgagaagagctgcagcgtgtggcacgccgccagcggcctgatgggcagaaccctgcacagagagccccccgccggcgaccaggagggcaccgccctgcacctgcagaccagcctgcccgccctgagcgaggccgacacccaggagctgacccagatcctgagaagaatgaagggcctggccctggaggccgagagcgagctggagagacaggacgaggccctggacggcgtggccgccgccgtggacagagccaccctgaccatcgacaagcacaacagaagaatgaagagactgacctag

SEQ ID NO: 230264 - DNA, 1317 bp, Artificial Sequence
  derived and/or modified sequence
tgatgcgccggcgccgagagacccagaagaagaggcagactgtgggacagcagcggcgtgccccagagacagaagagacccggcccctggagaacccagacccaggagcagatgagcagagacgtgtgcatccacacctggccctgcacctactacctggagcccaagagaagatgggtgaccggccagctgagcctgaccagcctgagcctgagattcatgaccgacagcaccggcgagatcctggtgagcttccccctgagcagcatcgtggagatcaagaaggaggccagccacttcatcttcagcagcatcaccatcctggagaagggccacgccaagcactggttcagcagcctgagacccagcagaaacgtggtgttcagcatcatcgagcacttctggagagagctgctgctgagccagcccggcgccgtggccgacgccagcgtgcccagaaccagaggcgaggagctgaccggcctgatggccggcagccagaagagactggaggacaccgccagagtgctgcaccaccagggccagcagctggacagcgtgatgagaggcctggacaagatggagagcgacctggaggtggccgacagactgctgaccgagctggagagccccgcctggtggcccttcagcagcaagctgtggaagaccccccccgagaccaagcccagagaggacgtgagcatgaccagctgcgagcccttcggcaaggagggcatcctgatcaagatccccgccgtgatcagccacagaaccgagagccacgtgaagcccggcagactgaccgtgctggtgagcggcctggagatccacgacagcagcagcctgctgatgcacagattcgagagagaggacgtggacgacatcaaggtgcacagcccctacgagatcagcatcagacagagattcatcggcaagcccgacatggcctacagactgatcagcgccaagatgcccgaggtgatccccatcctggaggtgcagttcagcaagaagatggagctgctggaggacgccctggtgctgagaagcgccagaaccagcagccccgccgagaagagctgcagcgtgtggcacgccgccagcggcctgatgggcagaaccctgcacagagagccccccgccggcgaccaggagggcaccgccctgcacctgcagaccagcctgcccgccctgagcgaggccgacacccaggagctgacccagggcttcagacccatgagcctgagcacccagaccgtgctggtgatgctgtgcagcgagagcgccggcgccctgtggagacagagactgagctag

SEQ ID NO: 230265 - DNA, 1341 bp, Artificial Sequence
  derived and/or modified sequence
atgagggcggcacgtcggggattgcattgcgctggtgccgagagacctcggagacgaggacggctttgggatagctcaggggttccccaacggcagaagcgaccaggtccatggaggacacagacacaggagcagatgagcagggacgtgtgtatacatacatggccatgcacttactaccttgagcccaagagaaggtgggtcacaggacagttgtccctgacctctctttccctgcggtttatgaccgacagcacaggcgaaattttagtgtcatttcccctctcatccattgtcgaaatcaagaaagaggctagtcattttattttcagctccatcaccatcctcgaaaaaggccatgccaagcattggttctcttctctcaggcctagcaggaacgttgtgttctcaatcattgagcatttctggcgggaactgctgctgtctcaacccggggcagtggccgatgcgagtgtgccccggaccagaggagaagaactgacaggtctgatggcaggctcacagaagaggctcgaggatacggcacgggtgctgcaccatcaaggacagcaacttgactccgtcatgcggggcctcgataaaatggaatccgatcttgaagtcgctgatcgcctcctgactgagctcgaatcccctgcttggtggcccttctccagtaaactttggaaaaccccaccagaaactaagcctcgtgaggacgtgtctatgaccagttgtgagccattcgggaaggaggggatactcattaaaataccggctgttattagccacagaacggagagccacgtcaagccagggcgccttaccgttctcgtttcagggctggaaattcacgactcaagctctctcctgatgcatcgatttgaacgcgaagacgttgacgacatcaaggtgcactcaccatacgaaatcagtattcgacagaggtttatcggaaaacccgatatggcataccgtcttatatctgccaagatgccagaagttatccccatcctagaagtccaattcagcaaaaagatggagctactagaggatgccttggtgcttagatctgctaggacctcatccccagctgagaaatcctgctccgtgtggcatgctgcctcagggcttatggggcggacattacatagggaacctcccgctggggaccaagaaggcactgcacttcatttacagacatcgctccccgcgctttccgaggcggatactcaggagctgacacaggggttcagaccaatgtcgctgagcacgcagactgtccttgttatgctgtgctccgaatctgccggcgccttatggagacagaggctatcctag

SEQ ID NO: 230266 - DNA, 1395 bp, Artificial Sequence
  derived and/or modified sequence
atgcgagcggccaggagaggcttacactgtgcaggtgctgaacgaccaaggagaagggggcgcctgtgggacagctccggcgtgccccagcgccaaaagcgcccaggcccgtggcgaacacagacccaggagcagatgtcccgggatgtatgcatccatacttggccctgcacttattacctggagccaaaacggcggtgggtaaccggccagctctcactgacctctttatcactcaggtttatgaccgactcaaccggggaaattctggtgtccttccccttaagttccatcgtggaaatcaagaaagaggcctcgcactttatattcagctccataaccatactagaaaagggacatgcaaagcattggttttcctccctgcgaccaagccgcaacgttgttttctctattatcgagcatttttggagggaacttctcctgtcccagccaggagctgttgctgacgcaagcgtaccacggacgcggggtgaggaactgacaggccttatggccgggagtcaaaagagacttgaggatactgccagggttcttcaccaccagggccagcagctagacagcgtcatgcggggactcgacaaaatggagtcagacctggaagtagcagaccgactgctgaccgagctggaatcgcccgcgtggtggcctttttcctctaaactttggaaaactccaccagagactaaacccagggaggacgtttccatgacgtcatgtgagccttttggaaaagaaggcatcctcatcaagattcccgcagtgatttcacacagaaccgaatctcatgtcaagccggggagactaacagtcctggtatctggccttgagatccacgactccagcagcctgttaatgcacagatttgaaagagaagatgttgatgacatcaaggtacattccccatatgagatatcaatccgccaacggttcattggcaagccagatatggcctacaggctgatcagcgcaaagatgccggaggttattcccatcctagaggttcagttcagcaaaaagatggagcttttggaagatgctttggttcttaggagcgccaggacgagttccccagcagagaagtcttgcagcgtatggcatgcagcttccggcctgatgggtcggactctccaccgggaaccaccggccggtgaccaggaagggacagctctgcacctacagactagtctgcctgccttatctgaggcagatacgcaggagctgacccaaatcctccgacggatgaaaggtctggctctggaggccgaatcagaactggagcgacaggacgaagcgctggatggcgtggcggccgccgtggaccgggcgaccctgacaattgataagcacaaccgtcgtatgaaacgcctgacttag

SEQ ID NO: 230267 - DNA, 2362 bp, Artificial Sequence
  derived and/or modified sequence
gcggccgccgccccaccgtaggtccgtagcaggtggtcgaagtcgggcctccccgcgggcgtcacccagcgccgccggctgccccagccctgcgtgaaggcgctggaaaacacgcagggcaggttgggcagcaagaagccccgcacaaagtcggcgtaggagaaggcgcccggctccgagacgaaggctacccggcccggagcctggccgacgccggggacatcgacccccaggcctcggaagtggctgtcggcgagggcgcgcgtctcgcggtccatccagctcagcacgggtcgaaggaccctcctcctcacttccgccggagcggaaacggtgaggaccagcctcggaaccagaagacgcagggcgccgcgtttctgccccgccagcgcctggggctccgggcctgcacgcatgcgcgcggctcgccgcggtcttcactgcgcaggcgccgagcggccgaggcgccgcggtcggctctgggactcgtctggcgtccctcagaggcagaagaggcctggaccttggcgcacacagacccaggaacagatgagcagggatgtctgcatccacacctggccgtgcacctactacctggagcccaagaggcgatgggttactggacagctgtccttaacatcgctgtcgctcaggttcatgactgacagcactggagagattctggtcagcttccccctctccagcatagttgagatcaagaaggaggcttcacattttatcttcagctccatcaccatcctggagaagggccatgccaagcactggttcagctccctgcggccaagtcgaaatgtggtcttcagcatcatcgagcatttctggagggagctgctgctgtctcagcctggagccgtggcagacgcatctgtcccaaggacccggggcgaggagctgacgggactcatggctggatcccagaaacgcctggaggacacggcgagggtcctgcaccaccagggccagcagctggacagcgtcatgagaggcctggacaagatggagtcagacctggaggtggcggacagattgctgacagaactggaatctcctgcttggtggccctttagctccaagctttggaagacaccaccggaaacaaagcccagggaagatgtctccatgaccagttgtgaaccctttgggaaagaagggatactgataaaaattcctgctgttatttcccacagaacagagtctcacgttaaaccagggaggctcaccgtccttgtgtctgggttggaaatacatgactccagttctttgctcatgcacaggtttgaaagagaagacgtggacgacatcaaggtccactcaccttacgaaattagcatccgccagcggtttattggaaagccagacatggcctatcgtttgatatctgccaagatgccagaggttatccccattttagaagtgcagttcagcaagaagatggagctgttagaagatgcattggtgctcagaagcgcaagaacctcttcccccgcagagaagagctgctcagtctggcatgcagcatctgggctgatgggccgtaccctgcaccgtgagccacccgcaggagaccaggagggcacagcactgcacctgcagacaagcctgccagccctttctgaggcagatacccaggaactaacccagatcctgaggaggatgaaggggctggccctggaggccgagagtgagctggagagacaagacgaagccctggatggcgttgcagcagctgtggacagggcaaccttgaccatcgacaagcacaacaggcggatgaagaggctgacctaggggcagaacgtccctgcattcctgtctcaccctgcacatcccgctgagatggagggctgggcggcagtgccagggctgcagaggcctgtggccctccggagtggtcttcctctggatggggctgctactgtggggctgcttctgcaccaggggcctccccaggtgtgcaccatgcctgcctcccacttggctgtccctgctgctgggcaggacccggccacatgttctgcggatgctgcagaagtgtggaccatggcgggaccccaaggacacttggcacaggcctggaagaggccgccctcgtcttgtctcggctccctttcatggacagactggccttcttagctgtactataaatttgtgagtgaagttagagcccagctcacttagccagctcactttgagggcatcctataaacacccaactgttcttttatcgtctcggttttagccaaaagtgaaattagcatgactgcatctttcaaacaaaaatattgatttctgcttttagggccccgtttccatccagaaataaagggaaatgctggcttca

SEQ ID NO: 230268 - DNA, 1317 bp, Artificial Sequence
  derived and/or modified sequence
tgatgtgccggagctgaaagaccaagaagacgaggacgactgtgggattcctccggcgtaccccaaagacagaaaagacctggaccttggcgtacccaaacgcaggaacagatgtctcgtgatgtttgtattcatacttggccctgcacatactatctggaacctaagcgtcgctgggtgacaggacagctgtcactaaccagtttgagccttcggttcatgactgactccaccggggagattttagtgagtttccctctcagttctattgtcgaaattaaaaaagaggcatcccatttcatattcagctccatcaccattttagagaaagggcatgccaagcactggttctcttccctgcgcccatcccgaaatgtcgttttctctatcatagagcatttttggcgagaattactgctctctcaacccggggccgtggcagacgcttctgtaccacgcactagaggcgaggaacttacaggcctcatggctggcagccaaaagaggttggaggatacggcgcgagttctgcaccatcagggccaacagctggatagtgttatgcggggccttgataagatggaaagcgatttggaagtcgccgataggttgttgacagagctcgagtcacctgcctggtggccgttctcatccaaattgtggaagacccctccagaaactaagccacgggaggacgtcagcatgacgagctgtgaaccgtttggaaaagaaggaatcctcattaagatccctgctgtcatatctcaccgcacagagtctcacgtcaaaccaggcaggctcactgttctcgtgtccggactggagattcatgactctagcagtctcctcatgcacagattcgagcgggaagatgttgatgatatcaaggtgcacagtccatatgagatatctattcgccaacggtttatcgggaagcccgatatggcctatcgcttgatcagtgctaagatgcccgaggttattcccattctggaggtgcagttcagcaagaagatggaactgctggaggatgcactcgtgctcagaagcgctcgaacctcatcgcccgcagaaaaatcctgcagtgtgtggcatgccgcaagcggcctaatgggaaggacattacatagagaacctccagccggcgaccaggagggcaccgctctccaccttcagacttctctgcccgccctgtccgaagccgatacacaggaactgactcaaggcttcaggccaatgtccctcagtacccaaactgttctcgtcatgctgtgctccgaatccgccggagctctgtggaggcagagactgtcatag

SEQ ID NO: 230269 - DNA, 1341 bp, Artificial Sequence
  derived and/or modified sequence
atgagagctgcccggcggggcctgcactgtgccggggctgagcggccccggcggcggggccgcctgtgggacagcagcggcgtgccccagaggcagaagaggcctggcccctggaggacccagacccaggagcagatgagcagagatgtgtgcatccacacctggccctgcacctactacctggagcccaagaggcgctgggtgacaggccagctgagcctgaccagcctgagcctgcgcttcatgacagacagcactggagagatcctggtgtccttccccctgagcagcatcgtggagatcaagaaggaggccagccacttcatcttcagcagcatcaccatcctggagaagggccacgccaagcactggttcagcagcctgcggcccagcagaaatgtggtgttcagcatcatcgagcacttctggagggagctgctgctgagccagcctggagctgtggctgatgcctctgtgcccaggaccagaggagaggagctgaccggcctgatggccggcagccagaagaggctggaggacacagcccgggtgctgcaccaccagggccagcagctggacagcgtgatgaggggcctggacaagatggagagtgacctggaggtggccgaccggctgctgacagagctggagagccctgcctggtggcccttcagcagcaagctgtggaagaccccacctgagaccaagcccagagaagatgtgtccatgaccagctgtgagccctttgggaaggagggcatcctgatcaagatcccagctgtgatcagccacaggacagagagccacgtgaagccaggccgcctgactgtgctggtgtctggcctggagatccatgacagcagcagcctgctgatgcacagatttgagcgggaggatgtggatgacatcaaggtgcacagcccctatgagatcagcatccggcagcgcttcatcggcaagccagacatggcctaccgcctcatcagcgccaagatgcctgaggtgatccccatcctggaggtgcagttcagcaagaagatggagctgctggaggatgccctggtgctgcggagcgcccggaccagcagccctgctgagaagagctgcagcgtgtggcacgccgccagcggcctgatgggccgcaccctgcaccgggagcccccagctggggaccaggagggcacagccctgcacctgcagaccagcctgcctgccctgtctgaggccgacacccaggagctgacccagggcttccggcccatgagcctgagcacccagacagtgctggtgatgctgtgcagcgagagcgctggggccctgtggaggcagaggctgtcctag

SEQ ID NO: 230270 - DNA, 1395 bp, Artificial Sequence
  derived and/or modified sequence
atgagagctgcccggcggggcctgcactgtgccggggctgagcggccccggcggcggggccgcctgtgggacagcagcggcgtgccccagaggcagaagaggcctggcccctggaggacccagacccaggagcagatgagcagagatgtgtgcatccacacctggccctgcacctactacctggagcccaagaggcgctgggtgacaggccagctgagcctgaccagcctgagcctgcgcttcatgacagacagcactggagagatcctggtgtccttccccctgagcagcatcgtggagatcaagaaggaggccagccacttcatcttcagcagcatcaccatcctggagaagggccacgccaagcactggttcagcagcctgcggcccagcagaaatgtggtgttcagcatcatcgagcacttctggagggagctgctgctgagccagcctggagctgtggctgatgcctctgtgcccaggaccagaggagaggagctgaccggcctgatggccggcagccagaagaggctggaggacacagcccgggtgctgcaccaccagggccagcagctggacagcgtgatgaggggcctggacaagatggagagtgacctggaggtggccgaccggctgctgacagagctggagagccctgcctggtggcccttcagcagcaagctgtggaagaccccacctgagaccaagcccagagaagatgtgtccatgaccagctgtgagccctttgggaaggagggcatcctgatcaagatcccagctgtgatcagccacaggacagagagccacgtgaagccaggccgcctgactgtgctggtgtctggcctggagatccatgacagcagcagcctgctgatgcacagatttgagcgggaggatgtggatgacatcaaggtgcacagcccctatgagatcagcatccggcagcgcttcatcggcaagccagacatggcctaccgcctcatcagcgccaagatgcctgaggtgatccccatcctggaggtgcagttcagcaagaagatggagctgctggaggatgccctggtgctgcggagcgcccggaccagcagccctgctgagaagagctgcagcgtgtggcacgccgccagcggcctgatgggccgcaccctgcaccgggagcccccagctggggaccaggagggcacagccctgcacctgcagaccagcctgcctgccctgtctgaggccgacacccaggagctgacccagatcctgcggaggatgaagggcctggccctggaggccgagagcgagctggagcggcaggatgaggccctggatggagtggccgctgctgtggaccgggccaccctgaccatcgacaagcacaacagaaggatgaagaggctgacctag

SEQ ID NO: 230271 - DNA, 1317 bp, Artificial Sequence
  derived and/or modified sequence
tgatgtgccggggctgagcggccccggcggcggggccgcctgtgggacagcagcggcgtgccccagaggcagaagaggcctggcccctggaggacccagacccaggagcagatgagcagagatgtgtgcatccacacctggccctgcacctactacctggagcccaagaggcgctgggtgacaggccagctgagcctgaccagcctgagcctgcgcttcatgacagacagcactggagagatcctggtgtccttccccctgagcagcatcgtggagatcaagaaggaggccagccacttcatcttcagcagcatcaccatcctggagaagggccacgccaagcactggttcagcagcctgcggcccagcagaaatgtggtgttcagcatcatcgagcacttctggagggagctgctgctgagccagcctggagctgtggctgatgcctctgtgcccaggaccagaggagaggagctgaccggcctgatggccggcagccagaagaggctggaggacacagcccgggtgctgcaccaccagggccagcagctggacagcgtgatgaggggcctggacaagatggagagtgacctggaggtggccgaccggctgctgacagagctggagagccctgcctggtggcccttcagcagcaagctgtggaagaccccacctgagaccaagcccagagaagatgtgtccatgaccagctgtgagccctttgggaaggagggcatcctgatcaagatcccagctgtgatcagccacaggacagagagccacgtgaagccaggccgcctgactgtgctggtgtctggcctggagatccatgacagcagcagcctgctgatgcacagatttgagcgggaggatgtggatgacatcaaggtgcacagcccctatgagatcagcatccggcagcgcttcatcggcaagccagacatggcctaccgcctcatcagcgccaagatgcctgaggtgatccccatcctggaggtgcagttcagcaagaagatggagctgctggaggatgccctggtgctgcggagcgcccggaccagcagccctgctgagaagagctgcagcgtgtggcacgccgccagcggcctgatgggccgcaccctgcaccgggagcccccagctggggaccaggagggcacagccctgcacctgcagaccagcctgcctgccctgtctgaggccgacacccaggagctgacccagggcttccggcccatgagcctgagcacccagacagtgctggtgatgctgtgcagcgagagcgctggggccctgtggaggcagaggctgtcctag

SEQ ID NO: 230272 - DNA, 1341 bp, Artificial Sequence
  derived and/or modified sequence
atgcgggccgcccggcggggcctgcactgcgccggcgccgagcggccccgcagaagaggtcgtctgtgggacagtagtggagtgccccagagacagaaacggccaggcccatggagaacccagactcaggagcagatgagccgagacgtatgcatccacacgtggccatgcacttactatctcgaacctaaacgtcggtgggtgacaggacagctatcattgactagcctcagtttgagattcatgaccgactctacaggggagattttagtgtcatttccactgtcatccattgtggagattaagaaagaggcctcccatttcatcttctccagcataactatcctggaaaagggacacgccaagcattggttttcctcactgagaccgtctaggaacgtggtgtttagtattatcgagcacttttggcgagagttgctgctctcacagcctggagccgtagccgatgcaagcgtcccacggacacggggagaggagctgactggccttatggccggctctcagaagcggctggaggacacggcacgggtgctccatcaccaggggcagcagctggatagtgtgatgagaggcctggataagatggagtccgatcttgaggtagcagaccggttgctgaccgaacttgagagccccgcatggtggccctttagtagtaaactctggaaaacccctcccgagactaagccacgcgaggacgtgtccatgacgtcttgtgagccctttggaaaagagggcatcctgattaaaattccagctgtgataagtcaccggacggagtctcatgtgaagccgggtcggctgaccgtgttagtgtccggccttgaaatccatgacagttcgagtctgctgatgcatcgcttcgaaagggaagacgttgatgatatcaaggtgcactctccttacgagatatcaatacgacaaaggttcattggcaaaccggatatggcatatcgactcatctccgccaagatgcctgaggttattcctatacttgaagtgcagttttccaagaagatggaactgctggaagacgccctcgttttaagatctgccaggacttcatcgccagcagagaaatcctgctcagtgtggcatgctgctagtggcctgatgggtagaaccttacatcgggagccgcctgctggcgatcaggaaggcactgctctgcacctccagacctccctccccgctttgtcagaagcagatacacaggagcttactcaggggttccgccccatgtcgctgtccacacagacagttctagtcatgctatgtagcgaaagcgccggcgccctatggcggcagcggttatcctag

SEQ ID NO: 230273 - DNA, 1395 bp, Artificial Sequence
  derived and/or modified sequence
atgcgggccgcccggcggggcctgcactgcgccggcgccgagcggccccgcaggcgcggccggttgtgggacagtagcggcgtcccccagcgacagaagaggcctggcccatggcggacccagactcaggagcagatgtcccgcgatgtttgcatccatacttggccctgcacatactacttggagccgaaacgccggtgggtgaccggccaactcagcttgacttcgctgagcctcagattcatgaccgacagcaccggcgagattctagtttcatttcctcttagctcaatagttgagatcaagaaagaggctagccatttcatcttcagcagtatcacaattctggagaagggacacgcaaagcattggttttcaagcctgagaccatcaagaaacgttgtatttagtataattgagcatttttggcgggaacttctgcttagtcagccaggggccgtagcagacgccagcgtccctcgcacacggggagaggaactcacgggactcatggccggcagccaaaaacgcttggaagacaccgcacgggttctgcatcaccaaggccaacaactggactccgtgatgcggggtctcgataaaatggaatcagaccttgaagtcgctgatcgcctgctcaccgaactcgagtcacccgcatggtggccgtttagtagcaaactgtggaaaactcctccagaaaccaagccgcgagaagatgttagcatgaccagttgtgagccctttggaaaggagggcatcttaatcaaaatacccgcagttatatctcacagaaccgagtcccacgtgaaaccaggaaggttaactgtgctggtatcgggcctagagattcacgactcatcctcactcctcatgcatcgatttgagcgggaggatgtggatgacattaaggtgcactcaccatacgaaatcagcatcaggcaaagattcattggcaagccagacatggcttaccgactgatctcagctaaaatgcccgaagtcatccctatcctcgaagtccagttcagcaagaaaatggaattgctggaagacgctctggtgttgaggagcgcccgaactagttcgcctgcggagaaaagctgttcagtgtggcacgccgcatccggattaatgggtaggacccttcacagggagcctcccgccggggatcaggagggtactgcactccatcttcagacctccctgccagcactcagtgaggcggatactcaggaactgacacaaattctgcgtaggatgaaaggcctggccctcgaggcagaatccgagttagagaggcaagatgaggctctcgacggagtcgccgccgccgtagatcgcgccacattgaccattgacaaacacaataggcgtatgaagcggctcacctag

SEQ ID NO: 230274 - DNA, 1317 bp, Artificial Sequence
  derived and/or modified sequence
tgatgcgccggcgccgagcggccccggcggcggggccggctgtgggattccagtggcgtgcctcagcgtcagaaaaggcctggaccctggaggactcagacgcaagagcaaatgtcaagagacgtatgcattcatacctggccctgcacatactaccttgagcctaaacgccgctgggtgacaggacaactcagtctcacctccctatcactcaggtttatgacagatagtacaggcgagatcctggtctcctttcccctgagcagcattgttgaaataaaaaaggaagcaagccactttattttttcatccattactattttggagaagggacacgccaaacattggttctcatcgttacgaccatcaagaaacgtcgtattttcaattatcgagcacttctggcgggaactcctcctgtcacagccaggcgctgtggccgacgcatcggtgcctagaacgcgtggtgaggagctcaccgggctgatggcgggatctcagaagcggttggaggataccgccagggtcctgcaccaccagggacaacaattggatagcgtgatgcggggcctggacaagatggagagcgacctggaggtggccgacagactcctgacggagctggagagcccggcatggtggccattcagctcgaaactctggaagacaccaccggagacaaagcctagagaagatgtgtccatgaccagctgcgagccttttggaaaagagggtatccttatcaagatccctgcggtaattagtcaccgtacagaatcgcacgtgaagcctggcaggctgactgtcctggtctctgggctggagatacacgacagctcttcgcttttaatgcacagatttgaaagagaggatgtggacgacattaaagtgcactccccgtacgagatcagtattcggcagaggttcatcggcaaacccgacatggcctataggctgattagcgcaaaaatgccggaggtaattccaattctagaagtacagttttctaaaaagatggaactgttggaggatgcgttggttctaagaagtgcgcgaaccagcagtcctgctgagaagagttgctcagtttggcatgctgcgtccggactgatgggaagaaccctgcacagagaaccacccgctggggaccaagagggcaccgcactgcatctgcagacatctctacccgccctgagcgaagcggacacgcaggaattaacacagggcttccgacctatgtcactcagcacacagacagtccttgtaatgctgtgcagcgagtcggccggtgccctctggcggcagcggttgtcctag

SEQ ID NO: 230275 - DNA, 1341 bp, Artificial Sequence
  derived and/or modified sequence
atgagagcggctaggagaggactccattgcgcgggagccgagaggcccaggaggcggggaaggctgtgggactcgagcggagttcctcagcgccagaagagacccggtccatggcgcactcagactcaagaacagatgtccagagacgtatgcatacatacatggccctgtacttattatcttgagcccaagagacgttgggtaacgggtcagctgtccctgacttccctatcgttaaggttcatgacggactctacaggcgagattttagtgtctttcccgctgtcttccattgttgagattaagaaggaggcttctcacttcatcttctcctccatcaccatcttagaaaagggtcatgccaaacattggttttcctcactacggccaagccgcaatgttgtcttcagcatcatcgagcacttctggcgcgaactgcttctctctcagccaggggcagttgccgatgcgtctgtgccccgtaccagaggcgaagaactcacaggacttatggcaggaagccagaaacgacttgaggataccgccagagtcctgcaccatcagggacagcaattggattcggtcatgcggggactggataagatggaatccgacctggaagttgccgaccgcctgctcacagagctcgagagccccgcttggtggccttttagctctaaactctggaagacaccccctgaaaccaagccgcgagaagatgtgagcatgacttcatgcgaaccttttggcaaggaggggatccttataaagattccagccgttatctcccatcgaactgagagccacgttaaacccggtcgcctgactgtgcttgtgagcggtttggagatccacgattctagcagcttactcatgcaccgatttgagcgtgaggatgttgacgatatcaaggtccactccccctacgagattagcatcagacagagattcattggcaagccagatatggcctacagactgatttcagcaaagatgccagaggtgatacctatactagaagtccagttcagtaagaaaatggagttgttagaggatgcactggtgctacggtctgccaggacatcgtcaccggctgagaaatcatgcagtgtgtggcacgcagcgtctgggctaatggggaggacactacatcgggagcctcccgctggtgatcaggaaggtaccgcgctccatctgcagaccagtctcccagccctgtccgaggctgacacgcaagaactgacccagggtttcagaccaatgagtcttagcactcagacggttctggtaatgctgtgtagcgaatcggccggagccttatggcgacagagactgagctag

SEQ ID NO: 230276 - DNA, 1395 bp, Artificial Sequence
  derived and/or modified sequence
atgagagccgcaaggcgcggtctacattgcgcgggagcagaacgccctcgcagaagaggtcggctgtgggactcttccggggtgccacagagacagaaaagacctggcccttggagaacccagacccaagaacagatgagtcgtgacgtgtgtatccacacatggccctgcacctactaccttgagcctaagcgacgctgggtgaccggccagctgagcctcaccagcctgagtctgaggttcatgaccgacagcaccggcgaaattctcgtctctttccccttgtcttctatcgtcgagatcaagaaggaagcgagtcactttattttttcctctatcactattttagagaagggacatgccaagcactggttttcctctcttcgcccaagccgcaacgtcgtgtttagcatcattgaacatttttggcgggagctcctcctgtcgcaacccggagccgtcgccgatgcatccgtgcctcgaacccggggagaggagttaactgggctgatggccggatcacagaagcggctggaggatactgctagggtcttacatcaccagggtcagcagcttgattcagtaatgcgtggtcttgacaagatggagtccgatctcgaagtcgcggaccgcctcctgacggagctcgaatctcccgcttggtggcccttcagctcgaagttgtggaagacccccccagagacaaagccacgtgaggacgtcagcatgacatcctgtgaaccctttggcaaggaagggatcttgattaaaattcctgccgttatctcccatcgcactgagtcacatgtaaagcctgggagactgaccgtgctggtgagtggcctcgaaattcacgactcatcgagcctgctgatgcatcgcttcgaacgggaagatgtggatgatatcaaggtccactctccgtatgagatcagcattaggcaacgatttataggcaaaccagatatggcctatagactcattagcgcaaaaatgcccgaggttatcccaatcctcgaggtacaattttctaagaaaatggaactattagaggatgcattggtgctgagatccgcccgaacatctagcccagctgaaaaatcctgctccgtttggcacgccgcttcaggtctgatggggaggaccctccatagggagcctcccgcaggagatcaggaaggcacagcgctgcatctgcagactagcttaccagctctgtccgaagccgatactcaggagctgacacagatactccgacggatgaagggtctggctcttgaggctgagagcgaactcgagagacaggacgaagcattggacggcgtggccgcagcggtggaccgggctactttaaccatcgacaaacacaacaggcgtatgaaaaggttaacttag

SEQ ID NO: 230277 - DNA, 1317 bp, Artificial Sequence
  derived and/or modified sequence
tgatgtgccggtgcagagcgcccaaggaggagaggtaggctgtgggactcaagtggcgtaccacagagacagaaacggcctggaccttggcgcacccagacacaggagcagatgagccgcgatgtgtgtatacacacttggccttgtacatactacctcgagcccaaacggcgatgggtaaccggccagctgagcctgacttccttatctctgagattcatgacggatagtaccggcgagatccttgtgtcatttcccctttctagtattgtagaaatcaaaaaggaggcctcccacttcatcttttcctctatcactatactcgaaaagggccatgccaaacattggttttcctccttgagacctagcagaaatgtagtgttcagcattattgaacacttttggagggagctgctgctgtcccaacccggagccgtggccgacgccagcgtgcccaggacccggggagaggagttaaccggtcttatggccggtagtcagaagcggctggaggatacggcaagggttttacatcatcagggccagcaactggacagcgtcatgcgcggattggataaaatggagagcgatttagaggtggctgaccgattgctcaccgaactggagagtccggcatggtggcctttttcttctaaactgtggaagacaccgcctgagactaagcccagggaggacgtgagcatgacctcctgcgagccgttcgggaaagagggcattctcatcaaaatcccggcagttatctctcacaggactgagtcccatgtgaagcctggtagactgacagtgctcgtgtccggactagaaatacacgactctagttctctgttaatgcacaggtttgagcgtgaggacgtggacgacatcaaagtgcattccccttacgaaattagcatccgccagagattcatcggtaagcccgacatggcctatcggctgattagcgcaaaaatgccagaagtcattcctattcttgaggttcagttttccaagaaaatggaactacttgaggacgcactggttctcaggtcagccaggacatccagtcccgctgaaaagagttgtagcgtttggcacgccgcttcgggactaatgggcaggacattacatcgggaaccaccagccggagatcaagaaggtaccgcgttgcatttacagacttccctgcctgccctctccgaggcagatactcaggaactcacacaggggttcagacccatgtctcttagtacccaaacggtccttgtgatgttatgctctgagagcgcaggcgctctgtggcggcaacggttatcatag

SEQ ID NO: 230278 - DNA, 2403 bp, Artificial Sequence
  derived and/or modified sequence
ctgcgcaggcgccgagcggccgaggcgccgcggtcggctctgggactcgtctggcgtccctcagaggcagaagaggcctggaccttggcgcacacagacccaggaacagatgagcagggatgtctgcatccacacctggccgtgcacctactacctggagcccaagaggcgatgggttactggacagctgtccttaacatcgctgtcgctcaggttcatgactgacagcactggagagattctggtcagcttccccctctccagcatagttgagatcaagaaggaggcttcacattttatcttcagctccatcaccatcctggagaagggccatgccaagcactggttcagctccctgcggccaagtcgaaatgtggtcttcagcatcatcgagcatttctggagggagctgctgctgtctcagcctggagccgtggcagacgcatctgtcccaaggacccggggcgaggagctgacgggactcatggctggatcccagaaacgcctggaggacacggcgagggtcctgcaccaccagggccagcagctggacagcgtcatgagaggcctggacaagatggagtcagacctggaggtggcggacagattgctgacagaactggaatctcctgcttggtggccctttagctccaagctttggaagacaccaccggaaacaaagcccagggaagatgtctccatgaccagttgtgaaccctttgggaaagaagggatactgataaaaattcctgctgttatttcccacagaacagagtctcacgttaaaccagggaggctcaccgtccttgtgtctgggttggaaatacatgactccagttctttgctcatgcacaggtttgaaagagaagacgtggacgacatcaaggtccactcaccttacgaaattagcatccgccagcggtttattggaaagccagacatggcctatcgtttgatatctgccaagatgccagaggttatccccattttagaagtgcagttcagcaagaagatggagctgttagaagatgcattggtgctcagaagcgcaagaacctcttcccccgcagagaagagctgctcagtctggcatgcagcatctgggctgatgggccgtaccctgcaccgtgagccacccgcaggagaccaggagggcacagcactgcacctgcagacaagcctgccagccctttctgaggcagatacccaggaactaacccagggcttccggcctatgtcgctgtcaacccagacagtgttggtgatgctttgctccgagtctgcaggagctttgtggagacagagactttcctagcagggcagcaagcggaagcttttcttccagaacagcctttgctcagggcatgagggagccggccaggcccacagcgcccagggcatcctcctcacggatgtgttggaggaaagtggctttggtgctatcctgggggaccatggccataagctggcagtgtcagccacgcatcagttgcgtttctttgttcaggttgtgcctcttgctgcctgcctgagtcacccagggctgctccccttcctggctctgacgccctcagcgggtcccacaagccgctcaggaccacagagtctggccatgggtctggccaggcatccactgatgctctaagctgcagcttctcttaggaacacttctatcaggtctggctcgcaggcatgccccagggccagcctggattgtactgtccttcaagcactccttgctctatttctttgaagtttataaaagtttgtttcccccaaaacccaaagcacttttaatcaggtagtttctgtggaggtcgaactggctggaaggaaggctggttcctggatttctttactcatgtagcagggactcaaggaagtctgatttgcgcctcgcctctgactcagagcccatgaaggttcctgtgtgaggccactggctgcctcggagctgacagcatcctgcacaatggctagatggcttgtcaccccaggccgcagaggaacaactgtttctagggtttggccagacttcacattctccattctttccatccctgttatgtggaatgcacacgatgccatgtaattacttcagtcccttctcaaaggaaaaagaatctggacctgcactccaggacactagcagtttgaaggttcgctcaggaatgttctttgtctgcagacctagcagctgtacagatcgctcttgtgtttttgcactattaattaacttcaagtgcaattttggcaggcaggccaagggtctcaacaggctatttggaatgagttctcttttaaggccttcaacgtagtgagacattttcaaatcaaaaagtacagcaggagccagcctttattttgtctgtgtacacaataaaatattccgcttctataggc

SEQ ID NO: 230279 - DNA, 1755 bp, Artificial Sequence
  derived and/or modified sequence
gcggccgccgccccaccgtaggtccgtagcaggtggtcgaagtcgggcctccccgcgggcgtcacccagcgccgccggctgccccagccctgcgtgaaggcgctggaaaacacgcagggcaggttgggcagcaagaagccccgcacaaagtcggcgtaggagaaggcgcccggctccgagacgaaggctacccggcccggagcctggccgacgccggggacatcgacccccaggcctcggaagtggctgtcggcgagggcgcgcgtctcgcggtccatccagctcagcacgggtcgaaggaccctcctcctcacttccgccggagcggaaacggtgaggaccagcctcggaaccagaagacgcagggcgccgcgtttctgccccgccagcgcctggggctccgggcctgcacgcatgcgcgcggctcgccgcggtcttcactgcgcaggcgccgagcggccgaggcgccgcggtcggctctgggactcgtctggcgtccctcagaggcagaagaggcctggaccttggcgcacacagacccaggaacagatgagcagggatgtctgcatccacacctggccgtgcacctactacctggagcccaagaggcgatgggttactggacagctgtccttaacatcgctgtcgctcaggttcatgactgacagcactggagagattctggtcagcttccccctctccagcatagttgagatcaagaaggaggcttcacattttatcttcagctccatcaccatcctggagaagggccatgccaagcactggttcagctccctgcggccaagtcgaaatgtggtcttcagcatcatcgagcatttctggagggagctgctgctgtctcagcctggagccgtggcagacgcatctgtcccaaggacccggggcgaggagctgacgggactcatggctggatcccagaaacgcctggaggacacggcgagggtcctgcaccaccagggccagcagctggacagcgtcatgagaggcctggacaagatggagtcagacctggaggtggcggacagattgctgacagaactggaatctcctgcttggtggccctttagctccaagctttggaagacaccaccggaaacaaagcccagggaagatgtctccatgaccagttgtgaaccctttgggaaagaagggatactgataaaaattcctgctgttatttcccacagaacagagtctcacgttaaaccagggaggctcaccgtccttgtgtctgggttggaaatacatgactccagttctttgctcatgcacaggtttgaaagagaagacgtggacgacatcaaggtccactcaccttacgaaattagcatccgccagcggtttattggaaagccagacatggcctatcgtttgatatctgccaagatgccagaggttatccccattttagaagtgcagttcagcaagaagatggagctgttagaagatgcattggtgctcagaagcgcaagaacctcttcccccgcagagaagagctgctcagtctggcatgcagcatctgggctgatgggccgtaccctgcaccgtgagccacccgcaggagaccaggagggcacagcactgcacctgcagacaagcctgccagccctttctgaggcagatacccaggaactaacccagggcttccggcctatgtcgctgtcaacccagacagtgttggtgatgctttgctccgagtctgcaggagctttgtggagacagagactttcctag

SEQ ID NO: 230280 - DNA, 1341 bp, Artificial Sequence
  derived and/or modified sequence
atgagagccgccagaagaggcctgcactgcgccggcgccgagagacccagaagaagaggcagactgtgggacagcagcggcgtgccccagagacagaagagacccggcccctggagaacccagacccaggagcagatgagcagagacgtgtgcatccacacctggccctgcacctactacctggagcccaagagaagatgggtgaccggccagctgagcctgaccagcctgagcctgagattcatgaccgacagcaccggcgagatcctggtgagcttccccctgagcagcatcgtggagatcaagaaggaggccagccacttcatcttcagcagcatcaccatcctggagaagggccacgccaagcactggttcagcagcctgagacccagcagaaacgtggtgttcagcatcatcgagcacttctggagagagctgctgctgagccagcccggcgccgtggccgacgccagcgtgcccagaaccagaggcgaggagctgaccggcctgatggccggcagccagaagagactggaggacaccgccagagtgctgcaccaccagggccagcagctggacagcgtgatgagaggcctggacaagatggagagcgacctggaggtggccgacagactgctgaccgagctggagagccccgcctggtggcccttcagcagcaagctgtggaagaccccccccgagaccaagcccagagaggacgtgagcatgaccagctgcgagcccttcggcaaggagggcatcctgatcaagatccccgccgtgatcagccacagaaccgagagccacgtgaagcccggcagactgaccgtgctggtgagcggcctggagatccacgacagcagcagcctgctgatgcacagattcgagagagaggacgtggacgacatcaaggtgcacagcccctacgagatcagcatcagacagagattcatcggcaagcccgacatggcctacagactgatcagcgccaagatgcccgaggtgatccccatcctggaggtgcagttcagcaagaagatggagctgctggaggacgccctggtgctgagaagcgccagaaccagcagccccgccgagaagagctgcagcgtgtggcacgccgccagcggcctgatgggcagaaccctgcacagagagccccccgccggcgaccaggagggcaccgccctgcacctgcagaccagcctgcccgccctgagcgaggccgacacccaggagctgacccagggcttcagacccatgagcctgagcacccagaccgtgctggtgatgctgtgcagcgagagcgccggcgccctgtggagacagagactgagctag

SEQ ID NO: 230281 - protein, 335 aa, Artificial Sequence
  derived and/or modified sequence
MATFVSELEAAKKNLSEALGDNVKQYWANLKLWFKQKISKEEFDLEAHRLLTQDNVHSHNDFLLAILTRCQILVSTPDGAGSLPWPGGSAAKPGKPKGKKKLSSVRQKFDHRFQPQNPLSGAQQFVAKDPQDDDDLKLCSHTMMLPTRGQLEGRMIVTAYEHGLDNVTEEAVSAVVYAVENHLKDILTSVVSRRKAYRLRDGHFKYAFGSNVTPQPYLKNSVVAYNNLIESPPAFTAPCAGQNPASHPPPDDAEQQAALLLACSGDTLPASLPPVNMYDLFEALQVHREVIPTHTVYALNIERIITKLWHPNHEELQQDKVHRQRLAAKEGLLLC

SEQ ID NO: 230282 - DNA, 1008 bp, Artificial Sequence
  derived and/or modified sequence
atggccacatttgtctccgagctggaagccgctaaaaagaacctctccgaagcgcttggggataacgttaaacaatactgggccaacctgaaattatggtttaagcagaagataagcaaggaagaattcgacctggaagcgcataggctcttaacacaggataatgtccatagccataatgacttcctgctcgccatacttacacgatgtcaaatcttagtgtccactccggatggggctggctccctcccttggcctggcgggagtgcagctaaaccggggaagccaaagggcaagaagaagttgtcctccgtccggcagaaattcgatcatagatttcagccacagaatccactgagcggggcccagcagtttgtggcgaaagaccctcaggatgacgacgacctgaaactgtgtagtcatactatgatgctccccactagagggcagctcgaggggcgaatgattgtgaccgcatatgagcatggactagataacgtcaccgaagaagccgtttcggccgtagtctacgccgtggagaatcatctcaaggacatactcacaagcgtcgtttcacgtagaaaagcctatcgcctgcgagacggacattttaagtatgcctttggctcgaacgtgacccctcagccttacctcaagaatagcgtggtggcctacaacaaccttatagagtctccgccagcgtttactgctccctgcgcaggccagaacccagcctctcaccctccacccgatgacgcggagcagcaggccgcacttctgctggcttgctccggagatacactgccagctagcctcccacccgtcaacatgtacgatctgtttgaagccctacaggtgcaccgggaggtaatccccactcacaccgtttacgcccttaacatcgaaagaattataacaaagctctggcatcccaatcatgaggagttacaacaagataaagtgcatagacaacggttagcagccaaggaagggcttcttctctgctag

SEQ ID NO: 230283 - DNA, 1008 bp, Artificial Sequence
  derived and/or modified sequence
atggccacctttgtgtctgagctggaggccgccaagaagaacctgtctgaggccctgggggacaacgtgaagcagtactgggccaacctgaagctgtggttcaagcagaagatcagcaaggaggagtttgacctggaggcccaccggctgctgacccaggacaacgtgcacagccacaatgacttcctgctggccatcctgacccgctgccagatcctggtgtccaccccagatggagctggcagcctgccctggccaggcggcagcgctgccaagccaggcaagcccaagggcaagaagaagctgagctctgtgcggcagaagtttgaccaccgcttccagccccagaaccccctgagcggggcccagcagtttgtggccaaggacccccaggatgatgatgacctgaagctgtgcagccacaccatgatgctgcccacccggggccagctggagggccgcatgattgtgacagcctatgagcacggcctggacaacgtgacagaggaggccgtgtctgctgtggtgtatgctgtggagaaccacctgaaggacatcctgacctctgtggtgtccaggaggaaggcctaccgcctgagagatggccacttcaagtatgccttcggcagcaatgtgaccccccagccctacctgaagaacagcgtggtggcctacaacaacctgattgagagccccccagccttcaccgccccctgtgccggccagaacccagccagccaccccccaccagatgatgctgagcagcaggccgccctgctgctggcctgcagcggggacaccctgcctgccagcctgccccctgtgaacatgtatgacctgtttgaggccctgcaggtgcaccgggaggtgatccccacccacacagtgtatgccctgaacatcgagcgcatcatcaccaagctgtggcaccccaaccacgaggagctgcagcaggacaaggtgcaccggcagaggctggccgccaaggagggcctgctgctgtgctag

SEQ ID NO: 230284 - DNA, 1008 bp, Artificial Sequence
  derived and/or modified sequence
atggccaccttcgtgagcgagctggaggccgccaagaagaacctgagtgaggctcttggtgacaacgtaaagcagtattgggcaaacctcaagctatggttcaaacaaaagatcagtaaagaagaatttgatctggaagcacatcgactgcttacccaggacaacgtgcatagtcacaatgatttcttacttgccatcctcacacgatgccagattcttgtttccacccctgacggagcaggctccctaccctggccaggagggtctgccgctaaaccaggaaaaccaaagggcaagaaaaaattgtccagcgtcagacagaaatttgaccaccggtttcagccacagaatcctttaagcggcgctcaacaatttgtcgctaaggacccccaagatgatgatgacttaaagttgtgctctcacacgatgatgctccccacacgtggacagttagaaggtcggatgattgtcaccgcctatgaacatggcctggataatgtcacagaagaggccgtttctgcggtggtctatgccgtcgaaaatcatttaaaagacattttgactagcgtagtcagtcggcgcaaagcataccgcttacgagatggacactttaaatacgctttcggcagcaatgttacaccacagccttatcttaagaacagcgtcgtggcttacaataacctgatcgaatctcccccagctttcactgccccgtgtgcaggtcagaaccctgcatctcatcccccccctgacgacgcggagcaacaggcggccttacttctcgcttgcagcggagatactctgcctgcctccctgcctcccgtgaacatgtatgatctctttgaagcactccaggttcacagagaggttattcccacccatactgtgtatgccctcaacattgagcggatcatcactaagctgtggcaccctaatcacgaagaactgcagcaggataaagttcatcgacagcgcctggctgcgaaagaaggtttattgctctgctag

SEQ ID NO: 230285 - DNA, 1008 bp, Artificial Sequence
  derived and/or modified sequence
atggcaaccttcgtttcagaactcgaggctgccaaaaagaatttgagtgaagcattgggggacaatgtcaaacagtactgggcaaacctgaagctgtggtttaagcagaaaatctctaaagaagaatttgacctggaggcacaccgcctcctgactcaagataacgttcacagccacaatgactttctgctggccatcctgacgcgctgtcagattctcgtctcaacccctgatggtgcaggtagcctgccatggcctgggggttcagctgctaaacctgggaaaccaaagggcaagaagaagctgtccagtgtccgccagaagtttgatcaccgtttccagccccagaatcccttgagcggtgcccagcagttcgtggcgaaagacccccaagatgacgacgatctcaagctgtgcagtcacactatgatgcttccgactcgcggacagttagaggggaggatgatagttacggcctacgaacacggcctcgacaatgtgacagaagaagccgtcagcgctgtggtgtacgctgtggaaaaccatcttaaagacatcctcacatccgtggtatcgcggagaaaggcttaccggctacgcgatggtcacttcaagtatgcctttggatctaacgttacaccacagccttacctgaaaaatagcgtggtcgcttacaacaatcttattgaaagtcccccagctttcactgccccttgcgcaggacagaaccccgcttcacacccacccccagacgatgccgaacagcaagcggctttgctcctagcgtgttctggcgatactctgcccgctagtctccccccagtgaatatgtatgatctgtttgaggcactccaggtgcatcgggaggtgatccctactcatacggtttacgccctcaacatcgagcggatcattaccaaactctggcaccctaaccacgaagagttgcagcaggacaaggttcaccggcagaggctcgctgcgaaggagggtctgctgctgtgttag

SEQ ID NO: 230286 - DNA, 2159 bp, Artificial Sequence
  derived and/or modified sequence
agcttccagagccaaggccttccgccgagttggtttttgggttgttgatcgcggtggccgggcggtctgcggtcgggctgagacacgcggagcaatggcgacctttgtgagcgagctggaggcggccaagaagaacttaagcgaggccctgggggacaacgtgaaacaatactgggctaacctaaagctgtggttcaagcagaagatcagcaaagaggagtttgaccttgaagctcatagacttctcacacaggataatgtccattctcacaatgatttcctcctggccattctcacgcgttgtcagattttggtttctacaccagatggtgctggatctttgccttggccagggggttccgcagcaaaacctggaaaacccaagggaaagaaaaagctttcttctgttcgtcagaaatttgatcatagattccagcctcaaaatcctctctcaggagcccagcaatttgtggcaaaggatccccaagatgatgacgacttgaaactttgttcccacacaatgatgcttcccactcgaggccagcttgaagggagaatgatagtgactgcttatgagcatgggctggacaatgtcaccgaggaggctgtttcagctgttgtctatgctgtggagaatcaccttaaagatatactgacgtcagttgtgtcaagaaggaaagcttatcggttacgagatggtcattttaaatatgcctttggcagtaacgtgaccccgcagccatacctgaagaatagtgtagtagcttacaacaacttaatagaaagccctccagcttttactgctccctgtgctggtcagaatccagcttctcacccaccccctgatgatgctgagcagcaggctgcactcctgctggcatgctccggagacactctacctgcatctttgcctccggtgaacatgtacgatctttttgaagctttgcaggtgcacagggaagtcatccctacacatactgtctatgctcttaacattgaaaggatcatcacgaaactctggcatccaaatcatgaagagctgcagcaagacaaagttcaccgccagcgcttggcagccaaggaggggcttttgctgtgctaaattaggatttgagggtgtgggaccctcaccgaattcattgattactgaaaattgaatgttttttgggtccacatttcaaggctgaagtgtatagtgtatatataacctttcctatggaaatgtgacattgagtacattttgtgttgctgttgtgaagccattaatataaatctttggtaatgacccatatctctatatgtatgtgttcccagttgtgggagcaggcactaatgaaatcctgtgcctggaatggagatatttaggtacctgaggcttagtgtcctgtggtctgcatgtaagatagatgacatcctagaacaaagaagctgttttaacttaatccccctgatcagcaggatatctgtgtgttcagtgacatcatacattctgtatctagaagtctaaaatttctgcctttctcctaaagaatgtgttcttgcattttggttgaaataacctacacagtgttaaaaatcagatacctcctttagtgaccagttcaaattttaatagcgataggtagcccctgagaaatttatcactataactccacaggaaatatgacttggaagtgctctgtgtactaaacaaaataaagcccctctttgcatttaaaaccaaagtcaaaacaaaactcttgtaatgcaattaattaactttatgtcttcccatgactcaagttttgttaaatatgcccaaaaactttgattggcagtttcttcggttaattattcctatagaatgtattttaagaaatctatacaaattggatatatgcttggtaattctccagtttctaggaggtacctatttctaccgtttcaagtgatgaagtgaaaataatttacattcgatagtgttactgataacaaacctacttaagagatatgttgctttttacttaagggatagtgttgatagataaattagaatgtatagataggtttgtgaaagtctaaataatggttgtatagatatgtatatatggttcacatatctggatctgtgtatttgattttgtactttaaatgtgacaaataaaccttttgggagaaaa

SEQ ID NO: 230287 - DNA, 1008 bp, Artificial Sequence
  derived and/or modified sequence
atggccaccttcgtgagcgagctggaggccgccaagaagaacctgagcgaggccctgggcgacaacgtgaagcagtactgggccaacctgaagctgtggttcaagcagaagatcagcaaggaggagttcgacctggaggcccacagactgctgacccaggacaacgtgcacagccacaacgacttcctgctggccatcctgaccagatgccagatcctggtgagcacccccgacggcgccggcagcctgccctggcccggcggcagcgccgccaagcccggcaagcccaagggcaagaagaagctgagcagcgtgagacagaagttcgaccacagattccagccccagaaccccctgagcggcgcccagcagttcgtggccaaggacccccaggacgacgacgacctgaagctgtgcagccacaccatgatgctgcccaccagaggccagctggagggcagaatgatcgtgaccgcctacgagcacggcctggacaacgtgaccgaggaggccgtgagcgccgtggtgtacgccgtggagaaccacctgaaggacatcctgaccagcgtggtgagcagaagaaaggcctacagactgagagacggccacttcaagtacgccttcggcagcaacgtgaccccccagccctacctgaagaacagcgtggtggcctacaacaacctgatcgagagcccccccgccttcaccgccccctgcgccggccagaaccccgccagccaccccccccccgacgacgccgagcagcaggccgccctgctgctggcctgcagcggcgacaccctgcccgccagcctgccccccgtgaacatgtacgacctgttcgaggccctgcaggtgcacagagaggtgatccccacccacaccgtgtacgccctgaacatcgagagaatcatcaccaagctgtggcaccccaaccacgaggagctgcagcaggacaaggtgcacagacagagactggccgccaaggagggcctgctgctgtgctag

SEQ ID NO: 230288 - protein, 780 aa, Artificial Sequence
  derived and/or modified sequence
MDQNSVPEKAQNEADTNNADRFFRSHSSPPHHRPGHSRALHHYELHHHGVPHQRGESHHPPEFQDFHDQALSSHVHQSHHHSEARNHGRAHGPTGFGLAPSQGAVPSHRSYGEDYHDELQRDGRRHHDGSQYGGFHQQSDSHYHRGSHHGRPQYLGENLSHYSSGVPHHGEASHHGGSYLPHGPNPYSESFHHSEASHLSGLQHDESQHHQVPHRGWPHHHQVHHHGRSRHHEAHQHGKSPHHGETISPHSSVGSYQRGISDYHSEYHQGDHHPSEYHHGDHPHHTQHHYHQTHRHRDYHQHQDHHGAYHSSYLHGDYVQSTSQLSIPHTSRSLIHDAPGPAASRTGVFPYHVAHPRGSAHSMTRSSSTIRSRVTQMSKKVHTQDISTKHSEDWGKEEGQFQKRKTGRLQRTRKKGHSTNLFQWLWEKLTFLIQGFREMIRNLTQSLAFETFIFFVVCLNTVMLVAQTFAEVEIRGEWYFMALDSIFFCIYVVEALLKIIALGLSYFFDFWNNLDFFIMAMAVLDFLLMQTHSFAIYHQSLFRILKVFKSLRALRAIRVLRRLSFLTSVQEVTGTLGQSLPSIAAILILMFTCLFLFSAVLRALFRKSDPKRFQNIFTTIFTLFTLLTLDDWSLIYMDSRAQGAWYIIPILVIYIIIQYFIFLNLVITVLVDSFQTALFKGLEKAKQERAARIQEKLLEDSLTELRAAEPKEVASEGTMLKRLIEKKFGTMTEKQQELLFHYLQLVASVEQEQQKFRSQAAVIDEIVDTTFEAGEEDFRN

SEQ ID NO: 230289 - DNA, 2343 bp, Artificial Sequence
  derived and/or modified sequence
atggatcagaactccgtccccgagaaggcacaaaacgaggctgacactaacaatgccgaccgcttcttccggagtcattcttcacctccacatcaccgaccgggccactcaagagcccttcatcactatgagctgcatcaccacggggtcccacaccagcgcggcgagagtcaccatcctcctgagttccaagacttccacgaccaggctctttccagtcatgtgcatcagtctcaccatcattcagaggcccggaatcacgggagagcccacgggcctacaggttttggcctggcgccttcacagggcgcggtcccatcacatagatcttatggggaggattatcatgatgagctccaaagagacgggcgcagacaccacgacggttctcaatacggcgggttccaccagcagagcgactcacactaccaccggggatctcaccacggacggccacagtatctgggcgaaaatctgagtcattactccagcggcgtgccccaccatggagaagcctcccaccacggaggaagttatcttccccacgggccgaacccatatagcgaaagcttccaccattcagaagccagtcatctaagtggtctgcagcacgatgagtctcagcatcatcaggtgccacatcgcggatggcctcatcatcaccaggtgcaccaccacggccggtctcgtcaccacgaagctcatcagcatgggaaatcgcctcatcacggagaaacaatctctccacattctagtgttggctcataccagcgaggcatctcagactaccactcagagtaccaccagggcgaccaccatcccagcgaataccatcacggagatcaccctcaccacacccaacatcactaccaccagacccaccggcatagagattaccatcagcaccaggaccaccacggtgcttatcacagttcgtatcttcacggagattatgtacagtccacttcccagctctccattccgcacacgagtaggtcactcattcatgacgctccaggccccgctgcctccagaactggcgtatttccctaccacgtcgcccacccccgtgggagtgcccattccatgactcgaagcagctcaactatccgatcccgcgtcactcaaatgagtaagaaggtgcatacccaagacatcagcacgaaacactctgaggactggggcaaggaggaaggacagtttcagaagagaaaaaccggccgcctccaaagaacgcgcaagaagggccatagtactaacctctttcaatggctgtgggaaaagctgacctttctgatacaggggttccgggaaatgatcagaaatcttacacagtcgcttgccttcgagacctttatcttcttcgtcgtctgcctaaacacagtcatgctggtggcgcaaaccttcgcggaagtcgaaattagaggggagtggtattttatggcacttgactctattttcttttgcatctacgttgtggaagctctgctgaaaattattgctctgggtttatcctacttttttgacttttggaataatctggatttcttcatcatggccatggccgtactggactttctactgatgcagacacattcattcgccatctatcatcagtctttgtttaggattctaaaagtgtttaagtctctgagagccctgcgcgcgatccgggtgctaagacggcttagcttcctgacatctgtgcaagaggtgaccggcactctgggtcagtctctgccctctatagccgcaatcctgatactcatgtttacttgcctattcctgtttagcgcggtactaagagccctctttcgcaagtctgaccccaagcggtttcagaacatatttaccacaatctttactctgtttacacttttaactctggatgactggagcctgatctacatggattcgagggcgcagggcgcgtggtacatcatccctatcctcgtgatatacatcataatccagtactttatcttcctgaacctagtgatcacggttttggtcgactcattccaaactgcgttattcaagggccttgagaaggccaaacaggagcgagccgcccgcattcaagagaagttactggaggattccctgacagagctcagagccgccgagcccaaagaagttgcgtcggaaggcactatgttaaagagacttatcgaaaagaagtttggcacaatgaccgaaaagcagcaggaacttttgttccactatttgcagctggtggcgtctgtggagcaagaacagcagaagtttaggtcccaggctgccgtgattgatgagatcgtcgatacgaccttcgaagccggtgaggaggacttccgtaattag

SEQ ID NO: 230290 - DNA, 2343 bp, Artificial Sequence
  derived and/or modified sequence
atggaccagaacagcgtgcctgagaaggcccagaatgaggccgacaccaacaatgctgaccgcttcttccgcagccacagcagccccccccaccaccggcccggccacagccgggccctgcaccactatgagctgcaccaccacggcgtgccccaccagagaggagagagccaccaccccccagagttccaggacttccatgaccaggccctgagcagccacgtgcaccagagccaccaccacagcgaggccagaaatcatggccgggcccacggccccaccggcttcggcctggcccccagccagggcgctgtgcccagccacaggagctatggagaggactaccatgatgagctgcagagagatggccgccgccaccatgatggcagccagtatggaggcttccaccagcagagcgacagccactaccaccggggcagccaccacggccggccccagtacctgggggagaacctgagccactacagcagcggcgtgccccaccacggggaggccagccaccacggcggcagctacctgccccacggccccaacccctacagcgagagcttccaccacagcgaggccagccacctgagcggcctgcagcatgatgagagccagcaccaccaggtgccccaccggggctggccccaccaccaccaggtgcaccaccacggccgcagccgccaccacgaggcccaccagcacggcaagagcccccaccacggggagaccatcagcccccacagctctgtgggcagctaccagaggggcatcagtgactaccacagcgagtaccaccagggcgaccaccaccccagcgagtaccaccacggggaccacccccaccacacccagcaccactaccaccagacccaccgccaccgggactaccaccagcaccaggaccaccacggggcctaccacagcagctacctgcatggagactatgtgcagagcaccagccagctgagcatcccccacaccagccgcagcctcatccatgatgcccctggccctgctgccagcaggactggagtcttcccctaccacgtggcccacccccggggcagcgcccacagcatgaccaggagcagcagcaccatccgcagccgggtgacccagatgagcaagaaggtgcacacccaggacatcagcaccaagcacagcgaggactggggcaaggaggagggccagttccagaagaggaagacaggccgcctgcagaggaccaggaagaagggccacagcaccaacctcttccagtggctgtgggagaagctgaccttcctgatccagggcttccgggagatgatccggaacctgacccagagcctggcctttgagaccttcatcttctttgtggtgtgcctgaacacagtgatgctggtggcccagacctttgctgaggtggagatccggggggagtggtacttcatggccctggacagcatcttcttctgcatctacgtggtggaggccctgctgaagatcatcgccctgggcctgagctacttctttgacttctggaacaacctggacttcttcatcatggccatggctgtgctggacttcctgctgatgcagacccacagctttgccatctaccaccagagcctcttccgcatcctgaaggtgttcaagagcctgcgggccctgcgggccatccgggtgctgcggcggctgtccttcctgacctctgtgcaggaggtgacaggcaccctgggccagagcctgcccagcattgctgccatcctgatcctgatgttcacctgcctcttcctgttctctgctgtgctgcgggccctcttcaggaagagtgaccccaagcgcttccagaacatcttcaccaccatcttcaccctcttcaccctgctgaccctggatgactggagcctcatctacatggacagccgggcccagggcgcctggtacatcatccccatcctggtgatctacatcatcatccagtacttcatcttcctgaacctggtgatcaccgtgctggtggacagcttccagacagccctcttcaagggcctggagaaggccaagcaggagcgggccgcccgcatccaggagaagctgctggaggacagcctgacagagctgcgggctgctgagcccaaggaggtggccagcgagggcaccatgctgaagaggctcatcgagaagaagtttggcaccatgacagagaagcagcaggagctgctcttccactacctgcagctggtggcctctgtggagcaggagcagcagaagttccgcagccaggccgctgtgattgatgagatcgtggacaccacctttgaagctggggaggaggacttcagaaattag

SEQ ID NO: 230291 - DNA, 2343 bp, Artificial Sequence
  derived and/or modified sequence
atggaccagaacagcgtgcccgagaaggcccagaacgaggccgacaccaacaatgccgatcggtttttcaggagtcatagttccccccctcatcaccgccctggacactcgagagcgctccatcactacgaactccatcaccacggagtcccacaccagcggggagagtcacatcacccccccgaattccaggacttccacgatcaagctctgtctagtcacgttcaccagtcgcaccaccattcagaagccaggaaccacggcagggcccacggcccaaccggattcggcctggccccatcccaaggtgccgttccttcccatcgctcctatggcgaagattatcatgatgagctgcagcgtgacggccggagacatcatgacgggtctcaatatgggggtttccatcagcaaagtgacagccattatcaccggggctcccatcacggacggccccagtatctcggggagaatctgtcacattattcttctggtgtcccacatcacggcgaggccagccaccatggggggagttatctgccccacggaccaaacccatacagtgagtcgtttcaccacagcgaggcttctcatctgtccggcctgcagcacgatgaaagccaacatcaccaggttccgcaccgcgggtggcctcaccaccaccaggtgcatcaccacggcagaagccgtcaccatgaagctcaccagcacgggaagagcccgcaccacggcgaaactattagccctcactcttccgtggggagttaccaacgcggtatctctgactaccattccgaatatcaccagggtgatcatcaccctagcgaatatcatcacggggatcatccccaccacactcagcaccactaccaccaaacgcatagacaccgggactaccaccagcatcaggaccaccacggggcatatcacagtagctatctgcacggcgattacgtgcagtcaacttcacaactgagtattcctcacacctctcggtccctgatccacgacgcaccaggccccgcagcctcaagaaccggggtctttccgtatcacgtggcacatccaagggggtcggcccattcaatgacaaggtcttcatcgacgatccgaagccgagtcacgcagatgtcaaagaaggtccatacccaggatataagcactaaacactccgaagactggggaaaggaagaaggtcagttccagaagagaaaaacaggacgactgcagaggacccgcaagaaggggcacagcaccaacctgttccaatggctctgggagaagctcacattcctaatccaaggctttagggaaatgatccgaaatctaacccagagtctggctttcgaaactttcattttctttgttgtctgcttgaataccgttatgctagtggctcagacttttgctgaggttgagatcaggggcgaatggtacttcatggctctggatagcatttttttctgcatctacgtggtagaagcactcctgaagataattgccctgggcctgtcttactttttcgatttttggaacaaccttgactttttcattatggccatggcagtcttagacttcctgctgatgcagactcattccttcgctatctatcaccagtccctcttcaggatcctgaaggtgtttaagtcactgcgggccctgcgggctatccgcgtacttagacgcctcagcttcctgacttctgtacaggaagtcacagggacactggggcagagtctgcctagcatcgccgccattcttatcctgatgttcacttgcctttttctgttttccgcagtgcttagggccttgttcaggaaatcggatcccaagcgattccaaaacatatttacaaccatcttcactctcttcactctgctcaccctggatgattggagcttgatctatatggactccagggcacagggagcatggtatatcatacccatcctggttatatatattattatccagtatttcatcttcctgaatttggtgatcactgtactcgtcgactcctttcaaaccgcactgttcaaggggctggaaaaggctaagcaggaacgagccgcccgcatccaggaaaaacttctggaggattcactcaccgaattaagggctgcagagcctaaggaagtagcttccgaaggtaccatgctcaagaggctgatcgagaagaagttcggaaccatgacagaaaagcagcaggagctactattccactacctgcagctggtggcttcagtggaacaggagcaacagaagttccgctctcaggcggctgtgattgacgaaattgtggacaccacttttgaagccggagaggaagattttaggaattag

SEQ ID NO: 230292 - DNA, 2343 bp, Artificial Sequence
  derived and/or modified sequence
atggatcagaattcagtgcccgaaaaagctcagaatgaagctgataccaacaatgccgacaggtttttccgcagccattctagtcccccacaccatcgccctggtcattctagggctctccatcactatgaattgcatcaccatggagtcccacatcaacggggtgagtcccaccatcctcccgagtttcaagacttccacgatcaggccctcagtagtcacgtgcatcagtcccaccatcactcagaagcgagaaaccacggtcgggctcatgggccaactgggttcggactggccccatcgcagggtgctgttcccagccaccgctcctacggcgaggactaccacgatgaactgcaaagggacggcagacgccaccatgatgggtcccagtacggaggattccaccaacaaagtgattctcactaccaccgtgggagccatcacgggagacctcagtaccttggagagaacctctcccactactcttctggcgtgccacatcatggggaagcctcccatcatgggggatcgtatttgccacatggcccaaatccatactccgagagtttccaccactcggaggccagccacttgtctggtctacagcatgacgagtcccaacaccatcaggtccctcatcggggttggccacaccatcatcaggtccaccaccacggaagatccagacatcacgaggcccaccaacacggcaagtcaccccaccacggcgaaacaatctccccacattcttccgtgggatcttaccagagaggaatctctgattaccatagcgagtatcatcagggagatcaccaccctagcgagtaccaccacggtgaccacccccaccacactcaacatcattaccatcagacacacaggcatagggattatcaccagcaccaggatcatcatggggcttaccacagtagctatctgcacggtgactacgtccagtcaacaagtcaactaagtatacctcatactagtcgatccctcatacatgatgcgcctggacccgctgcatccaggacaggagtgtttccctaccacgtggctcacccacggggaagcgcccacagtatgacgaggtcatcgtccacaattcggagtagggtgacacagatgtccaagaaggtgcacacccaggacatcagcacaaagcattcagaggactggggcaaggaagagggccagttccagaaaaggaagaccgggagactgcaaagaacccggaagaaaggccactcaacaaatcttttccagtggttgtgggagaagttgacctttctcatccagggcttcagggagatgattaggaatctcactcagagcctggcctttgagaccttcattttctttgtcgtctgcctaaacaccgtaatgctagtggctcaaaccttcgcggaggttgagatccggggtgaatggtacttcatggcccttgattcgatattcttctgcatctacgttgtggaggctttgttgaagattatcgccctcgggctgtcctattttttcgatttttggaataatctggacttcttcattatggccatggccgtactcgatttcttactcatgcagacacatagttttgccatttatcaccagtcactctttcgtattcttaaggtttttaaatcccttcgggctcttcgcgctatacgcgtgctgcgacgcctgtccttcctgacgagcgtgcaagaagtcacaggcaccctgggacagagtttgccgagtatagcagccattctaatcctgatgttcacatgcctgttcctatttagtgccgtcctacgtgctttatttcggaaaagcgatcccaagcggttccagaatatcttcaccacaatttttaccctgttcaccctgctcaccctcgacgactggagcctcatctatatggatagccgtgctcagggagcctggtacatcattcctattctagtgatttatattattatccaatattttatattcctgaacttggtcatcacagtactggtggactctttccagacggcactcttcaaagggctggagaaagcaaaacaagagcgtgccgctagaatacaggagaaactgttggaagactccttaacagaacttcgagcagccgagcccaaagaggtcgcttccgaaggtaccatgttaaaaaggttaatcgagaaaaagtttggtacaatgacagagaagcaacaggaactgcttttccattaccttcaactggtcgcctccgttgaacaagaacagcaaaagttcagatctcaggctgccgtaattgatgagattgtggatacaactttcgaggccggtgaggaagacttcagaaactag

SEQ ID NO: 230293 - DNA, 1611 bp, Artificial Sequence
  derived and/or modified sequence
gtgttctgctgcaactacgggcactgtccccctaggcctcccgcacttaggccctgcccaccccctttacgcggacggcctggctcgaccgagcttactactaccgccacgactactgcctctacagggtcaaccgctacacctagcagcacccctggaacggctccacccccaaaggtgctcacatcccctgctaccacaccaaccgccacttcttctaaggctacaagctcctcgagcccacgtaccgctacaactctaccagtgctgacaagtacagcgactaaatctacagctacgagcgttactcctataccttcatctaccctggggacgaccggtacactgccggagcagaccacaaccccggtggccactatgagcaccattcatccttccagtacgcctgagacaacccacacatcgacagtgttgacgactaaagcgaccaccactcgcgctacttcaagcacttcgacgccctcgtctaccccaggaacaacctggatcctgacagagctcaccaccgccgctacgacgacagccgcaacagggccaactgctacccccagttccacccccggtaccacctggatcctcaccgagctgaccaccacagcaactaccaccgcaagtacgggcagtaccgccacaccctcaagcacccccggaacaacgtggatcctcaccgaacctagtaccacagcaactgtaacagtgcctaccggttcgacagcaaccgctagtagtacgcaggccacggctgggacaccccacgttagtaccacggccactacacctacagtaactagttcgaaggcaactccatcttcctcgcccggaactgcgacggccctgccagctctgaggtctaccgctaccacccattcttaccagctgtatagccaccctcttctgctgcccactacatggactaggctgtcccagacaaccactcccacagctaccatgtccaccgcaaccccctcgtccaccccggagaccgtccacacttcgacggtattgacagccaccgccacgaccacgggccctgccctatggccccctcccccacctccacaggagcaactcactctccctaagtgtcgtctgccgcagccacgacactcccatcctctcctgcaacctcgggacggtacccatgcctcgagcgtcgaccagcacaatcaccatactcacaaccatcacacgcacaaccagtggctgcacggcgaccccctacttcaccctggcgaccacccacaccggcagtcagcagaccatcaccatcacaattgtacaggatctatggcaactccatccagttccacccagacttctggcacacctccctctctgacaactactgcaacaaccataactgccactggttcaacaacaaatccctcaagtacaccaggtaccactccgatcacacctgtgctcacaagtaccgccacaacgccggcagcgactagctccaaggccacaagctctagttcccctcgcaccgctaccacgctgcctgtcctgaccagcaccgccaccaaatcgacggcaacttctttcacaccaattccctctccctgcgggccaagaggccctagctag

SEQ ID NO: 230294 - DNA, 2619 bp, Artificial Sequence
  derived and/or modified sequence
acgagaatagtcaggcctttctggaagcccagtgccacagtctgcattgagcttggctcaggaaagaagggaaatccaggcggggcctgttgggcccaggtcttgagctcttttggctccagagttcccagcacagtcatggatcaaaactcagtgcctgaaaaggctcagaatgaggcagacaccaataacgcagataggttctttcgctctcactcatcacccccacaccacaggccaggccacagcagagctctccaccattacgagttgcaccatcacggcgtgccccaccaacgtggtgaatctcaccaccctccggagttccaagacttccacgaccaagccttgtcctcccatgtccaccaatctcaccaccacagcgaggcacggaatcacggcagagcccatggccccacaggctttggtctggctccctctcaaggcgccgtcccctcccaccgttcctacggtgaggactaccatgatgagctccaacgtgatggcaggaggcatcatgatgggtcccaatacggtgggttccatcagcagagtgactcccattaccatagggggtctcaccatggcagaccccaatatctcggtgagaatttatcccactattcctctggcgtgccccaccacggtgaggcttcccaccatggtgggtcctacctcccccatggacccaatccctacagtgagtccttccaccacagcgaggcttcccaccttagcgggctccaacacgatgagtcccagcatcaccaagtcccccaccgtggctggccccaccatcaccaagtccaccaccatggcaggtcccgtcatcatgaagcccaccagcatggaaagtctcctcatcacggagagaccatttcccctcattcctctgtggggtcctaccagcgtgggatatctgactatcacagcgagtaccaccaaggtgatcaccaccccagtgagtaccaccatggcgaccatccccaccacacacagcaccactaccaccagacccaccggcaccgagactaccatcagcaccaagaccaccacggcgcgtatcattccagttacctccatggcgactacgtccagagcacttcccaactctctatcccacacacatcccggagcctgattcacgatgcccccggccctgctgcttctcgtacaggagtcttcccctatcacgtagcacacccacggggctcggctcacagcatgactcggtcctccagcacaatccgctcacgtgtcacccagatgtccaaaaaagtccatacccaggatatctccaccaaacattcagaagactggggcaaagaagaagggcaatttcagaaacgcaaaaccggccggctccagcggacccgcaagaagggacactctaccaatctcttccagtggctgtgggaaaagctaaccttcctcattcagggcttccgggaaatgatccggaacctgacccaatccttggcctttgaaactttcatcttcttcgttgtctgcctcaacaccgtcatgctggtggcccagaccttcgctgaagtcgagatccggggcgagtggtacttcatggccttggactccatattcttctgcatctacgtggtggaagccctgctcaagatcatcgccctgggcctctcgtacttctttgacttctggaacaatttggacttcttcattatggccatggccgtgctggacttcttgctgatgcagacccactccttcgccatctaccaccaaagcctcttccggatcctcaaggtcttcaagagcctgcgggccctgagggcaatccgggtcctgcggaggctcagcttcctgaccagcgtccaggaagtgacagggaccctgggccagtccttgccgtccatcgcagccatcctcatcctcatgtttacctgcctcttcctcttctccgcggtcctccgggcactgttccgcaaatctgaccccaagcgcttccagaacatcttcaccaccatcttcaccctcttcaccttgctcacgctggatgactggtccctcatctacatggacagccgtgcccagggcgcctggtacatcattcccatcctcgtaatttacatcatcatccagtacttcatcttcctcaacctggtgattactgtcctggtggatagcttccagacggcgctgttcaaaggccttgagaaagcgaagcaggagagggccgcccggatccaagagaagctgctggaagactcactgacggagctcagagctgcagagcccaaagaggtggcgagtgaaggcaccatgctgaagcggctcatcgagaaaaagtttgggaccatgactgagaagcagcaggagctcctgttccattacctgcagctggtggcaagcgtggagcaggagcagcagaagttccgctcccaggcagccgtcatcgatgagattgtggacaccacatttgaggctggagaagaggacttcaggaattgaccccaggaggacaccagatacagacttcagcccctggcagtctgcccacctgggtgcactgggacgggtccccagatctgctggaatgattgtccgggccctgcagagcaggggccccaacagagtttttaaacccca

SEQ ID NO: 230295 - DNA, 2343 bp, Artificial Sequence
  derived and/or modified sequence
atggaccagaacagcgtgcccgagaaggcccagaacgaggccgacaccaacaacgccgacagattcttcagaagccacagcagccccccccaccacagacccggccacagcagagccctgcaccactacgagctgcaccaccacggcgtgccccaccagagaggcgagagccaccacccccccgagttccaggacttccacgaccaggccctgagcagccacgtgcaccagagccaccaccacagcgaggccagaaaccacggcagagcccacggccccaccggcttcggcctggcccccagccagggcgccgtgcccagccacagaagctacggcgaggactaccacgacgagctgcagagagacggcagaagacaccacgacggcagccagtacggcggcttccaccagcagagcgacagccactaccacagaggcagccaccacggcagaccccagtacctgggcgagaacctgagccactacagcagcggcgtgccccaccacggcgaggccagccaccacggcggcagctacctgccccacggccccaacccctacagcgagagcttccaccacagcgaggccagccacctgagcggcctgcagcacgacgagagccagcaccaccaggtgccccacagaggctggccccaccaccaccaggtgcaccaccacggcagaagcagacaccacgaggcccaccagcacggcaagagcccccaccacggcgagaccatcagcccccacagcagcgtgggcagctaccagagaggcatcagcgactaccacagcgagtaccaccagggcgaccaccaccccagcgagtaccaccacggcgaccacccccaccacacccagcaccactaccaccagacccacagacacagagactaccaccagcaccaggaccaccacggcgcctaccacagcagctacctgcacggcgactacgtgcagagcaccagccagctgagcatcccccacaccagcagaagcctgatccacgacgcccccggccccgccgccagcagaaccggcgtgttcccctaccacgtggcccaccccagaggcagcgcccacagcatgaccagaagcagcagcaccatcagaagcagagtgacccagatgagcaagaaggtgcacacccaggacatcagcaccaagcacagcgaggactggggcaaggaggagggccagttccagaagagaaagaccggcagactgcagagaaccagaaagaagggccacagcaccaacctgttccagtggctgtgggagaagctgaccttcctgatccagggcttcagagagatgatcagaaacctgacccagagcctggccttcgagaccttcatcttcttcgtggtgtgcctgaacaccgtgatgctggtggcccagaccttcgccgaggtggagatcagaggcgagtggtacttcatggccctggacagcatcttcttctgcatctacgtggtggaggccctgctgaagatcatcgccctgggcctgagctacttcttcgacttctggaacaacctggacttcttcatcatggccatggccgtgctggacttcctgctgatgcagacccacagcttcgccatctaccaccagagcctgttcagaatcctgaaggtgttcaagagcctgagagccctgagagccatcagagtgctgagaagactgagcttcctgaccagcgtgcaggaggtgaccggcaccctgggccagagcctgcccagcatcgccgccatcctgatcctgatgttcacctgcctgttcctgttcagcgccgtgctgagagccctgttcagaaagagcgaccccaagagattccagaacatcttcaccaccatcttcaccctgttcaccctgctgaccctggacgactggagcctgatctacatggacagcagagcccagggcgcctggtacatcatccccatcctggtgatctacatcatcatccagtacttcatcttcctgaacctggtgatcaccgtgctggtggacagcttccagaccgccctgttcaagggcctggagaaggccaagcaggagagagccgccagaatccaggagaagctgctggaggacagcctgaccgagctgagagccgccgagcccaaggaggtggccagcgagggcaccatgctgaagagactgatcgagaagaagttcggcaccatgaccgagaagcagcaggagctgctgttccactacctgcagctggtggccagcgtggagcaggagcagcagaagttcagaagccaggccgccgtgatcgacgagatcgtggacaccaccttcgaggccggcgaggaggacttcagaaactag

SEQ ID NO: 230296 - protein, 240 aa, Artificial Sequence
  derived and/or modified sequence
MLRSCAARLRTLGALCLPPVGRRLPGSEPRPELRSFSSEEVILKDCSVPNPSWNKDLRLLFDQFMKKCEDGSWKRLPSYKRTPTEWIQDFKTHFLDPKLMKEEQMSQAQLFTRSFDDGLGFEYVMFYNDIEKRMVCLFQGGPYLEGPPGFIHGGAIATMIDATVGMCAMMAGGIVMTANLNINYKRPIPLCSVVMINSQLDKVEGRKFFVSCNVQSVDEKTLYSEATSLFIKLNPAKSLT

SEQ ID NO: 230297 - DNA, 723 bp, Artificial Sequence
  derived and/or modified sequence
atgctgagaagctgcgccgccagactgagaaccctgggcgccctgtgcctgccccccgtgggcagaagactgcccggcagcgagcccagacccgagctgagaagcttcagcagcgaggaggtgatcctgaaggactgcagcgtgcccaaccccagctggaacaaggacctgagactgctgttcgaccagttcatgaagaagtgcgaggacggcagctggaagagactgcccagctacaagagaacccccaccgagtggatccaggacttcaagacccacttcctggaccccaagctgatgaaggaggagcagatgagccaggcccagctgttcaccagaagcttcgacgacggcctgggcttcgagtacgtgatgttctacaacgacatcgagaagagaatggtgtgcctgttccagggcggcccctacctggagggcccccccggcttcatccacggcggcgccatcgccaccatgatcgacgccaccgtgggcatgtgcgccatgatggccggcggcatcgtgatgaccgccaacctgaacatcaactacaagagacccatccccctgtgcagcgtggtgatgatcaacagccagctggacaaggtggagggcagaaagttcttcgtgagctgcaacgtgcagagcgtggacgagaagaccctgtacagcgaggccaccagcctgttcatcaagctgaaccccgccaagagcctgacctag

SEQ ID NO: 230298 - DNA, 723 bp, Artificial Sequence
  derived and/or modified sequence
atgcttaggtcatgcgcggcgaggctgagaacacttggagccctttgtctgcctcctgtggggagacgcttgcccggcagtgagccccggccagaattaaggagcttttcgtctgaggaggtcattctgaaggattgctctgtgcccaacccaagctggaacaaagacctgcgcctcttgtttgatcaatttatgaaaaaatgcgaagacggaagctggaagcgcttgccatcctacaagagaacccctaccgagtggattcaggattttaagacccatttcttggatcccaaactgatgaaggaagagcagatgagccaagcccagctgtttactaggtcttttgatgacggactgggattcgaatacgtgatgttttataatgacatagaaaaaagaatggtgtgcctttttcaggggggcccttatctggaaggcccgcccgggttcatccatggcggggcaatcgccacaatgatagatgcaaccgtcggcatgtgcgctatgatggccggagggattgtgatgacagccaacctcaatataaattataagaggccaataccactgtgttcggtcgtcatgatcaactctcagcttgacaaggtagaggggcgcaaattctttgtgagctgtaacgtccagtccgtggacgagaagactctgtactccgaggctacaagcttatttatcaaattgaatcctgctaagtcgctcacttag

SEQ ID NO: 230299 - DNA, 723 bp, Artificial Sequence
  derived and/or modified sequence
atgctgcggagctgtgccgcccggctgcggaccctgggcgccctgtgcctgccccctgtgggccggcggctgcccggcagcgagcccaggcctgagctgcgctccttcagcagcgaggaggtgatcctgaaggactgcagcgtgcccaaccccagctggaacaaggacctgcggctgctgtttgaccagttcatgaagaagtgtgaagatggctcctggaagaggctgcccagctacaagaggacccccacagagtggatccaggacttcaagacccacttcctggaccccaagctgatgaaggaggagcagatgagccaggcccagctgttcaccaggagctttgatgatggcctgggctttgaatatgtgatgttctacaatgacatcgagaagaggatggtgtgcctcttccagggcggcccctacctggagggccccccaggcttcatccacggcggggccatcgccaccatgattgatgccaccgtgggcatgtgtgccatgatggccggcggcatcgtgatgacagccaacctgaacatcaactacaagaggcccatccccctgtgcagcgtggtgatgatcaacagccagctggacaaggtggagggcaggaagttctttgtgtcctgcaatgtgcagagcgtggatgagaagaccctgtacagcgaggccaccagcctcttcatcaagctgaacccagccaagagcctgacctag

SEQ ID NO: 230300 - DNA, 723 bp, Artificial Sequence
  derived and/or modified sequence
atgctgcggagctgcgccgcccggctgcggaccctgggcgccctgtgcctccccccagttggtcgtagattgccgggttccgagcccaggccagaattgcggagcttctcatcggaagaggtgatcttgaaggactgctcagtgccaaatcccagctggaacaaggatctgcggctgctgttcgatcagttcatgaaaaaatgcgaagacggatcttggaagcggctacccagttataaacggacacccaccgaatggatccaggacttcaaaacccatttcctggatcccaaactgatgaaagaggagcagatgtctcaggcccagctgttcacaagaagtttcgacgacggattgggctttgagtacgtgatgttctataatgatattgagaaacgcatggtgtgtctgttccagggcgggccctacctggaaggtcccccaggttttattcacggcggcgccatcgctacgatgatcgatgctacagtcggaatgtgcgccatgatggccggtggtatcgtcatgaccgccaacctgaatatcaattacaaacgacctattcccctttgcagcgtggtgatgatcaactctcagctggacaaggtggaggggaggaagttttttgtttcttgtaatgtgcaaagcgtcgatgaaaaaacgctttacagtgaagcaaccagcctgtttattaaattgaacccggccaagtctcttacttag

SEQ ID NO: 230301 - DNA, 723 bp, Artificial Sequence
  derived and/or modified sequence
atgctccgctcttgcgccgctcggctgaggaccctgggcgctctctgtctcccccctgtggggagacgactcccaggaagcgagcctcgtcccgagctaagatccttttcaagtgaggaggtaattctaaaggactgttcagtcccaaatccttcatggaataaggatttacgactgctgtttgatcagttcatgaaaaagtgtgaggacggatcctggaagcgcctaccaagttacaaacggacaccaactgagtggatacaggactttaagacacactttctagaccccaagctcatgaaagaagaacagatgtcgcaggcacagcttttcacgcgatcctttgatgacggtttgggttttgaatacgtaatgttttacaatgatatcgagaagcgaatggtgtgcctctttcagggaggtccataccttgagggtccaccgggatttatccatggaggtgccatcgcgaccatgattgacgccaccgtgggaatgtgcgctatgatggctggcggaattgttatgaccgcaaacctcaacatcaattacaagcgccctatcccattgtgtagcgttgtgatgattaattctcaactggacaaagtcgagggaaggaagttcttcgtgagctgtaatgtgcagagcgtggacgagaaaacattgtactccgaggctacctcactcttcattaagttgaatccagcgaagtctctcacctag

SEQ ID NO: 230302 - DNA, 2377 bp, Artificial Sequence
  derived and/or modified sequence
gcgcgggttccggggctgaggggctgaggggcccaaggcgataaccgggatccgctccggccgcgctcctcttgcctttgagaagccccggaagtggcccggctgttggccgcagcgggaggtcttcggaaagaaaaggccggaaccagaagatagactcaacagcgatgccctacccggaccccgccggcctcacaccccggccagccagccgccagtagtgcgcaccgcctcctccccaagccccgccctgcgtccaccccaggggttaactcgcacgcgcgctcttgtggcggaggtagagtgcgccgtccagggctagagcaagcgcggccccgcggcccggagccatgctgaggagctgcgccgcgcgcctccgcacgctgggggctctgtgcctgccgccagtaggccggcgcctgccgggaagcgagccgcgacccgagctgaggtcattttcttctgaggaagtcattcttaaggactgttctgtccccaaccccagctggaacaaggacctaagactgctctttgaccagtttatgaagaaatgtgaagacggctcctggaaacgtttgccttcatataaacgtacacctactgaatggattcaagacttcaaaacccattttcttgacccaaagcttatgaaagaagaacaaatgtcacaggcccagctcttcaccagaagctttgatgatggcctgggctttgaatacgtgatgttctacaatgacattgagaaaaggatggtttgcttatttcaaggaggcccttacctggaaggaccacctggattcattcatggaggtgccattgcaaccatgattgatgctactgttggtatgtgtgcaatgatggctgggggaatcgtcatgactgccaatctcaacatcaattataaaagacctatccctctttgttctgttgttatgataaatagccaacttgataaagttgaaggaaggaaattttttgtttcctgtaatgttcagagtgttgatgagaagaccctatactcagaggcgacaagcttatttataaagctgaatcctgctaaaagtctgacataaagagctgctggtgaactccatctcattctcgcccctccagaagaagcagttgtcccccaaatactctgctccctcactgctgaatccctgtagggagaagcctgccaacagtgaccttccgaaacagccttctgaatacaaagaggattcagtttccatcttctcaactttttaacacagaaatacttcctgcgagcatatcgacaactctcgggccaggcgctgtggctcacacctataatcccagcactttaggaggccgaggcaggcggattgcctgagctcaggagttcaagatcagtctgggcaacacgatgaaactccgtctctactaaaatacaaaaaattatccaggcatggtggcgtacgcctgtagtcccagctactcaggaggctgaggcaggagaattgcttgaacccaggaggaagaggttgcagtgagccaagatcatgccacatcactccaacctgggcaacagaacaagaacccatctcaaacaaacaaacaaacaaaaaaaaaaaactcttgtctccttaggatatgttacctgctccactgcagactagagaaataaatgtgtattgaaccttttactgcaaacttgaaaatgctagaaaaccaagcatgaagaataaatacatggtgggaaacacacaggcatgtgcatatgcatatacattgtaagttagtaagttagaaagctagctttgttgtatctgaacacatgaatcttttttggtcagtgtaggaagcacagccagatcctataggaatgaatacctcaaatctgttgtctgagattctagagattaaaccactgtgccatttttaacccaggctgtactgttgtttcttaccaacagcataggttttcatcactggaaggagcctgtgttcatttcctagggctgctgtagcaaagtagtacaaactggattgtttaaaccaacaaaaactcattgtctctcagttctggaggccagaagttcaaaatcaaggtgttgaccaaggccattctcctgaaagtgctagggaaggagctgtccacgcctccctcctggcttctgggagcctcaggtgttccttggcttctagatgcatcattccagtcctccatcttcacatggcattccctctgtgtgtctccacagtgtcttccctctgtgcagatctatctctgtgtccaagtctcctctttttataaggaaaccagtcataatggacccacctgaatgacctcattttaacttgattacctctgtaaaaaatgtatttccaaataaagtgaccttatgaggtattg

SEQ ID NO: 230303 - protein, 295 aa, Artificial Sequence
  derived and/or modified sequence
MEHQLLCCEVETIRRAYPDANLLNDRVLRAMLKAEETCAPSVSYFKCVQKEVLPSMRKIVATWMLEVCEEQKCEEEVFPLAMNYLDRFLSLEPVKKSRLQLLGATCMFVASKMKETIPLTAEKLCIYTDNSIRPEELLQMELLLVNKLKWNLAAMTPHDFIEHFLSKMPEAEENKQIIRKHAQTFVALCATDVKFISNPPSMVAAGSVVAAVQGLNLRSPNNFLSYYRLTRFLSRVIKCDPDCLRACQEQIEALLESSLRQAQQNMDPKAAEEEEEEEEEVDLACTPTDVRDVDI

SEQ ID NO: 230304 - DNA, 486 bp, Artificial Sequence
  derived and/or modified sequence
atggagcaccagctgctgtgctgcgaggtggagaccatcagaagagcctaccccgacgccaacctgctgaacgacagagtgctgagagccatgctgaaggccgaggagacctgcgcccccagcgtgagctacttcaagtgcgtgcagaccttcgtggccctgtgcgccaccgacgtgaagttcatcagcaacccccccagcatggtggccgccggcagcgtggtggccgccgtgcagggcctgaacctgagaagccccaacaacttcctgagctactacagactgaccagattcctgagcagagtgatcaagtgcgaccccgactgcctgagagcctgccaggagcagatcgaggccctgctggagagcagcctgagacaggcccagcagaacatggaccccaaggccgccgaggaggaggaggaggaggaggaggaggtggacctggcctgcacccccaccgacgtgagagacgtggacatctag

SEQ ID NO: 230305 - DNA, 4307 bp, Artificial Sequence
  derived and/or modified sequence
gcttaacaacagtaacgtcacacggactacaggggagttttgttgaagttgcaaagtcctggagcctccagagggctgtcggcgcagtagcagcgagcagcagagtccgcacgctccggcgaggggcagaagagcgcgagggagcgcggggcagcagaagcgagagccgagcgcggacccagccaggacccacagccctccccagctgcccaggaagagccccagccatggaacaccagctcctgtgctgcgaagtggaaaccatccgccgcgcgtaccccgatgccaacctcctcaacgaccgggtgctgcgggccatgctgaaggcggaggagacctgcgcgccctcggtgtcctacttcaaatgtgtgcagaaggaggtcctgccgtccatgcggaagatcgtcgccacctggatgctggaggtctgcgaggaacagaagtgcgaggaggaggtcttcccgctggccatgaactacctggaccgcttcctgtcgctggagcccgtgaaaaagagccgcctgcagctgctgggggccacttgcatgttcgtggcctctaagatgaaggagaccatccccctgacggccgagaagctgtgcatctacaccgacaactccatccggcccgaggagctgctgcaaatggagctgctcctggtgaacaagctcaagtggaacctggccgcaatgaccccgcacgatttcattgaacacttcctctccaaaatgccagaggcggaggagaacaaacagatcatccgcaaacacgcgcagaccttcgttgccctctgtgccacagatgtgaagttcatttccaatccgccctccatggtggcagcggggagcgtggtggccgcagtgcaaggcctgaacctgaggagccccaacaacttcctgtcctactaccgcctcacacgcttcctctccagagtgatcaagtgtgacccggactgcctccgggcctgccaggagcagatcgaagccctgctggagtcaagcctgcgccaggcccagcagaacatggaccccaaggccgccgaggaggaggaagaggaggaggaggaggtggacctggcttgcacacccaccgacgtgcgggacgtggacatctgagggcgccaggcaggcgggcgccaccgccacccgcagcgagggcggagccggccccaggtgctcccctgacagtccctcctctccggagcattttgataccagaagggaaagcttcattctccttgttgttggttgttttttcctttgctctttcccccttccatctctgacttaagcaaaagaaaaagattacccaaaaactgtctttaaaagagagagagagaaaaaaaaaatagtatttgcataaccctgagcggtgggggaggagggttgtgctacagatgatagaggattttataccccaataatcaactcgtttttatattaatgtacttgtttctctgttgtaagaataggcattaacacaaaggaggcgtctcgggagaggattaggttccatcctttacgtgtttaaaaaaaagcataaaaacattttaaaaacatagaaaaattcagcaaaccatttttaaagtagaagagggttttaggtagaaaaacatattcttgtgcttttcctgataaagcacagctgtagtggggttctaggcatctctgtactttgcttgctcatatgcatgtagtcactttataagtcattgtatgttattatattccgtaggtagatgtgtaacctcttcaccttattcatggctgaagtcacctcttggttacagtagcgtagcgtgcccgtgtgcatgtcctttgcgcctgtgaccaccaccccaacaaaccatccagtgacaaaccatccagtggaggtttgtcgggcaccagccagcgtagcagggtcgggaaaggccacctgtcccactcctacgatacgctactataaagagaagacgaaatagtgacataatatattctatttttatactcttcctatttttgtagtgacctgtttatgagatgctggttttctacccaacggccctgcagccagctcacgtccaggttcaacccacagctacttggtttgtgttcttcttcatattctaaaaccattccatttccaagcactttcagtccaataggtgtaggaaatagcgctgtttttgttgtgtgtgcagggagggcagttttctaatggaatggtttgggaatatccatgtacttgtttgcaagcaggactttgaggcaagtgtgggccactgtggtggcagtggaggtggggtgtttgggaggctgcgtgccagtcaagaagaaaaaggtttgcattctcacattgccaggatgataagttcctttccttttctttaaagaagttgaagtttaggaatcctttggtgccaactggtgtttgaaagtagggacctcagaggtttacctagagaacaggtggtttttaagggttatcttagatgtttcacaccggaaggtttttaaacactaaaatatataatttatagttaaggctaaaaagtatatttattgcagaggatgttcataaggccagtatgatttataaatgcaatctccccttgatttaaacacacagatacacacacacacacacacacacacaaaccttctgcctttgatgttacagatttaatacagtttatttttaaagatagatccttttataggtgagaaaaaaacaatctggaagaaaaaaaccacacaaagacattgattcagcctgtttggcgtttcccagagtcatctgattggacaggcatgggtgcaaggaaaattagggtactcaacctaagttcggttccgatgaattcttatcccctgccccttcctttaaaaaacttagtgacaaaatagacaatttgcacatcttggctatgtaattcttgtaatttttatttaggaagtgttgaagggaggtggcaagagtgtggaggctgacgtgtgagggaggacaggcgggaggaggtgtgaggaggaggctcccgaggggaaggggcggtgcccacaccggggacaggccgcagctccattttcttattgcgctgctaccgttgacttccaggcacggtttggaaatattcacatcgcttctgtgtatctctttcacattgtttgctgctattggaggatcagttttttgttttacaatgtcatatactgccatgtactagttttagttttctcttagaacattgtattacagatgccttttttgtagttttttttttttttatgtgatcaattttgacttaatgtgattactgctctattccaaaaaggttgctgtttcacaatacctcatgcttcacttagccatggtggacccagcgggcaggttctgcctgctttggcgggcagacacgcgggcgcgatcccacacaggctggcgggggccggccccgaggccgcgtgcgtgagaaccgcgccggtgtccccagagaccaggctgtgtccctcttctcttccctgcgcctgtgatgctgggcacttcatctgatcgggggcgtagcatcatagtagtttttacagctgtgttattctttgcgtgtagctatggaagttgcataattattattattattattataacaagtgtgtcttacgtgccaccacggcgttgtacctgtaggactctcattcgggatgattggaatagcttctggaatttgttcaagttttgggtatgtttaatctgttatgtactagtgttctgtttgttattgttttgttaattacaccataatgctaatttaaagagactccaaatctcaatgaagccagctcacagtgctgtgtgccccggtcacctagcaagctgccgaaccaaaagaatttgcaccccgctgcgggcccacgtggttggggccctgccctggcagggtcatcctgtgctcggaggccatctcgggcacaggcccaccccgccccacccctccagaacacggctcacgcttacctcaaccatcctggctgcggcgtctgtctgaaccacgcgggggccttgagggacgctttgtctgtcgtgatggggcaagggcacaagtcctggatgttgtgtgtatcgagaggccaaaggctggtggcaagtgcacggggcacagcggagtctgtcctgtgacgcgcaagtctgagggtctgggcggcgggcggctgggtctgtgcatttctggttgcaccgcggcgcttcccagcaccaacatgtaaccggcatgtttccagcagaagacaaaaagacaaacatgaaagtctagaaataaaactggtaaaacccca

SEQ ID NO: 230306 - DNA, 1394 bp, Artificial Sequence
  derived and/or modified sequence
agagggctgtcggcgcagtagcagcgagcagcagagtccgcacgctccggcgaggggcagaagagcgcgagggagcgcggggcagcagaagcgagagccgagcgcggacccagccaggacccacagccctccccagctgcccaggaagagccccagccatggaacaccagctcctgtgctgcgaagtggaaaccatccgccgcgcgtaccccgatgccaacctcctcaacgaccgggtgctgcgggccatgctgaaggcggaggagacctgcgcgccctcggtgtcctacttcaaatgtgtgcagaccttcgttgccctctgtgccacagatgtgaagttcatttccaatccgccctccatggtggcagcggggagcgtggtggccgcagtgcaaggcctgaacctgaggagccccaacaacttcctgtcctactaccgcctcacacgcttcctctccagagtgatcaagtgtgacccggactgcctccgggcctgccaggagcagatcgaagccctgctggagtcaagcctgcgccaggcccagcagaacatggaccccaaggccgccgaggaggaggaagaggaggaggaggaggtggacctggcttgcacacccaccgacgtgcgggacgtggacatctgagggcgccaggcaggcgggcgccaccgccacccgcagcgagggcggagccggccccaggtgctcccctgacagtccctcctctccggagcattttgataccagaagggaaagcttcattctccttgttgttggttgttttttcctttgctctttcccccttccatctctgacttaagcaaaagaaaaagattacccaaaaactgtctttaaaagagagagagagaaaaaaaaaatagtatttgcataaccctgagcggtgggggaggagggttgtgctacagatgatagaggattttataccccaataatcaactcgtttttatattaatgtacttgtttctctgttgtaagaataggcattaacacaaaggaggcgtctcgggagaggattaggttccatcctttacgtgtttaaaaaaaagcataaaaacattttaaaaacatagaaaaattcagcaaaccatttttaaagtagaagagggttttaggtagaaaaacatattcttgtgcttttcctgataaagcacagctgtagtggggttctaggcatctctgtactttgcttgctcatatgcatgtagtcactttataagtcattgtatgttattatattccgtaggtagatgtgtaacctcttcaccttattcatggctgaagtcacctcttggttacagtagcgtagcgtgcccgtgtgcatgtcctttgcgcctgtgaccaccaccccaacaaaccatccagtgacaaaccatc

SEQ ID NO: 230307 - DNA, 486 bp, Artificial Sequence
  derived and/or modified sequence
atggaacaccagctgctgtgctgcgaagtcgagactattcgccgagcttatcccgacgctaatctgctgaacgatagggtgctgagggctatgctgaaagccgaagagacttgcgctcccagtgtgtcttactttaaatgtgtccagacattcgtggccctgtgtgccactgatgtgaagtttattagtaaccctcccagcatggtagccgcaggttccgtggttgccgcggtgcaaggcctgaacctgcgctcacccaataatttcctttcatactaccgcctgacccgatttctttctagggttattaaatgtgatcctgactgtctaagagcctgccaggagcagatcgaggcccttcttgaaagtagcctccggcaagcccagcagaatatggaccccaaggcagctgaagaagaggaggaagaagaagaggaagtcgacttggcctgcaccccaacggacgtccgggacgtcgacatttag

SEQ ID NO: 230308 - DNA, 486 bp, Artificial Sequence
  derived and/or modified sequence
atggagcaccagctgctgtgctgtgaggtggagaccatccggcgggcctacccagatgccaacctgctgaatgacagagtgctgcgggccatgctgaaggccgaggagacctgtgcccccagcgtgtcctacttcaagtgtgtgcagacctttgtggccctgtgtgccacagatgtgaagttcatcagcaaccccccatccatggtggccgccggctctgtggtggccgctgtgcagggcctgaacctgcggagccccaacaacttcctgagctactaccgcctgacccgcttcctgagcagggtcatcaagtgtgaccctgactgcctgcgggcctgccaggagcagatcgaggccctgctggagagcagcctgcggcaggcccagcagaacatggaccccaaggctgctgaggaggaggaggaggaggaggaggaggtggacctggcctgcacccccacagatgtgagagatgtggacatctag

SEQ ID NO: 230309 - DNA, 486 bp, Artificial Sequence
  derived and/or modified sequence
atggagcaccagctgctgtgctgcgaggtggagaccatccggcgggcctatcccgacgccaatctcttaaatgacagagtgctgcgcgccatgttaaaggcagaggaaacttgcgctccttctgtctcctattttaaatgtgttcagacttttgtggctctgtgcgctaccgacgttaaattcatttccaacccacctagtatggtggcagcgggtagcgtggtggcagctgtgcaggggctgaatctccgtagtcccaataatttcttgtcatactacagactgacccgctttctgagccgggtgatcaagtgcgatcctgactgtctaagggcatgccaggaacagatcgaagccctccttgaatcgtctctccgacaagcccagcagaatatggaccctaaagccgcggaggaggaggaggaggaagaagaagaggtggatcttgcatgtactcccacggacgtgcgggacgttgacatctag

SEQ ID NO: 230310 - DNA, 486 bp, Artificial Sequence
  derived and/or modified sequence
atggagcaccaactgctatgctgtgaggtggagaccatacggagggcctacccggacgcaaatctgctgaacgatagggtgctgcgcgctatgctgaaagcagaggagacttgcgcacctagcgtaagctattttaagtgcgtacagactttcgtggcgctgtgcgccactgatgtcaagttcatctctaatcccccatctatggtggctgccggatcagtggtggccgctgtccagggcttgaacctgcggtctcctaacaatttcctgagctattaccgcctgacaaggttcctctccagagtgataaaatgcgatccagactgtttgcgcgcttgccaggagcaaatcgaagccctcctggaatcttcactgagacaggctcaacagaacatggatcccaaagctgcagaggaagaagaggaggaagaagaggaagtagacttagcgtgtacccctacggacgttcgcgatgtagacatctag

SEQ ID NO: 230311 - DNA, 888 bp, Artificial Sequence
  derived and/or modified sequence
atggaacatcagctcctgtgttgcgaggtggagacaatccggcgggcctaccccgacgccaacttactaaatgaccgggtcctaagagcaatgctgaaagcggaggagacctgtgccccatctgtatcatatttcaagtgtgtccaaaaggaggtgctcccctccatgcgaaaaatcgttgctacctggatgcttgaagtatgtgaggaacaaaagtgcgaagaggaggtcttccctctagcgatgaactatctcgatcggttcctgtccctggaacctgtaaaaaaatcacgcctccagcttcttggagccacttgcatgttcgtcgcctctaagatgaaggaaacaattcctctcactgcagaaaagctgtgtatttacactgacaacagcatacgccctgaagaactgctccagatggagttgcttcttgtgaacaaacttaaatggaacctagctgccatgacaccccacgactttattgagcattttttgagtaagatgccagaagccgaggaaaacaagcagattatccggaaacacgcccagacgtttgtggccctttgcgccacggatgtgaagttcatctccaatcccccttccatggtcgcagccggatctgtcgtagctgctgttcagggtctcaaccttaggtctccaaacaacttcctctcctattacaggcttactcggttcttaagccgggtgattaagtgcgaccccgactgtctaagagcttgccaggagcagattgaggcgctactcgaaagctccttacgccaggcacagcaaaacatggaccctaaggcagcagaggaggaggaagaagaagaggaggaagtggacctcgcttgcactcccaccgatgttcgggatgttgatatttag

SEQ ID NO: 230312 - DNA, 888 bp, Artificial Sequence
  derived and/or modified sequence
atggagcaccagctgctgtgctgtgaggtggagaccatccggcgggcctacccagatgccaacctgctgaatgacagagtgctgcgggccatgctgaaggccgaggagacctgtgcccccagcgtgtcctacttcaagtgtgtgcagaaggaggtgctgcccagcatgaggaagatcgtggccacctggatgctggaggtgtgtgaggagcagaagtgtgaggaggaggtgttccccctggccatgaactacctggaccgcttcctgagcctggagcctgtgaagaagagccggctgcagctgctgggcgccacctgcatgtttgtggccagcaagatgaaggagaccatccccctgacagctgagaagctgtgcatctacacagacaacagcatccggcctgaggagctgctgcagatggagctgctgctggtgaacaagctgaagtggaacctggccgccatgacccctcatgacttcatcgagcacttcctgagcaagatgcctgaggccgaggagaacaagcagatcatcaggaagcacgcccagacctttgtggccctgtgtgccacagatgtgaagttcatcagcaaccccccatccatggtggccgccggctctgtggtggccgctgtgcagggcctgaacctgcggagccccaacaacttcctgagctactaccgcctgacccgcttcctgagcagggtcatcaagtgtgaccctgactgcctgcgggcctgccaggagcagatcgaggccctgctggagagcagcctgcggcaggcccagcagaacatggaccccaaggctgctgaggaggaggaggaggaggaggaggaggtggacctggcctgcacccccacagatgtgagagatgtggacatctag

SEQ ID NO: 230313 - DNA, 888 bp, Artificial Sequence
  derived and/or modified sequence
atggagcaccagctgctgtgctgcgaggtggagaccatccggcgggcgtatccagatgctaacttactgaacgatagagttttgagagccatgctgaaagctgaagaaacctgtgccccaagcgtatcctatttcaagtgcgttcaaaaggaggtgctaccctctatgcgcaaaatagtggcgacctggatgctcgaggtctgcgaagagcaaaaatgtgaggaagaagtgtttccattggccatgaactatctcgatcgctttctcagtctcgagccagtgaagaagtccagactgcagctgctcggcgctacatgtatgttcgttgcatccaagatgaaggagactattcccctgacagctgagaagttatgtatctacaccgacaacagcatccggcccgaggagttacttcaaatggaactgctcttggtgaacaagcttaaatggaacctcgcagcaatgaccccccatgattttatagagcatttcttgagtaagatgcccgaagccgaagagaacaagcagatcatccgtaaacatgcacagacatttgtggccttgtgcgcaaccgatgttaaattcatctcaaaccctcccagtatggttgctgctggcagcgttgtggctgcagttcaaggcctcaacctgaggtcaccaaacaacttcctgtcttattacaggctaaccagattcctcagtagagtcatcaagtgtgaccccgactgcctgcgggcgtgccaggagcagattgaggccctgctggaatcatccctccgtcaggctcagcagaatatggatcccaaagccgcagaagaggaagaagaggaggaggaggaggtggatctggcttgtaccccaaccgatgttagggacgttgatatctag

SEQ ID NO: 230314 - DNA, 888 bp, Artificial Sequence
  derived and/or modified sequence
atggaacaccaattgctctgttgcgaggttgagaccattcgccgagcttatcccgacgcgaacttactcaatgaccgcgttctgcgcgctatgctgaaggcggaggagacctgtgctccctctgtcagttactttaaatgcgtgcagaaggaggttttgcccagtatgcggaagatcgtggccacatggatgttggaggtatgtgaggagcaaaaatgtgaggaagaagtgttcccgctcgcaatgaattatctagaccgattcttatccttagagcccgtgaaaaagtcccgcctgcagctcttaggtgcaacttgcatgttcgtcgcaagcaaaatgaaagaaaccattcctcttactgccgagaagctatgtatttatacagataactcaatccggccagaagaactacttcagatggagctccttctggttaacaagctcaagtggaatctggccgctatgacaccgcatgattttatcgagcatttcctgtcaaaaatgcctgaggccgaggaaaataaacaaatcattcgcaagcacgcccaaacattcgtcgccctgtgcgccacggacgtaaagttcatctcaaacccccctagtatggtggcagccggaagcgtggtggctgcagtgcagggccttaacctcagaagccctaacaattttctttcttattaccggttgactcggtttctttccagggtgatcaagtgcgatcccgactgtctgagagcatgccaggagcagatagaggctctgctggagtctagcttgcgccaagctcagcagaacatggacccaaaggcggctgaggaggaggaggaggaggaggaagaagtggacctggcttgcacccctacagacgttcgagatgtagacatctag

SEQ ID NO: 230315 - DNA, 888 bp, Artificial Sequence
  derived and/or modified sequence
atggagcaccagctgctgtgctgcgaggtggagaccatcagaagagcctaccccgacgccaacctgctgaacgacagagtgctgagagccatgctgaaggccgaggagacctgcgcccccagcgtgagctacttcaagtgcgtgcagaaggaggtgctgcccagcatgagaaagatcgtggccacctggatgctggaggtgtgcgaggagcagaagtgcgaggaggaggtgttccccctggccatgaactacctggacagattcctgagcctggagcccgtgaagaagagcagactgcagctgctgggcgccacctgcatgttcgtggccagcaagatgaaggagaccatccccctgaccgccgagaagctgtgcatctacaccgacaacagcatcagacccgaggagctgctgcagatggagctgctgctggtgaacaagctgaagtggaacctggccgccatgaccccccacgacttcatcgagcacttcctgagcaagatgcccgaggccgaggagaacaagcagatcatcagaaagcacgcccagaccttcgtggccctgtgcgccaccgacgtgaagttcatcagcaacccccccagcatggtggccgccggcagcgtggtggccgccgtgcagggcctgaacctgagaagccccaacaacttcctgagctactacagactgaccagattcctgagcagagtgatcaagtgcgaccccgactgcctgagagcctgccaggagcagatcgaggccctgctggagagcagcctgagacaggcccagcagaacatggaccccaaggccgccgaggaggaggaggaggaggaggaggaggtggacctggcctgcacccccaccgacgtgagagacgtggacatctag

SEQ ID NO: 230316 - protein, 561 aa, Artificial Sequence
  derived and/or modified sequence
MAESGESGGPPGSQDSAAGAEGAGAPAAAASAEPKIMKVTVKTPKEKEEFAVPENSSVQQFKEEISKRFKSHTDQLVLIFAGKILKDQDTLSQHGIHDGLTVHLVIKTQNRPQDHSAQQTNTAGSNVTTSSTPNSNSTSGSATSNPFGLGGLGGLAGLSSLGLNTTNFSELQSQMQRQLLSNPEMMVQIMENPFVQSMLSNPDLMRQLIMANPQMQQLIQRNPEISHMLNNPDIMRQTLELARNPAMMQEMMRNQDRALSNLESIPGGYNALRRMYTDIQEPMLSAAQEQFGGNPFASLVSNTSSGEGSQPSRTENRDPLPNPWAPQTSQSSSASSGTASTVGGTTGSTASGTSGQSTTAPNLVPGVGASMFNTPGMQSLLQQITENPQLMQNMLSAPYMRSMMQSLSQNPDLAAQMQNPDTLSAMSNPRAMQALLQIQQGLQTLATEAPGLIPGFTPGLGALGSTGGSSGTNGSNATPSENTSPTAGTTEPGHQQFIQQMLQALAGVNPQLQNPEVRFQQQLEQLSAMGFLNREANLQALIATGGDINAAIERLLGSQPS

SEQ ID NO: 230317 - DNA, 1686 bp, Artificial Sequence
  derived and/or modified sequence
atggccgagagcggcgagagcggcggcccccccggcagccaggacagcgccgccggcgccgagggcgccggcgcccccgccgccgccgccagcgccgagcccaagatcatgaaggtgaccgtgaagacccccaaggagaaggaggagttcgccgtgcccgagaacagcagcgtgcagcagttcaaggaggagatcagcaagagattcaagagccacaccgaccagctggtgctgatcttcgccggcaagatcctgaaggaccaggacaccctgagccagcacggcatccacgacggcctgaccgtgcacctggtgatcaagacccagaacagaccccaggaccacagcgcccagcagaccaacaccgccggcagcaacgtgaccaccagcagcacccccaacagcaacagcaccagcggcagcgccaccagcaaccccttcggcctgggcggcctgggcggcctggccggcctgagcagcctgggcctgaacaccaccaacttcagcgagctgcagagccagatgcagagacagctgctgagcaaccccgagatgatggtgcagatcatggagaaccccttcgtgcagagcatgctgagcaaccccgacctgatgagacagctgatcatggccaacccccagatgcagcagctgatccagagaaaccccgagatcagccacatgctgaacaaccccgacatcatgagacagaccctggagctggccagaaaccccgccatgatgcaggagatgatgagaaaccaggacagagccctgagcaacctggagagcatccccggcggctacaacgccctgagaagaatgtacaccgacatccaggagcccatgctgagcgccgcccaggagcagttcggcggcaaccccttcgccagcctggtgagcaacaccagcagcggcgagggcagccagcccagcagaaccgagaacagagaccccctgcccaacccctgggccccccagaccagccagagcagcagcgccagcagcggcaccgccagcaccgtgggcggcaccaccggcagcaccgccagcggcaccagcggccagagcaccaccgcccccaacctggtgcccggcgtgggcgccagcatgttcaacacccccggcatgcagagcctgctgcagcagatcaccgagaacccccagctgatgcagaacatgctgagcgccccctacatgagaagcatgatgcagagcctgagccagaaccccgacctggccgcccagatgcagaaccccgacaccctgagcgccatgagcaaccccagagccatgcaggccctgctgcagatccagcagggcctgcagaccctggccaccgaggcccccggcctgatccccggcttcacccccggcctgggcgccctgggcagcaccggcggcagcagcggcaccaacggcagcaacgccacccccagcgagaacaccagccccaccgccggcaccaccgagcccggccaccagcagttcatccagcagatgctgcaggccctggccggcgtgaacccccagctgcagaaccccgaggtgagattccagcagcagctggagcagctgagcgccatgggcttcctgaacagagaggccaacctgcaggccctgatcgccaccggcggcgacatcaacgccgccatcgagagactgctgggcagccagcccagctag

SEQ ID NO: 230318 - DNA, 1686 bp, Artificial Sequence
  derived and/or modified sequence
atggccgagtctggagagagcggaggtccaccaggaagtcaggacagcgcggccggcgccgagggtgccggagcacctgctgccgctgcctccgcagaaccaaagatcatgaaggtaaccgtaaaaacaccaaaagagaaagaggaattcgccgtaccagaaaactcctccgtgcagcagttcaaagaggaaataagcaagcgttttaaatcccacacagaccagctggtgttgattttcgctgggaaaattctgaaggaccaggataccttgtcccagcacggaatacatgacggactcacagttcacctggtgatcaagactcagaataggccacaggatcactccgctcaacaaaccaacacagcagggtccaatgtgactaccagctcaactcccaatagcaactccaccagcgggtctgcgacctccaatcccttcggactggggggtttaggcggacttgccggtctatccagcctgggcttaaacacgactaatttcagcgagctgcagagccagatgcagagacaattactttctaatccggagatgatggtccagattatggaaaatccttttgttcagagcatgctgagcaacccagacctcatgagacagctcattatggcaaaccctcagatgcagcagctgatacagagaaatcccgagatctcccacatgcttaacaatcctgacattatgagacagacattagagctggctcgaaatcctgctatgatgcaggaaatgatgcggaatcaagatcgagccttgtcgaacctcgaatcaatccctgggggatacaacgctctgcgtagaatgtacaccgacatccaggagccaatgctgtctgccgcacaagagcagtttggaggaaaccctttcgccagtctggtcagcaatacaagttcaggagaaggcagccagccctcaagaacggaaaatagggacccgttgcctaatccttgggctccgcaaaccagccaatcaagttccgcgtcaagcgggaccgcgtccaccgtaggggggactaccggttctacagctagtggtacatctggccagagcaccactgctcccaacttggttcccggagtgggtgcaagcatgttcaatacccctggaatgcagagtctcctccagcaaattaccgagaacccccaactgatgcagaacatgctctccgccccctatatgaggagcatgatgcagagtttaagccagaatccggatctcgcagcccagatgcagaaccccgacaccctctccgccatgtccaatccacgggctatgcaggccttacttcagatccaacagggcctccagaccctcgccacagaggccccaggtctaatcccaggatttactcctgggctcggcgctctgggatctacaggcggcagttctggtactaacggaagcaacgcaacaccttctgaaaatacctcccccacagcgggaacgactgagcccggtcatcagcaattcatccagcagatgttgcaggctctcgctggcgtgaacccacagctgcagaatccagaagtaaggtttcagcagcagctcgaacaactatcggccatggggtttctgaatagagaggcaaacctccaggccttgatcgccactggtggcgacatcaacgctgctattgaacgtctgcttggttcccagcctagttag

SEQ ID NO: 230319 - DNA, 1686 bp, Artificial Sequence
  derived and/or modified sequence
atggccgagagcggggagagcggcggccccccaggcagccaggacagcgctgctggagctgagggcgctggggccccagctgctgctgccagcgctgagcccaagatcatgaaggtgacagtgaagacccccaaggagaaggaggagtttgctgtgcctgagaacagctctgtgcagcagttcaaggaggagatcagcaagcgcttcaagagccacacagaccagctggtgctgatctttgctgggaagatcctgaaggaccaggacaccctgagccagcacggcatccatgatggcctgactgtgcacctggtgatcaagacccagaaccggccccaggaccacagcgcccagcagaccaacacagctggcagcaatgtgaccaccagcagcacccccaacagcaacagcaccagcggcagcgccaccagcaaccccttcggcctgggcggcctgggcggcctggccggcctgagcagcctgggcctgaacaccaccaacttcagcgagctgcagagccagatgcagaggcagctgctgagcaaccctgagatgatggtgcagatcatggagaacccctttgtgcagagcatgctgagcaacccagacctgatgaggcagctgatcatggccaacccccagatgcagcagctgatccagagaaatcctgagatcagccacatgctgaacaacccagacatcatgaggcagaccctggagctggccagaaatcctgccatgatgcaggagatgatgaggaaccaggaccgggccctgagcaacctggagagcatccctgggggctacaatgccctgcggaggatgtacacagacatccaggagcccatgctgtctgctgcccaggagcagtttggaggcaacccctttgccagcctggtgagcaacaccagcagtggagagggcagccagcccagcaggacagaaaatagagaccccctgcccaacccctgggccccccagaccagccagagcagcagcgccagcagcggcacagccagcacagtgggcggcaccaccggcagcacagccagcggcaccagcggccagagcaccacagcccccaacctggtgcctggggtgggcgcctccatgttcaacaccccaggcatgcagagcctgctgcagcagatcacagagaacccccagctgatgcagaacatgctgagcgccccctacatgaggtccatgatgcagagcctgagccagaacccagacctggccgcccagatgcagaacccagacaccctgagcgccatgagcaacccccgggccatgcaggccctgctgcagatccagcagggcctgcagaccctggccacagaggcccctggcctcatccctggcttcaccccaggcctgggcgccctgggcagcactggaggcagcagcggcaccaacggcagcaatgccacccccagcgagaacaccagccccacagctggcaccacagagcccggccaccagcagttcatccagcagatgctgcaggccctggccggcgtgaacccccagctgcagaaccctgaggtgcgcttccagcagcagctggagcagctgagcgccatgggcttcctgaaccgggaggccaacctgcaggccctgattgccaccggcggggacatcaatgctgccatcgagcggctgctgggcagccagcccagctag

SEQ ID NO: 230320 - DNA, 1686 bp, Artificial Sequence
  derived and/or modified sequence
atggccgagagcggcgagagcggcggcccccccggcagccaggactctgcagcaggcgccgagggcgctggggcccctgcagctgctgcgtcggccgagccaaaaatcatgaaggtcacagtgaaaaccccaaaggagaaagaggaatttgctgtgccagagaacagctccgtccagcagtttaaggaagagattagtaaacgatttaagtcccatacagaccagctggtactgatctttgctgggaagatactcaaggatcaggacactctgagtcaacatgggatccatgacggtctaaccgtccacctcgtcattaagacacagaatcgaccgcaagatcatagcgcacagcaaacgaacactgccggatccaatgtaacaacatcatcgacacccaattccaactctacaagtggcagcgccacttccaaccctttcggccttggagggctggggggtctggctggtctgtcatcattaggactcaacactaccaattttagtgagctgcagagtcagatgcagaggcagctgttaagtaacccagagatgatggtgcaaatcatggaaaatccattcgttcagtcaatgctgagtaacccagatctgatgcgtcagcttattatggctaatccccagatgcaacagctcatccagcggaacccggaaattagccacatgcttaacaatcccgacatcatgagacagactctcgaattggctcgcaacccagcgatgatgcaggaaatgatgaggaatcaggatcgcgcattgtctaacctggagagcatcccaggtggatacaacgcattgagaagaatgtataccgatattcaggagcccatgctgtctgccgcgcaggagcaatttggaggaaacccattcgccagccttgtgtcgaacacttcctccggcgagggctcgcagccgtccagaactgagaaccgcgatccactgcccaatccatgggccccccagacatcacaatctagctctgcttcttcagggacagcaagtacagtgggcggcaccactggttcgaccgccagcggtacttccggacagagtacaacagcccccaacctcgtcccaggtgtgggagccagcatgttcaacactccaggcatgcagagtctgttgcagcaaataaccgagaatcctcagctcatgcaaaacatgctgtccgctccatatatgcgaagcatgatgcagagcttgtctcagaacccggatttggccgcacagatgcagaacccagacactctgtctgctatgtcaaaccccagagccatgcaggccctgctccagatccagcaggggcttcagaccttggcaacagaagcccccggcttaattcccggatttacccctgggctcggtgctcttggatcaactggtggttcctctggcacaaacggtagcaacgccaccccctcagagaacacaagcccgacagccggcactactgaacccggacaccaacagttcatccaacagatgctgcaggctcttgccggtgttaaccctcagctacagaacccagaggtccggttccaacaacagcttgagcaactcagcgctatggggtttctaaaccgtgaggctaacctacaggccttgattgcaacaggcggggatattaacgctgctattgagaggctgctgggatcacagccctcgtag

SEQ ID NO: 230321 - DNA, 1686 bp, Artificial Sequence
  derived and/or modified sequence
atggcggagagtggtgaatcggggggtcctcctggatcccaagattccgctgcaggagctgaaggcgctggcgctcccgcagctgctgcatctgcagaacccaaaattatgaaggtcacagtcaaaactccaaaggagaaggaggagttcgccgttcctgaaaattctagcgttcagcagttcaaagaagaaattagcaaacgctttaagtcccacaccgatcagctcgttcttatttttgccggaaagatccttaaagatcaggataccttgtcacagcatggaatccacgatggcctgaccgtccacctcgtcatcaagacacagaacaggccccaggatcattctgcccagcagaccaacacagccggaagcaatgtcaccacttcaagcacacctaactccaactcaactagtgggtccgcaacctcaaatccatttggtctgggtggcctcgggggtctggcgggtctgtcctccttaggactcaatacaaccaactttagcgaactgcaatcacagatgcagcgtcagctgctgagcaacccggagatgatggtgcagatcatggagaatccatttgtgcagtccatgctctctaatccggatctgatgcgtcagcttatcatggccaacccacagatgcagcagcttatacagcgcaatcccgagattagtcacatgctgaataatccagacataatgaggcagacactggaactcgccagaaatccagcaatgatgcaggaaatgatgcgcaaccaggatagagccctcagcaatctggagtccattccaggtggatataacgcacttcggaggatgtacaccgacattcaggaaccgatgctatcggcagctcaggaacagtttggaggaaatccctttgcaagtctcgtctctaacacgtcgtccggcgaggggagccagccctctcgaaccgagaatagggaccctctgccgaacccgtgggcaccccagactagtcagtctagctcagcatctagcgggacagcatccaccgttggaggcacaactggctctaccgcctccggcacttccggtcagtcaacgacagctcctaatttggtgccaggcgtcggtgcatcaatgtttaataccccgggaatgcagtccctcctccagcagatcacagaaaacccacagctcatgcagaatatgctctccgccccatatatgcgatcaatgatgcagtctctttcacagaaccccgacctcgccgctcaaatgcagaaccctgacaccttgtccgctatgagcaatccgcgtgccatgcaggcactgctacaaattcagcagggcttacagacgctggctacagaagccccagggctcatacccggattcacacccggtttaggcgcattgggcagcactgggggaagttcaggcacgaatggatctaacgctaccccatccgagaataccagccctactgccggaacaacagaaccgggtcaccagcagttcatacagcaaatgcttcaggctctggccggagtgaacccacagctgcagaaccctgaagtgcggtttcagcagcagttggagcaactgtcagccatgggctttcttaacagagaggctaatctccaagcattgatagcaactggaggagatattaatgcagccatcgaacgcctccttggcagccaaccttcatag

SEQ ID NO: 230322 - DNA, 2299 bp, Artificial Sequence
  derived and/or modified sequence
gcggatgtcggtgtgagcgagcggcgcctgaacacacggcggctgccgagcgcctgacccgggcctgcgccagagcctgcaccgagctccggggccccacacccgctacggtggccctgcgcccgttgctactgaggcggcgtgctctgcattcttcgctgtccaggcctgccggctctggtgtctgctggctcctccttgctcgcctgctccctcctgcttgcctgagtcaccgccgccgccgccgccacagccatggccgagagtggtgaaagcggcggtcctccgggctcccaggatagcgccgccggagccgaaggtgctggcgcccccgcggccgctgcctccgcggagcccaaaatcatgaaagtcaccgtgaagaccccgaaggaaaaggaggaattcgccgtgcccgagaatagctccgtccagcagtttaaggaagaaatctctaaacgttttaaatcacatactgaccaacttgtgttgatatttgctggaaaaattttgaaagatcaagataccttgagtcagcatggaattcatgatggacttactgttcaccttgtcattaaaacacaaaacaggcctcaggatcattcagctcagcaaacaaatacagctggaagcaatgttactacatcatcaactcctaatagtaactctacatctggttctgctactagcaacccttttggtttaggtggccttgggggacttgcaggtctgagtagcttgggtttgaatactaccaacttctctgaactacagagtcagatgcagcgacaacttttgtctaaccctgaaatgatggtccagatcatggaaaatccctttgttcagagcatgctctcaaatcctgacctgatgagacagttaattatggccaatccacaaatgcagcagttgatacagagaaatccagaaattagtcatatgttgaataatccagatataatgagacaaacgttggaacttgccaggaatccagcaatgatgcaggagatgatgaggaaccaggaccgagctttgagcaacctagaaagcatcccagggggatataatgctttaaggcgcatgtacacagatattcaggaaccaatgctgagtgctgcacaagagcagtttggtggtaatccatttgcttccttggtgagcaatacatcctctggtgaaggtagtcaaccttcccgtacagaaaatagagatccactacccaatccatgggctccacagacttcccagagttcatcagcttccagcggcactgccagcactgtgggtggcactactggtagtactgccagtggcacttctgggcagagtactactgcgccaaatttggtgcctggagtaggagctagtatgttcaacacaccaggaatgcagagcttgttgcaacaaataactgaaaacccacaactgatgcaaaacatgttgtctgccccctacatgagaagcatgatgcagtcactaagccagaatcctgaccttgctgcacagatgcagaatcctgatacactatcagcaatgtcaaaccctagagcaatgcaggccttgttacagattcagcagggtttacagacattagcaacggaagccccgggcctcatcccagggtttactcctggcttgggggcattaggaagcactggaggctcttcgggaactaatggatctaacgccacacctagtgaaaacacaagtcccacagcaggaaccactgaacctggacatcagcagtttattcagcagatgctgcaggctcttgctggagtaaatcctcagctacagaatccagaagtcagatttcagcaacaactggaacaactcagtgcaatgggatttttgaaccgtgaagcaaacttgcaagctctaatagcaacaggaggtgatatcaatgcagctattgaaaggttactgggctcccagccatcatagcagcatttctgtatcttgaaaaaatgtaatttatttttgataacggctcttaaactttaaaatacctgctttatttcattttgactcttggaattctgtgctgttataaacaaacccaatatgatgcattttaaggtggagtacagtaagatgtgtgggtttttctgtatttttcttttctggaacagtgggaattaaggctactgcatgcatcacttctgcatttattgtaattttttaaaaacatcaccttttatagttgggtgaccagattttgtcctgcatctgtccagtttatttgctttttaaacattagcctatggtagtaatttatgtagaataaaagcattaaaaagaa

SEQ ID NO: 230323 - protein, 693 aa, Artificial Sequence
  derived and/or modified sequence
MRTVVLTMKASVIEMFLVLLVTGVHSNKETAKKIKRPKFTVPQINCDVKAGKIIDPEFIVKCPAGCQDPKYHVYGTDVYASYSSVCGAAVHSGVLDNSGGKILVRKVAGQSGYKGSYSNGVQSLSLPRWRESFIVLESKPKKGVTYPSALTYSSSKSPAAQAGETTKAYQRPPIPGTTAQPVTLMQLLAVTVAVATPTTLPRPSPSAASTTSIPRPQSVGHRSQEMDLWSTATYTSSQNRPRADPGIQRQDPSGAAFQKPVGADVSLGEMDSWKPGSVLLDEGLVPKEELSTQSLEPVSLGDPNCKIDLSFLIDGSTSIGKRRFRIQKQLLADVAQALDIGPAGPLMGVVQYGDNPATHFNLKTHTNSRDLKTAIEKITQRGGLSNVGRAISFVTKNFFSKANGNRSGAPNVVVVMVDGWPTDKVEEASRLARESGINIFFITIEGAAENEKQYVVEPNFANKAVCRTNGFYSLHVQSWFGLHKTLQPLVKRVCDTDRLACSKTCLNSADIGFVIDGSSSVGTGNFRTVLQFVTNLTKEFEISDTDTRIGAVQYTYEQRLEFGFDKYSSKPDILNAIKRVGYWSGGTSTGAAINFALEQLFKKSKPNKRKLMILITDGRSYDDVRIPAMAAHLKGVITYAIGVAWAAQEELEVIATHPARDHSFFVDEFDNLHQYVPRIIQNICTEFNSQPRN

SEQ ID NO: 230324 - DNA, 2082 bp, Artificial Sequence
  derived and/or modified sequence
atgcgcactgtcgtcctaacaatgaaagccagtgtcatagaaatgttcttagttcttctcgtaaccggagttcatagtaataaagagactgctaaaaaaataaaacggccaaagttcactgtgccacaaatcaactgcgatgtaaaagctgggaaaatcatcgaccccgagtttatcgtgaagtgtcctgccggatgccaggatccaaaataccacgtgtatggcacagatgtgtatgcgtcttattcatcggtctgcggcgcagctgtgcattcaggtgtgttggacaatagtggagggaaaatactggtccggaaggtggctgggcagtcaggctacaaggggtcctattccaatggagttcagagtctgtcgctccccagatggcgggaaagttttattgtgcttgaatctaagccaaaaaagggggtcacatacccctctgcattgacatactcatcttccaagtccccagcagcccaggccggagaaaccaccaaggcataccaaagaccaccgatcccaggtactactgcccaacccgtgaccctcatgcagctactagccgtcaccgttgcggtggcaacacctacgacattaccgaggccttccccgtccgctgctagcaccacaagcattcctagacctcaatcggtagggcatcgttcccaggagatggatctgtggtcaaccgcgacatacacatcatctcagaacagacctcgggcagatcctggcattcagcgccaggaccccagtggggcagccttccagaaacctgtgggtgcggatgtgtcgctgggggaaatggacagttggaagccaggttccgtgctgctagatgagggcctggtgcctaaagaagaactgagcacacagagcctggagcccgtgagccttggtgaccccaactgcaaaattgacttgtctttcctgatagacggctcgactagcatcggcaaacgtcgtttcaggattcagaagcagctgctggccgatgtcgctcaggcgctggatattgggccagcgggaccgcttatgggagtcgtgcagtatggcgataacccagctacgcatttcaacctgaaaacacatactaattccagagacctgaagactgccatcgaaaaaatcacccagcgaggtggtttaagcaacgtgggacgcgcaatctccttcgtgaccaagaacttcttctccaaagccaatggaaacagatcaggggctccaaacgtggtcgttgtgatggtggatgggtggcccacagataaagtcgaggaggcctctagactggcaagggagagtggcataaatatcttttttatcaccatagagggtgctgcagagaatgagaagcagtacgttgtggagccgaactttgctaataaggccgtctgtcggacgaacggcttctattccctccacgtacagtcatggtttgggcttcataaaaccctgcaacctctggttaagagagtctgtgacacggataggctcgcttgttccaagacttgtctgaattctgccgatatcgggttcgtcattgatgggtcctcttccgtgggcactggaaacttccgaactgtacttcagtttgtcacaaatctcacaaaggagttcgaaatttccgacaccgacactcgaataggagccgtgcagtacacgtatgagcaacggctggaatttggattcgataagtactcttcaaagccggatatactgaacgccatcaaaagggtggggtactggtcaggtgggacctcaacaggggcagcaataaacttcgctctggagcaattgttcaaaaagtctaagccgaacaagcgcaagttaatgatcttaatcaccgacggcagatcttatgacgacgtgcgtatccctgccatggcagctcatctgaaaggagttatcacttacgctattggcgtcgcttgggcagcacaggaggagttagaggttattgcaacccatcctgcaagagatcattcatttttcgtggatgaatttgacaacctacaccagtacgtgccccgtattatacagaacatctgtaccgaattcaatagtcagccaaggaactag

SEQ ID NO: 230325 - DNA, 2082 bp, Artificial Sequence
  derived and/or modified sequence
atgaggaccgtcgtcctgactatgaaagcaagcgtgatagaaatgtttctggtcctccttgtgactggagtgcatagcaataaagaaacagcaaaaaagattaagcgaccaaagtttaccgtgcctcagatcaactgcgacgttaaagcaggcaagatcattgacccagaattcattgttaagtgtcccgcgggctgtcaggaccctaaatatcatgtctacgggacagacgtgtacgctagctattcatctgtgtgcggtgctgcagtgcacagtggagttctggataactcaggaggtaagatcctggtgcggaaggtcgcaggacagtccggatacaaaggtagttacagtaacggagtgcagagtttgtcactcccgaggtggagagaaagtttcatcgtgctcgaatccaagcccaaaaagggtgtgacatacccttctgccctgacctatagcagctccaagtcaccagccgcacaagctggggagactactaaagcttaccaaaggccacccattccaggcacaactgctcagcccgtaactctgatgcagctgctagcagtgacagtcgctgtggctactccaacaactctcccgcgaccctctcctagcgccgcttcaaccacgtcaatacctcgaccgcagtcagtgggtcacagatcccaggaaatggacctttggagcactgcaacctatacttcaagccagaatcggcctcgggccgatccaggtatacagaggcaggatcctagcggtgccgcctttcagaaacctgttggtgccgatgtgagtttgggggagatggatagctggaagcctggcagcgtcttactggatgaggggcttgtgcctaaagaggaactctctacccaaagccttgagcccgtgtcactcggtgatcctaattgtaaaatcgatctaagtttcctgatcgacggtagtactagcattggtaaaagacggttcagaatccagaaacaactgctcgcagacgtggcccaggctctagacattggcccagctggaccattgatgggggtcgtccaatacggcgacaatcctgcaactcactttaatctcaaaacgcatacaaactcacgagacttgaagacagccattgagaagatcacacaacgcggcggactgtccaatgtcggtcgggccatctccttcgtaacaaaaaactttttttctaaagccaatggaaaccgaagtggtgcacctaatgtcgtcgttgtcatggtcgatggctggcccaccgataaggtagaggaggcttcacgcttggctcgggaatccgggatcaatatcttcttcataactatcgaaggagccgccgaaaacgaaaagcagtatgtggtggaacccaactttgctaacaaagccgtgtgccgcactaacgggttctactcactccacgtgcagagctggttcgggctccataagacactgcaacctctggtgaagagggtgtgcgacacagatcggttggcttgttcaaagacgtgtctgaactctgcggacattggatttgtgatcgacggctcatcaagcgtgggcaccggcaactttcgcaccgtcctacaatttgtcaccaatctgaccaaagagttcgagatcagcgacacagacacgagaataggggccgtgcagtacacctatgagcaaagactagaattcgggttcgacaagtactcttccaagcctgacattctcaatgctattaagagagtcggctactggagtgggggcacctcaaccggtgcagccattaacttcgcgctggagcagttgttcaagaaaagcaaacccaataaaaggaagctcatgatccttatcacagatggcagatcttatgacgatgtccggatacctgcaatggcagcccaccttaaaggcgttattacttacgctatcggagtggcttgggcagcccaggaagagctcgaggtgattgctactcatccagctagagatcactcattcttcgtcgacgagttcgacaacctacaccagtacgttcccagaatcattcaaaacatttgtacagagttcaacagccagccaagaaattag

SEQ ID NO: 230326 - DNA, 2082 bp, Artificial Sequence
  derived and/or modified sequence
atgcgcaccgtggtcttgactatgaaagcctctgtgatagaaatgtttctggttttgctggtgactggagtccattccaacaaagagacagctaagaagattaagcgccccaaatttaccgtaccccagataaattgtgatgtcaaagccggtaaaattatcgatcctgaatttatcgttaagtgcccagctggttgtcaggatcccaagtatcatgtgtatggaaccgatgtatatgcaagttactcttctgtgtgcggggccgctgtgcactcaggcgtattagataacagcggagggaaaatcctcgtaagaaaggtcgctggacaaagcgggtataaaggatcctactccaacggagtgcaatctctgtctctaccgagatggagagaaagctttatcgttcttgagtctaaacctaaaaagggagttacgtacccatctgccctcacatactcatccagcaagtccccagctgcacaggccggcgaaactacaaaggcataccaaaggccccctatccccggaaccactgcccagccagtaaccttaatgcagctgctagctgtcacggttgccgtcgccacaccaacaaccctgccacgtccctcaccgtccgccgcgtcaacgaccagcattccccggccccagtctgtgggtcaccggagtcaagagatggacctttggagcacagctacctataccagctcacagaatcgccctagagccgatccaggcatacaaagacaagatccgagcggtgccgcattccaaaaacccgttggagcagatgtgtcattaggtgaaatggactcttggaagcctggaagcgtgctgttggacgaaggccttgtccctaaggaggaactcagcacacagtctctcgagcctgtttccctaggagatcccaactgcaaaattgacttatcctttctgatcgacgggtccacaagcatcggcaagcggagattcagaatccagaaacaattgctggcagatgtcgcacaggccctggatattggaccagcagggcctttgatgggtgtggtacaatacggagataatccagcaactcatttcaacctgaagactcatacaaactcacgagacctcaaaaccgctattgagaagataacccagagaggggggctatctaatgtgggcagagcaatttcttttgtaaccaaaaatttcttttctaaagccaatggaaatagatcgggagctccaaacgtcgtcgtagtaatggtggacggctggccaacagataaagttgaagaggcttcacgtttagcacgggaaagcgggattaatatatttttcattacaattgaaggagccgccgagaacgagaaacagtatgtggttgaacccaatttcgcaaataaagcagtgtgtcgcaccaatggattttactccctacacgtccagtcatggttcggcctgcacaagacgctgcagcccctggtgaagagagtctgtgatacggatcgtctagcatgcagtaagacctgtctgaactccgctgacatcgggtttgtcatagatggctcttcctccgtgggaaccggcaattttagaacagttttacaattcgtcactaacctcaccaaagaatttgaaatttccgacacagataccaggattggggcagttcagtacacttacgagcagcggctcgaattcggtttcgataagtacagttctaagcctgacatacttaatgcgatcaaaagagttgggtattggtcaggaggcaccagcaccggagccgctatcaacttcgcactcgaacagctgttcaagaaaagtaaacctaacaagcgtaaacttatgattctcatcactgacggacggtcttacgacgatgtgcgtatacctgccatggctgctcaccttaagggcgtgatcacatatgcaatcggtgtggcttgggcagcccaagaggaactcgaagttattgcaacacacccagcccgagatcactctttcttcgtagatgaattcgataacttacatcagtatgtacctagaatcatccagaatatctgtaccgaatttaattctcagccaaggaattag

SEQ ID NO: 230327 - DNA, 2082 bp, Artificial Sequence
  derived and/or modified sequence
atgagaaccgtggtgctgaccatgaaggccagcgtgatcgagatgttcctggtgctgctggtgaccggcgtgcacagcaacaaggagaccgccaagaagatcaagagacccaagttcaccgtgccccagatcaactgcgacgtgaaggccggcaagatcatcgaccccgagttcatcgtgaagtgccccgccggctgccaggaccccaagtaccacgtgtacggcaccgacgtgtacgccagctacagcagcgtgtgcggcgccgccgtgcacagcggcgtgctggacaacagcggcggcaagatcctggtgagaaaggtggccggccagagcggctacaagggcagctacagcaacggcgtgcagagcctgagcctgcccagatggagagagagcttcatcgtgctggagagcaagcccaagaagggcgtgacctaccccagcgccctgacctacagcagcagcaagagccccgccgcccaggccggcgagaccaccaaggcctaccagagaccccccatccccggcaccaccgcccagcccgtgaccctgatgcagctgctggccgtgaccgtggccgtggccacccccaccaccctgcccagacccagccccagcgccgccagcaccaccagcatccccagaccccagagcgtgggccacagaagccaggagatggacctgtggagcaccgccacctacaccagcagccagaacagacccagagccgaccccggcatccagagacaggaccccagcggcgccgccttccagaagcccgtgggcgccgacgtgagcctgggcgagatggacagctggaagcccggcagcgtgctgctggacgagggcctggtgcccaaggaggagctgagcacccagagcctggagcccgtgagcctgggcgaccccaactgcaagatcgacctgagcttcctgatcgacggcagcaccagcatcggcaagagaagattcagaatccagaagcagctgctggccgacgtggcccaggccctggacatcggccccgccggccccctgatgggcgtggtgcagtacggcgacaaccccgccacccacttcaacctgaagacccacaccaacagcagagacctgaagaccgccatcgagaagatcacccagagaggcggcctgagcaacgtgggcagagccatcagcttcgtgaccaagaacttcttcagcaaggccaacggcaacagaagcggcgcccccaacgtggtggtggtgatggtggacggctggcccaccgacaaggtggaggaggccagcagactggccagagagagcggcatcaacatcttcttcatcaccatcgagggcgccgccgagaacgagaagcagtacgtggtggagcccaacttcgccaacaaggccgtgtgcagaaccaacggcttctacagcctgcacgtgcagagctggttcggcctgcacaagaccctgcagcccctggtgaagagagtgtgcgacaccgacagactggcctgcagcaagacctgcctgaacagcgccgacatcggcttcgtgatcgacggcagcagcagcgtgggcaccggcaacttcagaaccgtgctgcagttcgtgaccaacctgaccaaggagttcgagatcagcgacaccgacaccagaatcggcgccgtgcagtacacctacgagcagagactggagttcggcttcgacaagtacagcagcaagcccgacatcctgaacgccatcaagagagtgggctactggagcggcggcaccagcaccggcgccgccatcaacttcgccctggagcagctgttcaagaagagcaagcccaacaagagaaagctgatgatcctgatcaccgacggcagaagctacgacgacgtgagaatccccgccatggccgcccacctgaagggcgtgatcacctacgccatcggcgtggcctgggccgcccaggaggagctggaggtgatcgccacccaccccgccagagaccacagcttcttcgtggacgagttcgacaacctgcaccagtacgtgcccagaatcatccagaacatctgcaccgagttcaacagccagcccagaaactag

SEQ ID NO: 230328 - DNA, 2082 bp, Artificial Sequence
  derived and/or modified sequence
atgcgaaccgtggtcctgactatgaaggcatccgttatcgagatgtttctcgtcctgctggttactggagtccacagtaataaggaaacagctaagaaaattaagcgtcccaaatttactgtgccacagataaattgtgatgttaaagccggcaagattatcgacccggagtttattgttaaatgtccagcaggctgccaggatcctaagtaccacgtttacgggactgacgtctatgctagctactcaagcgtgtgcggggcagccgtgcattcaggcgtgctcgacaattcaggaggaaaaatcttagttcgaaaggtggcgggacaaagtggctataagggttcttacagtaacggcgtccagtcactaagccttccccggtggcgagagagctttattgttctggagtcaaagcctaaaaaaggagttacttatcctagcgctctcacatatagcagctcaaaatctcctgccgcacaggcaggcgagacgaccaaagcttatcaaaggcctcctatacctggtacgacagctcagccagttactttgatgcagctcctggccgtgactgtggccgtagctacaccaactacgctgcctaggcctagcccaagcgctgcgtccacaacctccatcccccgacctcagtcagtgggccatagatcccaagaaatggatctctggagcaccgccacttatacctctagtcaaaaccgtccaagggcagatcccggcatccagcggcaggacccctccggtgccgcgttccagaagccggtcggagccgacgtttctctgggcgaaatggacagctggaagcctggttcagttctgctggatgagggcctggttccaaaagaggagttgtcgacacagtctctcgaaccggtcagccttggtgaccccaattgcaaaatcgatctttcgttcctgatagatggttccactagcataggcaaacgacgatttaggatacaaaaacagcttctggccgacgtggcacaggcactggacataggacctgcaggccctttgatgggcgtcgttcagtacggagacaatcccgctacccattttaatctgaagactcacactaattccagggacctcaagacagccatcgagaagatcacccagcgtggggggttgagcaacgtggggcgcgccattagctttgttacgaaaaattttttttccaaagccaacggcaaccgaagcggagccccaaatgtagtggtggtgatggtggatggctggcccacagataaagtcgaggaggcatctagactggcccgggagtcaggtattaatattttttttattacaattgagggagcagccgagaatgaaaagcagtacgtcgtagaaccgaacttcgcgaataaagccgtgtgcaggaccaacggcttttactcgttacatgtgcagtcctggttcggtttgcacaagactttacagcccctggtgaaacgtgtgtgcgacacagaccgcctggcatgttcaaaaacctgcttgaattctgcagacatcggcttcgttattgacggctcaagctctgtgggcactgggaattttcgcaccgtgctccagttcgtgactaatctgacgaaggagttcgaaatttcggacactgacacgcggatcggagctgtccagtacacgtatgagcagcggctggaatttggcttcgacaagtattctagtaagcccgacatcctgaatgccataaagagagttggatattggtcaggagggactagcaccggagctgccatcaattttgccctggaacagctgttcaaaaaatctaaaccaaacaaacggaaactgatgatcttgatcactgatggaagaagctacgatgacgtccggatcccggctatggcagcgcacctgaagggtgtgattacttatgcaataggtgttgcatgggcagcgcaggaagagctggaggtgattgctacgcatcctgcaagggatcactcttttttcgtcgacgagttcgacaacctccaccagtacgtccctcgaatcatacagaatatttgcaccgaattcaacagccagccgcgaaattag

SEQ ID NO: 230329 - DNA, 2082 bp, Artificial Sequence
  derived and/or modified sequence
atgaggacagtggtgctgaccatgaaggcctctgtgattgagatgttcctggtgctgctggtgactggagtgcacagcaacaaggagacagccaagaagatcaagaggcccaagttcaccgtgccccagatcaactgtgatgtgaaggccggcaagatcatcgaccctgagttcatcgtgaagtgcccagctggctgccaggaccccaagtaccacgtgtatggaacagatgtgtatgccagctacagctctgtgtgtggggctgctgtgcacagcggcgtgctggacaacagcggcggcaagatcctggtgaggaaggtggccggccagagcggctacaagggcagctacagcaatggagtgcagagcctgagcctgccccgctggagggagagcttcatcgtgctggagagcaagcccaagaagggcgtgacctaccccagcgccctgacctacagcagcagcaagagccctgctgcccaggccggggagaccaccaaggcctaccagaggcctcccatccctggcaccacagcccagcctgtgaccctgatgcagctgctggccgtgacagtggccgtggccacccccaccaccctgccccggcccagccccagcgctgccagcaccaccagcatcccccggccccagagcgtgggccacaggagccaggagatggacctgtggagcacagccacctacaccagcagccagaaccggcccagggctgaccccggcatccagaggcaggaccccagcggggccgccttccagaagcctgtgggcgcagatgtgtccctgggggagatggacagctggaagccaggctctgtgctgctggatgagggcctggtgcccaaggaggagctgagcacccagagcctggagcctgtgtccctgggggaccccaactgcaagattgacctgtccttcctgattgatggcagcaccagcatcggcaagaggcgcttccgcatccagaagcagctgctggctgatgtggcccaggccctggacatcggccctgctggccccctgatgggcgtggtgcagtacggggacaacccagccacccacttcaacctgaagacccacaccaacagccgggacctgaagacagccatcgagaagatcacccagaggggcggcctgagcaatgtgggccgggccatcagctttgtgaccaagaacttcttcagcaaggccaatggaaacagaagtggggccccaaatgtggtggtggtgatggtggatggctggcccacagacaaggtggaggaggccagccggctggcccgggagagcggcatcaacatcttcttcatcaccatcgagggcgctgctgaaaatgagaagcagtatgtggtggagcccaactttgccaacaaggctgtgtgcaggaccaacggcttctacagcctgcacgtgcagagctggtttggcctgcacaagaccctgcagcccctggtgaagagggtgtgtgacacagaccggctggcctgcagcaagacctgcctgaacagcgctgacattggatttgtgattgatggcagcagctctgtgggcactggaaacttcagaacagtgctgcagtttgtgaccaacctgaccaaggagtttgagatcagtgacacagacaccagaattggagctgtgcagtacacctatgagcagaggctggagtttggatttgacaagtacagcagcaagccagacatcctgaatgccatcaagagggtgggctactggagcggcggcaccagcactggagctgccatcaactttgccctggagcagctgttcaagaagagcaagcccaacaagaggaagctgatgatcctgatcacagatggccgctcctatgatgatgtgcgcatcccagccatggccgcccacctgaagggcgtcatcacctacgccatcggcgtggcctgggccgcccaggaggagctggaggtgattgccacccacccagcccgggaccacagcttctttgtggatgaatttgacaacctgcaccagtatgtgccccgcatcatccagaacatctgcacagagttcaacagccagcccaggaactag

SEQ ID NO: 230330 - DNA, 2810 bp, Artificial Sequence
  derived and/or modified sequence
aattcagcactaaaaccagtgtgagaagcagtatgtgtgagcatgtgtgtgtgtgtatgtgtgtgggggggggtgtaaaatgtgtttttcaaagtactgagaggttgatgggactgttcgattagctcctctgagaagaagagaaaaggttcttggacctctccctgtttcttccttagaataatttggatgggatttgtgatgcaggaaagcctaagggaaaaagaatattcattctgtgtggtgaaaattttttgaaaaaaaaattgccttcttcaaacaagggtgtcattctgatatttatgaggactgttgttctcactatgaaggcatctgttattgaaatgttccttgttttgctggtgactggagtacattcaaacaaagaaacggcaaagaagattaaaaggcccaagttcactgtgcctcagatcaactgcgatgtcaaagccggaaagatcatcgatcctgagttcattgtgaaatgtccagcaggatgccaagaccccaaataccatgtttatggcactgacgtgtatgcatcctactccagtgtgtgtggcgctgccgtacacagtggtgtgcttgataattcaggagggaaaatacttgttcggaaggttgctggacagtctggttacaaagggagttattccaacggtgtccaatcgttatccctaccacgatggagagaatcctttatcgtcttagaaagtaaacccaaaaagggtgtaacctacccatcagctcttacatactcatcatcgaaaagtccagctgcccaagcaggtgagaccacaaaagcctatcagaggccacctattccagggacaactgcacagccggtcactctgatgcagcttctggctgtcactgtagctgtggccacccccaccaccttgccaaggccatccccttctgctgcttctaccaccagcatccccagaccacaatcagtgggccacaggagccaggagatggatctctggtccactgccacctacacaagcagccaaaacaggcccagagctgatccaggtatccaaaggcaagatccttcaggagctgccttccagaaacctgttggagcggatgtcagcctgggagagatggactcatggaaacctggatcggtccttttagatgaaggacttgttccaaaagaagaattgagcacacagtctttggagccagtatccctgggagatccaaactgcaaaattgacttgtcgtttttaattgatgggagcaccagcattggcaaacggcgattccgaatccagaagcagctcctggctgatgttgcccaagctcttgacattggccctgccggtccactgatgggtgttgtccagtatggagacaaccctgctactcactttaacctcaagacacacacgaattctcgagatctgaagacagccatagagaaaattactcagagaggaggactttctaatgtaggtcgggccatctcctttgtgaccaagaacttcttttccaaagccaatggaaacagaagcggggctcccaatgtggtggtggtgatggtggatggctggcccacggacaaagtggaggaggcttcaagacttgcgagagagtcaggaatcaacattttcttcatcaccattgaaggtgctgctgaaaatgagaagcagtatgtggtggagcccaactttgcaaacaaggccgtgtgcagaacaaacggcttctactcgctccacgtgcagagctggtttggcctccacaagaccctgcagcctctggtgaagcgggtctgcgacactgaccgcctggcctgcagcaagacctgcttgaactcggctgacattggcttcgtcatcgacggctccagcagtgtggggacgggcaacttccgcaccgtcctccagtttgtgaccaacctcaccaaagagtttgagatttccgacacggacacgcgcatcggggccgtgcagtacacctacgaacagcggctggagtttgggttcgacaagtacagcagcaagcctgacatcctcaacgccatcaagagggtgggctactggagtggtggcaccagcacgggggctgccatcaacttcgccctggagcagctcttcaagaagtccaagcccaacaagaggaagttaatgatcctcatcaccgacgggaggtcctacgacgacgtccggatcccagccatggctgcccatctgaagggagtgatcacctatgcgataggcgttgcctgggctgcccaagaggagctagaagtcattgccactcaccccgccagagaccactccttctttgtggacgagtttgacaacctccatcagtatgtccccaggatcatccagaacatttgtacagagttcaactcacagcctcggaactgaattcagagcaggcagagcaccagcaagtgctgctttactaactgacgtgttggaccaccccaccgcttaatggggcacgcacggtgcatcaagtcttgggcagggcatggagaaacaaatgtcttgttattattctttgccatcatgctttttcatattccaaaacttggagttacaaagatgatcacaaacgtatagaatgagccaaaaggctacatcatgttgagggtgctggagattttacattttgacaattgttttcaaaataaatgttcggaatacagtgcagcccttacgacaggcttacgtagagcttttgtgagatttttaagttgttatttctgattagaactctgtaaccctcagcaagtttcatttttgtcatgacaatgtaggaattgctgaattaaatgtttagaaggatga

SEQ ID NO: 230331 - DNA, 2082 bp, Artificial Sequence
  derived and/or modified sequence
atgcggaccgtggtgctgaccatgaaggccagcgtgatcgagatgtttctcgtgttactggtaactggagttcactcaaataaggaaaccgcaaaaaagatcaaacggccaaagtttacagtgcctcaaatcaattgtgatgtcaaggcaggaaaaattattgatcccgagttcattgtgaagtgtcctgcaggatgccaggatcccaaatatcatgtctatggcaccgacgtgtatgcatcctactcatctgtctgcggagccgccgtgcatagcggagtgctggacaactcaggcgggaagatcttagtgaggaaagtcgcaggccagtctggatataagggctcatattcgaacggagttcagtccctcagcctgcccagatggcgcgaaagcttcattgtgctcgaaagcaaaccgaagaaaggagtaacatacccaagcgcacttacatacagcagcagcaaatcacccgcggcacaggctggggaaacgacaaaggcctaccagagaccaccgatcccaggtactaccgcccagcccgtgactctgatgcagttgctagcagttacggtcgccgtggccacaccaaccaccctgccccgtccctcccctagcgctgcaagcacaacctccatccctcgcccccagagcgtggggcacaggagccaggagatggatctgtggtcaacagccacttacacctcttcacaaaaccgcccgcgcgccgaccccggaatacaaaggcaggatccaagcggggctgctttccagaagcccgtaggagctgacgtaagtctcggggaaatggatagctggaagcccgggtcagtgctgttggatgagggactcgttccaaaggaggaactcagcacccagtcactggagccagtttccttaggagatccaaattgtaaaattgatctctccttcctgatcgatggatctactagcattggtaagaggagattccgcattcagaaacagctcctggccgacgtggcacaggctctcgatatcggaccagctggacctctcatgggggttgtgcagtacggagataaccccgccacacattttaacttgaaaacacacactaactccagggatctgaaaaccgctatcgagaaaatcactcagcgcggaggccttagcaatgtgggtcgagctataagctttgtgactaagaatttcttctctaaagccaatggaaacagaagtggagcacctaatgtagtcgttgtgatggttgacgggtggccaactgataaggtagaagaggccagcaggctggctcgcgagtcaggaataaacatcttcttcatcaccatcgaaggcgctgctgagaacgagaaacagtacgtcgtcgagccaaactttgcaaacaaggcagtttgcagaaccaacggattctactccctgcatgttcagagttggttcggcttgcacaagactttacaacctttggtgaagcgtgtctgcgatactgatcggctggcctgcagcaaaacgtgtctgaacagtgccgacataggcttcgttattgatggcagctcctcagtgggcactgggaattttaggacagttttgcagttcgttacaaacctcactaaagagttcgagatctctgacaccgatactcgaatcggagccgttcagtatacttatgaacagaggctggagttcggatttgacaaatattcctcaaaaccagacatccttaatgcaatcaaaagagtaggctactggtccgggggcaccagcacaggagcagccattaatttcgctcttgaacaactgttcaaaaaatcaaaaccgaataagagaaagctgatgattctaatcactgacgggcgtagctacgatgacgtgagaattccagcgatggccgcgcacttgaaaggcgtgatcacttatgccattggggtggcctgggccgcacaggaggagttggaagtgatagctacccaccctgctagggatcacagcttttttgtggacgagtttgataacctccaccagtatgtgcccaggatcattcaaaatatctgtacagaattcaacagtcaaccccggaactag

SEQ ID NO: 230332 - RNA, 2082 nt, Artificial Sequence
  derived and/or modified sequence
augaggaccgucguccugacuaugaaagcaagcgugauagaaauguuucugguccuccuugugacuggagugcauagcaauaaagaaacagcaaaaaagauuaagcgaccaaaguuuaccgugccucagaucaacugcgacguuaaagcaggcaagaucauugacccagaauucauuguuaagugucccgcgggcugucaggacccuaaauaucaugucuacgggacagacguguacgcuagcuauucaucugugugcggugcugcagugcacaguggaguucuggauaacucaggagguaagauccuggugcggaaggucgcaggacaguccggauacaaagguaguuacaguaacggagugcagaguuugucacucccgagguggagagaaaguuucaucgugcucgaauccaagcccaaaaagggugugacauacccuucugcccugaccuauagcagcuccaagucaccagccgcacaagcuggggagacuacuaaagcuuaccaaaggccacccauuccaggcacaacugcucagcccguaacucugaugcagcugcuagcagugacagucgcuguggcuacuccaacaacucucccgcgacccucuccuagcgccgcuucaaccacgucaauaccucgaccgcagucagugggucacagaucccaggaaauggaccuuuggagcacugcaaccuauacuucaagccagaaucggccucgggccgauccagguauacagaggcaggauccuagcggugccgccuuucagaaaccuguuggugccgaugugaguuugggggagauggauagcuggaagccuggcagcgucuuacuggaugaggggcuugugccuaaagaggaacucucuacccaaagccuugagcccgugucacucggugauccuaauuguaaaaucgaucuaaguuuccugaucgacgguaguacuagcauugguaaaagacgguucagaauccagaaacaacugcucgcagacguggcccaggcucuagacauuggcccagcuggaccauugaugggggucguccaauacggcgacaauccugcaacucacuuuaaucucaaaacgcauacaaacucacgagacuugaagacagccauugagaagaucacacaacgcggcggacuguccaaugucggucgggccaucuccuucguaacaaaaaacuuuuuuucuaaagccaauggaaaccgaaguggugcaccuaaugucgucguugucauggucgauggcuggcccaccgauaagguagaggaggcuucacgcuuggcucgggaauccgggaucaauaucuucuucauaacuaucgaaggagccgccgaaaacgaaaagcaguaugugguggaacccaacuuugcuaacaaagccgugugccgcacuaacggguucuacucacuccacgugcagagcugguucgggcuccauaagacacugcaaccucuggugaagagggugugcgacacagaucgguuggcuuguucaaagacgugucugaacucugcggacauuggauuugugaucgacggcucaucaagcgugggcaccggcaacuuucgcaccguccuacaauuugucaccaaucugaccaaagaguucgagaucagcgacacagacacgagaauaggggccgugcaguacaccuaugagcaaagacuagaauucggguucgacaaguacucuuccaagccugacauucucaaugcuauuaagagagucggcuacuggagugggggcaccucaaccggugcagccauuaacuucgcgcuggagcaguuguucaagaaaagcaaacccaauaaaaggaagcucaugauccuuaucacagauggcagaucuuaugacgauguccggauaccugcaauggcagcccaccuuaaaggcguuauuacuuacgcuaucggaguggcuugggcagcccaggaagagcucgaggugauugcuacucauccagcuagagaucacucauucuucgucgacgaguucgacaaccuacaccaguacguucccagaaucauucaaaacauuuguacagaguucaacagccagccaagaaauuag

SEQ ID NO: 230333 - RNA, 2082 nt, Artificial Sequence
  derived and/or modified sequence
augcgcaccguggucuugacuaugaaagccucugugauagaaauguuucugguuuugcuggugacuggaguccauuccaacaaagagacagcuaagaagauuaagcgccccaaauuuaccguaccccagauaaauugugaugucaaagccgguaaaauuaucgauccugaauuuaucguuaagugcccagcugguugucaggaucccaaguaucauguguauggaaccgauguauaugcaaguuacucuucugugugcggggccgcugugcacucaggcguauuagauaacagcggagggaaaauccucguaagaaaggucgcuggacaaagcggguauaaaggauccuacuccaacggagugcaaucucugucucuaccgagauggagagaaagcuuuaucguucuugagucuaaaccuaaaaagggaguuacguacccaucugcccucacauacucauccagcaaguccccagcugcacaggccggcgaaacuacaaaggcauaccaaaggcccccuauccccggaaccacugcccagccaguaaccuuaaugcagcugcuagcugucacgguugccgucgccacaccaacaacccugccacgucccucaccguccgccgcgucaacgaccagcauuccccggccccagucugugggucaccggagucaagagauggaccuuuggagcacagcuaccuauaccagcucacagaaucgcccuagagccgauccaggcauacaaagacaagauccgagcggugccgcauuccaaaaacccguuggagcagaugugucauuaggugaaauggacucuuggaagccuggaagcgugcuguuggacgaaggccuugucccuaaggaggaacucagcacacagucucucgagccuguuucccuaggagaucccaacugcaaaauugacuuauccuuucugaucgacggguccacaagcaucggcaagcggagauucagaauccagaaacaauugcuggcagaugucgcacaggcccuggauauuggaccagcagggccuuugaugggugugguacaauacggagauaauccagcaacucauuucaaccugaagacucauacaaacucacgagaccucaaaaccgcuauugagaagauaacccagagaggggggcuaucuaaugugggcagagcaauuucuuuuguaaccaaaaauuucuuuucuaaagccaauggaaauagaucgggagcuccaaacgucgucguaguaaugguggacggcuggccaacagauaaaguugaagaggcuucacguuuagcacgggaaagcgggauuaauauauuuuucauuacaauugaaggagccgccgagaacgagaaacaguaugugguugaacccaauuucgcaaauaaagcagugugucgcaccaauggauuuuacucccuacacguccagucaugguucggccugcacaagacgcugcagccccuggugaagagagucugugauacggaucgucuagcaugcaguaagaccugucugaacuccgcugacaucggguuugucauagauggcucuuccuccgugggaaccggcaauuuuagaacaguuuuacaauucgucacuaaccucaccaaagaauuugaaauuuccgacacagauaccaggauuggggcaguucaguacacuuacgagcagcggcucgaauucgguuucgauaaguacaguucuaagccugacauacuuaaugcgaucaaaagaguuggguauuggucaggaggcaccagcaccggagccgcuaucaacuucgcacucgaacagcuguucaagaaaaguaaaccuaacaagcguaaacuuaugauucucaucacugacggacggucuuacgacgaugugcguauaccugccauggcugcucaccuuaagggcgugaucacauaugcaaucgguguggcuugggcagcccaagaggaacucgaaguuauugcaacacacccagcccgagaucacucuuucuucguagaugaauucgauaacuuacaucaguauguaccuagaaucauccagaauaucuguaccgaauuuaauucucagccaaggaauuag

SEQ ID NO: 230334 - protein, 686 aa, Artificial Sequence
  derived and/or modified sequence
MAEAAEPEGVAPGPQGPPEVPAPLAERPGEPGAAGGEAEGPEGSEGAEEAPRGAAAVKEAGGGGPDRGPEAEARGTRGAHGETEAEEGAPEGAEVPQGGEETSGAQQVEGASPGRGAQGEPRGEAQREPEDSAAPERQEEAEQRPEVPEGSASGEAGDSVDAEGPLGDNIEAEGPAGDSVEAEGRVGDSVDAEGPAGDSVDAEGPLGDNIQAEGPAGDSVDAEGRVGDSVDAEGPAGDSVDAEGRVGDSVEAGDPAGDGVEAGVPAGDSVEAEGPAGDSMDAEGPAGRARRVSGEPQQSGDGSLSPQAEAIEVAAGESAGRSPGELAWDAAEEAEVPGVKGSEEAAPGDARADAGEDRVGDGPQQEPGEDEERRERSPEGPREEEAAGGEEESPDSSPHGEASRGAAEPEAQLSNHLAEEGPAEGSGEAARVNGRREDGEASEPRALGQEHDITLFVKAGYDGESIGNCPFSQRLFMILWLKGVIFNVTTVDLKRKPADLQNLAPGTNPPFMTFDGEVKTDVNKIEEFLEEKLAPPRYPKLGTQHPESNSAGNDVFAKFSAFIKNTKKDANEIHEKNLLKALRKLDNYLNSPLPDEIDAYSTEDVTVSGRKFLDGDELTLADCNLLPKLHIIKIVAKKYRDFEFPSEMTGIWRYLNNAYARDEFTNTCPADQEIEHAYSDVAKRMK

SEQ ID NO: 230335 - DNA, 3806 bp, Artificial Sequence
  derived and/or modified sequence
atggccgaggccgcggagccggagggggttgccccgggtccccaggggccgccggaggtccccgcgcctctggctgagagacccggagagccaggagccgcgggcggggaggcagaagggccggaggggagcgagggcgcagaggaggcgccgaggggcgccgccgctgtgaaggaggcaggaggcggcgggccagacaggggcccggaggccgaggcgcggggcacgaggggggcgcacggcgagactgaggccgaggagggagccccggagggtgccgaggtgccccaaggaggggaggagacaagcggcgcgcagcaggtggagggggcgagcccgggacgcggcgcgcagggcgagccccgcggggaggctcagagggagcccgaggactctgcggcccccgagaggcaggaggaggcggagcagaggcctgaggtcccggaaggtagcgcgtccggggaggcgggggacagcgtagacgcggagggcccgctgggggacaacatagaagcggagggcccggcgggcgacagcgtagaggcggagggccgggtgggggacagcgtagacgcggaaggtccggcgggggacagcgtagacgcggagggcccgctgggggacaacatacaagccgagggcccggcgggggacagcgtagacgcggagggccgggtgggggacagcgtagacgcggaaggtccggcgggggacagcgtagacgcggagggccgggtgggggacagcgtagaggcgggggacccggcgggggacggcgtagaagcgggggtcccggcgggggacagcgtagaagccgaaggcccggcgggggacagcatggacgccgagggtccggcaggaagggcgcgccgggtctcgggtgagccgcagcaatcgggggacggcagcctctcgccccaggccgaggcaattgaggtcgcagccggggagagtgcggggcgcagccccggtgagctcgcctgggacgcagcggaggaggcggaggtcccgggggtaaaggggtccgaagaagcggcccccggggacgcaagggcagacgctggcgaggacagggtaggggatgggccacagcaggagccgggggaggacgaagagagacgagagcggagcccggaggggccaagggaggaggaagcagcggggggcgaagaggaatcccccgacagcagcccacatggggaggcctccaggggcgccgcggagcctgaggcccagctcagcaaccacctggccgaggagggccccgccgagggtagcggcgaggccgcgcgcgtgaacggccgccgggaggacggagaggcgtccgagccccgggccctggggcaggagcacgacatcaccctcttcgtcaaggctggttatgatggtgagagtatcggaaattgcccgttttctcagcgtctctttatgattctctggctgaaaggcgttatatttaatgtgaccacagtggacctgaaaaggaaacccgcagacctgcagaacctggctcccggaacaaaccctcctttcatgacttttgatggtgaagtcaagacggatgtgaataagatcgaggagttcttagaggagaaattagctcccccgaggtatcccaagctggggacccaacatcccgaatctaattccgcaggaaatgacgtgtttgccaaattctcagcgtttataaaaaacacgaagaaggatgcaaatgagattcatgaaaagaacctgctgaaggccctgaggaagctggataattacttaaatagccctctgcctgatgaaatagatgcctacagcaccgaggatgtcactgtttctggaaggaagtttctggatggggacgagctgacgctggctgactgcaacctcttacccaagctccatattattaagattgtggccaagaagtacagagattttgaatttccttctgaaatgactggcatctggagatacttgaataatgcttatgctagagatgagttcacaaatacgtgtccagctgatcaagagattgaacacgcatattcagatgttgcaaaaagaatgaaatgaagctgggctgttttctgtcttatttctcagttgagtgagcaaggatacgaaaacagtgtgtttgaaaacaaattaggtttgggttcaattccttcaatttttaaaaaactggtctctgagagttttttaaatcattgagagcctgtttttcttctctaaaacattagtttaattttcttcaaaatgaaaatactgctttgtaattacaaaatgagacacacctatcttgatattttaaagcaatatcagagggtgtaaagaaggacattttaacaatcgccttcaattttactccacttaattaccgaaaacttactggagaacatgttccaaatcttcagtatcttgttctctctctctctctctctctctctctctatcacacacacacacacacacacacacacacacacacacaatttcattcatatatggtattgcattattttattttaaagcactggtgaggggacctcttggtgattcctggatgatcatacacagaggacttacaccatacaaaaatattgggcaccgcagtgccagagaagatgcttgaggttagattttaaggagtggggaattgtgaagcccacagatgcgcacgcaatgaccagcaggaaccggaagccctgggtcacccccactctgcctcatttctgcctccaggatgccactgcctctgcttccaggaaaggcaagggggagggtgcttatccgtgtctctggttccagcttcctgtctttgctccctcccctctcttagagactgtgccttcagcaggactcttaatatctgctgcaacttggagaacctccctgccctgaaatgtgaaccaagcacactttggttccttctccgggcggctctctctgagacccaaggctgcagtccctcagtgctggtggtatcgtgtggggatagcaatacttctctgcccttcattgtctcatctagacatcaagcagggaaaatccagggagattaaattcatggtgacaagtcctgggcagttctggtaaacggtccagttagggagggagtagaaactattgactcaaaagagtttctggctgatctgtggctttgcctccaccatccctaaccaacctctcatcacagctttgtgtgtgggctgagtgctggccttaaccctaggcgtggaagagaaaatgtgaggttgtttagatactcatcaggacctcacaggagctgagacttatcagccagaatgtgttcttcggacagtcgtacacatcttacagaaaaccctccttgtagagttggttgtggtatgtgtttgatgctataaagctcatttttaatgtgtacacctgctctagggacgattcgtttgaaagagagtaagatgcattaacagaaactatcctgggattaggtgaaaaatgtctagcaaaagaaacaaagtctttaatagagtggcctctttcgctcttcgattatgactgctgcagttttaccccagcagtcagctgtctttgtcaaccatacgtttttggagattgggtctagcacatgtcacccttgtccacgttgtttcacatctggttagggggcagattttaaaatgtagttttgtaatgttacatttaagcatgataaatgattagactaccagatgttactagtgctaactttgtattcttagacattaaaatgattgacataaactctttgtgccttgaaaatgaaacaaattataaaaatgtttaaatggaaccaa

SEQ ID NO: 230336 - DNA, 2061 bp, Artificial Sequence
  derived and/or modified sequence
atggccgaggccgccgagcccgagggcgtggcccccggcccccagggcccccccgaggtgcccgcccccctggccgagagacccggcgagcccggcgccgccggcggcgaggccgagggccccgagggcagcgagggcgccgaggaggcccccagaggcgccgccgccgtgaaggaggccggcggcggcggccccgacagaggccccgaggccgaggccagaggcaccagaggcgcccacggcgagaccgaggccgaggagggcgcccccgagggcgccgaggtgccccagggcggcgaggagaccagcggcgcccagcaggtggagggcgccagccccggcagaggcgcccagggcgagcccagaggcgaggcccagagagagcccgaggacagcgccgcccccgagagacaggaggaggccgagcagagacccgaggtgcccgagggcagcgccagcggcgaggccggcgacagcgtggacgccgagggccccctgggcgacaacatcgaggccgagggccccgccggcgacagcgtggaggccgagggcagagtgggcgacagcgtggacgccgagggccccgccggcgacagcgtggacgccgagggccccctgggcgacaacatccaggccgagggccccgccggcgacagcgtggacgccgagggcagagtgggcgacagcgtggacgccgagggccccgccggcgacagcgtggacgccgagggcagagtgggcgacagcgtggaggccggcgaccccgccggcgacggcgtggaggccggcgtgcccgccggcgacagcgtggaggccgagggccccgccggcgacagcatggacgccgagggccccgccggcagagccagaagagtgagcggcgagccccagcagagcggcgacggcagcctgagcccccaggccgaggccatcgaggtggccgccggcgagagcgccggcagaagccccggcgagctggcctgggacgccgccgaggaggccgaggtgcccggcgtgaagggcagcgaggaggccgcccccggcgacgccagagccgacgccggcgaggacagagtgggcgacggcccccagcaggagcccggcgaggacgaggagagaagagagagaagccccgagggccccagagaggaggaggccgccggcggcgaggaggagagccccgacagcagcccccacggcgaggccagcagaggcgccgccgagcccgaggcccagctgagcaaccacctggccgaggagggccccgccgagggcagcggcgaggccgccagagtgaacggcagaagagaggacggcgaggccagcgagcccagagccctgggccaggagcacgacatcaccctgttcgtgaaggccggctacgacggcgagagcatcggcaactgccccttcagccagagactgttcatgatcctgtggctgaagggcgtgatcttcaacgtgaccaccgtggacctgaagagaaagcccgccgacctgcagaacctggcccccggcaccaacccccccttcatgaccttcgacggcgaggtgaagaccgacgtgaacaagatcgaggagttcctggaggagaagctggccccccccagataccccaagctgggcacccagcaccccgagagcaacagcgccggcaacgacgtgttcgccaagttcagcgccttcatcaagaacaccaagaaggacgccaacgagatccacgagaagaacctgctgaaggccctgagaaagctggacaactacctgaacagccccctgcccgacgagatcgacgcctacagcaccgaggacgtgaccgtgagcggcagaaagttcctggacggcgacgagctgaccctggccgactgcaacctgctgcccaagctgcacatcatcaagatcgtggccaagaagtacagagacttcgagttccccagcgagatgaccggcatctggagatacctgaacaacgcctacgccagagacgagttcaccaacacctgccccgccgaccaggagatcgagcacgcctacagcgacgtggccaagagaatgaagtag

SEQ ID NO: 230337 - DNA, 2061 bp, Artificial Sequence
  derived and/or modified sequence
atggccgaggctgccgagcccgaaggggtcgcaccaggcccgcagggaccccctgaggtgcctgctcccttagccgagaggcctggggagcctggggccgcaggcggcgaagctgaaggccccgaaggcagcgaaggagctgaagaggctccacggggtgcagcagccgtgaaagaagctggtggcggaggacctgatcgtggtcccgaagccgaagcaaggggtacacgaggggcccacggtgagacagaagcggaggagggagcccccgagggagccgaagtcccacaggggggcgaggagacatccggagcccagcaggtggaaggagcaagtccgggtagaggggcacagggtgagccccgtggggaggcccagagagagcctgaggacagtgccgctcccgagcgccaagaagaagctgagcagaggccagaagttccagagggaagtgcatccggcgaggcgggggactctgtcgacgctgagggtcctttgggggataatatcgaagcagagggccccgcaggtgattccgtggaagccgagggaagggtaggagattcagtggatgccgaaggaccagccggcgattccgtggatgccgaggggcctttgggagacaatatacaggccgaaggtccagcaggcgattctgtggacgcagaggggcgcgtgggtgatagcgtcgatgccgagggacctgccggagactctgttgacgccgaaggacgggtaggtgacagcgttgaagccggcgatccagctggggacggcgtggaagctggcgttcctgccggtgacagcgttgaggctgaaggcccagccggcgactccatggacgccgagggaccagctgggcgggcacggcgtgtgtccggagagccccaacaatctggagacggctcattgtcacctcaagcagaagccattgaagtcgccgcaggcgagagcgccgggcgtagtccaggagagctggcttgggacgcagccgaggaggctgaggtgcccggcgttaaagggagtgaagaagcggcacccggcgacgcacgtgccgacgctggtgaggaccgcgtgggggacggaccgcagcaagagccaggggaggacgaagagcgccgagagagaagccctgaaggccctagagaggaagaggcagccggaggagaagaagagtccccggatagttccccccacggagaagctagtcggggtgccgccgagcctgaagcccaactttcgaatcatctagcggaggagggccctgctgagggctccggagaggctgctcgcgttaacgggagaagagaggacggggaagccagcgaacctcgggctctcggacaggagcatgacatcactctattcgttaaggctggctacgatggagagtccattggaaattgccctttttcgcagaggctgtttatgattctgtggctcaagggtgtcatttttaacgtgacaactgttgacttaaaacggaagccggcagacctacagaatcttgcccctggcacgaatccaccctttatgacctttgatggggaagtgaagacggatgtcaacaagatagaagaatttctcgaggaaaaattggccccgccgagatatcctaaactcggaacacagcacccggaatccaattccgctgggaatgatgtatttgctaaattcagcgccttcatcaaaaacacaaaaaaggatgccaacgaaattcatgaaaaaaacttactgaaggccctgcggaaattagacaactatctcaactccccattaccagatgaaattgacgcctactccacagaagatgtcacggtatctggtaggaagttccttgacggcgatgaactaaccctcgctgactgtaacctgctgccaaaattacacatcatcaagatagtggccaagaaatacagagactttgagtttccaagcgaaatgaccggcatttggcggtatttgaacaatgcgtatgctcgggatgagttcacgaatacgtgccctgctgatcaagagatcgagcatgcttactccgatgtggccaagcggatgaaatag

SEQ ID NO: 230338 - DNA, 2061 bp, Artificial Sequence
  derived and/or modified sequence
atggccgaggccgctgagcctgagggcgtggcccctggcccccagggccccccagaggtgcctgcccccctggccgagaggcctggagagcctggagctgctggaggagaggccgagggccctgagggcagcgagggcgctgaggaggcccccagaggagctgctgctgtgaaggaggccggcggcggcggccctgaccggggccctgaggccgaggcccggggcaccaggggggcccacggggagacagaagctgaggagggcgcccctgagggcgctgaggtgccccagggcggggaggagaccagcggggcccagcaggtggagggcgccagccctggccgcggggcccagggcgagcccagaggagaggcccagcgggagcctgaggacagcgctgcccctgagcggcaggaggaggccgagcagaggcctgaggtgcctgagggcagcgccagcggggaggccggggacagcgtggatgctgagggccccctgggggacaacatcgaggccgagggccctgctggggacagcgtggaggccgagggccgggtgggggacagcgtggatgctgagggccctgctggggacagcgtggatgctgagggccccctgggggacaacatccaggccgagggccctgctggggacagcgtggatgctgagggccgggtgggggacagcgtggatgctgagggccctgctggggacagcgtggatgctgagggccgggtgggggacagcgtggaggccggggaccctgctggagatggagtggaggccggcgtgcctgctggggacagcgtggaggccgagggccctgctggggacagcatggatgctgagggccctgctggccgggcccggcgggtgtctggagagccccagcagagcggagatggcagcctgagcccccaggccgaggccatcgaggtggccgccggggagagcgctggccgcagccctggagagctggcctgggatgctgctgaggaggccgaggtgcctggggtgaagggcagcgaggaggccgcccctggagatgcccgggcagatgctggggaggacagagtgggagatggcccccagcaggagcctggagaagatgaggagcggcgggagaggagccctgagggcccccgggaggaggaggccgccggcggggaggaggagagcccagacagcagcccccatggagaggccagcagaggagctgctgagcctgaggcccagctgagcaaccacctggccgaggagggccctgctgagggcagcggggaggccgcccgggtgaatggaagaagagaagatggagaggccagcgagccccgggccctgggccaggagcatgacatcaccctgtttgtgaaggccggctatgatggagagagcatcggcaactgccccttcagccagaggctcttcatgatcctgtggctgaagggcgtcatcttcaacgtgaccaccgtggacctgaagaggaagccagctgacctgcagaacctggcccctggcaccaacccccccttcatgacctttgatggagaggtgaagacagatgtgaacaagattgaggagttcctggaggagaagctggccccaccccgctaccccaagctgggcacccagcaccctgagagcaacagcgctggaaatgatgtgtttgccaagttcagcgccttcatcaagaacaccaagaaggatgccaatgagatccacgagaagaacctgctgaaggccctgaggaagctggacaactacctgaacagccccctgcctgatgaaattgatgcctacagcacagaagatgtgacagtgtctggcaggaagttcctggatggagatgagctgaccctggccgactgcaacctgctgcccaagctgcacatcatcaagatcgtggccaagaagtacagagactttgagttccccagcgagatgacaggcatctggagatacctgaacaatgcctatgccagagatgagttcaccaacacctgcccagctgaccaggagattgagcacgcctacagtgatgtggccaagaggatgaagtag

SEQ ID NO: 230339 - DNA, 2061 bp, Artificial Sequence
  derived and/or modified sequence
atggccgaggccgccgagcccgagggcgtggcccccggcccccaggggccacccgaagtccccgctcccctggccgagcgccccggtgagcctggggccgccgggggggaagccgaggggcctgagggatctgaaggcgccgaagaagcaccccgtggagctgctgccgtcaaagaggctggaggggggggcccagatcgggggcctgaagctgaggctagggggacacgcggggcccacggcgaaacagaggccgaagagggggcgcctgagggcgccgaagtaccacaaggcggcgaagagaccagcggggcccagcaggtggagggggcttcaccagggaggggtgctcagggagaaccccggggcgaggctcagagagagcctgaggattcggctgctcctgaaagacaggaggaagctgaacagaggccggaagtgccggagggcagcgccagtggtgaagctggtgactcggttgatgcggagggtcctctaggcgataacatcgaggcggagggacccgcgggtgactcagtcgaggctgaaggcagagtgggtgattccgtggacgcggaaggcccggccggagattcagttgatgcggaaggaccccttggcgacaatatccaggccgaaggcccagccggtgactcagtcgacgccgaaggtcgagtgggcgacagtgtggacgcagaaggacctgcgggcgattccgtggacgctgagggccgcgtgggggatagtgtggaggccggcgatcctgcgggcgatggcgttgaagctggcgtccccgctggagattcagttgaggccgagggccccgcaggtgacagtatggatgctgagggccccgctggtcgcgcccgtagggtcagcggcgaaccacaacagagcggcgatggtagcctcagccctcaggctgaagctattgaagtagctgctggggagtcagccgggagaagccccggcgagttagcctgggacgcagccgaagaggctgaggtcccaggggtgaaggggagtgaagaggctgctccaggggatgcaagggctgatgccggcgaggaccgcgtcggggacggcccccagcaggaacccggcgaagatgaggagcgacgggaaagaagccctgagggtcctcgtgaggaagaagcagctggcggagaagaagaatcacctgactcatccccacatggcgaggcatcgcgcggagccgccgagcccgaggctcagctcagcaatcacctcgccgaggaaggccccgccgagggctccggtgaagcagcaagagtgaacggaaggcgcgaggacggagaggcgagcgagccacgcgccctcggccaggagcatgatatcaccctgtttgtcaaggccggctacgacggcgagtccatagggaactgcccattcagccagcgccttttcatgatactgtggctcaagggagtgatcttcaatgtgactactgtagatctgaaaaggaagcccgcagatctgcagaacctggctcccggtacaaatccacctttcatgacctttgacggggaggtcaagacagatgtgaacaaaatagaagaattcctcgaagaaaagctcgcgccccccagatatcctaagctggggacccagcatcctgaatccaattctgccggaaacgatgtcttcgccaaattttctgctttcattaaaaatactaagaaggatgccaacgaaatccacgagaaaaatttattaaaagccctccggaagcttgacaattaccttaactctccactgccagatgaaattgatgcatacagcacggaagacgtgaccgtgtcgggccgaaaatttctagatggagatgaattgactctggctgattgtaatctgcttccaaaacttcatatcattaaaatcgtggccaaaaagtatagggacttcgaattcccatcggaaatgactggaatttggaggtatctgaacaacgcttatgccagggatgaattcacaaacacgtgccctgctgatcaggagattgaacacgcctattctgatgtcgccaagcggatgaagtag

SEQ ID NO: 230340 - DNA, 2061 bp, Artificial Sequence
  derived and/or modified sequence
atggccgaggctgcggaaccagagggtgtggccccaggacctcagggccctcctgaggtgcccgcaccgctggcggaacgacctggagagcccggagctgcgggtggagaggccgaggggccagagggtagcgaaggggctgaagaagctccccgaggggctgcagccgtgaaggaggctggtgggggaggacctgatcggggtccagaggctgaagccagaggcactcgcggtgcacacggcgagacagaagccgaggaaggtgcccctgaaggggctgaagtaccccaggggggagaagagacatctggcgcacaacaagtcgagggagcatcacctggcaggggagctcagggtgagccacgcggtgaagcccagagggagccagaagactctgctgcacccgaaaggcaggaagaggctgagcagagacctgaggtgcctgagggtagtgcgagcggcgaagctggcgatagtgtggatgcggaaggccctctgggcgacaacatagaggccgaaggacctgcaggggactccgtagaggcagagggacgggtaggtgattctgtggatgccgagggacccgcaggcgactctgtagatgctgagggacccctgggcgacaatatccaggccgagggccctgccggagacagcgtggacgcagaggggagagtcggtgattcagtggacgccgaaggacctgctggagactctgtcgatgcagagggtagagtgggtgattctgttgaggcaggcgaccctgctggcgacggagtagaggccggtgttccggctggagattcagtggaggcagagggccctgctggcgatagcatggacgcagaagggcctgctggacgggctcgcagagtgagcggggaaccccagcaaagcggtgacggctcactgagcccacaggccgaagctatcgaggttgcagcaggagagagcgccggaagatctcctggagaattggcctgggacgcggctgaagaggcggaggtgcctggtgtgaaaggttccgaagaggccgctccaggggatgccagagctgacgctggagaagaccgagtgggcgacgggccacaacaggagcctggagaagacgaggagagaagggagcggagtccggagggccctcgcgaggaggaagccgcaggaggggaggaagagtcccccgattcatctccccatggcgaggcctccaggggggctgctgagcctgaagcacagctgtctaatcatctggcggaggaggggcctgcagaaggttccggcgaagcagcacgcgtcaacgggcgacgcgaggacggcgaggccagcgaacctagggctctcggtcaagagcacgatataactctgttcgtgaaagcgggttatgatggagagtctattggaaattgcccgtttagtcaacgactcttcatgatcctctggcttaaaggagtgatcttcaatgttaccacagtggacctgaagcggaaacccgcagatctccagaacctagcacccggaacaaaccccccattcatgacgttcgatggtgaggttaaaacagatgttaacaaaattgaagaatttctggaagaaaaactcgcccctcctcggtaccctaagcttggcacccagcaccccgagtctaattcggccggaaatgacgtgttcgccaaattctctgcttttataaaaaacaccaagaaggacgccaacgaaatccacgagaaaaacctgctgaaagccctgaggaaactggacaattatctaaactctcccctacccgatgagattgacgcttacagcacagaagatgttacagtgagcggacgtaagtttttggacggagacgaactgacactggcagattgtaatctgctcccaaaactgcatataattaagattgtggccaaaaagtaccgtgactttgagtttccttctgagatgacaggtatttggagatatttgaacaacgcttatgcgagagatgagttcactaacacatgtcccgctgaccaggagatcgagcacgcctactctgatgtggccaaacggatgaaatag

SEQ ID NO: 230341 - protein, 214 aa, Artificial Sequence
  derived and/or modified sequence
MSVPQIHVEEVGAEEGAGAAAPPDDHLRSLKALTEKLRLETRRPSYLEWQARLEEHTWPFPRPAAEPQASLEEGERGGQEPLLPLREAGQHPPSARSASQGARPLSTGKLEGFQSIDEAIAWLRKELTEMRLQDQQLARQLMRLRGDINKLKIEHTCRLHRRMLNDATYELEERDELADLFCDSPLASSFSLSTPLKLIGVTKMNINSRRFSLC

SEQ ID NO: 230342 - DNA, 4094 bp, Artificial Sequence
  derived and/or modified sequence
aaaggagcagcgccgagaattcaccggagctcggggaggcgaggcgggagccctgagctgaggccgggcagcgcggacccgcgcaggaggaggcggcggggacaccggcgagtccccagcagggcccctgggctcccggaagggtctccagccacctgcccttcccgagaagagagagctctgggccttcttcctgccagtctggtcttcgagtgcgttcaggacagatagaccttggcacaggctgccccgagattcctgcgacgctgtctgttcctgccttctgtggagcatggcacccacaggcttccaggacggatcatagacccgagcctccaggagggcgccctgtgcggctcactgcgcggtccctctcagctcccctgccacccagcctctgaggccggctcctgtcccggaaatgccctcgggcacctggatgaggccatcccagagcgggacccaactgtgccacccaccaagcctccccctgcgccccccgtgccctcgcatgtccggctgccagggcagactgtagaatgtctgtgccccagatccacgtggaagaagtgggtgcagaagagggggcgggagcagccgcaccacccgatgaccacctccggagcctgaaggccctcaccgagaaactgaggctggagacccgcaggccctcctacctggaatggcaggccaggctggaggagcatacctggcccttcccgaggccggctgcggagccacaggcgagcttggaggagggggagcgtggggggcaggagcccttgctccccctgagagaggctgggcagcaccccccttctgccaggagtgccagccaaggtgccagacccctgtccactggcaagctggaaggctttcagagcatcgatgaagctatagcctggctcaggaaggaactgacggagatgcggctgcaggaccagcaactggccagacagctcatgcgcctgcgtggcgacatcaacaagctgaaaatcgaacacacctgccgcctccacaggaggatgctcaacgatgccacctacgagctggaggagcgggatgagctggccgacctcttctgtgactcccctcttgcctcctccttcagcctctccacaccactcaagcttattggcgtgaccaagatgaacatcaactctcggaggttctctctctgctgaggagccctcagactgggcggaggggctggagcggagggcttgggctggaggggtgtcagaggaagctgaggccaagttactccagtgggtctcccggaggcaggggtccctgggactggcgactcaagggccccaggacctattcagtggtgctctcccacccaggggccctgggtgtggatgccagtgtctctgtgactggctcttgcttactacccaaagagctctgcagaagggccgctccaaccaagatgttaaaggagacctgggttcccaccataatccatccctccacggtcacgttcctgtttcctggaatcactggtgctatgaactgggattcccaaagggaggccccccaacaaagctgtcatttttgcagaaggctgtcccgcaagggccttgggggaaattaggcatgtcagatgtgcctgtctcacgtgctgttgctgtcctctaagtattgtctcaaattcaccctaagtacatgactcagcaacattgacagggagctactaggaagggaaaatcgaaaggcatgacaaatgggcacttggggacgcagccccagtggctggcagccagtgtctctggtgagcctgacactataaggctgtgtaaattgtaaattctggcgtgtgctgggacatgtgatgggggcactagcgtagcttgggtgcaacaagcacagatgtccccattgtctcccctggccacatgcatctccaaagagcctcttcactgccacccacaccccagggtgacagcctgggagaccactggtgactgaaccaggcaggtcctgaaagcattttccataactgaattctcctgcaggggcgtgaccggggcctcctggtggattctggtggtgtcaccttactgccctctctggaaagacaatctagggagcccagaggcccatcctgagcctcctctgagattttgtgcctgacctaaacaactagttttaataagactgttactgatgtgttgttcacttgttagtaactgatttttgtccaaatgcggaagccacttgtgtaggtcaactacagtgcgtaggatttgattttaagagtttctccctcccaacaggcttgaggatcagcaagttaagaccccagcaggttagggaggtcagtctggggtcatacggcatggcaggggtccctcggccagacccgtagaatcctgagataaggagtgtttctgacctttggtgtcatctagtcgagtcctctcattagtaaaggagcaaagtgaaacctgggggaggagaaggacttccctcaggttgcacagctgtttaggctatagaatattgatgtgtgaaaccattattgataatgcctagtagatcacatgtcaatgaacttgaaccccaaagatggtcgtgatgctttgccaaacccgcacactgccaacccctctactctccacctcagcccccacccacatctcccagagtattgcaattcagaacatttgggtcaaggtggagcaaggcactgacagtggccccacagggcatgtgtcactaatcactgtcccatggtctacgcacggcatctggctgctctgtctactgtgacttcttcctgtgtaatctcagtggggcccgtgtccacccacacatcgtgacccacataggggagaggttgcttttcttttgtgggctgagagtaggacaatgcaaatgaatgatctctagtagacagaaaagaacttggtctcttttttaaaatttcaaagagccagaagttctatgcctccttcaaagtaggcagaacaacgcagccaagatctactgtctgccatgctctgtgcaatgaagtctgcaggcctgaggaccatgtactgctgtccttcctcagagctctgcacaaacactgccaagtcctgaagacgcattcctttcctgccaacctctttccagataagcccttgaggtctcgggctgacctacacacacacacacacacacacacacacacacccccacacacacacacacgacagagaacatgccataaacatccttgaacccatgcaggaaagcccatcccatattctgaaaaaatgccaaattaggtttttctttctttttggaaatcagtcattacagtaaccgaaaccattgggttcagcgaaaatggaaagatttagctgaatgtagtcagtccaattaagttggatgcaactgagtgatttagttgcttgggtaacccagtgcttgcttgctttcttcattctctgggtggaaactaagatcaagacacatgtttggggataagttaaatgtctgagctattttgctcggtttatcctaagagaactttattatgggatgaggaggtgacccaagatgagaagtggagggggacagcgatgttttctaaacatcgtccagtgttgactggcttccttactttgcacagtgaacacaactaaccacattaattcagctttgtgaagtccctgctctctgtgggtctatgagtcagcagcaacattggcctaacctccgtcccagcctcctggctcaccacatgtgtacagtgctgtttgcagttgtactcattatccatccatctctctgccatccccaagcatcgctgggtgtaaaacgcaaactctccaccgacactgccatgcgtggtcatgtcttgatgccttcaggggctcagtagctatcaaagaggcctggagggcctgggcaggcttgacgatgcctgaccgagttcaagacccacaccctgtagcaataccaagtgctattacataatcaatggacgatttatacttttattttttatgattatttgtttctatattgctgttagaaaaagtgaaataaaaatacttcaaaagaagatatccatataaaaataaaaggagagaaaaatg

SEQ ID NO: 230343 - DNA, 645 bp, Artificial Sequence
  derived and/or modified sequence
atgtcagtgccacagatccatgttgaagaggtcggcgccgaggaaggggcaggggccgcagcccctccggacgaccatctgcgatcgctgaaggcactcacagaaaaactgagactggagactcggcgcccatcatacctggagtggcaggctagactggaggagcatacctggcctttcccccgaccagccgctgagcctcaagcctctctcgaagagggcgagaggggcggccaggaaccactcctgcctctgcgggaagcagggcagcacccaccatccgcccgaagcgcctcccagggtgcaagacctctgagtacgggtaaactagagggattccagtcaatagacgaggccatcgcctggctcaggaaagaactgacggaaatgaggctgcaggaccagcagctggctcgacagctgatgcgtcttagaggagatatcaacaagctcaagattgagcacacctgccggctgcatcggcgcatgctcaatgatgctacctacgagctagaagaaagagacgagctggccgacttgttttgcgatagccctctggcttcgagcttctccctgtccacccccctgaaactaattggcgtgacaaaaatgaacattaacagtcggcgcttttcattatgctag

SEQ ID NO: 230344 - DNA, 645 bp, Artificial Sequence
  derived and/or modified sequence
atgtctgtgccccagatccacgtggaggaggtgggcgctgaggagggcgctggggccgccgcccccccagatgaccacctgcggagcctgaaggccctgacagagaagctgcggctggagacccggcggcccagctacctggagtggcaggcccggctggaggagcacacctggcccttccccaggcctgctgctgagccccaggccagcctggaggagggggagcggggcggccaggagcccctgctgcccctgcgggaggccggccagcacccccccagcgcccggagcgccagccagggcgcccggcccctgagcacaggcaagctggagggcttccagagcattgatgaggccatcgcctggctgaggaaggagctgacagagatgaggctgcaggaccagcagctggcccggcagctgatgaggctgcggggggacatcaacaagctgaagattgagcacacctgccgcctgcacaggaggatgctgaatgatgccacctatgagctggaggagagagatgagctggccgacctcttctgtgacagccccctggccagcagcttcagcctgagcacccccctgaagctgattggagtgaccaagatgaacatcaacagccgccgcttcagcctgtgctag

SEQ ID NO: 230345 - DNA, 645 bp, Artificial Sequence
  derived and/or modified sequence
atgagcgtgccccagatccacgtggaggaggtgggcgccgaggagggggctggcgccgctgctcccccagacgaccacttgcgctccctgaaagctctaaccgagaagcttcggcttgaaaccaggcggccatcatacctggagtggcaagccaggcttgaagagcacacatggccattcccccgccccgccgcggagccacaggcttcactcgaagaaggcgaacgtggggggcaggagcccctgctaccacttcgggaagccggccagcatccacctagcgcaagaagcgcatcacagggcgcaagacctttgtctaccggcaagctcgaaggcttccagtctatcgacgaggccatcgcctggcttaggaaagagctgacagaaatgcggctgcaggatcagcagctggcccgacagttgatgcggcttcgcggcgacattaacaagctgaaaatcgagcatacctgccgcctccacaggaggatgcttaatgacgctacttacgagctggaagagcgggacgagctggccgatcttttctgtgacagcccactcgctagcagcttcagcctcagtacccccctcaagctgatcggtgtcacaaaaatgaatattaactctcggcggttctccctctgttag

SEQ ID NO: 230346 - DNA, 645 bp, Artificial Sequence
  derived and/or modified sequence
atgagcgtgccacagatacatgtggaagaagtgggcgcagaagagggggctggcgctgctgctccaccagacgatcatttaaggtcattgaaagccttgaccgagaaactgcgcttagagactcgtaggccctcttacctcgaatggcaggccaggttggaggagcacacttggccgttcccgagaccagcagccgagcctcaggccagccttgaggagggcgagaggggagggcaagagcccttgctccctctgcgtgaggctggacaacacccgcctagtgctcgatcagcttcacagggcgcaaggcctctgagcacaggaaagctggagggctttcaaagtatcgatgaagccatagcttggctgagaaaggagttaactgagatgcgcctgcaggatcagcagcttgcccgtcagctcatgcggctgagaggtgatattaataagctgaaaatcgagcacacctgtcgcctacaccgccgaatgctgaacgacgctacgtatgaactggaggaacgggacgaacttgctgacctattttgcgacagcccattggcgtcttccttcagcctatctacaccactgaaattaatcggggttactaagatgaacatcaattctcgacgtttcagcctttgctag

SEQ ID NO: 230347 - DNA, 645 bp, Artificial Sequence
  derived and/or modified sequence
atgagcgtgccccagatccacgtggaggaggtgggcgccgaggagggcgccggcgccgccgccccccccgacgaccacctgagaagcctgaaggccctgaccgagaagctgagactggagaccagaagacccagctacctggagtggcaggccagactggaggagcacacctggcccttccccagacccgccgccgagccccaggccagcctggaggagggcgagagaggcggccaggagcccctgctgcccctgagagaggccggccagcacccccccagcgccagaagcgccagccagggcgccagacccctgagcaccggcaagctggagggcttccagagcatcgacgaggccatcgcctggctgagaaaggagctgaccgagatgagactgcaggaccagcagctggccagacagctgatgagactgagaggcgacatcaacaagctgaagatcgagcacacctgcagactgcacagaagaatgctgaacgacgccacctacgagctggaggagagagacgagctggccgacctgttctgcgacagccccctggccagcagcttcagcctgagcacccccctgaagctgatcggcgtgaccaagatgaacatcaacagcagaagattcagcctgtgctag

SEQ ID NO: 230348 - protein, 599 aa, Artificial Sequence
  derived and/or modified sequence
MAVSASPVISATSSGAGVPGGLFRAEPLYSTPREPPRLTPNMINSFVVNNHSNSAGGGGRGNTNTNECRMVDMHGMKVASFLMDGQELICLPQVFDLFLKHLVGGLHTVYTKLKRLDISPVVCTVEQVRILRGLGAIQPGVNRCKLITRKDFETLFTDCTNARRKRQMTRKQAVNSSRPGRPPKRSLGVLQENARLLTHAVPGLLSPGLITPTGITAAAMAEAMKLQKMKLMAMNTLQGNGSQNGTESEPDDLNSNTGGSESSWDKDKMQSPFAAPGPQHGIAHAALAGQPGIGGAPTLNPLQQNHLLTNRLDLPFMMMPHPLLPVSLPPASVAMAMNQMNHLNTIANMAAAAQIHSPLSRAGTSVIKERIPESPSPAPSLEENHRPGSQTSSHTSSSVSSSPSQMDHHLERMEEVPVQIPIMKSPLDKIQLTPGQALPAGFPGPFIFADSLSSVETLLTNIQGLLKVALDNARIQEKQIQQEKKELRLELYREREIRENLERQLAVELQSRTTMQKRLKKEKKTKRKLQEALEFESKRREQVEQALKQATTSDSGLRMLKDTGIPDIEIENNGTPHDSAAMQGGNYYCLEMAQQLYSA

SEQ ID NO: 230349 - DNA, 1800 bp, Artificial Sequence
  derived and/or modified sequence
atggctgtgagcgcaagtccagtgatttctgccacatcgtccggcgcaggggtccctggaggtctctttagagcagagcccctgtacagtaccccacgggagccaccacgccttacccccaatatgatcaattcctttgtcgttaacaaccactctaatagcgccgggggcgggggccggggaaacaccaacaccaatgagtgtcgaatggtagacatgcatggaatgaaggtggccagtttcctgatggacggtcaggaactgatatgcctgccccaggtttttgacctcttcctgaaacacctggtgggcggcctacataccgtgtatactaagttgaagagactggatatcagtcctgtagtttgcacagtcgaacaggtccgcatactgcgtggcctgggggccattcagccaggcgtgaatagatgcaagctcatcactcggaaggacttcgagaccctgttcaccgattgcacaaacgccaggcgaaaacgacagatgacccgaaagcaggctgtgaactcatctaggcccgggcgacctcctaagagatcactgggtgtgcttcaagaaaatgccaggttgctgactcacgccgtgcctgggctcctgtcccccggtctgatcacaccaacagggattacggccgccgccatggctgaagccatgaagcttcagaagatgaagctcatggctatgaatactctccaagggaatggctcccaaaatgggaccgagtctgagccagacgatttaaactccaacactggcggctccgagtcctcttgggacaaggataagatgcagtccccttttgccgcacccggccctcagcacggcattgcccatgctgccctggcaggtcaacccggaatcgggggagctcctactttgaatcccctccaacagaaccacctgttgactaaccgcctggatctgccctttatgatgatgccccatcccctcctgcccgtgtccttgccaccagcatccgtggccatggcaatgaaccaaatgaaccacttgaacactattgcgaacatggctgccgctgcacagattcattccccacttagtcgggccgggacatctgtaattaaggagcggatcccagaaagcccgtctcccgctccctctcttgaagagaatcatcgaccgggaagccaaacatcatcccatacgtcgtctagcgtgtcgtcctccccatcccagatggaccaccatctcgagagaatggaggaggtgcccgtacaaattccaattatgaagtctcctctcgacaaaattcagctcacgcccggacaagccctcccagcagggttcccgggaccctttatattcgccgacagcttaagctccgtggaaaccttgctgaccaacattcagggactccttaaggtggcactggacaatgctaggatacaggagaagcaaatccaacaggaaaaaaaggagctgcgcctggaactttatcgcgagagggagatccgtgaaaacctcgagcgacagttagctgtggagttgcagtctaggacaaccatgcagaagagacttaaaaaagaaaagaagaccaagcgaaaactgcaggaggctctcgagttcgaatcaaaacgccgtgagcaagtggaacaagctctgaaacaggcgaccacatctgattcaggactgcgcatgctcaaggatacgggcatccctgacattgagatagagaacaatggaaccccccatgactctgcagccatgcagggcggcaactattattgcctggagatggcacagcagctgtacagcgcctag

SEQ ID NO: 230350 - DNA, 1800 bp, Artificial Sequence
  derived and/or modified sequence
atggccgtgtccgcttcaccagtgatttctgccacgagtagcggggctggcgtgccaggaggtctcttccgggctgaacctctctattcaacaccgcgggaacctccaaggctcacccccaacatgatcaacagctttgtcgtgaacaatcatagcaacagtgctggcggaggcggacgcggcaacactaataccaacgaatgccgcatggtggacatgcatggaatgaaagtggccagcttcctgatggacggtcaagagcttatctgtttgccccaggtgttcgatttgtttcttaaacaccttgtaggcggactgcacacagtgtacacaaaacttaaacgcctggacatctctccagtcgtgtgtaccgtagagcaggttcgtatcttgcgcggcctcggtgcaattcaaccaggagtgaacaggtgcaagcttataacgcggaaagattttgagacgctgttcaccgactgtaccaatgcgaggcgcaagaggcagatgactcgcaaacaggctgtgaattcctctcggcccggccgtcctcccaagcggagtctgggagtgttacaggagaatgcgcggctgctgacccatgcagtgcccgggctcctgtctcccggtctgattacccccacgggtattactgccgctgcaatggcagaggccatgaagttgcagaaaatgaaactgatggcaatgaacactcttcaaggaaacggaagccaaaacggcactgaatcagaaccggacgatctgaattcaaacaccggggggtcagaatcatcgtgggataaagacaaaatgcagtctcccttcgctgcccccggtcctcaacatggcatcgctcacgccgcactggctggacagcctggtattggcggcgcacctactttgaatccactacagcaaaaccacctgttaactaaccgtctggacttaccctttatgatgatgccgcaccccttactgccagtgtccctgccgcctgcctccgtagcaatggcaatgaatcagatgaatcatcttaacaccattgcaaatatggcagccgccgcacagatacacagtcctttgtcaagagctggaactagcgttataaaagaacggataccggaatcaccgtcccccgcgcccagtcttgaggagaaccaccgtccaggttctcaaacttcctcacacacaagcagctccgtctcatcctcaccatcccagatggatcatcacctggagagaatggaagaggtcccggtccagattcctatcatgaaatcgccactcgacaagattcagctgacacccggacaggctctgcccgccggattccccggcccttttatatttgctgattccctcagctccgtggagactctgttaaccaacattcaggggttactgaaggttgcactggataatgccaggattcaggaaaaacaaattcagcaggaaaaaaaagagttgcggctggagctgtaccgcgagagagaaattagggagaatttggaacggcagctggccgtggaattacagtcacgtactacaatgcagaagcgactcaagaaggaaaaaaaaaccaagcgaaagttgcaggaggctctcgaatttgaatccaaacgcagagaacaagtagagcaggccctcaagcaagccaccacaagcgatagcggccttagaatgttaaaagacacgggaatccccgacattgagatcgagaacaatggcaccccgcatgacagcgcagcaatgcaagggggcaattactactgccttgagatggcacagcagctttattccgcttag

SEQ ID NO: 230351 - DNA, 1800 bp, Artificial Sequence
  derived and/or modified sequence
atggctgtgtctgccagccctgtgatcagcgccaccagcagcggggccggcgtgcctgggggcctcttccgggcagagcccctgtacagcaccccccgggagcccccccggctgacccccaacatgatcaacagctttgtggtgaacaaccacagcaacagcgctgggggcggcggccggggcaacaccaacaccaatgaatgtaggatggtggacatgcacggcatgaaggtggccagcttcctgatggatggccaggagctgatctgcctgccccaggtgtttgacctcttcctgaagcacctggtgggcggcctgcacacagtgtacaccaagctgaagaggctggacatcagccctgtggtgtgcaccgtggagcaggtgcgcatcctgcggggcctgggcgccatccagcccggggtgaaccgctgcaagctgatcaccaggaaggactttgagaccctcttcacagactgcaccaatgcccggaggaagaggcagatgaccaggaagcaggccgtgaacagcagcaggcctggccggccccccaagaggagcctgggcgtgctgcaggagaatgcccggctgctgacccatgctgtgcccggcctgctgagccctggcctcatcacccccaccggcatcacagctgctgccatggccgaggccatgaagctgcagaagatgaagctgatggccatgaacaccctgcagggcaatggcagccagaatggaacagagagcgagccagatgacctgaacagcaacacaggaggcagcgagagctcctgggacaaggacaagatgcagagcccctttgctgcccctggcccccagcacggcatcgcccatgctgccctggccggccagcccggcattggaggagcccccaccctgaaccccctgcagcagaaccacctgctgaccaaccggctggacctgcccttcatgatgatgccccaccccctgctgcctgtgtccctgcccccagcctctgtggccatggccatgaaccagatgaaccacctgaacaccatcgccaacatggctgctgctgcccagatccacagccccctgagccgggccggcaccagcgtcatcaaggagcgcatccctgagagccccagccctgcccccagcctggaggagaaccacaggcctggcagccagaccagcagccacaccagcagctctgtgagcagcagccccagccagatggaccaccacctggagaggatggaggaggtgcctgtgcagatccccatcatgaagagccccctggacaagatccagctgaccccaggccaggccctgcctgctggcttccctggccccttcatctttgctgacagcctgagctctgtggagaccctgctgaccaacatccagggcctgctgaaggtggccctggacaatgcccgcatccaggagaagcagatccagcaggagaagaaggagctgcggctggagctgtaccgggagcgggagatccgggagaacctggagcggcagctggccgtggagctgcagagcaggaccaccatgcagaagaggctgaagaaggagaagaagaccaagaggaagctgcaggaggccctggagtttgagagcaagagaagagagcaggtggagcaggccctgaagcaggccaccaccagtgacagcggcctgaggatgctgaaggacaccggcatcccagacatcgagattgaaaataatggcacccctcatgattctgctgccatgcagggcggcaactactactgcctggagatggcccagcagctgtacagcgcctag

SEQ ID NO: 230352 - DNA, 1800 bp, Artificial Sequence
  derived and/or modified sequence
atggccgtgagcgccagccccgtgatcagcgccaccagcagcggcgctggcgttcctggtgggctgttccgcgccgaacctctgtacagtacgccccgtgaacctccccgccttacaccaaatatgatcaactccttcgtggtgaacaaccactctaactcagcagggggaggcgggagggggaataccaacacaaatgagtgtagaatggtcgacatgcacgggatgaaggtggcctcatttctgatggatggtcaagagctgatctgtcttccacaggtcttcgatctttttcttaaacacttggtggggggattgcacacagtttacacaaagcttaaacggcttgacattagccctgttgtctgcacagtcgagcaggtgcgtatcctacgcgggttgggagcaatccagcctggcgttaatagatgtaagctaataaccaggaaagatttcgagacccttttcaccgactgcactaatgctcgaagaaagcgccaaatgacgcgtaaacaggccgtcaacagctcaaggcctggacgcccccccaaaagatctctgggtgtgctccaggagaacgcccgtctgttgacccacgccgttcccgggttgcttagccccggattgatcacaccaaccggcatcacagctgcggctatggctgaggccatgaaattgcagaaaatgaaactcatggcaatgaacaccctgcagggaaacggctcccagaatgggaccgaatccgagcccgacgatttaaattcaaataccggaggatcagaaagtagctgggataaggataagatgcagagtccctttgcggcacctggcccccagcacggcatcgctcatgctgccctcgctgggcaacctggcataggtggggcccctacgctaaacccactgcagcagaaccaccttctcacaaatcgactcgacctgccttttatgatgatgccccacccgctgctgccagtcagtcttcccccagcatccgtcgctatggcaatgaaccagatgaatcatttgaatacgatcgcgaacatggcagcagcggcccaaatccattcgccgctgagtagggccgggacctccgtcatcaaggagaggattccagagtcccctagtccagcccccagtttggaggagaatcaccggcccggatcccagactagctctcatacctcatctagcgtgagctcaagccccagccagatggaccaccatctcgagaggatggaagaggttcccgtgcagatacccatcatgaaaagccccctcgacaagatccaactgactccgggccaggcactgcctgctgggttccccggaccctttatttttgctgattcgctgagctccgtggagaccttacttacaaacatccaggggctgttaaaggtcgcgctcgataacgcccgaatacaggaaaagcagattcagcaggagaagaaagaactgcggttagagctttacagagagagagaaatccgcgagaacttggagaggcagctggccgtggagctacagagccggaccaccatgcagaagagactgaagaaagagaagaaaaccaagagaaaactgcaagaggccctcgagtttgaaagcaagcggcgcgagcaggtagagcaggctctgaagcaagcgaccacatctgattctggcctgcgcatgctcaaggacaccgggattccagacatcgagattgagaacaatggaacaccgcatgacagtgcagcaatgcaggggggcaactactactgtctggaaatggcccagcagctgtacagtgcgtag

SEQ ID NO: 230353 - DNA, 1800 bp, Artificial Sequence
  derived and/or modified sequence
atggccgtgagcgccagccccgtgatcagcgccaccagcagcggcgcgggcgtccccgggggtttgtttcgcgcagagcccttatattccactcctcgcgagccccctagactgacccctaacatgataaactcatttgtggtgaacaatcactcaaattctgccgggggaggaggcaggggtaataccaataccaatgaatgcaggatggttgatatgcacggaatgaaggtggcctctttcttgatggatggccaggagcttatttgcctccctcaggtgtttgatctatttctgaaacatcttgtgggcggccttcatacagtgtacacgaaactgaaacggctagatatcagccctgtggtatgcacggtggaacaagtgcgcattctaaggggcttaggcgcaattcaacccggggtcaatcgatgtaagctgattacaaggaaggacttcgagactctgttcacggactgtacgaatgccagacgcaagcgccagatgacccggaagcaggccgtgaactcctcacggcccggcaggccccctaagaggagcctgggagtcctgcaggagaatgcccggctgctgacccacgccgtacctgggcttctctctcctggcctgatcacaccaaccggcattaccgcagccgctatggccgaggccatgaaactgcaaaagatgaagctaatggcaatgaacaccctacagggcaatggcagccagaacggcaccgaaagcgagcccgatgacttgaatagcaacactggaggatcagaaagcagttgggataaggataagatgcaaagtccctttgccgcgccaggacctcagcacggcattgcgcatgccgcgctagctggccaacccggaatcgggggggcccccaccttgaacccactacagcagaaccatctactgaccaacaggctggacttgccattcatgatgatgccacacccactgcttccggtgtccctcccccctgcatcagttgcaatggccatgaaccagatgaatcatctgaatacaatagctaacatggcagccgctgcccagattcactctccactgagcagggctggaactagtgtgattaaagagaggatccctgagagcccctctcctgctccgtctctggaggagaatcatcgcccggggagtcagacgtccagccataccagcagctcagtgagctcatctcccagccagatggatcaccacctagagcggatggaagaggtgccagtgcaaatcccaattatgaagagccctctggataagatccagctcacccccgggcaggccttgcctgctggcttccccggtccttttatcttcgccgattcactgagcagtgtagaaacactgttgaccaatatccagggcttgctgaaagtggctctggacaacgcgaggatccaggagaaacagatccagcaggaaaagaaggaactaagactggagttgtaccgagagagggaaatccgggagaatctggagagacagttagccgtggaacttcagtctaggaccactatgcagaagcgcctaaagaaggaaaagaagaccaaacgcaaactccaagaagctctcgaatttgaatccaaacgtcgcgaacaggttgagcaggccttgaagcaggctaccactagcgactccggcttgcgcatgctgaaggacaccggtatacctgatatagagattgaaaacaacggaactcctcacgacagcgccgctatgcaaggaggcaattattactgtctcgaaatggctcaacagttatactccgcatag

SEQ ID NO: 230354 - DNA, 1800 bp, Artificial Sequence
  derived and/or modified sequence
atggccgtatccgcctcacctgtgatttctgcaacttcttccggcgctggagtcccaggtgggctctttagggccgagccattatactcgaccccaagagagccgccaaggttgaccccgaacatgatcaattctttcgtggtcaataatcactcgaattccgcaggagggggaggacgcggaaataccaatactaatgagtgccgaatggtggacatgcacggtatgaaggtggccagcttcctgatggatggacaagagttaatttgtttgccccaggttttcgatctgttccttaaacatctggtcggaggcctgcacacagtgtacacgaagttgaaaagattggatatttctcccgtggtgtgcaccgtagaacaggtacgaatcctgaggggcctcggagccattcagccgggtgtgaatcgctgcaagcttattacaagaaaagattttgagaccctgttcactgactgtaccaatgcgagaaggaagcgccagatgacacggaagcaggctgtgaacagtagtaggccgggaagacctcccaaaagaagcctgggggtgctccaggagaatgctcggctcttgactcacgccgtaccgggtttattgagcccaggactgattactcctacaggcataacggcagccgctatggccgaagcaatgaaactccagaaaatgaaactcatggctatgaacacactccaagggaatggctcacagaacgggacggagtctgagcccgatgacctgaacagcaacaccgggggatcggagtcatcttgggataaggacaagatgcagtcaccattcgccgcaccaggaccgcagcacggaattgcgcacgcagccctggccggacaaccgggtataggaggcgctccgacgttgaacccgctccagcaaaatcacctactgaccaaccggctcgatctgcctttcatgatgatgcctcacccactcctccccgtgagcctcccccctgcctctgtcgcaatggctatgaatcaaatgaaccacctgaatacaatagctaacatggctgccgctgcccagatccattctcccctcagccgggctgggactagtgtcattaaggaacggattcccgagagcccttctccggctccttcccttgaggaaaatcataggcccggttcccagacgagtagtcatacctcctcgagcgtaagttcttcaccatcgcaaatggaccaccacctagagcgtatggaggaggtccccgtgcagatcccgataatgaaatcacccctcgataagatccaactgacacccggacaggctctgcctgccggatttcccggacctttcattttcgcagattcattatcttccgtcgaaactctgctcaccaatatacagggccttctgaaggtggccttggataatgcacgcattcaggaaaagcaaatccagcaagagaagaaagagctgcggctcgagctttacagggaaagagagatccgcgagaatctggagcgccagctggccgtggagctgcagagcagaacaacaatgcaaaaaagactgaaaaaggaaaagaaaacaaagcggaagttacaggaagccctagagttcgagagcaaacgtagggagcaggtcgagcaggccctgaagcaggccacaacttctgatagcgggttgaggatgctgaaggacaccggaataccagacatcgaaatcgagaacaacggcactccgcacgatagcgcggcaatgcagggcggtaattactattgccttgagatggcccaacagctctactccgcctag

SEQ ID NO: 230355 - DNA, 1800 bp, Artificial Sequence
  derived and/or modified sequence
atggccgtttcagcctcccctgttatctcagccacatctagtggggcaggtgtgcctggcggtctttttcgcgcagagcccttatactctacccctagggagccccctcgcttgacacccaatatgatcaatagctttgtagtcaacaaccacagcaacagtgccggaggaggaggcagaggaaacactaacactaacgagtgtagaatggtcgatatgcatggtatgaaggttgcttctttcctgatggacgggcaagaactcatatgtctacctcaagtgttcgacctgttcctgaaacatctggtgggtgggctgcataccgtttacacaaaactcaaaagactggatattagtcccgtcgtttgcacagtggagcaagtaagaattctgcggggactcggggctatccagcctggagtgaataggtgcaagctaattaccaggaaggactttgagaccctgttcaccgactgcaccaacgccaggcgcaagcggcaaatgacacgcaagcaggccgtcaattccagcagacccggaagaccccctaagcgctctctgggtgtgctccaggagaacgccagacttctcacccacgctgttcccggactgctgtcaccaggcctgatcacaccgacgggaatcaccgccgctgcgatggccgaggcgatgaaactgcaaaaaatgaaactgatggctatgaatacccttcagggtaacggcagccaaaatggcaccgagtcggaaccagatgacttgaactccaacaccggtggctctgaaagttcatgggacaaggataaaatgcaatcaccatttgctgctcccggaccacagcatggcattgcccacgctgccctggcgggtcagcctggaattgggggtgctcccaccctgaatcccctacagcagaaccacctcctgacgaaccgactggaccttcccttcatgatgatgccccatcctctgctccctgtgtccctacccccagcctctgtagcaatggctatgaatcagatgaaccacctgaacaccatcgccaacatggccgcagcagcccagatacatagtccgctgtctcgcgcagggacctccgtgatcaaagaaagaattcccgaaagcccctcccctgctcctagtctggaggaaaatcatcgacccggatcccagactagctctcacacaagcagctccgtttcgagttccccgtctcagatggaccatcatctggagcggatggaggaggtgcctgtgcagatccctatcatgaagtctcccctggacaagattcagctgacacctggccaggctcttcccgctggcttcccaggaccttttatatttgctgatagtctcagctccgtggaaaccctactcacaaacattcagggattattgaaggttgctctggacaacgcccgaatacaggagaagcagatacagcaggagaaaaaggaactgaggctggagctgtaccgcgagcgcgaaataagagagaatctggagcgccagctggcagttgaactgcaatctagaacaaccatgcaaaagaggcttaagaaagaaaagaaaacaaaaagaaagctccaggaagcccttgaatttgaaagcaaaaggcgggaacaagtggagcaggctctcaagcaggcaactacaagcgattcaggtctgaggatgctgaaggacactggcataccggacatcgagattgaaaataatggaaccccacatgactctgccgcaatgcagggcggtaattattattgcctggagatggcccagcagctctacagcgcctag

SEQ ID NO: 230356 - DNA, 2417 bp, Artificial Sequence
  derived and/or modified sequence
actgtttgttgagcttgagcgtgagccggctgctgaagacttgcgaacagttcggagccagcgagagcgcgccagagagagcgagagtgagggagtgagtgcgaggggatctagaggagtcagggcgagaaagcgagggccggaggacccacgatagagacagagtgaccatggctgtctccgcatctccagtgatctctgcaacttccagcggcgccggcgtcccggggggcttattccgggccgaacccctgtactcgactcccagagagccccctcgtcttactcctaatatgatcaatagtttcgtggttaataaccacagcaacagtgccggaggcggcggcaggggcaacaccaacaccaacgagtgccgcatggtcgacatgcacgggatgaaggtggcttcgttcctgatggacggccaggaactgatctgcctgccgcaagtctttgatctttttctcaagcacctggtgggaggcttgcacactgtgtacaccaagctgaagagactggatatatcccccgtggtgtgtactgttgagcaggtccggatcctccgcgggctgggggccatccagcccggggtaaaccgctgcaaactcatcaccaggaaagacttcgaaactttgttcaccgattgcaccaatgccagaaggaagaggcaaatgacaagaaaacaagctgttaacagttcaagacccggcaggccccctaagcgttctttgggagtgttgcaggaaaatgcccgccttctgacccatgcagtcccaggcctcttatcgccaggacttatcactccgacaggtataacagctgcagcgatggctgaggcgatgaaacttcagaagatgaagcttatggctatgaacactcttcagggaaatggaagccaaaatgggaccgaatcagagcctgatgatcttaattctaacacaggtggaagtgaatcctcctgggataaagataagatgcagtctccatttgctgcacctggaccccaacatggaattgctcatgcagccctagctggccagccaggcattgggggtgctccaaccctcaatccactgcagcagaaccacctgctaaccaatagactggatctgccatttatgatgatgcctcatcccctacttccagtcagcttacctcctgcatcagttgccatggcaatgaatcagatgaaccatctcaatactattgccaacatggctgctgcagcacagattcacagtccactctccagagctggtacctctgttataaaggagcggatcccagagagtccttctcctgctccttctctagaagagaatcatcgtcctgggagccagacctcttcccacaccagcagcagtgtgtccagctctccctctcagatggatcatcatttggaaagaatggaagaggtaccagttcaaattccaataatgaagtcacccttggacaagatacagctgactcctgggcaggcattgcccgctggattccctggaccattcatttttgctgatagtctgtcctccgtggagactctgttgaccaacattcagggtctgctgaaagttgctttggataatgctcgcatccaggagaagcagattcaacaagaaaagaaggagctgcgactggagctctatagagagagagaaattagagaaaaccttgaaagacaacttgcagttgagcttcaaagcagaactactatgcaaaagcgcctgaagaaggagaaaaaaaccaagagaaaattgcaggaagccttggaatttgaatcaaagcgccgggagcaagtggagcaggcacttaagcaagccaccactagtgacagtggcctgaggatgttaaaagatactggaattccagatattgaaatagaaaacaatgggactcctcatgatagtgctgctatgcaaggaggtaactattactgtttagaaatggcacaacagttgtattcagcctgaaaggtcctcgctggctttacataaatgaagatgcttgtgattccagtttatctctgaaactattcaacatggagttatttcagttttgtttatcagcaaagctttgtttactgaaggagctatttaatctatgttacattaaaaaagaaacgcgtgtacattttaaaagcaatgatgtaaactttgttcttgcattagactgaccagtttaaaaatatgaactaaaacctaatggctaaagtaacttgaccatatttgatgcttttctatgctcatttcaacttggctttttgtcttttaaatttttaaaaaatgcagtagtgtgttagagactagaaagttatatgtatggtttccctgttctactatacataacgttaaagtacaccttctttgttaaaaatgtacttgctaaacttcagcgtaaataaaaacattttgactttg

SEQ ID NO: 230357 - DNA, 2232 bp, Artificial Sequence
  derived and/or modified sequence
atggctgtctccgcatctccagtgatctctgcaacttccagcggcgccggcgtcccggggggcttattccgggccgaacccctgtactcgactcccagagagccccctcgtcttactcctaatatgatcaatagtttcgtggttaataaccacagcaacagtgccggaggcggcggcaggggcaacaccaacaccaacgagtgccgcatggtcgacatgcacgggatgaaggtggcttcgttcctgatggacggccaggaactgatctgcctgccgcaagtctttgatctttttctcaagcacctggtgggaggcttgcacactgtgtacaccaagctgaagagactggatatatcccccgtggtgtgtactgttgagcaggtccggatcctccgcgggctgggggccatccagcccggggtaaaccgctgcaaactcatcaccaggaaagacttcgaaactttgttcaccgattgcaccaatgccagaaggaagaggcaaatgacaagaaaacaagctgttaacagttcaagacccggcaggccccctaagcgttctttgggagtgttgcaggaaaatgcccgccttctgacccatgcagtcccaggcctcttatcgccaggacttatcactccgacaggtataacagctgcagcgatggctgaggcgatgaaacttcagaagatgaagcttatggctatgaacactcttcagggaaatggaagccaaaatgggaccgaatcagagcctgatgatcttaattctaacacaggtggaagtgaatcctcctgggataaagataagatgcagtctccatttgctgcacctggaccccaacatggaattgctcatgcagccctagctggccagccaggcattgggggtgctccaaccctcaatccactgcagcagaaccacctgctaaccaatagactggatctgccatttatgatgatgcctcatcccctacttccagtcagcttacctcctgcatcagttgccatggcaatgaatcagatgaaccatctcaatactattgccaacatggctgctgcagcacagattcacagtccactctccagagctggtacctctgttataaaggagcggatcccagagagtccttctcctgctccttctctagaagagaatcatcgtcctgggagccagacctcttcccacaccagcagcagtgtgtccagctctccctctcagatggatcatcatttggaaagaatggaagaggtaccagttcaaattccaataatgaagtcacccttggacaagatacagctgactcctgggcaggcattgcccgctggattccctggaccattcatttttgctgatagtctgtcctccgtggagactctgttgaccaacattcagggtctgctgaaagttgctttggataatgctcgcatccaggagaagcagattcaacaagaaaagaaggagctgcgactggagctctatagagagagagaaattagagaaaaccttgaaagacaacttgcagttgagcttcaaagcagaactactatgcaaaagcgcctgaagaaggagaaaaaaaccaagagaaaattgcaggaagccttggaatttgaatcaaagcgccgggagcaagtggagcaggcacttaagcaagccaccactagtgacagtggcctgaggatgttaaaagatactggaattccagatattgaaatagaaaacaatgggactcctcatgatagtgctgctatgcaaggaggtaactattactgtttagaaatggcacaacagttgtattcagcctgaaaggtcctcgctggctttacataaatgaagatgcttgtgattccagtttatctctgaaactattcaacatggagttatttcagttttgtttatcagcaaagctttgtttactgaaggagctatttaatctatgttacattaaaaaagaaacgcgtgtacattttaaaagcaatgatgtaaactttgttcttgcattagactgaccagtttaaaaatatgaactaaaacctaatggctaaagtaacttgaccatatttgatgcttttctatgctcatttcaacttggctttttgtcttttaaatttttaaaaaatgcagtagtgtgttagagactagaaagttatatgtatggtttccctgttctactatacataacgttaaagtacaccttctttgttaaaaatgtacttgctaaacttcagcgtaaataaa

SEQ ID NO: 230358 - DNA, 1775 bp, Artificial Sequence
  derived and/or modified sequence
atatgcacccaaagcactcttagttgcagccaaagcagtggaagaaggaagaggcaaatgacaagaaaacaagctgttaacagttcaagacccggcaggccccctaagcgttctttgggagtgttgcaggaaaatgcccgccttctgacccatgcagtcccaggcctcttatcgccaggacttatcactccgacaggtataacagctgcagcgatggctgaggcgatgaaacttcagaagatgaagcttatggctatgaacactcttcagggaaatggaagccaaaatgggaccgaatcagagcctgatgatcttaattctaacacaggtggaagtgaatcctcctgggataaagataagatgcagtctccatttgctgcacctggaccccaacatggaattgctcatgcagccctagctggccagccaggcattgggggtgctccaaccctcaatccactgcagcagaaccacctgctaaccaatagactggatctgccatttatgatgatgcctcatcccctacttccagtcagcttacctcctgcatcagttgccatggcaatgaatcagatgaaccatctcaatactattgccaacatggctgctgcagcacagattcacagtccactctccagagctggtacctctgttataaaggagcggatcccagagagtccttctcctgctccttctctagaagagaatcatcgtcctgggagccagacctcttcccacaccagcagcagtgtgtccagctctccctctcagatggatcatcatttggaaagaatggaagaggtaccagttcaaattccaataatgaagtcacccttggacaagatacagctgactcctgggcaggcattgcccgctggattccctggaccattcatttttgctgatagtctgtcctccgtggagactctgttgaccaacattcagggtctgctgaaagttgctttggataatgctcgcatccaggagaagcagattcaacaagaaaagaaggagctgcgactggagctctatagagagagagaaattagagaaaaccttgaaagacaacttgcagttgagcttcaaagcagaactactatgcaaaagcgcctgaagaaggagaaaaaaaccaagagaaaattgcaggaagccttggaatttgaatcaaagcgccgggagcaagtggagcaggcacttaagcaagccaccactagtgacagtggcctgaggatgttaaaagatactggaattccagatattgaaatagaaaacaatgggactcctcatgatagtgctgctatgcaaggaggtaactattactgtttagaaatggcacaacagttgtattcagcctgaaaggtcctcgctggctttacataaatgaagatgcttgtgattccagtttatctctgaaactattcaacatggagttatttcagttttgtttatcagcaaagctttgtttactgaaggagctatttaatctatgttacattaaaaaagaaacgcgtgtacattttaaaagcaatgatgtaaactttgttcttgcattagactgaccagtttaaaaatatgaactaaaacctaatggctaaagtaacttgaccatatttgatgcttttctatgctcatttcaacttggctttttgtcttttaaatttttaaaaaatgcagtagtgtgttagagactagaaagttatatgtatggtttccctgttctactatacataacgttaaagtacaccttctttgttaaaaatgtacttgctaaactt

SEQ ID NO: 230359 - DNA, 1800 bp, Artificial Sequence
  derived and/or modified sequence
atggccgtgagcgccagccccgtgatcagcgccaccagcagcggcgccggcgtgcccggcggcctgttcagagccgagcccctgtacagcacccccagagagccccccagactgacccccaacatgatcaacagcttcgtggtgaacaaccacagcaacagcgccggcggcggcggcagaggcaacaccaacaccaacgagtgcagaatggtggacatgcacggcatgaaggtggccagcttcctgatggacggccaggagctgatctgcctgccccaggtgttcgacctgttcctgaagcacctggtgggcggcctgcacaccgtgtacaccaagctgaagagactggacatcagccccgtggtgtgcaccgtggagcaggtgagaatcctgagaggcctgggcgccatccagcccggcgtgaacagatgcaagctgatcaccagaaaggacttcgagaccctgttcaccgactgcaccaacgccagaagaaagagacagatgaccagaaagcaggccgtgaacagcagcagacccggcagaccccccaagagaagcctgggcgtgctgcaggagaacgccagactgctgacccacgccgtgcccggcctgctgagccccggcctgatcacccccaccggcatcaccgccgccgccatggccgaggccatgaagctgcagaagatgaagctgatggccatgaacaccctgcagggcaacggcagccagaacggcaccgagagcgagcccgacgacctgaacagcaacaccggcggcagcgagagcagctgggacaaggacaagatgcagagccccttcgccgcccccggcccccagcacggcatcgcccacgccgccctggccggccagcccggcatcggcggcgcccccaccctgaaccccctgcagcagaaccacctgctgaccaacagactggacctgcccttcatgatgatgccccaccccctgctgcccgtgagcctgccccccgccagcgtggccatggccatgaaccagatgaaccacctgaacaccatcgccaacatggccgccgccgcccagatccacagccccctgagcagagccggcaccagcgtgatcaaggagagaatccccgagagccccagccccgcccccagcctggaggagaaccacagacccggcagccagaccagcagccacaccagcagcagcgtgagcagcagccccagccagatggaccaccacctggagagaatggaggaggtgcccgtgcagatccccatcatgaagagccccctggacaagatccagctgacccccggccaggccctgcccgccggcttccccggccccttcatcttcgccgacagcctgagcagcgtggagaccctgctgaccaacatccagggcctgctgaaggtggccctggacaacgccagaatccaggagaagcagatccagcaggagaagaaggagctgagactggagctgtacagagagagagagatcagagagaacctggagagacagctggccgtggagctgcagagcagaaccaccatgcagaagagactgaagaaggagaagaagaccaagagaaagctgcaggaggccctggagttcgagagcaagagaagagagcaggtggagcaggccctgaagcaggccaccaccagcgacagcggcctgagaatgctgaaggacaccggcatccccgacatcgagatcgagaacaacggcaccccccacgacagcgccgccatgcagggcggcaactactactgcctggagatggcccagcagctgtacagcgcctag

SEQ ID NO: 230360 - protein, 47 aa, Artificial Sequence
  derived and/or modified sequence
SSLLEKGLDGAKKAVGGLGKLGKDAVEDLESVGKGAVHDVKDVLDSV

SEQ ID NO: 230361 - protein, 110 aa, Artificial Sequence
  derived and/or modified sequence
MRFMTLLFLTALAGALVCAYDPEAASAPGSGNPCHEASAAQKENAGEDPGLARQAPKPRKQRSSLLEKGLDGAKKAVGGLGKLGKDAVEDLESVGKGAVHDVKDVLDSVL

SEQ ID NO: 230362 - DNA, 333 bp, Artificial Sequence
  derived and/or modified sequence
atgcggtttatgacactgctgtttttaactgccctagcaggagctctcgtttgtgcatatgatccagaagctgcaagtgctcctgggtccggcaacccttgtcacgaagcttcagccgcacagaaggaaaacgctggcgaggatcctggcctggctcgccaagccccaaagcctagaaagcagcgttcctcactgctggagaagggccttgatggggcgaaaaaagccgttgggggactcggaaaactgggcaaagacgccgtggaggacctggaatccgtcgggaagggtgcagtccacgacgttaaggacgtgctggattccgtactttag

SEQ ID NO: 230363 - DNA, 333 bp, Artificial Sequence
  derived and/or modified sequence
atgaggttcatgaccctgctcttcctgacagccctggccggggccctggtgtgtgcctatgaccctgaggccgccagcgcccctggcagcggcaacccctgccacgaggccagcgctgcccagaaggaaaatgctggagaagatcctggcctggcccggcaggcccccaagcccaggaagcagaggagcagcctgctggagaagggcctggatggagccaagaaggctgtgggcggcctgggcaagctgggcaaggatgctgtggaggacctggagagcgtgggcaaaggagctgtgcatgatgtgaaggatgtgctggacagcgtgctgtag

SEQ ID NO: 230364 - DNA, 333 bp, Artificial Sequence
  derived and/or modified sequence
atgcggttcatgaccctgctgttcctgaccgccctggccggcgcccttgtgtgtgcctatgaccccgaggccgcatccgctccgggatccggcaacccttgtcatgaggccagcgctgcccaaaaggagaacgctggagaggaccctgggctggccagacaggcacccaaaccgcgcaaacagcgctcttccctgctcgaaaagggccttgatggtgccaagaaggcagtgggcggattagggaagctcggaaaagacgccgtggaggaccttgaaagcgtgggaaaaggagcagttcacgacgtgaaggatgtgctagactcagtgctttag

SEQ ID NO: 230365 - DNA, 333 bp, Artificial Sequence
  derived and/or modified sequence
atgagattcatgacccttctattcctgacagctcttgccggtgccctggtctgtgcctatgatcctgaggccgctagcgcgccagggtccggaaacccgtgtcacgaggcatcagcggctcagaaggagaatgccggagaagacccagggctggcaaggcaagcacctaaaccacgaaagcagcgctccagtttactggaaaaaggactggatggcgcaaagaaggccgtggggggattagggaagctgggcaaagacgccgtggaagacctagagtccgtaggcaaaggagccgtgcacgatgtgaaagacgtccttgactccgttctctag

SEQ ID NO: 230366 - DNA, 333 bp, Artificial Sequence
  derived and/or modified sequence
atgagattcatgaccctgctgttcctgaccgccctggccggcgccctggtgtgcgcctacgaccccgaggccgccagcgcccccggcagcggcaacccctgccacgaggccagcgccgcccagaaggagaacgccggcgaggaccccggcctggccagacaggcccccaagcccagaaagcagagaagcagcctgctggagaagggcctggacggcgccaagaaggccgtgggcggcctgggcaagctgggcaaggacgccgtggaggacctggagagcgtgggcaagggcgccgtgcacgacgtgaaggacgtgctggacagcgtgctgtag

SEQ ID NO: 230367 - DNA, 645 bp, Artificial Sequence
  derived and/or modified sequence
cagccagcctttgttgacttaacaggtggctctgaggtgggagaagaggaggaggagaacacaccactggaagactggttcccattggtccctgtcatgcttaaaaaaaggcccagagaggcagtcttgacaccctagatcccaagatctccaaggatttggtggcatacccactccagcacacagaagcatgaggttcatgactctcctcttcctgacagctctggcaggagccctggtctgtgcctatgatccagaggccgcctctgccccaggatcggggaacccttgccatgaagcatcagcagctcaaaaggaaaatgcaggtgaagacccagggttagccagacaggcaccaaagccaaggaagcagagatccagccttctggaaaaaggcctagacggagcaaaaaaagctgtggggggactcggaaaactaggaaaagatgcagtcgaagatctagaaagcgtgggtaaaggagccgtccatgacgttaaagacgtccttgactcagtactatagctgtaaggagaagctgagaaatgatacccaggagcagcaggctttacgtcttcagcctaaaacctaaaaaaaaaaaaaaaaaaaaaaatttaaaacagctattaaactgaaagcatctgtaa

SEQ ID NO: 230368 - protein, 418 aa, Artificial Sequence
  derived and/or modified sequence
MAKLLQPPPKFLPSEWHIANKNQYHRADAQRSRSERLVAESQRLVDEIEKTTRKSQSDVNKKLEQRLEEVQFWKKELDDKLEQLVNVTDDLLIYKIRLEKALETLKEPLHITETCLAYREKRIGIDLVHDTVEHELIKEAEIIQGIMALLTRTLEEASEQIRMNRSAKYNLEKDLKDKFVALTIDDICFSLNNNSPNIRYSENAVRIEPNSVSLEDWLDFSSTNVEKADKQRNNSLMLKALVDRILSQTANDLRKQCDVVDTAFKNGLKDTKDARDKLADHLAKVMEEIASQEKNITALEKAILDQEGPAKVAHTRLETRTHRPNVELCRDVAQYRLMKEVQEITHNVARLKETLAQAQAELKGLHRRQLALQEEIQVKENTIYIDEVLCMQMRKSIPLRDGEDHGVWAGGLRPDAVC

SEQ ID NO: 230369 - protein, 272 aa, Artificial Sequence
  derived and/or modified sequence
MALLTRTLEEASEQIRMNRSAKYNLEKDLKDKFVALTIDDICFSLNNNSPNIRYSENAVRIEPNSVSLEDWLDFSSTNVEKADKQRNNSLMLKALVDRILSQTANDLRKQCDVVDTAFKNGLKDTKDARDKLADHLAKVMEEIASQEKNITALEKAILDQEGPAKVAHTRLETRTHRPNVELCRDVAQYRLMKEVQEITHNVARLKETLAQAQAELKGLHRRQLALQEEIQVKENTIYIDEVLCMQMRKSIPLRDGEDHGVWAGGLRPDAVC

SEQ ID NO: 230370 - DNA, 1257 bp, Artificial Sequence
  derived and/or modified sequence
atggccaagctgctgcagcccccccccaagttcctgcccagcgagtggcacatcgccaacaagaaccagtaccacagagccgacgcccagagaagcagaagcgagagactggtggccgagagccagagactggtggacgagatcgagaagaccaccagaaagagccagagcgacgtgaacaagaagctggagcagagactggaggaggtgcagttctggaagaaggagctggacgacaagctggagcagctggtgaacgtgaccgacgacctgctgatctacaagatcagactggagaaggccctggagaccctgaaggagcccctgcacatcaccgagacctgcctggcctacagagagaagagaatcggcatcgacctggtgcacgacaccgtggagcacgagctgatcaaggaggccgagatcatccagggcatcatggccctgctgaccagaaccctggaggaggccagcgagcagatcagaatgaacagaagcgccaagtacaacctggagaaggacctgaaggacaagttcgtggccctgaccatcgacgacatctgcttcagcctgaacaacaacagccccaacatcagatacagcgagaacgccgtgagaatcgagcccaacagcgtgagcctggaggactggctggacttcagcagcaccaacgtggagaaggccgacaagcagagaaacaacagcctgatgctgaaggccctggtggacagaatcctgagccagaccgccaacgacctgagaaagcagtgcgacgtggtggacaccgccttcaagaacggcctgaaggacaccaaggacgccagagacaagctggccgaccacctggccaaggtgatggaggagatcgccagccaggagaagaacatcaccgccctggagaaggccatcctggaccaggagggccccgccaaggtggcccacaccagactggagaccagaacccacagacccaacgtggagctgtgcagagacgtggcccagtacagactgatgaaggaggtgcaggagatcacccacaacgtggccagactgaaggagaccctggcccaggcccaggccgagctgaagggcctgcacagaagacagctggccctgcaggaggagatccaggtgaaggagaacaccatctacatcgacgaggtgctgtgcatgcagatgagaaagagcatccccctgagagacggcgaggaccacggcgtgtgggccggcggcctgagacccgacgccgtgtgctag

SEQ ID NO: 230371 - DNA, 819 bp, Artificial Sequence
  derived and/or modified sequence
atggccctgctgaccagaaccctggaggaggccagcgagcagatcagaatgaacagaagcgccaagtacaacctggagaaggacctgaaggacaagttcgtggccctgaccatcgacgacatctgcttcagcctgaacaacaacagccccaacatcagatacagcgagaacgccgtgagaatcgagcccaacagcgtgagcctggaggactggctggacttcagcagcaccaacgtggagaaggccgacaagcagagaaacaacagcctgatgctgaaggccctggtggacagaatcctgagccagaccgccaacgacctgagaaagcagtgcgacgtggtggacaccgccttcaagaacggcctgaaggacaccaaggacgccagagacaagctggccgaccacctggccaaggtgatggaggagatcgccagccaggagaagaacatcaccgccctggagaaggccatcctggaccaggagggccccgccaaggtggcccacaccagactggagaccagaacccacagacccaacgtggagctgtgcagagacgtggcccagtacagactgatgaaggaggtgcaggagatcacccacaacgtggccagactgaaggagaccctggcccaggcccaggccgagctgaagggcctgcacagaagacagctggccctgcaggaggagatccaggtgaaggagaacaccatctacatcgacgaggtgctgtgcatgcagatgagaaagagcatccccctgagagacggcgaggaccacggcgtgtgggccggcggcctgagacccgacgccgtgtgctag

SEQ ID NO: 230372 - DNA, 1257 bp, Artificial Sequence
  derived and/or modified sequence
atggcgaaactccttcagccccccccaaaatttcttccttcagagtggcacatcgcaaacaaaaatcaataccatcgcgccgatgcccagcgctctcgctccgaacggctcgtggccgaatcacagcggctggtggacgaaatcgaaaagaccactaggaagtcccagtctgatgtgaataagaagcttgaacagcggctcgaggaggtgcagttctggaaaaaagaactggacgataaactggaacaactggtgaatgtgactgatgatttgttaatatataaaataaggctagagaaagctctagaaacactaaaagaacccctgcatatcaccgaaacctgcttggcatatcgagagaaacggatcggcattgatcttgtgcacgacaccgtcgaacatgagctcattaaagaggccgagattattcagggtatcatggcattgcttacgcggaccctggaggaggcatccgagcagatccggatgaatcgcagtgctaagtataacctggaaaaggatcttaaagacaagttcgtggcccttaccattgatgatatatgtttcagcctcaacaacaattccccaaatattagatactctgaaaatgcggtccgtatagagcccaatagtgttagtttggaagactggttggacttttcttcaacaaatgtagagaaggccgacaaacagaggaataattcccttatgctcaaagcactggtggacaggatcctgtcacagacggcaaacgatctgaggaaacaatgtgacgtggtcgataccgcgtttaagaacggcttgaaggacacgaaggatgctcgcgataagttagctgaccacttggcaaaggtcatggaggagattgccagtcaagagaagaatataactgctctcgagaaggcaattctggaccaggaaggaccagctaaagtcgcccacaccaggttggaaacacgcacacatcgccctaatgttgaactctgtcgggatgtggctcagtacaggctgatgaaggaagtccaggagatcacacacaacgtcgcacgcctcaaagagaccctcgcgcaggctcaggcagaactgaaggggctccacagaagacaactagccttacaagaggaaattcaggtgaaagaaaatacaatttacattgacgaagtgctctgtatgcagatgagaaagtcaatccccctgagagacggggaggatcatggagtgtgggctggcggactgaggcccgacgccgtgtgttag

SEQ ID NO: 230373 - DNA, 819 bp, Artificial Sequence
  derived and/or modified sequence
atggccctgctcacacggactcttgaggaggcgagcgaacagatccgtatgaacagatctgccaaatacaatctggaaaaggacctgaaggacaaattcgtggccttgaccattgacgacatctgtttttcattgaataacaactctccaaatatccgctattccgagaacgctgtgcgaattgagcctaacagcgtgtcactcgaagactggctggattttagctccacaaatgtggaaaaggccgataaacagaggaacaatagtctgatgctgaaggccttagtggatcgaatactttcccaaaccgcaaatgatttaagaaagcagtgtgacgtcgttgatacggccttcaaaaatggcttgaaggataccaaagatgcacgcgacaagttagccgaccaccttgctaaagtaatggaggagatcgcgtcccaggagaagaatattactgccctggagaaggctatattggaccaagagggccccgctaaggtagcacacaccagactcgagacacgaactcatagaccgaacgtggaactgtgcagagatgttgcacagtaccgactcatgaaagaggtacaggagataacccacaacgtggcccgcttgaaagagaccctcgctcaggcacaagccgaattgaaaggattgcatagaaggcagttggccctgcaggaggagattcaagttaaggaaaacaccatttatatagatgaggtcctgtgcatgcagatgcggaaatctatacctcttcgggacggcgaggatcacggggtttgggcaggtgggttgagacctgacgctgtatgctag

SEQ ID NO: 230374 - DNA, 1257 bp, Artificial Sequence
  derived and/or modified sequence
atggccaagctgctgcagcccccacccaagttcctgcccagcgagtggcacatcgccaacaagaaccagtaccacagagcagatgcccagaggagccgctctgagcggctggtggccgagagccagaggctggtggatgaaattgagaagaccaccaggaagagccagagtgatgtgaacaagaagctggagcagaggctggaggaggtgcagttctggaagaaggagctggatgacaagctggagcagctggtgaatgtgacagatgacctgctgatctacaagatccggctggagaaggccctggagaccctgaaggagcccctgcacatcacagagacctgcctggcctaccgggagaagagaattggaattgacctggtgcatgacacagtggagcacgagctgatcaaggaggccgagatcatccagggcatcatggccctgctgaccaggaccctggaggaggccagcgagcagatccgcatgaacagaagtgccaagtacaacctggagaaggacctgaaggacaagtttgtggccctgaccattgatgacatctgcttcagcctgaacaacaacagccccaacatccgctacagtgaaaatgctgtgagaattgagcccaacagcgtgtccctggaggactggctggacttcagcagcaccaacgtggagaaggctgacaagcagaggaacaacagcctgatgctgaaggccctggtggaccgcatcctgagccagacagccaatgacctgaggaagcagtgtgatgtggtggacacagccttcaagaatggcctgaaggacaccaaggatgcccgggacaagctggccgaccacctggccaaggtgatggaggagatcgccagccaggagaagaacatcacagccctggagaaggccatcctggaccaggagggccctgccaaggtggcccacacccggctggagaccaggacccaccggcccaacgtggagctgtgcagagatgtggcccagtaccgcctgatgaaggaggtgcaggagatcacccacaacgtggcccggctgaaggagaccctggcccaggcccaggccgagctgaagggcctgcaccggcggcagctggccctgcaggaggagatccaggtgaaggagaacaccatctacattgatgaggtgctgtgcatgcagatgaggaagagcatccccctgagagatggagaagatcatggagtgtgggccggcggcctgcggccagatgctgtgtgctag

SEQ ID NO: 230375 - DNA, 819 bp, Artificial Sequence
  derived and/or modified sequence
atggccctgctgaccaggaccctggaggaggccagcgagcagatccgcatgaacagaagtgccaagtacaacctggagaaggacctgaaggacaagtttgtggccctgaccattgatgacatctgcttcagcctgaacaacaacagccccaacatccgctacagtgaaaatgctgtgagaattgagcccaacagcgtgtccctggaggactggctggacttcagcagcaccaacgtggagaaggctgacaagcagaggaacaacagcctgatgctgaaggccctggtggaccgcatcctgagccagacagccaatgacctgaggaagcagtgtgatgtggtggacacagccttcaagaatggcctgaaggacaccaaggatgcccgggacaagctggccgaccacctggccaaggtgatggaggagatcgccagccaggagaagaacatcacagccctggagaaggccatcctggaccaggagggccctgccaaggtggcccacacccggctggagaccaggacccaccggcccaacgtggagctgtgcagagatgtggcccagtaccgcctgatgaaggaggtgcaggagatcacccacaacgtggcccggctgaaggagaccctggcccaggcccaggccgagctgaagggcctgcaccggcggcagctggccctgcaggaggagatccaggtgaaggagaacaccatctacattgatgaggtgctgtgcatgcagatgaggaagagcatccccctgagagatggagaagatcatggagtgtgggccggcggcctgcggccagatgctgtgtgctag

SEQ ID NO: 230376 - DNA, 1257 bp, Artificial Sequence
  derived and/or modified sequence
atggccaagctgctgcagcccccccccaagttcctgcccagcgagtggcatatagctaacaagaatcagtatcatagggccgatgcccagcgctcacgtagcgagagattggtcgccgaatcccagcgcttagtcgacgaaattgaaaaaactactaggaagagccagtccgacgtgaataaaaagcttgagcagcgcctggaagaagtccaattctggaaaaaggagctcgacgacaaacttgagcagctcgtgaacgttacagatgacttactcatttacaaaatccgcctagagaaggcgctggagacactgaaggagcccctgcacatcacagagacgtgcctggcataccgggagaagagaattggcatcgaccttgtgcacgatactgtagaacacgagttaatcaaagaagccgaaattatacaagggatcatggctttgttgacgaggacgctggaagaggccagtgagcagattcgtatgaacagatcagccaagtacaacctcgagaaggacttgaaagacaagttcgtggcgctcacaatagacgatatctgcttttcattaaacaacaactcacccaatatccgctacagcgagaacgccgtgcgcatcgagccaaattccgtgagcttggaagattggctcgacttttctagcacaaatgtcgaaaaagcagacaagcagcgcaacaattccctgatgctgaaggcattagtggacagaattctctcgcagactgccaacgaccttcgcaagcagtgtgacgtggtggatacggcctttaagaacggccttaaggataccaaggatgcccgcgacaaactggcagatcacttggccaaggtcatggaggaaatcgcctctcaagagaagaatattacagccctggaaaaggctatcctggatcaggaggggcccgctaaggtcgctcatacacgcttggagacacgtactcaccggcccaatgtcgagctatgcagagatgtcgcacagtatcgcctgatgaaggaagtgcaggagattacgcataacgtggctaggctgaaggaaaccctggcccaagctcaggcagagctgaaaggactgcaccgccggcagctcgcacttcaggaggagattcaggtaaaggagaatacaatctatatcgacgaggttctctgcatgcaaatgagaaagtccatcccgcttcgcgatggagaagatcatggggtgtgggccgggggattgagaccagacgccgtgtgttag

SEQ ID NO: 230377 - DNA, 819 bp, Artificial Sequence
  derived and/or modified sequence
atggccctgctgacccggaccctggaggaggccagcgagcagatcaggatgaacagatccgcaaaatacaatctggagaaggatctcaaggacaagttcgtggcactcacaatcgacgatatttgcttctccctcaacaataattccccgaacatcagatatagtgagaacgccgtgagaatcgagccaaatagcgtttcactagaagattggcttgacttttctagcaccaacgttgagaaagccgataagcaaaggaataatagcctgatgctgaaggcccttgtcgaccgcatactgtcccagaccgccaatgatctccgcaagcaatgcgacgtggtggacactgcgttcaagaacggtcttaaggatacgaaggacgcgagagataagctggccgatcacctggcgaaagtcatggaagagattgcctcacaggagaaaaacatcaccgccctcgaaaaggccatactcgatcaggagggtccagccaaagttgcacataccaggctggagaccaggacccacagaccaaacgtcgagttatgcagggacgtagcccaatatcgactcatgaaagaggttcaggaaataactcacaacgtggctcgtctgaaggaaactctagcccaggcccaggccgaacttaagggacttcatcggaggcagctggctttacaggaggagatccaggttaaagagaacacaatttatatcgatgaagtcctctgcatgcaaatgcggaaatcgatcccattaagggatggcgaggaccacggcgtctgggccggtgggctaagacccgacgcagtgtgttag

SEQ ID NO: 230378 - DNA, 1257 bp, Artificial Sequence
  derived and/or modified sequence
atggctaagctcctgcagccacctcccaagttcttgccttcagaatggcacatagctaataaaaaccagtaccaccgagccgacgcccaacggagtaggtctgagcggctggttgcggagtcccagagactagtggacgagatcgagaaaacaacaaggaaaagtcaatccgacgttaataagaagctcgagcaacgtctggaagaggtccagttttggaaaaaagaactggatgacaagctggagcagctggtcaacgtgaccgatgacctacttatttacaagataaggttagagaaagccctcgaaaccctcaaggagccgctgcacattacagaaacctgcctggcctaccgagaaaagaggattggcatagacctggttcacgacaccgtcgaacatgagctgatcaaagaggctgagataattcagggcatcatggcccttctgacacgaacactcgaagaagccagtgagcagatccgtatgaacaggagcgccaagtataatctggaaaaagaccttaaggataagttcgtggctctgaccatcgacgacatttgtttctctcttaacaacaactcccccaacattaggtatagtgagaacgccgtaagaattgagcccaacagcgtttccttggaagattggctagacttctccagcacaaacgtggaaaaggccgacaagcagcggaataattcacttatgctaaaggcgctggttgaccgcatcctttcccagactgctaatgatcttcgaaagcagtgcgatgtggtggatacagctttcaaaaacggactgaaggacacaaaggacgctagggacaaacttgctgaccacctggccaaggtgatggaggagatcgcgagtcaagaaaagaacatcaccgccctggagaaggcgattctggaccaggaaggccctgccaaggtggctcatacaagactcgagactaggacacaccgccctaatgtcgaactctgcagagacgtggctcagtaccgccttatgaaggaggttcaggaaattacccataacgttgctcgactaaaagagaccctggctcaggcccaagccgagctcaaggggctccaccgacggcagctcgcactgcaagaggaaatccaggtgaaagagaacaccatctatatcgatgaagtgttgtgcatgcagatgcgtaaaagcattcccctgcgggatggcgaggaccatggagtatgggcgggagggcttcgtcctgacgcagtatgctag

SEQ ID NO: 230379 - DNA, 819 bp, Artificial Sequence
  derived and/or modified sequence
atggctttactcacccgcaccctcgaggaggcatccgagcagataagaatgaatagatctgccaagtacaacctggagaaggacctcaaggataaattcgtggcactcacaatagacgacatctgttttagtctgaataacaactcccccaacatccgctattccgagaatgcagtcagaatagagcccaatagcgtaagtttagaggattggctcgacttctccagtaccaacgtcgaaaaggccgataagcagaggaacaattcacttatgctgaaagcccttgttgacagaatcctatctcaaaccgcaaacgatttgagaaagcaatgtgatgtggtggataccgctttcaaaaacggcctgaaggatacaaaagatgcccgagacaaactcgctgatcacctggccaaggtgatggaagagatcgcatcccaagaaaagaatatcacggccctcgaaaaagctatcctcgaccaagaagggcctgctaaggtagcacacacccgacttgagacaagaacccatcggccaaacgtggaactctgccgggatgtggcacaatacaggctgatgaaggaagtacaggaaatcacacacaacgtggcacgtctgaaagagaccttagcacaggctcaggccgagttaaaaggcctccatcggcgtcaacttgctttgcaggaagagatccaggtgaaggagaatactatctacatcgacgaagtgctttgtatgcagatgagaaagtctatccccctccgtgacggtgaagatcacggtgtttgggctggcggactccgacccgatgctgtctgctag

SEQ ID NO: 230380 - DNA, 3421 bp, Artificial Sequence
  derived and/or modified sequence
gttgtcatggagaccgcgttgtttacctctctgttctgcaagagctggaagctccagttggggtaaggaggctcccatcccgagcttgcgtagtggttctgtgtggcgctgaggaatttggaaacctcaaatggctaaactattacaacctccacccaagttcctgccctcagagtggcacattgctaacaagaaccagtaccacagagcagacgctcaaaggtcccgatcagaacgcctggtcgcagaaagccagaggcttgtggatgaaattgaaaagaccacaagaaaatctcaaagcgatgtgaacaagaaactagaacagagactcgaggaagtccagttctggaagaaggagttagatgacaaacttgagcagcttgtgaatgtaactgatgatctactcatatataagatcagattggaaaaagccctggagaccttgaaagagcccttgcacatcactgagacatgcctggcatacagggagaagcgcattggcattgacctggtgcacgacacagtggagcatgagctgataaaggaggctgagatcatccagggcattatggctctgctgacccgtaccttggaggaggcttccgagcagattcggatgaaccgctctgccaagtacaatcttgagaaggatttgaaggacaagtttgtggccctgaccatagatgatatctgcttctcgctcaacaacaactcaccaaacatcagatattctgagaacgccgtgaggattgagccaaactccgtgagtctggaagactggttggacttctccagcaccaatgtggagaaggctgacaagcagcggaacaactccctgatgctgaaagccctggtggatcgaatcctgtcccagacagccaatgatctgcgcaagcagtgtgatgtggtggacacggcattcaagaatgggctgaaggatacaaaggatgccagggacaagctggctgatcatctggccaaggtcatggaagagattgcttcccaggagaaaaatattacagctcttgaaaaggccatccttgaccaagaagggccagccaaggtggctcatacgcgcttggagaccaggacacaccggccgaacgtggagctgtgtcgtgatgtcgcacaatataggctaatgaaggaggttcaagagatcacccacaatgtcgcaagattgaaggaaactttagcccaagctcaggcagagctgaaagggctgcatcgcagacagcttgccctgcaggaggagatccaggtcaaagagaacaccatttatatcgacgaagtgctgtgtatgcagatgaggaaatccatcccacttcgggatggggaagaccatggggtctgggctgggggcctccgccctgatgctgtctgctaatagtagggctagttccaattctcattaaaccacattgtaaacagtagttacagtagtacagagctctcatttcaggctggcggggcctctagccagcctgctgcaacctcttggctggcattccaagcctgctcagggggctgattttggggcgagtttcttctcttatgctggtgtggtgtttgcctaacaattcaactccatattttagcacaggccactcttacaatatcacaggacttggggccccaggacagggtttcaagacatttcagttcagattcaattcaataaagtagttgggctggatcacctgtgtagaccatgcccctcttgctcatgagatgggatgctaacctttctcttggctctcaaaatttcttttctctagaaaataatgtgttttttttctcttaaatactcaaataacataaagaaaaagaacaaaattccattcattcaagtcaatgggttcaagtcaatggttaagactgtaggttccggagtctgccatctgagtataggacctccaatagtccccactcacagggctataggggcgttgaatgagatcacctccgtaaagggcttcatactgagcctgtatcatggggcagtgagtgtttaatgaatgtgagccattgtgagcagtcccaccctataccaacataatttctgcacaattgtactcatggcataaactcaatttcaggattatttttttccttcactgctaattattgcaagcctttgttcatgttgctaaattgtctttataattattttaatggttacgtacctctttacaagttttcagcaagactgttttatatacttactgtttcttttccaaaaagagttcaacttgtgggaggctgccttccgctgagctgcagcaggtcagagatctatgtgggtgactgtcaaaggaagacatttgctgtgggaaactgctcatttgttccttattccgctaacattgaaggaacactttccatggacgaggcttaccatctcagcaccctcccatgtgtgaagctgctgctacactctgctaacatttggttccccggtgctcatggacagctgacggtgtggggctcaggagacctagcttctagttgcaacactgccaggaaagtttctctccttctttaggaccacctgtaaagtaaggaaaggactatatcgtctggaactcttcctgtccttgctgttccctgaatctggctgtctagctgcacatacggtgtcatagggcacaatgataatgcagagtgtgggcctaattcctgggagctttgcaatctaggtgctccttggtccagagactctttgccatcagaaagggatgttcccaatctgggatggagaaaccccctttgaggccaaaagcactggcttaattctgttaattctgatctatgccaccccagtgctgaacgtctcctctcagagtgctcagcaaatacacagcccttcccatgcctcaatcaaggagggaggcccctctctgctcactgggaagcctctgggtgcttttctgctctggctcggaagagtccaaataagccttcccagctcactgggcagacctcagagtttctgctaacttagcagggttttgaggtctgtcccagaggatgtggctggcagggtgtgaagacactgggcaaaatccttccttgtgaatacagctctcagaggcagccagcctcagtggtggattcagatcccaggctctgcagggagatgtgattcagatcagctggtggatcagctccacgctctacctgtgatgtgatccccgccaagttactcaacttccccgagcttcagttgcctaatctgtaaataagactaataaagcctagattggcgagataacgtgtggaagactctcaacacagtgtctggaacatgctgcttttaagggaaatgtgattttgattatggttgaggccatttctcaacatgtagacataaaatgcggaaacatctaagatttcaataaagcaatgttttgttagtaaa

SEQ ID NO: 230381 - DNA, 1532 bp, Artificial Sequence
  derived and/or modified sequence
agttggggtaaggaggctcccatcccgagcttgcgtagtggttctgtgtggcgctgaggaatttggaaacctcaaatggctaaactattacaacctccacccaagttcctgccctcagagtggcacattgctaacaagaaccagtaccacagagcagacgctcaaaggtcccgatcagaacgcctggtcgcagaaagccagaggcttgtggatgaaattgaaaagaccacaagaaaatctcaaagcgatgtgaacaagaaactagggagaagcgcattggcattgacctggtgcacgacacagtggagcatgagctgataaaggaggctgagatcatccagggcattatggctctgctgacccgtaccttggaggaggcttccgagcagattcggatgaaccgctctgccaagtacaatcttgagaaggatttgaaggacaagtttgtggccctgaccatagatgatatctgcttctcgctcaacaacaactcaccaaacatcagatattctgagaacgccgtgaggattgagccaaactccgtgagtctggaagactggttggacttctccagcaccaatgtggagaaggctgacaagcagcggaacaactccctgatgctgaaagccctggtggatcgaatcctgtcccagacagccaatgatctgcgcaagcagtgtgatgtggtggacacggcattcaagaatgggctgaaggatacaaaggatgccagggacaagctggctgatcatctggccaaggtcatggaagagattgcttcccaggagaaaaatattacagctcttgaaaaggccatccttgaccaagaagggccagccaaggtggctcatacgcgcttggagaccaggacacaccggccgaacgtggagctgtgtcgtgatgtcgcacaatataggctaatgaaggaggttcaagagatcacccacaatgtcgcaagattgaaggaaactttagcccaagctcaggcagagctgaaagggctgcatcgcagacagcttgccctgcaggaggagatccaggtcaaagagaacaccatttatatcgacgaagtgctgtgtatgcagatgaggaaatccatcccacttcgggatggggaagaccatggggtctgggctgggggcctccgccctgatgctgtctgctaatagtagggctagttccaattctcattaaaccacattgtaaacagtagttacagtagtacagagctctcatttcaggctggcggggcctctagccagcctgctgcaacctcttggctggcattccaagcctgctcagggggctgattttggggcgagtttcttctcttatgctggtgtggtgtttgcctaacaattcaactccatattttagcacaggccactcttacaatatcacaggacttggggccccaggacagggtttcaagacatttcagttcagattcaattcaataaagtagttgggctggatcacctgtgtagaccatgcccctcttgctcatgagatgggatgctaacctttctctt

SEQ ID NO: 230382 - protein, 563 aa, Artificial Sequence
  derived and/or modified sequence
MSRVAGTRTDVNELLQRWTPRCVRWHTGGARRVALDRPLVTACLPPAGDVVDVYQREFLALRDRLHAAEQESLKRSKELNLVLDEIKRAVSERQALRDGDGNRTWGRLTEDPRLKPWNGSHRHVLHLPTVFHHLPHLLAKESSLQPAVRVGQGRTGVSVVMGIPSVRREVHSYLTDTLHSLISELSPQEKEDSVIVVLIAETDSQYTSAVTENIKALFPTEIHSGLLEVISPSPHFYPDFSRLRESFGDPKERVRWRTKQNLDYCFLMMYAQSKGIYYVQLEDDIVAKPNYLSTMKNFALQQPSEDWMILEFSQLGFIGKMFKSLDLSLIVEFILMFYRDKPIDWLLDHILWVKVCNPEKDAKHCDRQKANLRIRFKPSLFQHVGTHSSLAGKIQKLKDKDFGKQALRKEHVNPPAEVSTSLKTYQHFTLEKAYLREDFFWAFTPAAGDFIRFRFFQPLRLERFFFRSGNIEHPEDKLFNTSVEVLPFDNPQSDKEALQEGRTATLRYPRSPDGYLQIGSFYKGVAEGEVDPAFGPLEALRLSIQTDSPVWVILSEIFLKKAD

SEQ ID NO: 230383 - DNA, 1692 bp, Artificial Sequence
  derived and/or modified sequence
atgtctcgtgtagcagggacccggacagacgtgaatgagcttcttcagagatggacacccagatgtgtgcggtggcacactggcggcgcccggcgggtggccctagaccgccccctagtgacagcatgtctgccccccgccggcgacgttgtggacgtctaccaacgcgaattcctcgccttgagggaccgcctgcacgctgcggaacaagaatctctaaaaagatctaaagagctgaatctggtcctggatgagatcaaaagagcagtcagtgagcgtcaggctcttcgtgacggcgacggcaatcgaacctgggggcgcttgactgaagatccaagactcaagccttggaatggcagtcaccggcacgtgctccacctgcctacggtgtttcaccacctgccccacctcctagccaaggaatcctccttacagccagcagttagggtgggccaggggcgaaccggcgtctcagtggtaatggggatccctagcgtgagaagagaggtgcattcttacctgacagatacattacattccctgattagcgagctttcacctcaggaaaaagaagactctgtgatagttgtgctgattgctgagacagacagccagtataccagcgccgtcacggagaacattaaggcactgtttcccaccgaaatccactctgggctgctggaggtcatcagcccatccccacatttttatcctgatttcagcaggctgagggaaagttttggagatccaaaggagagagtgaggtggagaacgaagcagaacctggactactgctttctgatgatgtatgctcagtctaaaggaatctattacgtgcagctagaggatgatatagtggccaagccaaactatctctctacaatgaaaaatttcgcactccagcagccttctgaggactggatgatcctagagttctcgcagctgggattcatcggtaagatgtttaaatcactcgacttaagtctgatcgtagaattcattttaatgttctaccgtgacaaacccattgattggctgttagaccacatcctctgggtcaaggtatgtaatcccgaaaaggacgccaaacactgcgatagacagaaagccaatctaagaatccgattcaaaccaagtctattccagcacgtgggcacccactctagcctagctggcaaaatccagaagttgaaagataaagatttcggaaaacaggcgctccggaaggaacacgttaacccccccgcagaggtgtccacatctttgaagacctatcaacactttaccctggagaaggcatatttacgggaagactttttctgggccttcactccggctgccggggacttcatcagattccgtttcttccaacctctgcggctggaaagatttttcttcagatcagggaacatcgaacatcccgaagataagctcttcaacacgtcagtggaggtgcttccatttgacaaccctcagtcggataaagaggccctacaagaaggacgtacggctacactcagataccctcggtcccccgatggatatttacagattgggtctttttataaaggagtggccgagggcgaggtggaccctgccttcggccctcttgaggcgttgcgactaagcattcagacagatagcccagtctgggtcattctgtctgaaattttcctgaaaaaggctgactag

SEQ ID NO: 230384 - DNA, 1692 bp, Artificial Sequence
  derived and/or modified sequence
atgagccgggtggccggcaccaggacagatgtgaatgagctgctgcagcgctggaccccccgctgtgtgcgctggcacactggaggagccaggagagtggccctggaccggcccctggtgacagcctgcctgcccccagctggagatgtggtggatgtgtaccagcgggagttcctggccctgcgggaccggctgcatgctgctgagcaggagagcctgaagaggagcaaggagctgaacctggtgctggatgagatcaagagagctgtgtctgagcggcaggccctgagagatggagatggcaacagaacctggggccgcctgacagaggacccccggctgaagccctggaatggcagccacagacatgtgctgcacctgcccaccgtcttccaccacctgccccacctgctggccaaggagagcagcctgcagcctgctgtgcgggtgggccagggccgcactggagtgtctgtggtgatgggcatccccagcgtgagaagagaggtgcacagctacctgacagacaccctgcacagcctcatcagcgagctgagcccccaggagaaggaggacagcgtgattgtggtgctgattgctgagacagacagccagtacaccagcgctgtgacagagaacatcaaggccctcttccccacagagatccacagcggcctgctggaggtgatcagccccagcccccacttctacccagacttcagccggctgcgggagagctttggagaccccaaggagcgggtgcgctggaggaccaagcagaacctggactactgcttcctgatgatgtatgcccagagcaagggcatctactacgtgcagctggaggatgacatcgtggccaagcccaactacctgagcaccatgaagaactttgccctgcagcagcccagcgaggactggatgatcctggagttcagccagctgggcttcatcggcaagatgttcaagagcctggacctgagcctcatcgtggagttcatcctgatgttctacagagacaagcccatcgactggctgctggaccacatcctgtgggtgaaggtgtgcaaccctgagaaggatgccaagcactgtgaccggcagaaggccaacctgcgcatccgcttcaagcccagcctcttccagcacgtgggcacccacagcagcctggccggcaagatccagaagctgaaggacaaggactttgggaagcaggccctgaggaaggagcacgtgaaccccccagctgaggtgtccaccagcctgaagacctaccagcacttcaccctggagaaggcctacctgcgggaggacttcttctgggccttcaccccagctgctggggacttcatccgcttccgcttcttccagcccctgcggctggagcgcttcttcttccgcagcggcaacatcgagcaccctgaggacaagctgttcaacacctctgtggaggtgctgccctttgacaacccccagagcgacaaggaggccctgcaggagggccgcacagccaccctgcgctaccccaggagcccagatggctacctgcagatcggcagcttctacaagggcgtggccgagggggaggtggaccctgccttcggccccctggaggccctgcggctgagcatccagacagacagccctgtgtgggtgatcctgtctgagatcttcctgaagaaggctgactag

SEQ ID NO: 230385 - DNA, 3027 bp, Artificial Sequence
  derived and/or modified sequence
ctctggggtctgtgaagccaccaaggatcaaggaatggaagagctgcctgagtgtagagggagttcggtcaggcttcttaaacttggagacttggaaacagaaggccttgtaggccacataggttttcagagactcgcctggcagaggcctggagcgtcctgctgcgtggactgtgggcaccgagccaccaggaggttgttgatctcattcttgctcactggtccctgccagactggtggtgcctctctactgtcgggcagccccacctctgtgctgccccatccacctacagccctcatgcctgggcccagctggaggttctgacaggggccccctggggtggcatgcggacccttcagggtgccccaggcgcagcacaggtctccagagacacaggcaccagggcgttcagagctagtcccctcgctgctgttgactgtccttgagcagccccagggccggtttctcaacctcatttgctcacctgagcaatgaagtgaggtgggctcctggaactgcagcagccaccccccggggccatcgtgaggctaagaatccagtgcagggtgagcaaccagcgaccgctacaaggacagtgaagagctagcaccaggaccttgggtagcccacccgctggagggagcgtgtgctgcaaaaagcaagagtgggctttggaggccaacggatggagcggattcagtctgaggctgttccagcccttgcttaggatccacctacctaggtctggaaatcgtatttccacttcagatgccttctcagaggataaaataacccccggtgggggagagtactggaagagggctaattcccctggttttctccccatgagcattagtgtcagtgtaattttagagtgaccccagctatgtcacgtgtggcaggcacaagaacagatgtcaatgagctattgcagaggtggacacccagatgtgtgcgctggcacactggaggggcccgtagggtggctctagaccgccccctcgtgacggcttgcctaccacctgcaggcgacgttgtggacgtttaccagcgggagttcctggcgctgcgcgatcggttgcacgcagctgagcaggagagcctcaagcgctccaaggagctcaacctggtgctggacgagatcaagagggccgtgtcagaaaggcaggcgctgcgagacggagacggcaatcgcacctggggccgcctaacagaggacccccgattgaagccgtggaacggctcacaccggcacgtgctgcacctgcccaccgtcttccatcacctgccacacctgctggccaaggagagcagtctgcagcccgcggtgcgcgtgggccagggccgcaccggagtgtcggtggtgatgggcatcccgagcgtgcggcgcgaggtgcactcgtacctgactgacactctgcactcgctcatctccgagctgagcccgcaggagaaggaggactcggtcatcgtggtgctgatcgccgagactgactcacagtacacttcggcagtgacagagaacatcaaggccttgttccccacggagatccattctgggctcctggaggtcatctcaccctccccccacttctaccctgacttctcccgcctccgagagtcctttggggaccccaaggagagagtcaggtggaggaccaaacagaacctcgattactgcttcctcatgatgtacgcgcagtccaaaggcatctactacgtgcagctggaggatgacatcgtggccaagcccaactacctgagcaccatgaagaactttgcactgcagcagccttcagaggactggatgatcctggagttctcccagctgggcttcattggtaagatgttcaagtcgctggacctgagcctgattgtagagttcattctcatgttctaccgggacaagcccatcgactggctcctggaccatattctgtgggtgaaagtctgcaaccccgagaaggatgcgaagcactgtgaccggcagaaagccaacctgcggatccgcttcaaaccgtccctcttccagcacgtgggcactcactcctcgctggctggcaagatccagaaactgaaggacaaagactttggaaagcaggcgctgcggaaggagcatgtgaacccgccagcagaggtgagcacgagcctgaagacataccagcacttcaccctggagaaagcctacctgcgcgaggacttcttctgggccttcacccctgccgcgggggacttcatccgcttccgcttcttccaacctctaagactggagcggttcttcttccgcagtgggaacatcgagcacccggaggacaagctcttcaacacgtctgtggaggtgctgcccttcgacaaccctcagtcagacaaggaggccctgcaggagggccgcaccgccaccctccggtaccctcggagccccgacggctacctccagatcggctccttctacaagggagtggcagagggagaggtggacccagccttcggccctctggaagcactgcgcctctcgatccagacggactcccctgtgtgggtgattctgagcgagatcttcctgaaaaaggccgactaagctgcgggcttctgagggtaccctgtggccagccctgaagcccacatttctgggggtgtcgtcactgccgtccccggagggccagatacggccccgcccaaagggttctgcctggcgtcgggcttgggccggcctggggtccgccgctggcccggaggccctaggagctggtgctgcccccgcccgccgggccgcggaggaggcaggcggcccccacactgtgcctgaggcccggaaccgttcgcacccggcctgccccagtcaggccgttttagaagagcttttacttgggcgcccgccgtctctggcgcgaacactggaatgcatatactactttatgtgctgtgttttttattcttggatacatttgattttttcacgtaagtccacatatacttctataagagcgtgacttgtaataaagggttaatgaagtgtgtgcctcaaa

SEQ ID NO: 230386 - DNA, 1692 bp, Artificial Sequence
  derived and/or modified sequence
atgagccgggtggccggcacccggaccgacgtgaacgagctgctgcagagatggacaccccgctgtgtaaggtggcacaccggtggagcccggcgcgtggctcttgacagacccctggttacggcttgcctgcccccagccggcgacgtggttgacgtgtaccagagggagttcctggctctgagagataggctgcacgccgctgaacaggaatcccttaaacgatcaaaagagttgaatcttgtgctagacgaaatcaaacgagccgtgagcgagcgccaggcactgagggatggtgatggtaatcgaacctgggggcggctgacagaggatccaagattgaaaccctggaacggttcgcaccgccacgtgctgcacctcccaacagtttttcaccatctaccacatctgctcgcgaaggaaagctcactccagcctgccgttcgggtcggacagggaaggactggggtttcggttgttatggggattccaagcgtgcggagggaggttcacagttacctaactgacactttacactcactgatctcggagctctccccgcaggagaaggaagattctgtgattgtcgtgctgattgcagagaccgattcgcagtatacttcggctgtgaccgagaatatcaaagccttgtttccaactgagattcactcaggcttgctggaagttatctctccctcacctcatttttaccctgacttctctcgcctcagggagagtttcggggaccctaaggagcgggtccgctggcggaccaagcagaatctagactactgtttcctgatgatgtacgcccagtcgaaaggaatctactatgtgcaattagaagacgacatcgtcgcaaaacctaattatctttctacaatgaaaaacttcgctctccagcagccttccgaggactggatgatcctagagtttagtcagctaggtttcataggcaaaatgttcaagtctttggaccttagtcttatcgtggaattcatactgatgttctaccgtgacaaacccattgactggctgctggatcacatattatgggtgaaggtgtgtaatccagagaaggatgcgaaacactgtgatcgacagaaagcgaatctgcggattaggtttaagccttctctgtttcaacacgtgggcacgcatagctctctggctggaaaaatacagaagctgaaggacaaagattttggaaagcaagccctgcgtaaagagcacgtgaatccacccgccgaggtgagtacttctcttaaaacttaccagcacttcactctggagaaagcgtacttgagagaagatttcttttgggctttcacacccgcagcgggagacttcatcaggttcagatttttccaaccactgcgtctggagagattctttttccggtctgggaatatcgaacaccctgaggacaaattatttaataccagtgtcgaggttcttccgtttgacaatccgcagagtgacaaggaggccctccaagaaggccgaactgctaccctgagatacccaaggagtccagatggatacctgcagattggaagtttttataaaggcgtagcagaaggtgaagttgaccccgccttcggcccattggaggcactgcggttgtcaatccagaccgattcacccgtttgggtgattttgtccgagatatttttaaagaaagcagactag

SEQ ID NO: 230387 - DNA, 1692 bp, Artificial Sequence
  derived and/or modified sequence
atgagcagggtcgccggaacccgaacggacgtaaacgagctgctgcagaggtggacacccagatgcgtacggtggcacaccggaggcgctcgcagagtagccctcgaccggcctctggtaaccgcctgccttcctcccgctggagatgtggtcgatgtctaccaacgggaatttctggcccttagagaccggctccacgctgcagagcaggagagtctgaagcgtagcaaagagctgaatctggtcttggacgagataaagagagctgtgtcagaacgccaggccctcagagacggggatggaaaccggacctgggggagactcacagaggacccccgattgaagccatggaatggatcacacagacacgtgcttcacctaccaaccgttttccaccatctaccacacctcctggccaaggagagcagcctccaaccagctgtcagagtgggccaaggaagaactggagtcagcgtggtgatgggtatcccgagcgtgcggcgagaagttcattcctatctgacggacaccctccatagccttatcagcgagttgagcccccaggagaaagaagacagcgtgatcgtggtgttaatcgcagagaccgattcccagtacactagcgctgttaccgagaatataaaggccctgttccccacggaaattcattcaggtttgcttgaggtgatttctcccagtccacatttttaccctgatttttctaggctgcgggagtcctttggcgaccccaaggaacgcgtccggtggcggacaaaacaaaacctggattattgctttctcatgatgtatgcccagtccaagggaatctattacgtgcagctggaggacgatatcgtagccaaacccaattatttgtcgaccatgaagaacttcgccctgcagcagccaagcgaggattggatgatactggaattttcccagcttgggtttatcggaaagatgtttaagtcactcgacctgtcactgattgtcgaattcatcctaatgttctaccgggataaacccattgattggctgctcgaccacatactctgggttaaggtctgcaatcccgagaaggatgctaagcactgcgaccgtcaaaaggccaacctgcgaatacgctttaaaccctctctgttccagcatgtggggacccattcgagtctcgctgggaagattcagaaacttaaagacaaagacttcggcaagcaggccttaagaaaagagcacgtgaacccccctgccgaagtgagcacctccctgaagacataccagcacttcaccctcgaaaaggcatacctccgagaagactttttttgggcattcacgccagccgctggcgatttcatcaggttccgatttttccagccactgagactggaacgctttttttttagaagtggaaatattgaacatcccgaagacaagcttttcaacacaagcgtcgaagtgctgcctttcgacaatccacagtctgacaaggaagccctgcaagagggcaggaccgccaccttgcggtatcctaggtctcccgatggttatctccaaatcggcagcttttacaaaggtgttgcagaaggtgaggtggaccctgctttcgggccattagaggccctgcgtctgagcatccagacagatagtcccgtctgggttatcctctcagagatttttttaaaaaaggctgattag

SEQ ID NO: 230388 - DNA, 1692 bp, Artificial Sequence
  derived and/or modified sequence
atgagcagagtggccggcaccagaaccgacgtgaacgagctgctgcagagatggacccccagatgcgtgagatggcacaccggcggcgccagaagagtggccctggacagacccctggtgaccgcctgcctgccccccgccggcgacgtggtggacgtgtaccagagagagttcctggccctgagagacagactgcacgccgccgagcaggagagcctgaagagaagcaaggagctgaacctggtgctggacgagatcaagagagccgtgagcgagagacaggccctgagagacggcgacggcaacagaacctggggcagactgaccgaggaccccagactgaagccctggaacggcagccacagacacgtgctgcacctgcccaccgtgttccaccacctgccccacctgctggccaaggagagcagcctgcagcccgccgtgagagtgggccagggcagaaccggcgtgagcgtggtgatgggcatccccagcgtgagaagagaggtgcacagctacctgaccgacaccctgcacagcctgatcagcgagctgagcccccaggagaaggaggacagcgtgatcgtggtgctgatcgccgagaccgacagccagtacaccagcgccgtgaccgagaacatcaaggccctgttccccaccgagatccacagcggcctgctggaggtgatcagccccagcccccacttctaccccgacttcagcagactgagagagagcttcggcgaccccaaggagagagtgagatggagaaccaagcagaacctggactactgcttcctgatgatgtacgcccagagcaagggcatctactacgtgcagctggaggacgacatcgtggccaagcccaactacctgagcaccatgaagaacttcgccctgcagcagcccagcgaggactggatgatcctggagttcagccagctgggcttcatcggcaagatgttcaagagcctggacctgagcctgatcgtggagttcatcctgatgttctacagagacaagcccatcgactggctgctggaccacatcctgtgggtgaaggtgtgcaaccccgagaaggacgccaagcactgcgacagacagaaggccaacctgagaatcagattcaagcccagcctgttccagcacgtgggcacccacagcagcctggccggcaagatccagaagctgaaggacaaggacttcggcaagcaggccctgagaaaggagcacgtgaacccccccgccgaggtgagcaccagcctgaagacctaccagcacttcaccctggagaaggcctacctgagagaggacttcttctgggccttcacccccgccgccggcgacttcatcagattcagattcttccagcccctgagactggagagattcttcttcagaagcggcaacatcgagcaccccgaggacaagctgttcaacaccagcgtggaggtgctgcccttcgacaacccccagagcgacaaggaggccctgcaggagggcagaaccgccaccctgagataccccagaagccccgacggctacctgcagatcggcagcttctacaagggcgtggccgagggcgaggtggaccccgccttcggccccctggaggccctgagactgagcatccagaccgacagccccgtgtgggtgatcctgagcgagatcttcctgaagaaggccgactag

SEQ ID NO: 230389 - protein, 508 aa, Artificial Sequence
  derived and/or modified sequence
MTSTCTNSTRESNSSHTCMPLSKMPISLAHGIIRSTVLVIFLAASFVGNIVLALVLQRKPQLLQVTNRFIFNLLVTDLLQISLVAPWVVATSVPLFWPLNSHFCTALVSLTHLFAFASVNTIVVVSVDRYLSIIHPLSYPSKMTQRRGYLLLYGTWIVAILQSTPPLYGWGQAAFDERNALCSMIWGASPSYTILSVVSFIVIPLIVMIACYSVVFCAARRQHALLYNVKRHSLEVRVKDCVENEDEEGAEKKEEFQDESEFRRQHEGEVKAKEGRMEAKDGSLKAKEGSTGTSESSVEARGSEEVRESSTVASDGSMEGKEGSTKVEENSMKADKGRTEVNQCSIDLGEDDMEFGEDDINFSEDDVEAVNIPESLPPSRRNSNSNPPLPRCYQCKAAKVIFIIIFSYVLSLGPYCFLAVLAVWVDVETQVPQWVITIIIWLFFLQCCIHPYVYGYMHKTIKKEIQDMLKKFFCKEKPPKEDSHPDLPGTEGGTEGKIVPSYDSATFP

SEQ ID NO: 230390 - DNA, 1527 bp, Artificial Sequence
  derived and/or modified sequence
atgacgtccacctgcaccaacagcacgcgcgagagtaacagcagccacacgtgcatgcccctctccaaaatgcccatcagcctggcccacggcatcatccgctcaaccgtgctggttatcttcctcgccgcctctttcgtcggcaacatagtgctggcgctagtgttgcagcgcaagccgcagctgctgcaggtgaccaaccgttttatctttaacctcctcgtcaccgacctgctgcagatttcgctcgtggccccctgggtggtggccacctctgtgcctctcttctggcccctcaacagccacttctgcacggccctggttagcctcacccacctgttcgccttcgccagcgtcaacaccattgtcgtggtgtcagtggatcgctacttgtccatcatccaccctctctcctacccgtccaagatgacccagcgccgcggttacctgctcctctatggcacctggattgtggccatcctgcagagcactcctccactctacggctggggccaggctgcctttgatgagcgcaatgctctctgctccatgatctggggggccagccccagctacactattctcagcgtggtgtccttcatcgtcattccactgattgtcatgattgcctgctactccgtggtgttctgtgcagcccggaggcagcatgctctgctgtacaatgtcaagagacacagcttggaagtgcgagtcaaggactgtgtggagaatgaggatgaagagggagcagagaagaaggaggagttccaggatgagagtgagtttcgccgccagcatgaaggtgaggtcaaggccaaggagggcagaatggaagccaaggacggcagcctgaaggccaaggaaggaagcacggggaccagtgagagtagtgtagaggccaggggcagcgaggaggtcagagagagcagcacggtggccagcgacggcagcatggagggtaaggaaggcagcaccaaagttgaggagaacagcatgaaggcagacaagggtcgcacagaggtcaaccagtgcagcattgacttgggtgaagatgacatggagtttggtgaagacgacatcaatttcagtgaggatgacgtcgaggcagtgaacatcccggagagcctcccacccagtcgtcgtaacagcaacagcaaccctcctctgcccaggtgctaccagtgcaaagctgctaaagtgatcttcatcatcattttctcctatgtgctatccctggggccctactgctttttagcagtcctggccgtgtgggtggatgtcgaaacccaggtaccccagtgggtgatcaccataatcatctggcttttcttcctgcagtgctgcatccacccctatgtctatggctacatgcacaagaccattaagaaggaaatccaggacatgctgaagaagttcttctgcaaggaaaagcccccgaaagaagatagccacccagacctgcccggaacagagggtgggactgaaggcaagattgtcccttcctacgattctgctacttttccttga

SEQ ID NO: 230391 - DNA, 1527 bp, Artificial Sequence
  derived and/or modified sequence
atgacctctacctgcaccaacagcacaagagagtccaacagtagccatacatgtatgcctctctcaaagatgccaatcagcctggcccacggtattatacggagtacagttttggtaatatttttggctgcctcctttgtggggaatattgtcctggcgcttgtcttgcagcgaaagccccagctgttgcaggttactaatcgcttcatttttaatctgcttgttaccgaccttctgcagatcagccttgtggccccttgggtggtcgccactagcgttcccctgttctggccactcaatagccacttctgtacagctcttgttagcctcacgcatctcttcgcattcgccagcgtgaatacaattgtcgtggtgagcgtcgatcgctatttatcaataattcaccctctgtcctacccaagtaaaatgacccagcgccggggctacctcctcctgtatggaacctggattgtggcaatcttgcagtccacccccccgctgtatggctggggtcaggcagcatttgacgaacggaatgccctgtgctctatgatttggggggcctctccctcttatactatcctcagcgtcgtgtcttttattgttataccattaatagtaatgattgcatgttacagtgtcgtgttttgcgctgcccggcggcaacacgccctgttatacaatgttaagaggcattctttggaggtcagagtaaaagactgcgtggagaacgaagatgaggagggagccgagaagaaggaagagttccaggatgagtccgaattccgcaggcagcatgagggtgaggtgaaggccaaggagggccgcatggaggcaaaagatgggtctttgaaggcgaaagaggggagtaccggtacttcagagagttctgtcgaggcccgcggttctgaggaagtgcgggaaagcagcaccgtagccagtgacggctctatggaagggaaggaaggctcgaccaaggtggaggaaaacagcatgaaagccgacaagggcaggacggaggtgaatcagtgttctatcgatctgggcgaagacgacatggaattcggggaagacgacatcaatttctctgaagacgatgtggaggccgtgaatatcccagagtctttgccaccttcccggcgtaatagtaatagcaacccccccctgcctcgctgctaccaatgcaaggcagctaaggtaatcttcattatcatcttctcttacgtgctaagcctaggaccttattgctttttagctgtattggcggtgtgggtggatgtggaaacgcaagtgccccagtgggtgattaccattattatttggcttttctttctgcagtgctgcattcatccatatgtctatggatacatgcacaagactatcaagaaagagatacaggatatgctcaagaaatttttttgtaaggaaaagcctccgaaggaagacagccatccagacctacctgggaccgagggcggaacagaaggaaaaattgtgcccagctatgactctgccacttttccgtag

SEQ ID NO: 230392 - DNA, 1527 bp, Artificial Sequence
  derived and/or modified sequence
atgaccagcacctgcaccaacagcacccgggagagcaacagcagccacacctgcatgcccctgagcaagatgcccatcagcctggcccacggcatcatccgcagcacagtgctggtgatcttcctggccgccagctttgtgggcaacatcgtgctggccctggtgctgcagaggaagccccagctgctgcaggtgaccaaccgcttcatcttcaacctgctggtgacagacctgctgcagatcagcctggtggccccctgggtggtggccacctctgtgcccctcttctggcccctgaacagccacttctgcacagccctggtgtccctgacccacctgtttgcctttgcctctgtgaacaccatcgtggtggtgtctgtggaccgctacctgagcatcatccaccccctgagctaccccagcaagatgacccagaggcggggctacctgctgctgtatggcacctggatcgtggccatcctgcagagcaccccacccctgtatggctggggccaggccgcctttgatgaaagaaatgccctgtgcagcatgatctggggcgccagccccagctacaccatcctgtctgtggtgtccttcatcgtcatccccctcatcgtgatgattgcctgctacagcgtggtgttctgtgccgcccggcggcagcacgccctgctgtacaacgtgaagaggcacagcctggaggtgcgggtgaaggactgtgtggagaatgaagatgaggagggcgctgagaagaaggaggagttccaggatgagagcgagttccggcggcagcacgagggggaggtgaaggccaaggagggccgcatggaggccaaggatggcagcctgaaggccaaggagggcagcacaggcaccagcgagagctctgtggaggcccggggcagcgaggaggtgcgggagagcagcacagtggccagtgatggctccatggagggcaaggagggcagcaccaaggtggaggagaacagcatgaaggctgacaagggccgcacagaggtgaaccagtgcagcattgacctgggggaggatgacatggagtttggagaagatgacatcaacttctctgaagatgatgtggaggccgtgaacatccctgagagcctgccccccagcagaagaaacagcaacagcaacccccccctgccccgctgctaccagtgcaaggccgccaaggtgatcttcatcatcatcttctcctatgtgctgagcctgggcccctactgcttcctggccgtgctggccgtgtgggtggatgtggagacccaggtgccccagtgggtgatcaccatcatcatctggctgttcttcctgcagtgctgcatccacccctacgtgtatggctacatgcacaagaccatcaagaaggagatccaggacatgctgaagaagttcttctgcaaggagaagccacccaaggaggacagccacccagacctgcccggcacagagggcggcacagagggcaagatcgtgcccagctatgacagcgccaccttcccctag

SEQ ID NO: 230393 - DNA, 1527 bp, Artificial Sequence
  derived and/or modified sequence
atgaccagcacctgcaccaacagcacccgggagagcaacagcagccatacatgtatgcccttgagcaaaatgcccatttctctggcacacgggattattaggagcactgtgctggtgatatttttggctgcatctttcgtaggaaatatcgtactagccctcgtcctgcagaggaagccccagctgttacaggtgacaaataggtttattttcaacctgctggtgactgacctcctgcagatttctttggtggccccctgggtggtcgcaacgagcgtgccactgttttggcccttaaactcacacttctgcacagctcttgtctctttaacacacttgttcgcctttgcaagcgtgaatacgatcgttgtggtcagtgtggacagatacctgtcaattatccaccctttaagttacccatctaagatgacccaacgccggggctatctgctgctgtacggaacgtggatcgtcgccattctgcagagcactccaccgctgtatggatgggggcaggctgcttttgatgagagaaacgctctgtgttcaatgatttggggggcatcaccatcatatacaatcctaagcgtggtcagctttattgttatacccctgattgtgatgatcgcatgttactcagtcgttttctgcgccgccagaaggcagcacgctttactgtataatgtgaaacgtcattcgctggaagttagggtaaaagattgcgtggagaacgaggatgaggagggggccgaaaaaaaggaggaatttcaagatgaatccgagttcaggagacagcacgaaggtgaagtgaaggcgaaagagggtaggatggaagcaaaggatgggagcctcaaagcaaaagaggggagtaccgggacgtcagaaagtagtgtagaagcccgggggtctgaggaagtgagagaaagcagcactgtggccagcgatggatcaatggagggaaaggaaggctcaacaaaagtggaagagaactcaatgaaagcagataaaggtagaaccgaggtgaatcagtgcagtatcgatctgggggaggacgacatggagttcggagaagatgacattaatttctctgaagacgacgtggaggcggtgaatatccctgagagtttgccccctagcagacgtaacagcaactcaaacccccctctacctaggtgttatcagtgtaaagcagctaaggtgatctttatcattattttctcatatgtattgagcctggggccttactgttttctggccgtgcttgccgtatgggtcgatgtagagacacaagtcccccagtgggtcatcactatcatcatatggttattcttcctgcagtgttgtattcacccctatgtatacggatatatgcacaaaacaatcaagaaggaaattcaggatatgctcaagaaatttttttgcaaggaaaagcctcctaaagaagactctcaccctgatctcccggggacagaagggggaacggaggggaaaattgtaccaagctatgactcagctactttcccttag

SEQ ID NO: 230394 - DNA, 1527 bp, Artificial Sequence
  derived and/or modified sequence
atgacttctacttgcactaatagcactcgcgagagtaactcaagccatacctgcatgccgctgtctaagatgccgatttccctggcacacggcatcatcagaagtactgtgctggtaattttcttggccgcatcattcgtggggaacattgtgctggcactggtcctgcagcggaaaccacaactcttacaggtgactaatcgatttatcttcaacctgcttgtaacagaccttcttcagattagtttggtcgcaccatgggtagttgccacaagcgtgccactcttttggcccttgaacagtcatttctgcaccgccttggttagcctgacacacttgttcgcttttgcctcggttaacacaatcgtggtggtgagtgtcgaccgttatttatccattatccaccccttgagctacccatctaagatgacccagagacgaggatacttactgttatatggcacctggatcgttgcaatcctgcagagtacaccaccactttatgggtggggccaggctgcattcgatgaacgcaatgcactgtgtagcatgatctggggggcttcccccagttacaccattttaagcgtggtgtcttttatcgtgatacctctgatcgtcatgatcgcctgttacagcgtggtattttgtgcagccagacggcagcacgcactattgtacaatgtcaagagacactcgctggaagtgagggtgaaggactgtgtggagaacgaagacgaggagggtgcagaaaaaaaggaagaattccaggacgaaagcgagtttagaaggcagcacgagggcgaggttaaagccaaggaggggaggatggaggctaaagacgggtctctgaaggctaaggaaggcagcaccggcacctccgagagttctgtggaggctagaggctccgaagaggtgcgtgaatcatcgaccgtagcctctgatggatcaatggagggaaaggagggttccacaaaggtagaggagaactcaatgaaggctgacaaaggcagaaccgaagtgaatcagtgctctattgacctcggcgaggacgatatggagttcggggaggatgacattaacttctcagaggacgacgtggaagccgtgaacatccccgaatccctgccgccatccaggcgtaactctaactcaaatcccccactgcccaggtgctatcagtgtaaggcggcaaaagtaatttttatcatcatctttagttatgtgctctccttggggccatactgcttcctcgccgtgctggccgtttgggttgatgtggaaactcaggtgccacagtgggtgatcaccattatcatctggctgttcttcctgcagtgttgtattcacccttacgtttatgggtatatgcacaaaacaattaagaaggaaattcaggatatgctaaagaagtttttctgtaaagagaagccgccaaaagaagacagccatcccgatctgccaggaactgaaggcggaaccgagggcaagatcgttccatcttacgacagcgctacattcccctag

SEQ ID NO: 230395 - DNA, 1527 bp, Artificial Sequence
  derived and/or modified sequence
atgaccagcacctgcaccaacagcaccagagagagcaacagcagccacacctgcatgcccctgagcaagatgcccatcagcctggcccacggcatcatcagaagcaccgtgctggtgatcttcctggccgccagcttcgtgggcaacatcgtgctggccctggtgctgcagagaaagccccagctgctgcaggtgaccaacagattcatcttcaacctgctggtgaccgacctgctgcagatcagcctggtggccccctgggtggtggccaccagcgtgcccctgttctggcccctgaacagccacttctgcaccgccctggtgagcctgacccacctgttcgccttcgccagcgtgaacaccatcgtggtggtgagcgtggacagatacctgagcatcatccaccccctgagctaccccagcaagatgacccagagaagaggctacctgctgctgtacggcacctggatcgtggccatcctgcagagcaccccccccctgtacggctggggccaggccgccttcgacgagagaaacgccctgtgcagcatgatctggggcgccagccccagctacaccatcctgagcgtggtgagcttcatcgtgatccccctgatcgtgatgatcgcctgctacagcgtggtgttctgcgccgccagaagacagcacgccctgctgtacaacgtgaagagacacagcctggaggtgagagtgaaggactgcgtggagaacgaggacgaggagggcgccgagaagaaggaggagttccaggacgagagcgagttcagaagacagcacgagggcgaggtgaaggccaaggagggcagaatggaggccaaggacggcagcctgaaggccaaggagggcagcaccggcaccagcgagagcagcgtggaggccagaggcagcgaggaggtgagagagagcagcaccgtggccagcgacggcagcatggagggcaaggagggcagcaccaaggtggaggagaacagcatgaaggccgacaagggcagaaccgaggtgaaccagtgcagcatcgacctgggcgaggacgacatggagttcggcgaggacgacatcaacttcagcgaggacgacgtggaggccgtgaacatccccgagagcctgccccccagcagaagaaacagcaacagcaacccccccctgcccagatgctaccagtgcaaggccgccaaggtgatcttcatcatcatcttcagctacgtgctgagcctgggcccctactgcttcctggccgtgctggccgtgtgggtggacgtggagacccaggtgccccagtgggtgatcaccatcatcatctggctgttcttcctgcagtgctgcatccacccctacgtgtacggctacatgcacaagaccatcaagaaggagatccaggacatgctgaagaagttcttctgcaaggagaagccccccaaggaggacagccaccccgacctgcccggcaccgagggcggcaccgagggcaagatcgtgcccagctacgacagcgccaccttcccctag

SEQ ID NO: 230396 - protein, 213 aa, Artificial Sequence
  derived and/or modified sequence
MDPLFQQTHKQVHEIQSCMGRLETADKQSVHIVENEIQASIDQIFSRLERLEILSSKEPPNKRQNARLRVDQLKYDVQHLQTALRNFQHRRHAREQQERQREELLSRTFTTNDSDTTIPMDESLQFNSSLQKVHNGMDDLILDGHNILDGLRTQRLTLKGTQKKILDIANMLGLSNTVMRLIEKRAFQDKYFMIGTQGSCQTAHFGGRSAGSS

SEQ ID NO: 230397 - DNA, 1469 bp, Artificial Sequence
  derived and/or modified sequence
aaccggaaggggggctgtgaggacgtgttccgaggaagccagagccggagccgtggcctgcggggccggcgacatggatcccctgttccagcaaacgcacaagcaggtccacgagatccagtcttgcatgggacgcctggagacggcagacaagcagtctgtgcacatagtagaaaacgaaatccaagcaagcatagaccagatattcagccgtctagaacgtctggagattttgtccagcaaggagccccctaacaaaaggcaaaatgccagacttcgggttgaccagttaaagtatgatgtccagcacctgcagactgcgctcagaaacttccagcatcggcgccatgcaagggagcagcaggagagacagcgagaagagcttctgtctcgaaccttcaccactaacgactctgacaccaccataccaatggacgaatcactgcagtttaactcctccctccagaaagttcacaacggcatggatgacctcattttagatgggcacaatattttagatggactgaggacccagagactgaccttgaaggggactcagaagaagatccttgacattgccaacatgctgggcttgtccaacacagtgatgcggctcatcgagaagcgggctttccaggacaagtactttatgataggcacccaaggatcctgccagacagcacactttggaggaaggtctgcagggagcagctgagccatttgttcttgaactctgggaggcagaagtccccgcacccatcatgcgtggactgataggacatcttttcgtggtgtgcaccagtgctttccacacttgacagtggttggctttgatgaaccctcatgctgcaccttcagagccagtcctctagtttggaataaaaattgcagaggtggtttttgggtctttaccacctgcggctggtggacagcagccagtgtgtctggacacccaggggcattgagactgcatgttgtcacatgaccacttctcttcacacatctgctttcagtgcctggtgaaaaatagaccttggcctaacagtgtgactctctccaccgcctcagtgtagggaagggtccaggccagggaaggagcaccctctagtggaggcgggggtgaattcttaggtcgagctgatgcaagaaactccggtagccagcctctgtgaccttgtacatgagtttggtgtgcctattgtgatttaaaacaggtgggttatcaagaggaacttgagatctctttattacatggacatttacttcagggggaccactgtaagaaaagccaaactccaagaccaagtaagttagaggagtcttgattttttagacttcactgcggagttctgtacaccctttgccctgatgaatttgaatgggtttgatttgcaaatttggatttacacccattgttttggaagcacatcagctgaataaagttgaggtttattttatttagaaaatca

SEQ ID NO: 230398 - DNA, 642 bp, Artificial Sequence
  derived and/or modified sequence
atggatcccctcttccaacaaacacataaacaggtgcacgaaatccagtcctgtatgggccgacttgaaaccgccgacaagcaaagcgttcatatagtcgagaacgaaatacaggctagcatcgaccaaatcttttcacgcctggaacgccttgagatattaagcagcaaggaaccacctaacaagcgacagaacgcacgacttcgcgtcgatcaacttaagtacgacgtgcaacacctccaaactgctctgcggaacttccagcatagaagacatgccagggagcagcaggaacgacaacgtgaggagttactgtcacgcacttttacgactaatgactcggataccactattcccatggatgaaagccttcagttcaatagtagtctgcagaaggttcacaatggcatggatgatcttattcttgacggacataacattctggacgggcttcggacgcagcgcctgacattgaaagggacccagaagaaaatcctcgacattgccaacatgctcggtttgtccaacacagtcatgcggttaattgagaagcgggcattccaagacaagtactttatgatcggaacacagggatcatgccaaactgcccattttggtgggcgatcagcgggttcctcttag

SEQ ID NO: 230399 - DNA, 642 bp, Artificial Sequence
  derived and/or modified sequence
atggaccccctcttccagcagacccacaagcaggtgcatgagatccagagctgcatgggccgcctggagacagctgacaagcagagcgtgcacatcgtggagaatgagatccaggccagcattgaccagatcttcagccggctggagcggctggagatcctgagcagcaaggagccccccaacaagaggcagaatgcccggctgcgggtggaccagctgaagtatgatgtgcagcacctgcagacagccctgaggaacttccagcacagaagacatgcccgggagcagcaggagcggcagcgggaggagctgctgagcaggaccttcaccaccaatgacagcgacaccaccatccccatggatgagagcctgcagttcaacagcagcctgcagaaggtgcacaacggcatggatgacctgatcctggatggccacaacatcctggatggcctgcggacccagaggctgaccctgaagggcacccagaagaagatcctggacatcgccaacatgctgggcctgagcaacacagtgatgaggctcatcgagaagagggccttccaggacaagtacttcatgattggcacccagggcagctgccagacagcccactttggaggccgctctgctggcagcagctag

SEQ ID NO: 230400 - DNA, 642 bp, Artificial Sequence
  derived and/or modified sequence
atggaccccctgttccagcagacccacaagcaggtgcacgagatccaatcatgcatgggaaggctagagacagcagataaacagagtgtccatattgttgaaaacgaaattcaggcgtccatcgatcaaattttttctcgcctggaacgcctggaaatcttgtccagtaaagagccacctaataagagacagaatgcacgccttcgggtcgatcaattgaagtatgatgtgcagcacctgcaaactgcacttcgaaactttcagcaccggcgccatgcccgggagcagcaggagcgtcagcgggaggaattactgtcgagaacttttaccactaacgattccgataccacaattcctatggatgaatcactccagttcaactcaagtctgcagaaagtgcacaacggaatggacgacctgatcctcgacgggcacaacatcctcgacgggctgagaacgcagaggctgacacttaagggcacgcagaaaaagatccttgatatcgcgaacatgttaggcctctcaaatacagtgatgagactgatcgaaaagagggccttccaggacaagtacttcatgattggtacccaggggtcatgccagaccgcacacttcggtggccggagcgctggctcttcctag

SEQ ID NO: 230401 - DNA, 642 bp, Artificial Sequence
  derived and/or modified sequence
atggatcctctctttcaacaaacacacaagcaggttcacgagatccagagctgcatgggtcgactggaaactgcggacaaacagtcagtacatatcgtggaaaacgagatccaagcatctatcgaccaaatattctcacggttggagagattggagatcctgagctccaaggagccgccaaataaacggcagaacgctagattacgagtcgatcagctgaaatatgacgtccagcaccttcaaaccgcgctgaggaatttccagcaccggcgacacgccagagagcagcaagagagacagcgcgaggaactgctgtcccggacatttacaaccaatgattctgacactacgattcccatggatgaaagtttgcaattcaacagcagtctccagaaagtgcataatggcatggacgatctgatcttagacgggcacaatattctcgatggccttagaactcagcgcctcacactgaaggggactcaaaagaagatcttagacattgctaatatgctcggcctgtcaaacactgtcatgcgactgatcgaaaaacgagccttccaagacaaatacttcatgatcggaacccaggggtcctgtcagacggcccattttggtggcaggagtgctggctcatcctag

SEQ ID NO: 230402 - DNA, 642 bp, Artificial Sequence
  derived and/or modified sequence
atggaccccctgttccagcagacccacaagcaggtgcacgagatccagagctgcatgggcagactggagaccgccgacaagcagagcgtgcacatcgtggagaacgagatccaggccagcatcgaccagatcttcagcagactggagagactggagatcctgagcagcaaggagccccccaacaagagacagaacgccagactgagagtggaccagctgaagtacgacgtgcagcacctgcagaccgccctgagaaacttccagcacagaagacacgccagagagcagcaggagagacagagagaggagctgctgagcagaaccttcaccaccaacgacagcgacaccaccatccccatggacgagagcctgcagttcaacagcagcctgcagaaggtgcacaacggcatggacgacctgatcctggacggccacaacatcctggacggcctgagaacccagagactgaccctgaagggcacccagaagaagatcctggacatcgccaacatgctgggcctgagcaacaccgtgatgagactgatcgagaagagagccttccaggacaagtacttcatgatcggcacccagggcagctgccagaccgcccacttcggcggcagaagcgccggcagcagctag

SEQ ID NO: 230403 - protein, 93 aa, Artificial Sequence
  derived and/or modified sequence
MKLVTIFLLVTISLCSYSATAFLINKVPLPVDKLAPLPLDNILPFMDPLKLLLKTLGISVEHLVEGLRKCVNELGPEASEAVKKLLEALSHLV

SEQ ID NO: 230404 - DNA, 282 bp, Artificial Sequence
  derived and/or modified sequence
atgaagctcgtgaccatcttcctcctggtgactattagtctgtgtagttacagcgccactgctttcctcattaataaagtaccactgcccgtggataaattggctcccctgccactggacaacattctgccctttatggatcctcttaaacttttgctcaaaacccttggcatcagtgtcgaacacctcgtggagggactccgtaagtgcgtgaacgaacttggccccgaggcctccgaagccgtgaaaaagctgctcgaagccttaagtcaccttgtctag

SEQ ID NO: 230405 - DNA, 282 bp, Artificial Sequence
  derived and/or modified sequence
atgaagctggtgaccatcttcctgctggtgaccatcagcctgtgcagctacagcgccacagccttcctgatcaacaaggtgcccctgcctgtggacaagctggcccccctgcccctggacaacatcctgcccttcatggaccccctgaagctgctgctgaagaccctgggcatctctgtggagcacctggtggagggcctgaggaaatgtgtgaatgagctgggccctgaggccagcgaggccgtgaagaagctgctggaggccctgagccacctggtgtag

SEQ ID NO: 230406 - DNA, 282 bp, Artificial Sequence
  derived and/or modified sequence
atgaagctggtgaccatcttcctgctggtgaccatcagcctgtgcagctacagtgccacagcttttttgatcaataaagtccccctacctgtggataagctggcacccctccctctggataacatcctcccattcatggaccccctcaaacttctcctgaagacccttggcattagtgttgagcatctggtggaaggcctgagaaaatgcgtgaatgaactcggacccgaggcgtctgaggccgtcaagaaattgctagaggctctcagccatctggtgtag

SEQ ID NO: 230407 - DNA, 282 bp, Artificial Sequence
  derived and/or modified sequence
atgaagctcgtgaccatcttcttgttagtgacgatcagcctctgctcctactcggcaaccgcttttcttattaataaggttcctctccccgtggataagctagctccattaccactcgacaacattctgcctttcatggacccactgaagcttctgctgaaaacactgggcatctcagtggaacacctggtggagggactaagaaagtgcgtgaatgagttgggccctgaagcctcagaggccgtcaagaaattactggaggccctgagtcatttggtttag

SEQ ID NO: 230408 - DNA, 515 bp, Artificial Sequence
  derived and/or modified sequence
acactttgtatggcaagtggaaccactggcttggtggattttgctagatttttctgatttttaaactcctgaaaaatatcccagataactgtcatgaagctggtaactatcttcctgctggtgaccatcagcctttgtagttactctgctactgccttcctcatcaacaaagtgccccttcctgttgacaagttggcacctttacctctggacaacattcttccctttatggatccattaaagcttcttctgaaaactctgggcatttctgttgagcaccttgtggaggggctaaggaagtgtgtaaatgagctgggaccagaggcttctgaagctgtgaagaaactgctggaggcgctatcacacttggtgtgacatcaagataaagagcggaggtggatggggatggaagatgatgctcctatcctccctgcctgaaacctgttctaccaattatagatcaaatgccctaaaatgtagtgacccgtgaaaaggacaaataaagcaatgaatac

SEQ ID NO: 230409 - DNA, 282 bp, Artificial Sequence
  derived and/or modified sequence
atgaagctggtgaccatcttcctgctggtgaccatcagcctgtgcagctacagcgccaccgccttcctgatcaacaaggtgcccctgcccgtggacaagctggcccccctgcccctggacaacatcctgcccttcatggaccccctgaagctgctgctgaagaccctgggcatcagcgtggagcacctggtggagggcctgagaaagtgcgtgaacgagctgggccccgaggccagcgaggccgtgaagaagctgctggaggccctgagccacctggtgtag

SEQ ID NO: 230410 - protein, 654 aa, Artificial Sequence
  derived and/or modified sequence
MAKFGVHRILLLAISLTKCLESTKLLADLKKCGDLECEALINRVSAMRDYRGPDCRYLNFTKGEEISVYVKLAGEREDLWAGSKGKEFGYFPRDAVQIEEVFISEEIQMSTKESDFLCLLGVSYTFDNEDSELNGDYGENIYPYEEDKDEKSSIYESDFQIEPGFYATYESTLFEDQVPALEAPEDIGSTSESKDWEEVVVESMEQDRIPEVHVPPSSAVSGVKEWFGLGGEQAEEKAFESVIEPVQESSFRSRKIAVEDENDLEELNNGEPQTEHQQESESEIDSVPKTQSELASESEHIPKPQSTGWFGGGFTSYLGFGDEDTGLELIAEESNPPLQDFPNSISSDKEATVPCTEILTEKKDTITNDSLSLKPSWFDFGFAILGFAYAKEDKIMLDDRKNEEDGGADEHEHPLTSELDPEKEQEIETIKIIETEDQIDKKPVSEKTDESDTIPYLKKFLYNFDNPWNFQNIPKETELPFPKQILDQNNVIENEETGEFSIDNYPTDNTKVMIFKSSYSLSDMVSNIELPTRIHEEVYFEPSSSKDSDENSKPSVDTEGPALVEIDRSVENTLLNSQMVSTDNSLSSQNYISQKEDASEFQILKYLFQIDVYDFMNSAFSPIVILTERVSLPFKPFAIILPILLNIRVATKYV

SEQ ID NO: 230411 - protein, 541 aa, Artificial Sequence
  derived and/or modified sequence
MAKFGVHRILLLAISLTKCLESTKLLADLKKCGDLECEALINRVSAMRDYRGPDCRYLNFTKGEEISVYVKLAGEREDLWAGKGKEFGYFPRDAVQIEEVFISEEIQMSTKESDFLCLLGVSYTFDNEDSELNGDYGENIYPYEEDKDEKSSIYESDFQIEPGFYATYESTLFEDQVPALEAPEDIGSTSESKDWEEVVVESMEQDRIPEVHVPPSSAVSGVKEWFGLGGEQAEEKAFESVIEPVQESSFRSRKIAVEDENDLEELNNGEPQTEHQQESESEIDSVPKTQSELASESEHIPKPQSTGWFGGGFTSYLGFGDEDTGLELIAEESNPPLQDFPNSISSDKEATVPCTEILTEKKDTITNDSLSLKPSWFDFGFAILGFAYAKEDKIMLDDRKNEEDGGADEHEHPLTSELDPEKEQEIETIKIIETEDQIDKKPVSEKTDESDTIPYLKKFLYNFDNPWNFQNIPKETELPFPKQILDQNNVIENEETGEFSIDNYPTDNTKVMIFKSSYSLSGWYENIYIRIYFIFKHNLFL

SEQ ID NO: 230412 - DNA, 1626 bp, Artificial Sequence
  derived and/or modified sequence
atggccaagttcggcgtgcaccggatcctgctgctggccatcagcttaacaaagtgtttggaatcgactaaactgctcgcggacctgaagaagtgtggagatcttgagtgcgaggcactcattaatcgggtcagcgcaatgagggactatcgcggcccagactgccggtatttgaacttcactaagggggaggaaattagcgtctatgtgaagttggccggggaacgcgaggatctttgggccggtaaaggtaaggagttcggctactttccacgagacgcggtacaaatagaggaggttttcatttccgaagaaatccagatgtccaccaaggagtccgactttctttgcttattaggggtttcatacactttcgacaatgaggattcagaactgaatggggactatggcgaaaacatatacccatatgaagaagacaaagatgaaaagtctagcatctatgagagtgactttcagatagagcctggtttctatgctacctatgaatctacactgttcgaggaccaggtcccagccctggaggccccggaggacatcgggtccactagcgagagtaaggattgggaagaagtagtagtggaatccatggaacaagacaggatcccagaggtccatgtaccgccctcctctgctgtgagcggagtcaaagaatggtttgggctgggaggcgagcaagccgaggagaaggcctttgagtcggtcatcgaacctgtacaggagagttctttccgctcaagaaaaatcgctgtcgaggatgaaaacgacctggaggaactgaacaatggcgagccccagacagaacaccagcaagaatccgaaagcgagatcgatagtgtgcccaaaactcaaagtgagcttgccagcgaatccgaacatatacccaagcctcagtcaacgggatggttcgggggcggttttacttcttatctgggattcggcgatgaagatactggtctagaattgatcgccgaggaaagcaatccaccactacaggatttccctaattccatttcaagcgacaaagaagccactgtgccttgcacggaaattctcaccgaaaagaaggacactatcaccaacgacagtctgtccctgaagccttcctggttcgactttgggttcgctatattgggtttcgcctacgcaaaagaagataagatcatgctcgatgaccggaagaatgaggaggacggcggggctgatgagcatgaacatccactcacaagcgaattggaccctgagaaagaacaggagatcgagaccataaagatcattgagacagaggaccaaatcgataagaagcctgtctcagaaaagaccgacgaatccgataccatcccgtacttgaagaaattcctgtataatttcgataatccgtggaactttcagaatatcccaaaagaaaccgagctacccttccccaagcaaattctggaccagaacaacgtgattgaaaacgaagagaccggtgagttctctatcgataactaccccaccgataatacaaaagttatgattttcaagagctcatatagcctgagcggttggtacgaaaacatatacattcgaatctacttcatcttcaagcacaacctgttcctatag

SEQ ID NO: 230413 - DNA, 1965 bp, Artificial Sequence
  derived and/or modified sequence
atggctaaatttggcgtgcacagaatcttacttttggccatctcccttacaaagtgcctggaatcaacgaaattactcgccgacctcaagaagtgcggggacctcgaatgcgaggcactgattaatcgcgtgtccgccatgcgcgactaccggggacctgattgtcggtaccttaatttcaccaaaggtgaggaaatttcggtctacgtgaagctggcgggagagcgcgaggacctgtgggcaggatcaaaaggcaaggagtttggatactttcctagagacgccgtgcaaatcgaggaggttttcatcagcgaggagatacagatgagcaccaaggagtcagactttttatgtttgctaggagtatcttatacattcgacaacgaagactccgagctgaacggagactacggcgagaacatatacccttacgaggaagacaaggacgagaagagttctatctatgaatctgattttcaaatcgaacctggtttttatgcgacttacgagtccactttatttgaagatcaggtccctgctttggaagctcctgaggacataggcagcaccagcgagtcaaaagattgggaggaggtggttgtagagtctatggaacaggaccgtattccagaggtgcatgttcccccttcatctgctgttagtggggtgaaggagtggtttgggctcggcggagaacaagcagaagaaaaggcctttgaatcggtcattgaaccggtgcaggaatcatcatttagatctcgaaaaattgccgtcgaggacgaaaatgatctggaggaattaaataatggggaacctcagactgaacaccagcaagaatcagaaagcgaaatagacagcgtgcccaagacccagtctgaactagcatcagagagcgagcacattcccaaaccgcagagcactggctggttcggcggaggcttcactagttatttgggattcggggatgaggacaccggactcgaactgatcgctgaggagtctaacccccctctgcaggattttccgaacagtatcagttccgataaagaagctacggtgccatgtaccgaaatcctcaccgagaaaaaagatactatcaccaatgattccttgtcgctgaagccaagttggttcgacttcggcttcgctatactagggttcgcttatgctaaagaagataaaatcatgctggatgaccgaaaaaatgaggaggacggcggtgcagatgagcacgagcacccactcacatctgagttggacccagagaaggaacaggagatcgagaccataaagatcatcgagacagaagaccagattgacaagaaaccagtgagtgaaaagaccgacgaaagcgatacaatcccctacctgaagaaattcctatataacttcgataatccttggaattttcagaatattcctaaggaaaccgagctcccatttccaaaacagatcctggaccaaaacaatgtgatcgaaaatgaagaaacaggggaattcagcattgataactaccctacagataacactaaagtaatgatcttcaaatcctcctatagccttagtgacatggtgagcaacatcgaactgccaactcgaattcacgaggaggtgtatttcgaaccatcttcctctaaggactctgatgagaacagcaaaccctcggtggacaccgagggtcctgctcttgttgaaatcgatcgaagcgtggagaatactttattgaattcacagatggtgtccacggataactcgctctcatctcagaactacattagtcaaaaggaggatgcttctgaattccaaatcctgaagtacctatttcagattgatgtctacgattttatgaactcggccttctccccgattgttatcctcactgaaagggtgagtttgcctttcaagccgttcgccattatcctgccaattttactaaatattcgcgttgctacaaagtatgtgtag

SEQ ID NO: 230414 - DNA, 1626 bp, Artificial Sequence
  derived and/or modified sequence
atggccaagttcggcgtgcatcggatcctacttctcgctatcagccttactaaatgccttgaatccaccaagcttctggcggacctcaagaagtgcggagatttggaatgcgaggcccttataaacagggtgagtgccatgagagactatagaggccctgactgtcggtacctaaactttacgaaaggcgaagagatttccgtctatgtgaaactggctggcgaaagagaggatctttgggctggcaagggcaaagagttcggctatttccctagagatgcagttcaaatcgaagaagtgttcatcagtgaagaaatccagatgtccacaaaagaatctgacttcctttgcctgctgggggtctcctacacctttgacaatgaggattctgagctaaatggagactacggggaaaatatctatccgtatgaagaggacaaagatgaaaagagctctatttacgaaagtgattttcagatcgaacctggcttctatgctacttatgagagtaccttgtttgaggaccaggtccccgcactcgaggcacccgaggatatcgggtcaaccagcgagagtaaggattgggaagaggtcgtcgtggaatcaatggaacaggatagaatccctgaggtgcatgtgccgcctagctctgctgtgtccggagtgaaggagtggtttggactgggtggcgagcaggccgaagagaaagcctttgagtctgtgatcgagccagtgcaggaaagtagcttccgctctcgtaagatcgccgtggaggacgaaaatgacctagaggagctgaataacggtgaaccacagactgagcaccagcaggagtccgagtcagaaattgactctgtgcccaagactcagtccgagctggcttctgagtccgaacacatccccaagcctcagtcaacgggttggtttggtggcggattcaccagctatctgggatttggtgacgaggatactggcctcgagctcatcgctgaggagtccaaccctccactgcaggactttccgaattctatctcatcagataaggaagcaaccgtaccctgcactgagatactgacagaaaaaaaagatactatcacgaatgatagccttagcctgaagcccagctggttcgattttggatttgccatccttggcttcgcttatgcgaaagaagacaagattatgctggatgaccggaaaaatgaggaggatggcggagcagatgagcacgagcaccccctgacttccgagttggatcctgagaaggagcaggagatcgagactattaagatcatcgaaaccgaagaccaaattgataagaagcccgtgtccgagaaaaccgatgagtctgacactatcccatatctgaaaaagtttctgtacaactttgacaacccctggaactttcagaatataccaaaagagaccgaactgccctttccaaagcagattttggaccaaaataatgtaatcgaaaacgaggaaactggcgagttttctatagataattacccgacggataacaccaaagtgatgatattcaaaagttcctatagcctttccgggtggtatgagaatatctatatcagaatttacttcattttcaaacacaatcttttcctctag

SEQ ID NO: 230415 - DNA, 1965 bp, Artificial Sequence
  derived and/or modified sequence
atggcgaaatttggggttcatcgcatccttcttctggccatctctttgacgaagtgcctggaatccacaaaactactggctgatttgaagaagtgtggggacctggaatgtgaagcacttatcaatagggtcagcgcaatgagagactataggggcccagattgccggtaccttaacttcactaaaggagaagagatcagtgtctacgttaagttagccggagaaagggaggatctatgggcaggctctaagggcaaagagttcggatatttccctcgggatgctgtacagatagaagaagtgttcatcagcgaggagatacagatgtctaccaaggagtctgacttcctgtgccttttaggcgtgagttacaccttcgacaatgaggattcagagctcaacggtgactacggagaaaatatttatccatacgaggaagacaaggacgagaagtcttctatctacgagagcgatttccaaattgaaccggggttttatgcgacttatgagagtactcttttcgaagatcaggtgccagcactggaggcccccgaagacattggaagcacctcagaatcaaaagactgggaagaagtcgtggtggagagcatggagcaggatcgcattccggaagtgcacgtacctccatccagtgccgtgagcggtgtgaaagaatggtttggcctggggggagaacaagctgaagaaaaagcattcgagtccgtaatcgagcctgtgcaggagtcctctttccgttcacgaaaaattgcggttgaggacgaaaatgatttggaggagctcaacaatggcgagccacagaccgaacaccaacaagaatccgaatccgagatcgatagcgttccaaagacacagtctgaactagccagcgagtcagagcatatacccaagccccagtctactggctggtttggtggagggttcacaagttatctagggttcggcgatgaggacacaggactggaactgatagccgaagaatcgaatcctcccttacaggatttcccaaattccatttcttccgacaaagaagctactgttccatgcacagagatcctcactgaaaaaaaagacactatcaccaatgacagcctgtccttgaaaccatcttggtttgatttcggcttcgcgatcttgggctttgcttatgccaaagaagacaaaattatgcttgatgacaggaagaacgaggaggacgggggtgcggacgagcatgagcatccgttaacgtctgagctcgatccagaaaaagaacaggaaatagaaaccattaagattatagagaccgaagaccagatcgacaagaagccagtatccgaaaagacagacgaatcggatacgattccttacctgaagaaatttctctacaactttgacaacccatggaacttccaaaatattcccaaggaaaccgagcttccttttcccaagcagattctggaccagaacaacgtgattgagaacgaggaaacgggggaattttcaattgataattatcccacagataacacaaaggtcatgattttcaaaagctcttatagcctctccgatatggtgtccaacattgaactccctacaaggatccatgaggaagtctattttgaaccatcttccagcaaagactctgatgagaattctaagccatcggtagacacagaaggacctgccctagtagaaattgatcgatctgtggaaaacaccctgcttaacagtcaaatggtctccacagacaactcactgtcatcacagaattacattagccaaaaagaagacgcttcagaattccagattctcaagtatttgttccagatcgacgtttatgattttatgaacagcgcttttagccccatcgtgattttgacagaaagagtttcccttcctttcaagccctttgctattatcctgccgatcttgctaaatattagagttgccacaaagtacgtgtag

SEQ ID NO: 230416 - DNA, 1626 bp, Artificial Sequence
  derived and/or modified sequence
atggctaagtttggtgtgcataggatcctgttactggctatatccttaactaagtgtctggagtctacaaaattgctggccgatctaaaaaaatgtggggacctggagtgcgaagccctgatcaatagagtctcagccatgagggactatcgtgggccagactgcagatatctaaacttcactaaaggggaagagatcagcgtgtacgtaaagttggcaggagaaagggaggatctgtgggcaggaaagggaaaggaattcggctactttccccgtgacgctgttcagatcgaggaggtattcatatccgaagagatccagatgagcactaaggagagcgactttttatgcctgcttggagtctcctacacttttgacaatgaggattctgagctgaacggagactacggagaaaacatctatccgtacgaggaggacaaggacgagaaatccagcatctacgagtccgatttccaaatagaaccagggttttatgccacctacgagtctacactgttcgaagaccaggtccctgccctcgaagctccagaggacatcggtagcacgtccgagagcaaggattgggaagaagtggtggtagagtcaatggaacaggataggatccctgaggtgcacgtacccccttcatcggctgtaagcggcgttaaagaatggttcgggttggggggagagcaggcagaggagaaggccttcgaatcagtgatcgaacccgtgcaggagtcatcattcaggtcacggaaaattgccgttgaagacgagaacgatctcgaagagctgaacaacggagagcctcagacagagcatcagcaagaatctgagtcagagatcgattccgtgcccaagacccagtctgaattggcatcagagtccgaacatataccaaaaccacagtctacaggctggtttggaggcggcttcacctcctacctcggattcggtgacgaggacaccgggctagaacttatcgccgaagaatcaaaccccccacttcaagacttccccaactccattagcagtgacaaagaagctactgtgccttgtactgaaatcctgaccgaaaaaaaagataccatcacaaatgattctctctcattaaaacccagctggtttgacttcggctttgccatcctgggcttcgcctatgccaaagaagacaaaatcatgcttgatgaccgcaagaacgaagaagatgggggcgccgatgaacacgaacacccactcacctccgaattagaccccgagaaagaacaagagatcgagacgattaagataattgaaaccgaagaccagatcgacaaaaaaccagtatctgaaaaaacggacgagagcgatacaattccatatctcaagaagtttttgtataactttgacaatccatggaacttccagaatattcccaaggaaactgagttaccgtttccaaagcagattctcgatcagaataatgtaatagagaacgaagagacaggcgagttcagcattgataattaccctactgacaatactaaggtgatgatttttaaatctagctacagtctatctggctggtacgagaacatctatattaggatttacttcattttcaagcacaatctgtttctctag

SEQ ID NO: 230417 - DNA, 1965 bp, Artificial Sequence
  derived and/or modified sequence
atggcaaaattcggagttcaccgcatcttgctgctggccatttcattaaccaaatgtctggaatccactaaactgctggccgacctgaagaaatgcggcgacctcgagtgtgaggcgctgatcaatcgagtcagtgctatgagagattatagaggccctgattgtagatacctgaatttcactaaaggagaggagattagcgtgtacgtaaagttagccggagaacgtgaagatctgtgggcaggctcaaaagggaaagaattcggatacttccctagggacgcggtccagattgaagaagtatttattagtgaagagatccagatgagcactaaagaatctgatttcctgtgtctgttaggcgtgagttacacttttgacaatgaagatagcgaattaaacggagattatggagagaatatctacccatacgaggaggataaggacgaaaagagtagcatatatgaatcagatttccagatagagcccggcttttacgccacctacgaatctacgctgttcgaagaccaggtccctgctttagaggccccagaagacataggctccacatccgaatcaaaggactgggaggaggtggttgtagagtctatggagcaagatcgcattcccgaggtgcacgtacccccatctagtgcagtttctggcgtgaaagaatggttcggattaggcggagaacaagccgaggaaaaagcctttgagagtgtcatcgaaccagttcaggaatcaagctttaggtcacgtaagattgccgtcgaagacgaaaatgaccttgaagagttaaacaatggagagcctcagacagaacatcagcaggaatcagagtcggagatcgactcagtcccgaagacgcagagcgaacttgccagtgaaagcgagcacattcctaaaccacagtccaccggctggtttggaggcggcttcactagctacctcggatttggagatgaagataccggactagagctgatcgcagaagaatccaaccctcccctccaagacttccctaacagcatttcatcagataaggaagcaacggtcccctgcaccgagattcttaccgaaaagaaggatacaatcaccaacgactccctgtcactgaagccatcttggtttgatttcgggtttgcaatcctgggctttgcctacgccaaagaggataaaatcatgcttgatgaccgaaagaacgaagaggacggcggcgcagatgaacacgaacacccactgacatcagaattagaccccgagaaagagcaggaaatcgaaaccatcaagataatcgagactgaggatcagattgacaaaaaacccgtatccgagaagacagatgagagcgacaccattccttacctgaaaaagtttctttacaactttgacaatccttggaacttccaaaacatcccaaaggaaaccgaactccctttccctaaacaaattctggaccaaaacaacgtgatcgagaacgaggaaacaggcgaattctcaattgataattatcccacagataacacaaaggtcatgattttcaaaagctcttatagcctctccgatatggtgtccaacattgaactccctacaaggatccatgaggaagtctattttgaaccatcttccagcaaagactctgatgagaattctaagccatcggtagacacagaaggacctgccctagtagaaattgatcgatctgtggaaaacaccctgcttaacagtcaaatggtctccacagacaactcactgtcatcacagaattacattagccaaaaagaagacgcttcagaattccaaatcctcaagtacctcttccagatcgacgtttacgactttatgaatagtgccttttcccctatcgttatccttactgagcgcgtctccttaccttttaaaccttttgccatcatcctacccattcttctcaacattagagtggctacaaaatatgtttag

SEQ ID NO: 230418 - DNA, 1626 bp, Artificial Sequence
  derived and/or modified sequence
atggcaaagtttggggtgcacagaatactgctactggcaataagcctgactaagtgcctagaaagcacgaagcttctggcggatcttaaaaagtgcggggaccttgagtgtgaagccctgataaatcgggtgtcagcaatgagagactacagaggacctgactgtcgctatcttaattttacaaaaggcgaggaaatctcagtttatgtgaagttggctggcgaaagagaggacctatgggcgggcaaggggaaggaattcgggtattttccaagggatgcagtgcagattgaagaggttttcattagcgaggagattcagatgagcactaaggagagcgactttctgtgcctacttggcgtatcttacacgtttgacaatgaagacagtgaactcaacggtgattacggcgagaatatttatccctatgaagaagataaggacgagaaaagcagcatttacgagagcgactttcagatcgaacccggattctacgccacttatgagagcacactgttcgaagaccaggtgccagcccttgaagcccctgaggacatcggcagtacaagtgaaagcaaagactgggaggaggttgtggtcgagtccatggaacaagataggattcctgaggtccatgtgccccccagctcagcagtgagtggcgttaaggagtggtttggattaggtggggagcaagcagaggagaaggcttttgaatcagttattgagcccgtgcaggaatcatcatttcgatctagaaaaatcgctgtcgaggacgaaaacgatctggaggaactgaataatggggaacctcaaactgagcaccaacaagaaagcgagagtgagattgattccgtacctaagacccaaagtgagctcgcatctgagtccgaacatatcccgaaacctcagtctaccggctggtttggaggcgggttcacaagctatttggggtttggcgacgaggacaccggtctggaattaatcgctgaagagtccaaccccccactgcaagacttccctaactctatatctagtgacaaagaagccaccgtgccatgtactgagatattaactgaaaagaaggataccataaccaacgatagcctttccctgaagccatcctggtttgacttcgggttcgcaatactcggttttgcatatgctaaggaagacaaaatcatgctggacgatcgaaagaacgaagaagatgggggcgccgatgaacacgaacacccactcacctccgaattagaccccgagaaagaacaagagatcgagacgattaagataattgaaaccgaagaccagatcgacaaaaaaccagtatctgaaaaaacggacgagagcgatacaattccatatctcaagaagtttttgtataactttgacaatccatggaacttccagaatattcccaaggaaactgagttaccgtttccaaagcagattctcgatcagaataatgtaatagagaacgaagagacaggcgagttcagcatagataactacccaaccgacaacaccaaggtcatgatcttcaaaagcagttactcattgtctggctggtatgagaacatctacatccgcatctacttcatcttcaagcacaacctctttctgtag

SEQ ID NO: 230419 - DNA, 1626 bp, Artificial Sequence
  derived and/or modified sequence
atggcaaaatttggcgttcacagaatccttcttctggctatttctctgacaaagtgtctggagagtacaaaactgctggcagaccttaaaaaatgtggtgacttggaatgtgaagctttaataaacagagtctcagccatgagagattatagaggacctgactgccgatacctgaacttcactaagggagaagagatatctgtttatgttaaacttgcaggagaaagggaagatttgtgggcaggaaaaggaaaggagtttggatattttcccagagatgcagtccagattgaagaggtgttcatatctgaggaaattcagatgtcaacgaaagaatctgactttctttgtcttcttggagtaagttacacatttgacaatgaagatagtgaattaaacggtgattatggtgaaaatatatatccttatgaagaagataaagatgaaaaatctagtatatatgaaagtgattttcagatagaacctggattttatgcaacttatgaaagtactttgtttgaagaccaagttccagcattagaggctcctgaagatatcggaagtaccagtgaatcaaaagactgggaagaagtagttgttgaaagtatggaacaggatcgtattccagaagtgcatgtcccaccatcttcagctgtgtctggagtcaaagaatggtttggattgggaggagaacaagctgaagagaaggcttttgaatcagttattgaacctgtacaagaaagctcatttcggagtagaaaaatagcagtggaagatgagaatgacctagaggaattaaataatggtgagcctcaaacagaacatcagcaagaatctgaatcagaaattgattcagtgccaaagacacagtctgaactagcatctgagtcagagcacattcccaaacctcaatccactggttggtttggtggaggatttacaagttatttaggttttggagatgaggatacagggcttgaattaatagctgaagaaagcaatccaccactacaagattttcccaattccatatcatctgataaagaagccacagttccatgtacagaaatattaacagaaaaaaaagacacaatcactaatgatagcttgagtctcaagccaagttggtttgattttggttttgctatactaggctttgcatatgccaaggaagataaaattatgttagatgacaggaaaaatgaagaagatggtggggcagatgaacatgaacatcctctaacaagtgaattagaccctgaaaaagaacaagaaatagaaacgataaaaattatagaaacagaagatcaaatagacaagaaaccagtctcagaaaaaacagacgaatctgatactataccatatttgaaaaagttcttgtataattttgacaacccttggaacttccagaacattccaaaggaaacagaattgccatttcccaaacagatactggatcaaaataatgtaattgaaaatgaagaaactggagaattttccattgataattatcccacagataatacaaaagttatgatattcaaaagttcatacagtctgtcaggttggtatgaaaatatttacattagaatttattttatttttaaacataatttatttttataa

SEQ ID NO: 230420 - DNA, 2570 bp, Artificial Sequence
  derived and/or modified sequence
aaaacagacagtgtttgtctctcaagttaaaccaacaagccgatagaaaaaggtagttatcaagagatttttaaaacttcaaccctttttctcttatagttagtgaagagagtagaatatctccagttttggctgacatctctacaacctgaacaattggcttaaacttcacttgggattcccggttgcttgttttagcatggcaaaatttggcgttcacagaatccttcttctggctatttctctgacaaagtgtctggagagtacaaaactgctggcagaccttaaaaaatgtggtgacttggaatgtgaagctttaataaacagagtctcagccatgagagattatagaggacctgactgccgatacctgaacttcactaagggagaagagatatctgtttatgttaaacttgcaggagaaagggaagatttgtgggcaggaagtaaaggaaaggagtttggatattttcccagagatgcagtccagattgaagaggtgttcatatctgaggaaattcagatgtcaacgaaagaatctgactttctttgtcttcttggagtaagttacacatttgacaatgaagatagtgaattaaacggtgattatggtgaaaatatatatccttatgaagaagataaagatgaaaaatctagtatatatgaaagtgattttcagatagaacctggattttatgcaacttatgaaagtactttgtttgaagaccaagttccagcattagaggctcctgaagatatcggaagtaccagtgaatcaaaagactgggaagaagtagttgttgaaagtatggaacaggatcgtattccagaagtgcatgtcccaccatcttcagctgtgtctggagtcaaagaatggtttggattgggaggagaacaagctgaagagaaggcttttgaatcagttattgaacctgtacaagaaagctcatttcggagtagaaaaatagcagtggaagatgagaatgacctagaggaattaaataatggtgagcctcaaacagaacatcagcaagaatctgaatcagaaattgattcagtgccaaagacacagtctgaactagcatctgagtcagagcacattcccaaacctcaatccactggttggtttggtggaggatttacaagttatttaggttttggagatgaggatacagggcttgaattaatagctgaagaaagcaatccaccactacaagattttcccaattccatatcatctgataaagaagccacagttccatgtacagaaatattaacagaaaaaaaagacacaatcactaatgatagcttgagtctcaagccaagttggtttgattttggttttgctatactaggctttgcatatgccaaggaagataaaattatgttagatgacaggaaaaatgaagaagatggtggggcagatgaacatgaacatcctctaacaagtgaattagaccctgaaaaagaacaagaaatagaaacgataaaaattatagaaacagaagatcaaatagacaagaaaccagtctcagaaaaaacagacgaatctgatactataccatatttgaaaaagttcttgtataattttgacaacccttggaacttccagaacattccaaaggaaacagaattgccatttcccaaacagatactggatcaaaataatgtaattgaaaatgaagaaactggagaattttccattgataattatcccacagataatacaaaagttatgatattcaaaagttcatacagtctgtcagatatggtctctaacatagagttacctacgagaattcacgaagaagtatattttgaaccctcatcttctaaagatagtgatgaaaattcgaaaccatcagtagacaccgaagggcctgctctggtggagatagacagatctgtggaaaataccctgctaaatagtcagatggtttcaactgataactctttgtcttctcaaaattatatttctcagaaagaagatgcttctgagtttcagattctgaaatacttattccaaattgatgtttatgatttcatgaattctgcattttcaccaattgtaattcttacagaaagggtaagtttgccttttaaaccttttgcaataattttacctattttgctaaatataagagtggctacaaaatatgtttgaatgaatcctccctgtttaatgtttatataatgtttctctttccatgacatcttacctgtaagatttctctttatatgaatgttttgtcaaatggatattgatttttaaaaacatttccctaagttttgttgatgttgatcttgagcggtgtttgctttttactccaccctccccatttttcaaattagggaaagttaggtactaaataagttaactcaggaataataggaactagagctgggtgtggtggtgtgtgcctggagttcccactacttaggaggctgaggcaggaggatccttttactgaatgtaacaaggagaataaaagggaagagtgagcccaagggtttgagaccagtctgggcaacatagctagaccttatctcttaaaaaagaaaaaaaaaaa

SEQ ID NO: 230421 - DNA, 1965 bp, Artificial Sequence
  derived and/or modified sequence
atggccaagttcggcgtgcacagaatcctgctgctggccatcagcctgaccaagtgcctggagagcaccaagctgctggccgacctgaagaagtgcggcgacctggagtgcgaggccctgatcaacagagtgagcgccatgagagactacagaggccccgactgcagatacctgaacttcaccaagggcgaggagatcagcgtgtacgtgaagctggccggcgagagagaggacctgtgggccggcagcaagggcaaggagttcggctacttccccagagacgccgtgcagatcgaggaggtgttcatcagcgaggagatccagatgagcaccaaggagagcgacttcctgtgcctgctgggcgtgagctacaccttcgacaacgaggacagcgagctgaacggcgactacggcgagaacatctacccctacgaggaggacaaggacgagaagagcagcatctacgagagcgacttccagatcgagcccggcttctacgccacctacgagagcaccctgttcgaggaccaggtgcccgccctggaggcccccgaggacatcggcagcaccagcgagagcaaggactgggaggaggtggtggtggagagcatggagcaggacagaatccccgaggtgcacgtgccccccagcagcgccgtgagcggcgtgaaggagtggttcggcctgggcggcgagcaggccgaggagaaggccttcgagagcgtgatcgagcccgtgcaggagagcagcttcagaagcagaaagatcgccgtggaggacgagaacgacctggaggagctgaacaacggcgagccccagaccgagcaccagcaggagagcgagagcgagatcgacagcgtgcccaagacccagagcgagctggccagcgagagcgagcacatccccaagccccagagcaccggctggttcggcggcggcttcaccagctacctgggcttcggcgacgaggacaccggcctggagctgatcgccgaggagagcaacccccccctgcaggacttccccaacagcatcagcagcgacaaggaggccaccgtgccctgcaccgagatcctgaccgagaagaaggacaccatcaccaacgacagcctgagcctgaagcccagctggttcgacttcggcttcgccatcctgggcttcgcctacgccaaggaggacaagatcatgctggacgacagaaagaacgaggaggacggcggcgccgacgagcacgagcaccccctgaccagcgagctggaccccgagaaggagcaggagatcgagaccatcaagatcatcgagaccgaggaccagatcgacaagaagcccgtgagcgagaagaccgacgagagcgacaccatcccctacctgaagaagttcctgtacaacttcgacaacccctggaacttccagaacatccccaaggagaccgagctgcccttccccaagcagatcctggaccagaacaacgtgatcgagaacgaggagaccggcgagttcagcatcgacaactaccccaccgacaacaccaaggtgatgatcttcaagagcagctacagcctgagcgacatggtgagcaacatcgagctgcccaccagaatccacgaggaggtgtacttcgagcccagcagcagcaaggacagcgacgagaacagcaagcccagcgtggacaccgagggccccgccctggtggagatcgacagaagcgtggagaacaccctgctgaacagccagatggtgagcaccgacaacagcctgagcagccagaactacatcagccagaaggaggacgccagcgagttccagatcctgaagtacctgttccagatcgacgtgtacgacttcatgaacagcgccttcagccccatcgtgatcctgaccgagagagtgagcctgcccttcaagcccttcgccatcatcctgcccatcctgctgaacatcagagtggccaccaagtacgtgtag

SEQ ID NO: 230422 - DNA, 1626 bp, Artificial Sequence
  derived and/or modified sequence
atggccaagttcggcgtgcacagaatcctgctgctggccatcagcctgaccaagtgcctggagagcaccaagctgctggccgacctgaagaagtgcggcgacctggagtgcgaggccctgatcaacagagtgagcgccatgagagactacagaggccccgactgcagatacctgaacttcaccaagggcgaggagatcagcgtgtacgtgaagctggccggcgagagagaggacctgtgggccggcaagggcaaggagttcggctacttccccagagacgccgtgcagatcgaggaggtgttcatcagcgaggagatccagatgagcaccaaggagagcgacttcctgtgcctgctgggcgtgagctacaccttcgacaacgaggacagcgagctgaacggcgactacggcgagaacatctacccctacgaggaggacaaggacgagaagagcagcatctacgagagcgacttccagatcgagcccggcttctacgccacctacgagagcaccctgttcgaggaccaggtgcccgccctggaggcccccgaggacatcggcagcaccagcgagagcaaggactgggaggaggtggtggtggagagcatggagcaggacagaatccccgaggtgcacgtgccccccagcagcgccgtgagcggcgtgaaggagtggttcggcctgggcggcgagcaggccgaggagaaggccttcgagagcgtgatcgagcccgtgcaggagagcagcttcagaagcagaaagatcgccgtggaggacgagaacgacctggaggagctgaacaacggcgagccccagaccgagcaccagcaggagagcgagagcgagatcgacagcgtgcccaagacccagagcgagctggccagcgagagcgagcacatccccaagccccagagcaccggctggttcggcggcggcttcaccagctacctgggcttcggcgacgaggacaccggcctggagctgatcgccgaggagagcaacccccccctgcaggacttccccaacagcatcagcagcgacaaggaggccaccgtgccctgcaccgagatcctgaccgagaagaaggacaccatcaccaacgacagcctgagcctgaagcccagctggttcgacttcggcttcgccatcctgggcttcgcctacgccaaggaggacaagatcatgctggacgacagaaagaacgaggaggacggcggcgccgacgagcacgagcaccccctgaccagcgagctggaccccgagaaggagcaggagatcgagaccatcaagatcatcgagaccgaggaccagatcgacaagaagcccgtgagcgagaagaccgacgagagcgacaccatcccctacctgaagaagttcctgtacaacttcgacaacccctggaacttccagaacatccccaaggagaccgagctgcccttccccaagcagatcctggaccagaacaacgtgatcgagaacgaggagaccggcgagttcagcatcgacaactaccccaccgacaacaccaaggtgatgatcttcaagagcagctacagcctgagcggctggtacgagaacatctacatcagaatctacttcatcttcaagcacaacctgttcctgtag

SEQ ID NO: 230423 - DNA, 1965 bp, Artificial Sequence
  derived and/or modified sequence
atggcaaagttcggggtgcatagaattctattgctggcaattagcctcactaagtgtttagaatctactaaacttctagctgatctgaagaaatgcggcgatctcgagtgtgaggcactgataaacagggtcagcgctatgagagattatcgtggccccgactgccgatacctcaatttcacaaagggggaggagatctccgtgtacgtaaagctggccggcgagcgcgaggacttgtgggccggaagcaaggggaaggaattcggctatttcccgagggatgccgtccaaatcgaagaggtgtttatatcagaagagatccagatgagcactaaggagtcggacttcttatgcctcctcggcgtgtcttacacgtttgataatgaggattcagagctgaacggagactacggggaaaacatctatccgtacgaggaggacaaggatgagaaatctagtatctatgaaagtgattttcaaatcgagcccggattctatgcaacatatgaatccaccctctttgaagatcaggtgccggctctggaggcgcccgaggatatcgggagtacctcggagtctaaggactgggaagaggtagtggtcgaaagtatggaacaagaccgcatacccgaagtacacgtgcctcctagctctgcagtcagcggtgtgaaagaatggtttggactgggaggggagcaagccgaggagaaagctttcgaaagcgtcattgaacctgtccaagagagcagcttccggtcccgaaaaatcgccgtggaggacgagaacgacctcgaggagctaaataatggcgagccccagactgaacatcagcaggagtcggagtctgagatcgactctgtacccaagacccagtccgagctcgcatccgaatcagagcacatcccaaagccccaaagcactggttggttcgggggtggctttacctcctatttaggctttggcgatgaggatacaggactagagctgattgccgaggagtcgaatccaccactgcaggactttcccaactcaatttctagtgataaggaagccactgtaccatgcacagaaatactcaccgaaaagaaggatacaataacaaatgattcgctgtctctgaaacctagttggttcgatttcgggttcgccatcctggggtttgcttatgccaaggaggataagataatgctagacgaccggaagaatgaagaagacgggggtgctgatgagcatgagcacccactaacctccgagttagaccccgagaaagagcaggagatcgagaccataaaaattatcgagacggaggaccagatagacaaaaaacctgtcagtgagaagacagatgagtcagacacaatcccctatcttaaaaagttcctgtacaacttcgataacccttggaacttccagaatatccctaaggagacagaacttccgtttcccaaacagatcttggatcagaataacgtgattgaaaatgaagagacaggagagttttcgatcgacaattatcccactgacaacacgaaagtgatgatttttaaaagttcgtactcactgtccgacatggtgtcaaacattgagctgccgacaaggatccacgaggaagtgtattttgagccctcaagcagcaaagatagtgatgagaatagcaaaccctcagtggacacggaaggacccgccctggttgagatagaccggtctgtcgaaaatacactcctgaattcccaaatggtgtccacagataactccttgtcttctcagaattatattagtcaaaaggaagatgccagtgaattccaaatcttaaaatacttgtttcagatagacgtctacgacttcatgaattctgccttcagccctatagttatcctgaccgaacgagtttcgctgccttttaaaccttttgcaatcatcctgccaatcctgcttaacatccgggtggctacaaagtacgtttag

SEQ ID NO: 230424 - DNA, 1626 bp, Artificial Sequence
  derived and/or modified sequence
atggccaagttcggagttcatcggattcttcttttagccatctccctgactaagtgtctcgaatcaaccaaactgttggctgacctgaagaagtgcggagacctggaatgtgaagccctaattaaccgcgtctctgcaatgcgagattataggggacctgattgccgctacttgaattttactaagggtgaggagatcagcgtgtacgttaaattagccggcgagagggaggatctgtgggccggcaagggcaaggagtttggatacttccctcgagacgctgtgcagattgaggaagtgttcattagcgaggagatacagatgtctactaaagaatcagacttcctttgtttgctgggggttagctacactttcgataacgaggacagcgaactgaatggggattacggagagaatatctacccctacgaggaggacaaggacgagaagtcatccatttatgaatctgattttcagatcgaacctggcttttacgctacctatgagtccaccctgtttgaagaccaggtgcccgcactcgaggcaccggaggacatcggaagcaccagcgagtcaaaggactgggaagaggtggtagtggaatcaatggagcaggatagaatccctgaggtacacgtccccccctcgtctgccgtctctggcgtgaaagagtggttcgggctgggaggcgagcaggcagaagagaaagccttcgagtccgttattgaacctgttcaggagtcatcatttaggtccaggaaaatagctgtagaagacgaaaatgatctcgaagagctgaataatggtgagccacagacagaacatcaacaggagtcggaatctgagattgattcagttcctaagacacagagcgaacttgctagcgaatccgaacacatacccaaacctcagtctacagggtggtttgggggaggtttcacgtcatatttggggtttggggacgaggacaccggcctggagctgatcgccgaagagagcaatccacctctgcaggattttccaaattctattagtagtgacaaagaggctaccgtgccatgtaccgaaatcttgaccgagaagaaggatactataaccaacgattccttaagtcttaaaccttcatggtttgatttcggatttgcgatcctggggtttgcttacgctaaagaagataagatcatgctagacgataggaagaatgaagaagatggaggcgctgatgaacatgagcaccccctcacgagcgagttagaccctgaaaaagagcaggaaattgaaactattaagatcattgagaccgaagaccagattgacaagaaaccagtctccgaaaaaacagacgagtccgatacaattccttacctcaagaagtttttatacaactttgacaatccttggaattttcagaatatacctaaggagaccgagttaccgttccctaagcagatactggaccagaacaacgtgattgagaatgaggaaaccggagaattctcaattgataactatccaacagataacactaaggtcatgatcttcaaatcttcctattcccttagcgggtggtatgagaatatctatattcgaatctactttattttcaagcataacttattcctgtag

SEQ ID NO: 230425 - DNA, 1965 bp, Artificial Sequence
  derived and/or modified sequence
atggccaagtttggagtgcaccgcatcctgctgctggccatcagcctgaccaagtgcctggagagcaccaagctgctggccgacctgaagaagtgtggggacctggagtgtgaggccctgatcaacagagtgtctgccatgagggactaccggggccctgactgccgctacctgaacttcaccaagggggaggagatctctgtgtatgtgaagctggccggggagcgggaggacctgtgggccggcagcaagggcaaggagtttggctacttccccagagatgctgtgcagatcgaggaggtgttcatcagcgaggagatccagatgagcaccaaggagagtgacttcctgtgcctgctgggcgtgtcctacacctttgacaatgaagattctgagctgaatggagactatggagagaacatctacccctatgaggaggacaaggatgagaagagcagcatctatgaaagtgacttccagatcgagcccggcttctacgccacctatgagagcaccctgtttgaggaccaggtgcctgccctggaggccccagaagatattggcagcaccagcgagagcaaggactgggaggaggtggtggtggagagcatggagcaggaccgcatccctgaggtgcacgtgccccccagcagcgctgtgtctggagtgaaggagtggtttggcctgggcggggagcaggccgaggagaaggcctttgaatctgtgattgagcctgtgcaggagagcagcttccgcagcaggaagattgctgtggaggatgaaaatgacctggaggagctgaacaatggagagccccagacagagcaccagcaggagagcgagagcgagattgacagcgtgcccaagacccagagcgagctggccagcgagagcgagcacatccccaagccccagagcacaggctggtttggaggcggcttcaccagctacctgggctttggagatgaggacaccggcctggagctgattgctgaggagagcaacccccccctgcaggacttccccaacagcatcagcagtgacaaggaggccaccgtgccctgcacagagatcctgacagagaagaaggacaccatcaccaatgacagcctgagcctgaagcccagctggtttgattttggatttgccatcctgggctttgcctatgccaaggaggacaagatcatgctggatgacaggaagaatgaggaggatggaggagcagatgaacatgagcaccccctgaccagcgagctggaccctgagaaggagcaggagattgagaccatcaagatcattgaaacagaggaccagattgacaagaagcctgtgtctgagaagacagatgaaagtgacaccatcccctacctgaagaagttcctgtacaactttgacaacccctggaacttccagaacatccccaaggagacagagctgcccttccccaagcagatcctggaccagaacaacgtgattgaaaatgaggagactggagagttcagcattgacaactaccccacagacaacaccaaggtgatgatcttcaagagcagctacagcctgagtgacatggtgagcaacatcgagctgcccacccgcatccacgaggaggtgtactttgagcccagcagcagcaaggacagtgatgagaacagcaagcccagcgtggacacagagggccctgccctggtggagattgacagatctgtggagaacaccctgctgaacagccagatggtgtccacagacaacagcctgagcagccagaactacatcagccagaaggaggatgccagcgagttccagatcctgaagtacctgttccagattgatgtgtatgacttcatgaacagcgccttcagccccatcgtcatcctgacagagcgggtgtccctgcccttcaagccctttgccatcatcctgcccatcctgctgaacatccgggtggccaccaagtatgtgtag

SEQ ID NO: 230426 - DNA, 1626 bp, Artificial Sequence
  derived and/or modified sequence
atggccaagtttggagtgcaccgcatcctgctgctggccatcagcctgaccaagtgcctggagagcaccaagctgctggccgacctgaagaagtgtggggacctggagtgtgaggccctgatcaacagagtgtctgccatgagggactaccggggccctgactgccgctacctgaacttcaccaagggggaggagatctctgtgtatgtgaagctggccggggagcgggaggacctgtgggccggcaagggcaaggagtttggctacttccccagagatgctgtgcagatcgaggaggtgttcatcagcgaggagatccagatgagcaccaaggagagtgacttcctgtgcctgctgggcgtgtcctacacctttgacaatgaagacagcgagctgaatggagactatggagagaacatctacccctatgaggaggacaaggatgagaagagcagcatctatgaaagtgacttccagatcgagcccggcttctacgccacctatgagagcaccctgtttgaggaccaggtgcctgccctggaggcccctgaggacatcggcagcaccagcgagagcaaggactgggaggaggtggtggtggagagcatggagcaggaccgcatccctgaggtgcacgtgccccccagcagcgctgtgtctggagtgaaggagtggtttggcctgggcggggagcaggccgaggagaaggcctttgagagcgtcatcgagcctgtgcaggagagcagcttccgcagcaggaagattgctgtggaggatgaaaatgacctggaggagctgaacaacggggagccccagacagagcaccagcaggagagcgagagcgagattgattctgtgcccaagacccagagcgagctggccagcgagagcgagcacatccccaagccccagagcacaggctggtttggaggcggcttcaccagctacctgggctttggagatgaggacaccggcctggagctgattgctgaggagagcaacccccccctgcaggacttccccaacagcatcagcagtgacaaggaggccaccgtgccctgcacagagatcctgacagagaagaaggacaccatcaccaatgacagcctgagcctgaagcccagctggtttgattttggatttgccatcctgggctttgcctatgccaaggaggacaagatcatgctggatgacaggaagaatgaagaagatggcggcgcagatgagcacgagcaccccctgaccagcgagctggaccctgagaaggagcaggagattgagaccatcaagatcatcgagacagaggaccagattgacaagaagcctgtgtctgagaagacagatgaaagtgacaccatcccctacctgaagaagttcctgtacaactttgacaacccctggaacttccagaacatccccaaggagacagagctgcccttccccaagcagatcctggaccagaacaacgtgattgaaaatgaggagaccggggagttcagcattgacaactaccccacagacaacaccaaggtgatgatcttcaagagcagctacagcctgagcggctggtatgagaacatctacatccgcatctacttcatcttcaagcacaacctcttcctgtag

SEQ ID NO: 230427 - DNA, 1965 bp, Artificial Sequence
  derived and/or modified sequence
atggccaagttcggcgtgcaccggatcctgctgctggccatcagcctgacaaaatgcctcgagtcaaccaagcttctggccgacctgaaaaagtgcggtgacctggagtgcgaggccctcataaaccgggtctcagcaatgcgcgactaccggggaccagactgtagatatctgaatttcactaagggtgaggagatctctgtctatgtcaagctcgctggtgaacgtgaagacctgtgggctggatcaaagggaaaagagttcgggtactttcctcgcgatgcagtccaaatagaagaagtgtttatttcagaggagatacagatgtcaacaaaggaatccgattttttgtgcctattgggcgtcagctataccttcgacaatgaggattcagagttaaacggtgattacggtgaaaacatctatccatacgaggaggataaagacgaaaagagctcaatatatgaatctgacttccaaattgaacctgggttctacgctacctacgagtcaactctcttcgaggaccaggtcccggcactggaggcccctgaggatatcggctctacgagcgaatccaaggattgggaagaggttgtagtagaaagtatggaacaggatcgcattccagaagttcacgtaccacctagtagtgctgtgagcggtgtgaaagagtggtttggactgggcggggaacaagctgaggaaaaagcatttgaaagcgtgattgagcccgtccaagaatcctcttttagaagccgtaagatcgccgtggaggatgagaacgatctggaggaattgaataatggggagccccagaccgaacaccagcaggaatctgaaagtgaaattgattccgtgcccaagacccagtccgagcttgcgagtgagtccgagcacatccccaaaccgcagtccacaggttggttcggtggtggcttcacctcttatctggggttcggtgacgaggatacgggcttggagcttattgcagaagaatctaatccgcctctgcaggattttcctaactctatcagctccgacaaagaggcgaccgttccttgcactgaaattctgaccgaaaaaaaagacaccatcacaaatgattcacttagcctgaaaccgtcatggttcgatttcggcttcgcgatcctgggtttcgcctatgcaaaggaagacaaaattatgctggacgaccggaaaaatgaggaagatggcggagccgacgaacatgagcatcccttaaccagtgagctggatcccgagaaggagcaggagatagagactatcaagattatagaaacagaggaccaaatcgacaagaagccggtatctgagaaaacagatgaaagcgacaccatcccctacctgaagaagttcttatacaatttcgataatccctggaatttccaaaatatccctaaggagacggaactcccgtttcctaaacagatactggatcaaaataatgttattgagaatgaagagactggagagttttctattgacaattacccaacagataacacaaaagtgatgatctttaaaagctcttactccctatccgacatggtttctaatatcgagttgcccaccagaatacatgaagaggtgtacttcgaacccagcagctctaaggattcagatgaaaattctaagccctccgtggacaccgagggccccgcattggtcgagatagatcgcagcgttgaaaacactctcctaaattctcagatggtctcaacagataacagcttgagcagccagaactacatatctcaaaaggaggacgcgtcggaattccaaattctgaaatatctgttccagatcgacgtgtatgatttcatgaacagcgcgttctcacccatcgtgatcctcaccgagcgtgtgagcctgcccttcaagcctttcgctatcatcttgccgatcctactaaatattagagtcgccactaagtacgtttag

SEQ ID NO: 230428 - RNA, 1965 nt, Artificial Sequence
  derived and/or modified sequence
auggcgaaauuugggguucaucgcauccuucuucuggccaucucuuugacgaagugccuggaauccacaaaacuacuggcugauuugaagaaguguggggaccuggaaugugaagcacuuaucaauagggucagcgcaaugagagacuauaggggcccagauugccgguaccuuaacuucacuaaaggagaagagaucagugucuacguuaaguuagccggagaaagggaggaucuaugggcaggcucuaagggcaaagaguucggauauuucccucgggaugcuguacagauagaagaaguguucaucagcgaggagauacagaugucuaccaaggagucugacuuccugugccuuuuaggcgugaguuacaccuucgacaaugaggauucagagcucaacggugacuacggagaaaauauuuauccauacgaggaagacaaggacgagaagucuucuaucuacgagagcgauuuccaaauugaaccgggguuuuaugcgacuuaugagaguacucuuuucgaagaucaggugccagcacuggaggcccccgaagacauuggaagcaccucagaaucaaaagacugggaagaagucgugguggagagcauggagcaggaucgcauuccggaagugcacguaccuccauccagugccgugagcggugugaaagaaugguuuggccuggggggagaacaagcugaagaaaaagcauucgaguccguaaucgagccugugcaggaguccucuuuccguucacgaaaaauugcgguugaggacgaaaaugauuuggaggagcucaacaauggcgagccacagaccgaacaccaacaagaauccgaauccgagaucgauagcguuccaaagacacagucugaacuagccagcgagucagagcauauacccaagccccagucuacuggcugguuugguggaggguucacaaguuaucuaggguucggcgaugaggacacaggacuggaacugauagccgaagaaucgaauccucccuuacaggauuucccaaauuccauuucuuccgacaaagaagcuacuguuccaugcacagagauccucacugaaaaaaaagacacuaucaccaaugacagccuguccuugaaaccaucuugguuugauuucggcuucgcgaucuugggcuuugcuuaugccaaagaagacaaaauuaugcuugaugacaggaagaacgaggaggacgggggugcggacgagcaugagcauccguuaacgucugagcucgauccagaaaaagaacaggaaauagaaaccauuaagauuauagagaccgaagaccagaucgacaagaagccaguauccgaaaagacagacgaaucggauacgauuccuuaccugaagaaauuucucuacaacuuugacaacccauggaacuuccaaaauauucccaaggaaaccgagcuuccuuuucccaagcagauucuggaccagaacaacgugauugagaacgaggaaacgggggaauuuucaauugauaauuaucccacagauaacacaaaggucaugauuuucaaaagcucuuauagccucuccgauaugguguccaacauugaacucccuacaaggauccaugaggaagucuauuuugaaccaucuuccagcaaagacucugaugagaauucuaagccaucgguagacacagaaggaccugcccuaguagaaauugaucgaucuguggaaaacacccugcuuaacagucaaauggucuccacagacaacucacugucaucacagaauuacauuagccaaaaagaagacgcuucagaauuccagauucucaaguauuuguuccagaucgacguuuaugauuuuaugaacagcgcuuuuagccccaucgugauuuugacagaaagaguuucccuuccuuucaagcccuuugcuauuauccugccgaucuugcuaaauauuagaguugccacaaaguacguguag

SEQ ID NO: 230429 - RNA, 1626 nt, Artificial Sequence
  derived and/or modified sequence
auggcuaaguuuggugugcauaggauccuguuacuggcuauauccuuaacuaagugucuggagucuacaaaauugcuggccgaucuaaaaaaauguggggaccuggagugcgaagcccugaucaauagagucucagccaugagggacuaucgugggccagacugcagauaucuaaacuucacuaaaggggaagagaucagcguguacguaaaguuggcaggagaaagggaggaucugugggcaggaaagggaaaggaauucggcuacuuuccccgugacgcuguucagaucgaggagguauucauauccgaagagauccagaugagcacuaaggagagcgacuuuuuaugccugcuuggagucuccuacacuuuugacaaugaggauucugagcugaacggagacuacggagaaaacaucuauccguacgaggaggacaaggacgagaaauccagcaucuacgaguccgauuuccaaauagaaccaggguuuuaugccaccuacgagucuacacuguucgaagaccaggucccugcccucgaagcuccagaggacaucgguagcacguccgagagcaaggauugggaagaaguggugguagagucaauggaacaggauaggaucccugaggugcacguacccccuucaucggcuguaagcggcguuaaagaaugguucggguuggggggagagcaggcagaggagaaggccuucgaaucagugaucgaacccgugcaggagucaucauucaggucacggaaaauugccguugaagacgagaacgaucucgaagagcugaacaacggagagccucagacagagcaucagcaagaaucugagucagagaucgauuccgugcccaagacccagucugaauuggcaucagaguccgaacauauaccaaaaccacagucuacaggcugguuuggaggcggcuucaccuccuaccucggauucggugacgaggacaccgggcuagaacuuaucgccgaagaaucaaaccccccacuucaagacuuccccaacuccauuagcagugacaaagaagcuacugugccuuguacugaaauccugaccgaaaaaaaagauaccaucacaaaugauucucucucauuaaaacccagcugguuugacuucggcuuugccauccugggcuucgccuaugccaaagaagacaaaaucaugcuugaugaccgcaagaacgaagaagaugggggcgccgaugaacacgaacacccacucaccuccgaauuagaccccgagaaagaacaagagaucgagacgauuaagauaauugaaaccgaagaccagaucgacaaaaaaccaguaucugaaaaaacggacgagagcgauacaauuccauaucucaagaaguuuuuguauaacuuugacaauccauggaacuuccagaauauucccaaggaaacugaguuaccguuuccaaagcagauucucgaucagaauaauguaauagagaacgaagagacaggcgaguucagcauugauaauuacccuacugacaauacuaaggugaugauuuuuaaaucuagcuacagucuaucuggcugguacgagaacaucuauauuaggauuuacuucauuuucaagcacaaucuguuucucuag

SEQ ID NO: 230430 - RNA, 1965 nt, Artificial Sequence
  derived and/or modified sequence
auggcaaaauucggaguucaccgcaucuugcugcuggccauuucauuaaccaaaugucuggaauccacuaaacugcuggccgaccugaagaaaugcggcgaccucgagugugaggcgcugaucaaucgagucagugcuaugagagauuauagaggcccugauuguagauaccugaauuucacuaaaggagaggagauuagcguguacguaaaguuagccggagaacgugaagaucugugggcaggcucaaaagggaaagaauucggauacuucccuagggacgcgguccagauugaagaaguauuuauuagugaagagauccagaugagcacuaaagaaucugauuuccugugucuguuaggcgugaguuacacuuuugacaaugaagauagcgaauuaaacggagauuauggagagaauaucuacccauacgaggaggauaaggacgaaaagaguagcauauaugaaucagauuuccagauagagcccggcuuuuacgccaccuacgaaucuacgcuguucgaagaccaggucccugcuuuagaggccccagaagacauaggcuccacauccgaaucaaaggacugggaggaggugguuguagagucuauggagcaagaucgcauucccgaggugcacguacccccaucuagugcaguuucuggcgugaaagaaugguucggauuaggcggagaacaagccgaggaaaaagccuuugagagugucaucgaaccaguucaggaaucaagcuuuaggucacguaagauugccgucgaagacgaaaaugaccuugaagaguuaaacaauggagagccucagacagaacaucagcaggaaucagagucggagaucgacucagucccgaagacgcagagcgaacuugccagugaaagcgagcacauuccuaaaccacaguccaccggcugguuuggaggcggcuucacuagcuaccucggauuuggagaugaagauaccggacuagagcugaucgcagaagaauccaacccuccccuccaagacuucccuaacagcauuucaucagauaaggaagcaacgguccccugcaccgagauucuuaccgaaaagaaggauacaaucaccaacgacucccugucacugaagccaucuugguuugauuucggguuugcaauccugggcuuugccuacgccaaagaggauaaaaucaugcuugaugaccgaaagaacgaagaggacggcggcgcagaugaacacgaacacccacugacaucagaauuagaccccgagaaagagcaggaaaucgaaaccaucaagauaaucgagacugaggaucagauugacaaaaaacccguauccgagaagacagaugagagcgacaccauuccuuaccugaaaaaguuucuuuacaacuuugacaauccuuggaacuuccaaaacaucccaaaggaaaccgaacucccuuucccuaaacaaauucuggaccaaaacaacgugaucgagaacgaggaaacaggcgaauucucaauugauaauuaucccacagauaacacaaaggucaugauuuucaaaagcucuuauagccucuccgauaugguguccaacauugaacucccuacaaggauccaugaggaagucuauuuugaaccaucuuccagcaaagacucugaugagaauucuaagccaucgguagacacagaaggaccugcccuaguagaaauugaucgaucuguggaaaacacccugcuuaacagucaaauggucuccacagacaacucacugucaucacagaauuacauuagccaaaaagaagacgcuucagaauuccaaauccucaaguaccucuuccagaucgacguuuacgacuuuaugaauagugccuuuuccccuaucguuauccuuacugagcgcgucuccuuaccuuuuaaaccuuuugccaucauccuacccauucuucucaacauuagaguggcuacaaaauauguuuag

SEQ ID NO: 230431 - RNA, 1626 nt, Artificial Sequence
  derived and/or modified sequence
auggcaaaguuuggggugcacagaauacugcuacuggcaauaagccugacuaagugccuagaaagcacgaagcuucuggcggaucuuaaaaagugcggggaccuugagugugaagcccugauaaaucgggugucagcaaugagagacuacagaggaccugacugucgcuaucuuaauuuuacaaaaggcgaggaaaucucaguuuaugugaaguuggcuggcgaaagagaggaccuaugggcgggcaaggggaaggaauucggguauuuuccaagggaugcagugcagauugaagagguuuucauuagcgaggagauucagaugagcacuaaggagagcgacuuucugugccuacuuggcguaucuuacacguuugacaaugaagacagugaacucaacggugauuacggcgagaauauuuaucccuaugaagaagauaaggacgagaaaagcagcauuuacgagagcgacuuucagaucgaacccggauucuacgccacuuaugagagcacacuguucgaagaccaggugccagcccuugaagccccugaggacaucggcaguacaagugaaagcaaagacugggaggagguuguggucgaguccauggaacaagauaggauuccugagguccaugugccccccagcucagcagugaguggcguuaaggagugguuuggauuagguggggagcaagcagaggagaaggcuuuugaaucaguuauugagcccgugcaggaaucaucauuucgaucuagaaaaaucgcugucgaggacgaaaacgaucuggaggaacugaauaauggggaaccucaaacugagcaccaacaagaaagcgagagugagauugauuccguaccuaagacccaaagugagcucgcaucugaguccgaacauaucccgaaaccucagucuaccggcugguuuggaggcggguucacaagcuauuugggguuuggcgacgaggacaccggucuggaauuaaucgcugaagaguccaaccccccacugcaagacuucccuaacucuauaucuagugacaaagaagccaccgugccauguacugagauauuaacugaaaagaaggauaccauaaccaacgauagccuuucccugaagccauccugguuugacuucggguucgcaauacucgguuuugcauaugcuaaggaagacaaaaucaugcuggacgaucgaaagaacgaagaagaugggggcgccgaugaacacgaacacccacucaccuccgaauuagaccccgagaaagaacaagagaucgagacgauuaagauaauugaaaccgaagaccagaucgacaaaaaaccaguaucugaaaaaacggacgagagcgauacaauuccauaucucaagaaguuuuuguauaacuuugacaauccauggaacuuccagaauauucccaaggaaacugaguuaccguuuccaaagcagauucucgaucagaauaauguaauagagaacgaagagacaggcgaguucagcauagauaacuacccaaccgacaacaccaaggucaugaucuucaaaagcaguuacucauugucuggcugguaugagaacaucuacauccgcaucuacuucaucuucaagcacaaccucuuucuguag

SEQ ID NO: 230432 - protein, 244 aa, Artificial Sequence
  derived and/or modified sequence
MPAATVDHSQRICEVWACNLDEEMKKIRQVIRKYNYVAMDTEFPGVVARPIGEFRSNADYQYQLLRCNVDLLKIIQLGLTFMNEQGEYPPGTSTWQFNFKFNLTEDMYAQDSIELLTTSGIQFKKHEEEGIETQYFAELLMTSGVVLCEGVKWLSFHSGYDFGYLIKILTNSNLPEEELDFFEILRLFFPVIYDVKYLMKSCKNLKGGLQEVAEQLELERIGPQHQAGSDSLLTGMAFFKMREV

SEQ ID NO: 230433 - DNA, 126 bp, Artificial Sequence
  derived and/or modified sequence
atgcccgctgcaactgtggaccactcgcagcgtatctgtgaagtctgggcatgcaatcttgatgaggagatgaaaaaaatccggcaggtaatccgcaagtacaactatgtggcgatggacacttag

SEQ ID NO: 230434 - DNA, 735 bp, Artificial Sequence
  derived and/or modified sequence
atgcccgcggcaacagttgaccattcccaacggatatgtgaggtttgggcctgcaacctggacgaggagatgaaaaaaattagacaagtgataaggaaatacaactacgtggccatggacaccgaattccccggggtcgtggcccgccctatcggcgagtttcggtccaacgctgattaccagtatcaattactccgctgcaatgtggatctccttaagattatccagctgggattgacatttatgaatgaacagggagagtatccgcccggcactagcacctggcagtttaacttcaaattcaatctgaccgaggatatgtatgcccaagattcaattgagttactgaccacctcagggattcagttcaaaaagcacgaagaggaaggcatcgagacgcaatatttcgccgagctgctcatgacctctggtgttgtgctgtgtgagggcgtaaagtggttatcattccattccgggtatgacttcggatacttgatcaaaatcctaacaaatagtaatctgcctgaagaagagctggacttctttgaaatcctgaggctgttcttccccgtgatctacgacgtcaagtacctgatgaaaagttgcaaaaatctaaagggcggacttcaggaggtggccgagcaactagaactcgagcggatcggaccccagcaccaggcaggctctgattccctgctgaccgggatggccttcttcaaaatgagagaggtgtag

SEQ ID NO: 230435 - DNA, 444 bp, Artificial Sequence
  derived and/or modified sequence
atgcccgccgctaccgttgatcacagccagcggatttgtgaagtctgggcctgcaacctggatgaggagatgaagaaaattcgccaagtcattcgtaaatacaattatgtagcaatggacaccgagtttcccggagtggttgcaagacctattggggaattcagatccaatgcggactaccagtaccagctcttacgttgcaacgtcgatctgttgaagatcatacaacttgggctgaccttcatgaatgaacagggcgaatatcccccaggaacaagcacatggcagtttaatttcaagttcaatttgactgaggacatgtatgcacaggactccatcgagttgttgaccaccagtggcattcaattcaaaaaacacgaagaggaaggaattgaaacccagtactttgccgaattgctgatgactagcggcgtcgtgctctag

SEQ ID NO: 230436 - DNA, 126 bp, Artificial Sequence
  derived and/or modified sequence
atgcctgctgccaccgtggaccacagccagaggatctgtgaggtgtgggcctgcaacctggatgaggagatgaagaagatccggcaggtgatcaggaagtacaactacgtggccatggacacctag

SEQ ID NO: 230437 - DNA, 735 bp, Artificial Sequence
  derived and/or modified sequence
atgcctgctgccaccgtggaccacagccagaggatctgtgaggtgtgggcctgcaacctggatgaggagatgaagaagatccggcaggtgatcaggaagtacaactacgtggccatggacacagagttccctggggtggtggcccggcccatcggggagttccgcagcaatgctgactaccagtaccagctgctgcgctgcaatgtggacctgctgaagatcatccagctgggcctgaccttcatgaatgagcagggcgagtacccacctggcaccagcacctggcagttcaacttcaagttcaacctgacagaggacatgtatgcccaggacagcattgagctgctgaccaccagcggcatccagttcaagaagcatgaggaggagggcatcgagacccagtactttgctgagctgctgatgaccagcggcgtggtgctgtgtgagggcgtgaagtggctgtccttccacagcggctatgactttggctacctgatcaagatcctgaccaacagcaacctgcctgaggaggagctggacttctttgagatcctgcggctcttcttccctgtgatctatgatgtgaagtacctgatgaagagctgcaagaacctgaagggcggcctgcaggaggtggccgagcagctggagctggagagaattggcccccagcaccaggccggcagtgacagcctgctgaccggcatggccttcttcaagatgagggaggtgtag

SEQ ID NO: 230438 - DNA, 444 bp, Artificial Sequence
  derived and/or modified sequence
atgcctgctgccaccgtggaccacagccagaggatctgtgaggtgtgggcctgcaacctggatgaggagatgaagaagatccggcaggtgatcaggaagtacaactacgtggccatggacacagagttccctggggtggtggcccggcccatcggggagttccgcagcaatgctgactaccagtaccagctgctgcgctgcaatgtggacctgctgaagatcatccagctgggcctgaccttcatgaatgagcagggcgagtacccacctggcaccagcacctggcagttcaacttcaagttcaacctgacagaggacatgtatgcccaggacagcattgagctgctgaccaccagcggcatccagttcaagaagcatgaggaggagggcatcgagacccagtactttgctgagctgctgatgaccagcggcgtggtgctgtag

SEQ ID NO: 230439 - DNA, 126 bp, Artificial Sequence
  derived and/or modified sequence
atgcccgccgccaccgtggaccacagccagcggatctgcgaggtgtgggcttgcaacctggacgaagaaatgaaaaaaattcggcaggtgatacgcaaatataactatgttgccatggatacctag

SEQ ID NO: 230440 - DNA, 735 bp, Artificial Sequence
  derived and/or modified sequence
atgcccgccgccaccgtggaccacagccagcggatctgcgaggtgtgggcctgcaatctcgacgaggaaatgaaaaaaatccgtcaagtcatcagaaagtataattatgtcgcaatggatactgagtttccgggagttgtggctcgtccaatcggcgagttccgctccaacgcagactaccaatatcagttgctgagatgtaatgtggacctgcttaaaatcatacaactgggattgactttcatgaacgagcagggcgaatatccaccgggcaccagcacttggcagtttaactttaaattcaacctcaccgaggacatgtatgctcaggatagtatcgaacttttgaccactagcgggatccagttcaagaagcacgaagaagagggcattgaaactcagtattttgcagaattactcatgacatcgggggttgttctgtgtgaaggagtaaagtggttgagctttcatagcgggtacgatttcggatacttgatcaaaatcctcaccaattctaacctaccagaggaagaactcgatttcttcgagattctgcgattgttctttcccgtgatctatgacgtgaagtatctgatgaagtcctgcaaaaatctgaaaggtggcttgcaagaagtggcagagcagctggagctggaacggatcgggccccagcaccaggctggaagtgatagccttctcaccggcatggccttctttaagatgcgagaagtgtag

SEQ ID NO: 230441 - DNA, 444 bp, Artificial Sequence
  derived and/or modified sequence
atgcccgccgccaccgtggaccacagccagcggatctgcgaggtgtgggcctgcaatcttgacgaggagatgaagaagattcgacaagtgatacgtaagtataattacgttgcaatggataccgaatttcctggggtggtggcacggcccatcggtgaatttcgctccaatgccgactatcaataccagttgctgcggtgcaatgtagatttattgaagattatccagcttggactgactttcatgaacgaacagggcgagtatccgcccgggacttcaacatggcaattcaattttaagttcaatttgacagaggatatgtacgctcaagattcaattgagttactgaccaccagcggcatccagtttaagaagcatgaagaggagggcattgaaactcaatatttcgctgagctgttgatgactagtggtgtggtcctctag

SEQ ID NO: 230442 - DNA, 126 bp, Artificial Sequence
  derived and/or modified sequence
atgcctgctgcgacagtcgaccactctcaaaggatttgcgaggtgtgggcttgtaatctcgacgaggagatgaagaagatcagacaggtgattcggaagtataactatgttgcaatggatacatag

SEQ ID NO: 230443 - DNA, 735 bp, Artificial Sequence
  derived and/or modified sequence
atgcctgccgcaaccgtggatcacagccaacgcatttgtgaggtctgggcttgtaacctcgatgaagagatgaagaagatccgacaggtaatacgtaaatataattacgtggcaatggatacggagttccctggagttgttgcacgaccaattggggaattcaggagcaatgctgactaccaatatcagcttctgcggtgtaatgtggatctgttgaaaattatccagctgggtttaacattcatgaacgagcaaggagaatatcccccaggaacttccacatggcagttcaatttcaagttcaatctcaccgaagacatgtatgcccaggactccattgaactgctgacgacatccggaatacagtttaaaaaacatgaagaagaaggtatagaaacccagtactttgccgagctgcttatgaccagcggggtagtcctgtgtgagggtgtaaagtggctcagttttcatagtggctacgacttcggatacttgattaaaatattgacaaattcgaacttgcccgaggaagagctagacttctttgaaatcctccgactgttcttccccgtcatttatgatgtcaaatacttgatgaagtcctgtaaaaatctgaaaggtggacttcaagaggtcgctgagcagctcgagttggagcggattggcccacagcaccaggccggatctgattccctgttgacaggtatggctttttttaaaatgcgggaggtgtag

SEQ ID NO: 230444 - DNA, 444 bp, Artificial Sequence
  derived and/or modified sequence
atgcccgctgcaactgtggatcatagccaaaggatatgcgaagtgtgggcatgtaacttagatgaggagatgaagaagattaggcaggtcatacgcaagtacaactacgttgcaatggacacagagtttccgggagtggttgcacgcccaattggcgagttcaggtccaatgctgattaccagtaccagttgctccgctgtaatgtggatctcttgaagatcattcagctggggttgacctttatgaatgaacaaggggagtacccacccggtacatctacgtggcaatttaatttcaagtttaatctgaccgaagatatgtacgcccaggattccatcgagctgcttaccacaagcggtatccagtttaaaaaacacgaggaggagggaattgaaacccagtattttgcagagttactgatgacttccggagtggtactttag

SEQ ID NO: 230445 - DNA, 568 bp, Artificial Sequence
  derived and/or modified sequence
agtgggacggaaattgggagtggagggcggtggcctagatcctcacctcttcgtattgtttcacgcggcagtgcttgggagtcagtgtagctccagtcagtgttatcagcaccttcgcactggcgctttgccagggaagagagttatctatggcttgaatacctcggtgccgtcctctcgtttctctgggaaactgcagtacggagatgctttctccagtaatgagaaggcctttggtgtctcttcggggcttctgggactgcagtagagagagagaaggatttgaaatttccctgcccaagaatcaacaggaactctgtttatagaccagaaatgtgacatctatctttggtacataaataaaggataaaatattttatgaaacaaatcttcaatcaagtataacattttgatgcttggcatctagactcccttgtgccctcactatgccagcggcaactgtagatcatagccaaagaatttgtgaagtttgggcttgcaacttggatgaagagatgaagaaaattcgtcaagttatccgaaaatataattacgttgctatggacac

SEQ ID NO: 230446 - DNA, 1885 bp, Artificial Sequence
  derived and/or modified sequence
atctagcgcccccgtcaggacgtgcgaaaagcgacggcgcagcacggtgcggcgcagctcctgctcgcctttcccttcgctgggcgagaggtgtctatggggcacccgctgccgccgccgctaccgccaccgccaccgccaccgccgccgagtgctgtctctatggcgaggaggaggaggaggagcgcgagctcagcgacacaagtacataaataaaggataaaatattttatgaaacaaatcttcaatcaagtataacattttgatgcttggcatctagactcccttgtgccctcactatgccagcggcaactgtagatcatagccaaagaatttgtgaagtttgggcttgcaacttggatgaagagatgaagaaaattcgtcaagttatccgaaaatataattacgttgctatggacaccgagtttccaggtgtggttgcaagacccattggagaattcaggagcaatgctgactatcaataccaactattgcggtgtaatgtagacttgttaaagataattcagctaggactgacatttatgaatgagcaaggagaataccctccaggaacttcaacttggcagtttaattttaaatttaatttgacggaggacatgtatgcccaggactctatagagctactaacaacatctggtatccagtttaaaaaacatgaggaggaaggaattgaaacccagtactttgcagaacttcttatgacttctggagtggtcctctgtgaaggggtcaaatggttgtcatttcatagcggttacgactttggctacttaatcaaaatcctaaccaactctaacttgcctgaagaagaacttgacttctttgagatccttcgattgttttttcctgtcatttatgatgtgaagtacctcatgaagagctgcaaaaatctcaaaggtggattacaggaggtggcagaacagttagagctggaacggataggaccacaacatcaggcaggatctgattcattgctcacaggaatggcctttttcaaaatgagagaagtatgaagacatcactgcctttttctcagttggttgttaggttgagaacattaaaaatcttgtggccaaagattttgggcaacaagtacctactaagtaaagatataattagagataccatatgagtcacatccaccacacttaaaagtattcaaaaataagtcatcttgaaatgtagttcagaaggaactgggagaacatgttcatcatagaaccaacaattttaaaacataaactacctgagaagtcatgtaggtccaaccatattatttctcaggtgagaaaacaggctaataacttccatgattaaacacattactagtgggagaactccagagttcttttctgactcccattggtgctcctcctacaaggcaaggaatctttatattaggtttattctagcatgaccccttttaaggtttaaactggtgataaatatattatttgctcatgtcattcttcagtgctttgaagattttatagagaagaactcaggctcttttactgcattgagtcttaaaaggggggttgaattccgaagggatcaaataaatccaacgtagtagttgcatcagaaaccatattaggaaaaccctccttaaacggcaaaaggcagagatcagttccttgagtataaagtgttagggatggaagaatgaaactaaatgaacccattatctactcctaagtaattaagtgatgtgcacagatacacctagctataggtaaacaggaaaattggttgtgcaaaaaacaagtgaggtttttcttgactataagttttcccttttggaaaaattcgctgtggatttgagtatattttctcttagacattaaattgagactgagaattt

SEQ ID NO: 230447 - DNA, 700 bp, Artificial Sequence
  derived and/or modified sequence
gggacgatgaacctgagagggtgcgcgatggcgccagctggagtgcggctggcggaggaaggagcctggcggcgggttgggggctggaaggatttgaaatttccctgcccaagaatcaacaggaactctgtttatagaccagaaatgtgacatctatctttggtacataaataaaggataaaatattttatgaaacaaatcttcaatcaagtataacattttgatgcttggcatctagactcccttgtgccctcactatgccagcggcaactgtagatcatagccaaagaatttgtgaagtttgggcttgcaacttggatgaagagatgaagaaaattcgtcaagttatccgaaaatataattacgttgctatggacaccgagtttccaggtgtggttgcaagacccattggagaattcaggagcaatgctgactatcaataccaactattgcggtgtaatgtagacttgttaaagataattcagctaggactgacatttatgaatgagcaaggagaataccctccaggaacttcaacttggcagtttaattttaaatttaatttgacggaggacatgtatgcccaggactctatagagctactaacaacatctggtatccagtttaaaaaacatgaggaggaaggaattgaaacccagtactttgcagaacttcttatgacttctggagtggtcctctg

SEQ ID NO: 230448 - DNA, 126 bp, Artificial Sequence
  derived and/or modified sequence
atgcccgccgccaccgtggaccacagccagagaatctgcgaggtgtgggcctgcaacctggacgaggagatgaagaagatcagacaggtgatcagaaagtacaactacgtggccatggacacctag

SEQ ID NO: 230449 - DNA, 735 bp, Artificial Sequence
  derived and/or modified sequence
atgcccgccgccaccgtggaccacagccagagaatctgcgaggtgtgggcctgcaacctggacgaggagatgaagaagatcagacaggtgatcagaaagtacaactacgtggccatggacaccgagttccccggcgtggtggccagacccatcggcgagttcagaagcaacgccgactaccagtaccagctgctgagatgcaacgtggacctgctgaagatcatccagctgggcctgaccttcatgaacgagcagggcgagtacccccccggcaccagcacctggcagttcaacttcaagttcaacctgaccgaggacatgtacgcccaggacagcatcgagctgctgaccaccagcggcatccagttcaagaagcacgaggaggagggcatcgagacccagtacttcgccgagctgctgatgaccagcggcgtggtgctgtgcgagggcgtgaagtggctgagcttccacagcggctacgacttcggctacctgatcaagatcctgaccaacagcaacctgcccgaggaggagctggacttcttcgagatcctgagactgttcttccccgtgatctacgacgtgaagtacctgatgaagagctgcaagaacctgaagggcggcctgcaggaggtggccgagcagctggagctggagagaatcggcccccagcaccaggccggcagcgacagcctgctgaccggcatggccttcttcaagatgagagaggtgtag

SEQ ID NO: 230450 - DNA, 444 bp, Artificial Sequence
  derived and/or modified sequence
atgcccgccgccaccgtggaccacagccagagaatctgcgaggtgtgggcctgcaacctggacgaggagatgaagaagatcagacaggtgatcagaaagtacaactacgtggccatggacaccgagttccccggcgtggtggccagacccatcggcgagttcagaagcaacgccgactaccagtaccagctgctgagatgcaacgtggacctgctgaagatcatccagctgggcctgaccttcatgaacgagcagggcgagtacccccccggcaccagcacctggcagttcaacttcaagttcaacctgaccgaggacatgtacgcccaggacagcatcgagctgctgaccaccagcggcatccagttcaagaagcacgaggaggagggcatcgagacccagtacttcgccgagctgctgatgaccagcggcgtggtgctgtag

SEQ ID NO: 230451 - protein, 492 aa, Artificial Sequence
  derived and/or modified sequence
MVKFPALTHYWPLIRFLVPLGITNIAIDFGEQALNRGIAAVKEDAVEMLASYGLAYSLMKFFTGPMSDFKNVGLVFVNSKRDRTKAVLCMVVAGAIAAVFHTLIAYSDLGYYIINKLHHVDESVGSKTRRAFLYLAAFPFMDAMAWTHAGILLKHKYSFLVGCASISDVIAQVVFVAILLHSHLECREPLLIPILSLYMGALVRCTTLCLGYYKNIHDIIPDRSGPELGGDATIRKMLSFWWPLALILATQRISRPIVNLFVSRDLGGSSAATEAVAILTATYPVGHMPYGWLTEIRAVYPAFDKNNPSNKLVSTSNTVTAAHIKKFTFVCMALSLTLCFVMFWTPNVSEKILIDIIGVDFAFAELCVVPLRIFSFFPVPVTVRAHLTGWLMTLKKTFVLAPSSVLRIIVLIASLVVLPYLGVHGATLGVGSLLAGFVGESTMVAIAACYVYRKQKKKMENESATEGEDSAMTDMPPTEEVTDIVEMREENE

SEQ ID NO: 230452 - protein, 294 aa, Artificial Sequence
  derived and/or modified sequence
MGALVRCTTLCLGYYKNIHDIIPDRSGPELGGDATIRKMLSFWWPLALILATQRISRPIVNLFVSRDLGGSSAATEAVAILTATYPVGHMPYGWLTEIRAVYPAFDKNNPSNKLVSTSNTVTAAHIKKFTFVCMALSLTLCFVMFWTPNVSEKILIDIIGVDFAFAELCVVPLRIFSFFPVPVTVRAHLTGWLMTLKKTFVLAPSSVLRIIVLIASLVVLPYLGVHGATLGVGSLLAGFVGESTMVAIAACYVYRKQKKKMENESATEGEDSAMTDMPPTEEVTDIVEMREENE

SEQ ID NO: 230453 - DNA, 1479 bp, Artificial Sequence
  derived and/or modified sequence
atggtaaagtttccagcactgacacactactggccattaatccgctttttagtgcccctgggtatcacaaatatcgccattgactttggggagcaggcccttaaccgcggaattgcagctgttaaagaagacgccgtcgagatgctcgcgagctatggactggcctattcattgatgaagttctttaccggcccaatgtctgatttcaaaaacgtgggccttgtattcgttaactccaaaagagaccggacgaaggctgtgctgtgcatggtcgtcgctggcgccattgctgctgtctttcatacacttatcgcctattccgacctgggatattacattatcaacaagctgcaccatgttgacgaatctgtcggctccaaaacgagaagggcattcctgtatttggctgccttccctttcatggatgctatggcatggacgcacgcaggcattctgctgaagcacaagtattccttcctggtggggtgtgcatctatatccgatgtcatagcccaagtggtctttgtggcgattctcctccactcccaccttgaatgccgtgaacctctcctgatccctattctctccttgtatatgggagccttagtgcggtgcaccacgttgtgtctcggttactataaaaatatccatgatattattccggatcgcagtggccccgaactgggcggggatgcgacaattcggaagatgctcagtttttggtggccccttgccctcatcttggctacccaacggatctctcgccctatcgttaacctgtttgtatcacgggatctgggaggcagctctgctgcaaccgaggccgtggccatcctgaccgctacctatcccgtggggcatatgccatacggatggctcaccgaaattagggcagtctacccggccttcgacaaaaacaatccaagtaataaactggtcagtacctccaataccgttacagcagctcacatcaaaaagttcacttttgtatgcatggctctatcactaactctgtgtttcgtaatgttctggacccccaatgtgagcgaaaaaattcttatcgatattatcggcgtagattttgcattcgcagagctctgtgtagtgccacttcgtatcttctccttcttcccagtacccgtcacagtcagagcccacctaacgggctggctgatgactctgaaaaagacattcgtgcttgcaccaagctcagtgttgagaatcattgttctgattgcatcactggtcgttcttccgtatttgggagtacatggtgctacgctcggcgtcggtagtctgctggcagggtttgtgggggagagcactatggtagctatcgcagcctgctacgtgtatcggaagcaaaagaagaagatggagaacgagtctgccactgagggagaagacagcgccatgactgatatgccgccaaccgaagaagtgactgatattgtggaaatgagagaggagaacgaatag

SEQ ID NO: 230454 - DNA, 885 bp, Artificial Sequence
  derived and/or modified sequence
atgggcgctctggtcaggtgcaccactttatgcctgggttactacaaaaacattcacgacatcattcccgatcgatccggcccagagctaggcggggacgcaacaatccgtaagatgctgtccttctggtggcccttggcactgattttagcaacccagcggatcagccggcctattgtgaatctatttgtctctagagatcttggcggctcctccgctgccacggaggctgtcgccatcctcacggccacataccccgtggggcatatgccctacggctggttgacggagattcgggcagtgtaccctgcctttgacaagaacaatcccagtaacaaacttgtgtctacctctaataccgttactgccgcccatattaagaaatttacattcgtctgcatggccctgagtctgactctgtgcttcgttatgttttggacgcctaacgtatccgagaaaattctgatagacattattggagtggacttcgcctttgctgagttatgcgtcgttccgctgcgtatattctctttcttccccgtcccggtgacagtgcgggcgcatctcaccggttggctcatgacactcaagaaaactttcgtcctcgccccaagcagtgtgttgagaattatagtcctgattgcatccctcgtcgtgctcccatatttgggggtccacggcgcgaccctgggtgtgggaagtctgctggcagggtttgtgggtgaatctaccatggtcgctatcgccgcttgctacgtctaccggaaacaaaagaaaaaaatggaaaacgagtcagccactgagggagaggacagcgctatgacagatatgcctcctacggaggaagttactgatatagtggagatgcgagaggagaacgagtag

SEQ ID NO: 230455 - DNA, 1479 bp, Artificial Sequence
  derived and/or modified sequence
atggtgaagtttcctgccctgacccactactggcccctcatccgcttcctggtgcccctgggcatcaccaacatcgccatcgactttggagagcaggccctgaacagaggaattgctgctgtgaaggaggatgctgtggagatgctggccagctatggcctggcctacagcctgatgaagttcttcaccggccccatgtctgacttcaagaatgtgggcctggtgtttgtgaacagcaagagggacaggaccaaggctgtgctgtgcatggtggtggccggggccatcgctgctgtgttccacaccctcatcgcctacagcgacctgggctactacatcatcaacaagctgcaccacgtggatgaatctgtgggcagcaagacccggcgggccttcctgtacctggccgccttccccttcatggatgccatggcctggacccatgctggcatcctgctgaagcacaagtacagcttcctggtgggctgtgccagcatcagtgatgtgattgcccaggtggtgtttgtggccatcctgctgcacagccacctggagtgccgggagcccctgctgatccccatcctgagcctgtacatgggcgccctggtgcgctgcaccaccctgtgcctgggctactacaagaacatccatgacatcatcccagacaggagcggccctgagctgggcggagatgccaccatcaggaagatgctgtccttctggtggcccctggccctgatcctggccacccagaggatcagccggcccatcgtgaacctgtttgtgtcccgggacctgggcggcagcagcgctgccacagaagctgtggccatcctgacagccacctaccctgtgggccacatgccctacggctggctgacagagatccgggctgtgtacccagcctttgacaagaacaaccccagcaacaagctggtgtccaccagcaacacagtgacagctgcccacatcaagaagttcacctttgtgtgcatggccctgagcctgaccctgtgctttgtgatgttctggaccccaaatgtgtctgagaagatcctgattgacatcattggagtggactttgcctttgctgagctgtgtgtggtgcccctgcgcatcttctccttcttccctgtgcctgtgacagtgcgggcccacctgaccggctggctgatgaccctgaagaagacctttgtgctggcccccagctctgtgctgcgcatcatcgtgctgattgccagcctggtggtgctgccctacctgggcgtgcacggggccaccctgggcgtgggcagcctgctggccggctttgtgggggagagcaccatggtggccatcgccgcctgctacgtgtacaggaagcagaagaagaagatggagaatgaaagtgccacagaaggagaggacagcgccatgacagacatgccacccacagaggaggtgacagacatcgtggagatgagggaggagaatgaatag

SEQ ID NO: 230456 - DNA, 885 bp, Artificial Sequence
  derived and/or modified sequence
atgggcgccctggtgcgctgcaccaccctgtgcctgggctactacaagaacatccatgacatcatcccagacaggagcggccctgagctgggcggagatgccaccatcaggaagatgctgtccttctggtggcccctggccctgatcctggccacccagaggatcagccggcccatcgtgaacctgtttgtgtcccgggacctgggcggcagcagcgctgccacagaagctgtggccatcctgacagccacctaccctgtgggccacatgccctacggctggctgacagagatccgggctgtgtacccagcctttgacaagaacaaccccagcaacaagctggtgtccaccagcaacacagtgacagctgcccacatcaagaagttcacctttgtgtgcatggccctgagcctgaccctgtgctttgtgatgttctggaccccaaatgtgtctgagaagatcctgattgacatcattggagtggactttgcctttgctgagctgtgtgtggtgcccctgcgcatcttctccttcttccctgtgcctgtgacagtgcgggcccacctgaccggctggctgatgaccctgaagaagacctttgtgctggcccccagctctgtgctgcgcatcatcgtgctgattgccagcctggtggtgctgccctacctgggcgtgcacggggccaccctgggcgtgggcagcctgctggccggctttgtgggggagagcaccatggtggccatcgccgcctgctacgtgtacaggaagcagaagaagaagatggagaatgaaagtgccacagaaggagaggacagcgccatgacagacatgccacccacagaggaggtgacagacatcgtggagatgagggaggagaatgaatag

SEQ ID NO: 230457 - DNA, 1479 bp, Artificial Sequence
  derived and/or modified sequence
atggtgaagttccccgccctgacccactactggcccctgatccggttccttgttcccctcggaatcacaaacatagcaatcgactttggagaacaagccctcaataggggaattgcagctgtaaaagaagatgctgtggagatgctagcatcgtatggcctggcatacagcttaatgaaattcttcactggaccgatgagtgattttaaaaatgtcggccttgtttttgtaaatagcaagagagacaggactaaggcagtgttgtgtatggtggtggctggagcaatcgccgcagtgtttcacacgctgatcgcctacagcgacctgggatactacattattaacaagctgcatcacgtggacgaatcagtgggcagcaagactcggagggcattcttatacctagctgcattcccattcatggacgccatggcgtggacccacgccgggattctcctaaagcacaagtattcattcctggtaggatgtgcttcaatatctgacgtgatcgctcaagtggtattcgtggctatccttctgcatagtcacctggagtgtcgagaacctctcctcatccccatcctgtccctctacatgggcgcattggtgaggtgtaccaccttatgcttggggtattataaaaacattcacgatatcattccagatagatctggacctgaactgggaggcgacgccacaatcagaaagatgttgtccttttggtggcctctcgcccttatattggcaacccaaaggatctctagaccaatagtgaatcttttcgtgagccgggatctagggggctctagcgccgctactgaggccgttgcaatccttacagcaacctatccagtggggcatatgccttacggatggctgaccgagattcgcgcagtgtatcccgcgtttgataaaaacaatccttccaataagttagtctcaactagcaatacagtgaccgcggcacatattaagaaattcacattcgtgtgcatggctttgtctctgaccctttgcttcgtgatgttttggacacccaatgtgtctgagaaaatcttgatcgacattattggtgtagactttgcttttgccgagctctgtgtggtgccactgcgtatttttagcttcttccctgtacctgtgaccgtccgcgcccacctgaccggatggttgatgactcttaagaagacattcgtgctagctccctcctccgtgctgcgaatcattgtgttaatcgcatctttagtcgtactgccgtacttaggcgtgcatggagcgaccctaggcgtgggatccctgttggctggcttcgtcggggagtctactatggttgcaatcgccgcatgctacgtttatagaaagcagaagaagaagatggaaaatgaatctgccacagaaggcgaagacagcgctatgacggatatgcccccaaccgaggaggtgactgacattgtggaaatgcgggaggagaacgagtag

SEQ ID NO: 230458 - DNA, 885 bp, Artificial Sequence
  derived and/or modified sequence
atgggcgccctggtgcggtgcaccaccctgtgcctgggctactacaagaatattcatgacatcatccccgaccgtagcggaccagagctgggcggagatgcgacgatccgtaagatgctcagcttctggtggcccctggcactaattttggctacccaaaggatcagtaggcccattgtgaacctgtttgtgagccgcgacctggggggatctagcgcagcaaccgaggccgtggctatcctgaccgccacgtaccccgtgggccacatgccctacggctggctgactgaaattcgagccgtgtatccggccttcgacaaaaataacccctccaacaaattggttagcacatccaatactgtaacggctgcgcatatcaaaaagtttactttcgtttgcatggccctgtccctaactctatgctttgtgatgttttggacacccaatgtaagcgaaaaaattctgatcgacattatcggagtcgactttgcctttgccgaactgtgcgtcgtgccgcttagaatcttttccttctttccggtgccggtgacagtgcgggcacatcttaccgggtggttgatgaccctgaagaaaacttttgtgctcgcccccagctccgtgttaaggatcattgtgctgattgccagtttggtcgtgctgccttacctcggtgtgcatggcgccactctgggggtaggttctcttctggcaggattcgtgggagaatcgacaatggtggctatcgctgcctgctacgtttaccggaagcagaaaaagaagatggagaatgagtcagctaccgagggggaagatagcgctatgaccgacatgcctccaacggaggaggtaaccgatattgtagagatgcgagaagagaatgagtag

SEQ ID NO: 230459 - DNA, 8203 bp, Artificial Sequence
  derived and/or modified sequence
agagcgcttataatggagccgctgtcagcagaaccttctgccgccgccgccgccgccgccgtccctcctcttttttttcccggcagatctttgttgtgtgggagggcagcagggatggacttgagcttgcggatcccctgctagagcagccgcgctcggagaaggcgccgcagccgcgaggaggagccgccgccgccgcgcccgaggccccgccgcccgcggcctctgtcggcccgcgccccgctcgccccgtcgccccgtcgcccctcgcctccccgcagagtcccctcgcggcagcagatgtgtgtggggtcagcccacggcggggactatggtgaaattcccggcgctcacgcactactggcccctgatccggttcttggtgcccctgggcatcaccaacatagccatcgacttcggggagcaggccttgaaccggggcattgctgctgtcaaggaggatgcagtcgagatgctggccagctacgggctggcgtactccctcatgaagttcttcacgggtcccatgagtgacttcaaaaatgtgggcctggtgtttgtgaacagcaagagagacaggaccaaagccgtcctgtgtatggtggtggcaggggccatcgctgccgtctttcacacactgatagcttatagtgatttaggatactacattatcaataaactgcaccatgtggacgagtcggtggggagcaagacgagaagggccttcctgtacctcgccgcctttcctttcatggacgcaatggcatggacccatgctggcattctcttaaaacacaaatacagtttcctggtgggatgtgcctcaatctcagatgtcatagctcaggttgtttttgtagccattttgcttcacagtcacctggaatgccgggagcccctgctcatcccgatcctctccttgtacatgggcgcacttgtgcgctgcaccaccctgtgcctgggctactacaagaacattcacgacatcatccctgacagaagtggcccggagctggggggagatgcaacaataagaaagatgctgagcttctggtggcctttggctctaattctggccacacagagaatcagtcggcctattgtcaacctctttgtttcccgggaccttggtggcagttctgcagccacagaggcagtggcgattttgacagccacataccctgtgggtcacatgccatacggctggttgacggaaatccgtgctgtgtatcctgctttcgacaagaataaccccagcaacaaactggtgagcacgagcaacacagtcacggcagcccacatcaagaagttcaccttcgtctgcatggctctgtcactcacgctctgtttcgtgatgttttggacacccaacgtgtctgagaaaatcttgatagacatcatcggagtggactttgcctttgcagaactctgtgttgttcctttgcggatcttctccttcttcccagttccagtcacagtgagggcgcatctcaccgggtggctgatgacactgaagaaaaccttcgtccttgcccccagctctgtgctgcggatcatcgtcctcatcgccagcctcgtggtcctaccctacctgggggtgcacggtgcgaccctgggcgtgggctccctcctggcgggctttgtgggagaatccaccatggtcgccatcgctgcgtgctatgtctaccggaagcagaaaaagaagatggagaatgagtcggccacggagggggaagactctgccatgacagacatgcctccgacagaggaggtgacagacatcgtggaaatgagagaggagaatgaataaggcacgggacgccatgggcactgcagggacagtcagtcaggatgacacttcggcatcatctcttccctctcccatcgtattttgttcccttttttttgttttgttttggtaatgaaagaggccttgatttaaaggtttcgtgtcaattctctagcatactgggtatgctcacactgacggggggacctagtgaatggtctttactgttgctatgtaaaaacaaacgaaacaactgacttcatacccctgcctcacgaaaacccaaaagacacagctgcctcacggttgacgttgtgtcctcctcccctggacaatctcctcttggaaccaaaggactgcagctgtgccatcgcgcctcggtcaccctgcacagcaggccacagactctcctgtcccccttcatcgctcttaagaatcaacaggttaaaactcggcttcctttgatttgcttcccagtcacatggccgtacaaagagatggagccccggtggcctcttaaatttcccttccgccacggagttcgaaaccatctactccacacatgcaggaggcgggtggcacgctgcagcccggagtccccgttcacactgaggaacggagacctgtgaccacagcaggctgacagatggacagaatctcccgtagaaaggtttggtttgaaatgccccgggggcagcaaactgacatggttgaatgatagcatttcactctgcgttctcctagatctgagcaagctgtcagttctcacccccaccgtgtatatacatgagctaacttttttaaattgtcacaaaagcgcatctccagattccagaccctgccgcatgacttttcctgaaggcttgcttttccctcgcctttcctgaaggtcgcattagagcgagtcacatggagcatcctaactttgcattttagtttttacagtgaactgaagctttaagtctcatccagcattctaatgccaggttgctgtagggtaacttttgaagtagatatattacctggttctgctatccttagtcataactctgcggtacaggtaattgagaatgtactacggtacttccctcccacaccatacgataaagcaagacattttataacgataccagagtcactatgtggtcctccctgaaataacgcattcgaaatccatgcagtgcagtatatttttctaagttttggaaagcaggttttttcctttaaaaaaattatagacacggttcactaaattgatttagtcagaattcctagactgaaagaacctaaaaaaaaaaatattttaaagatataaatatatgctgtatatgttatgtaatttattttaggctataatacatttcctattttcgcattttcaataaaatgtctctaatacaatacggtgattgcttgtgtgctcaacatacctgcagttgaaacgtattgtatcaatgaacattgtaccttattggcagcagttttataaagtccgtcatttgcatttgaatgtaaggctcagtaaatgacagaactatttttcattatgggtaactggggaataaatgggtcactggagtaggaatagaagtgcaagctggaaaggcaaaaatgagaaagaaaaaggcaggccctttgtgtctaccgttttcagtgctgtgtgatcatattgttcctcacagcaaaaaagaatgcaagggcataatgttagctgtgaacatgccagggttgcattcacattcctgggtacccagtgctgatggggtgtgcccacgtggggacatgtccttggcgtgcttcctcagagtggcttttcctccattaatacatatatgagtactgaaaaattaagttgcatagctgctttgcagtggtttcagaggcagatctgagaagattaaaaaaaaatctcaatgtatcagctttttttaaaggacattactagaaaattaaacagtattttttaacatgtgtgactttcatgcttctggggttggagcttaaagatccaaactgagaaagcaggccgggcatggtggctcatgcctgtaatcccaacactttgggaggccaaggagggtggatcacttaaggtcaggagtttgagaccagcctggccaacatggcaaaaccctgtctctactaaaaacataaaaattagctgggggtggtagcacatacctgtaatcccagctactcaggaggctgaggcaggagaatttgcttgatcctgggaggcagaggttgtagtgagccgagatcgcgccatcgcactccagcctgggtgacaagagcaaaactccatctcaaaaaaaaaaaaaatcctttccctctaaatccaggaaggatcagcaagggcctcctcattatgagatgaggaaatacaactccagagattccttcagtgatcaagatcagtgggccataatatttggttagagtttctgagaacacaggaagcaatgccacactcaggccaccacaatggagctgatttggcaggacttgttcaaacctttcaccttaaagcacgtgatccttcttcgtacattttcttcacttgggctgcttaagtcacagcctaacaactttgaggcaaaactgagaactggcatattctcctgcgtttcttctaatcgagtcccatcatccagctagacatgagagatcaaaccagggagggtgacctttctccttcccacttttcagagtcattggggcaactttttgacttttgtgaccaaagaaacattcccccaaaacatttatttttcattgtagggcattcagctgacagctgcattttagaaagttaccatgcctgtgagattctcatgtcaaagaccagggaaagaccaggtgtgactttctccaaaactgagtgattgcttgtggatgaatacaatctaaaaatacaaggccatgaagtagtttttcatttagatgctgagaaataataggtttgggcagctcaaagcataggaaatagtaagggttttctagagctcctcctttggtggcctgtttgagtagcacaagggacgtcatcctaaatgtgcagttgccatttgttctgtagtgacttacagggatctcagtggcaaagggcgtcagtgagacaacaactgagcaaaaagaactagacgaggcttgcgcttggaaagtcacggtaggattggacctgccggccacatggctcagggagtattgacggatttgcacattggcaggaaactctcccgtttgggattctttaaatggggcacagaaggccacttgtttgcatttctgggtaaaaaacagtcatcccccatgactgcctgcatcgggtttgtcttgtgccaaagttactcttcctttgtttttactttgccttgatttttagcattagctggtagtttggcttggaaatgtcctggatagccgattccctaagaaactgaaacatttaatattggcttaggatgtatcagatggggccaaataaagcttctttacaatagtaaaagcactttatacttcactctctgagtcttcccaataaataaccttgggaggtgcagggggtggggggcccaggatggggaggcctgggagctcccagggtagtgacagagttgggctgagttctccagacgccaggatgcgtcgcagcggggccagctcaggagtgctcactcccagccctctggatctctctcctggttggaataatcattacatatcgtaactctcaaaatttattcacttatattttcagaataagaagtgtgaaatgttaacagctctctgctctcttacttgttccccatttggggatcttctggagggaaggggcagggggagagtaacttttctatatccttggtttctaggaacacatcgatttgaagactcagtagctgactggtttttttttttcccccttcaaactgaagtgcgagtgtgcgtgtgttccacaaaatagcaagtatttatagtgttgtaattacatttccttgagaaatattttcttgtatttaaaaatctttctacttcagtaactcccagcagaacagtgcccaggacagcatgtgccggttagtaccagctttgcaggtgagctgacttctaaacttaggacgacgtcttcatcaatcaaactagtgcacagtccagaaaaaggggtcctttatcttctaagttctgctcctcacctttctttggaaccaaaattgcagtggagtgtgaggaagagctttgaaagacgtggagtgttgagatgtctgcattgcacattcagccggttcaaagccagcagctcctgcctgcattctgtagacatcgccctcacacacagtcctctgatggctctcatataaagcactcaaaccgtaggaaagcatgtttttgagcaacgtgtctgggatactcctctgtgtggttattttgaatctctatttctgtcattgaagcagcaaaaaacatcatgtgactcatcaactgatctaatcacacttaaaacaggatgtagagaaaaatctgatgagaaacgtaaaagggcctgttgcctgcccttttaaaggcaaaatgtctaaaatcatgcaaatgttcaaaatgagagaaattgcattgtggaatcaaaataacccaaactccactcagaaaagtcacaaatatatagtatactatctgatctcaaaagggaaaaacgagatgataagaccttaagtttagactttattttcttctcaagagtggacattaaatctattaacttgcaactttctgctgggaagagcatcaaaggtgggcctcctaaatcatttttgaaaaacctctgtcaagtccaagtggttccaggagaattatagccagtatcttttaaaatatttcattttagtgataatgtttttctctgcttcatttgcaatcaaccaggatctctaaaagactgcataagatatatgcacttttataggtggctgtcagctacacatagattcagcaaattttttttatatagtacctgtttttaagttaggctacataacttaaagtgcactttactaacaagacttgacattagcgtctacaatatgtatatgtaaacaaaagcacacaagaactaggcaccctttctctctccaagagtttaagtggtttccttaggttaaagaaggggacagaccagctaaaaatggttgtaccactcactgtacaacctcatggaaattctcactataagatttagaggcaatgttccctagctataagccagggcaagaaatggcgcctctggagttggggaacattaggggaacattacaaccgggtagatgctggttccctgaagtgtggggccatgaacatgcagggacccacggtttgaatgaaacagctactgaaagctaagttcaaaccacccttgcgtaacaaaggagtacagggtacacatcaacaccaatcacccagcaccccacagcgatggtcatgtcaccgtgcagcaggtcccttaccccagggctgccacatccacaagccttgcagtggcaaatacgctgctccttggatttaatgagatattttggttgcttaatgatgtactgatcagggaactgtctaaagctagtagggccaaggagttaatcaaagggcttcgggaaagtggacaagagccacacacgtgattctgttccatgccgacactcattcatttaagaagtgtattcaagctggaggcttccatatcactcacgcttcttggcctcaccttgctcatctgtccaatgggaggcttgagccattattgctaaggccccttcctgatctaacattctgtttatgatctaggatttagaacgtcgtatgagatcctacaatggaagaataaaatcacctcattcttcatttcagatctgaacattagcagtgatctagatttttttttttttaaacaaaattaagtgtgcttagagtcattcctctacatgggctgtggctgtcagcccataggtttgtcagtttcacatcaaaactgtgggtataaactgttgaaaccaatcacattaaaatatttagctgggcacagtggtgtgcatctgtagtcccagctacttgggaggctgaggcaggaggatcgcttaagcacaggagttggaatccagcctgagcaacagagcaaaaccccgtctctaaaatacaaataaaatatttgtgtagtttttgattaaaattgactacagcggtcagtataaaatacatgtcgcttttaaggaagtgctctttatgtatctaacagatggaagtttttgcattggtaagagcatttatatatgctttgtttcagggtttatggatttgtattcatatattgtcaaataggtttcatactctaattttactttaagtaaagcttaaacacttggcatacaa

SEQ ID NO: 230460 - DNA, 1722 bp, Artificial Sequence
  derived and/or modified sequence
gtcacctggaatgccgggagcccctgctcatcccgatcctctccttgtacatgggcgcacttgtgcgctgcaccaccctgtgcctgggctactacaagaacattcacgacatcatccctgacagaagtggcccggagctggggggagatgcaacaataagaaagatgctgagcttctggtggcctttggctctaattctggccacacagagaatcagtcggcctattgtcaacctctttgtttcccgggaccttggtggcagttctgcagccacagaggcagtggcgattttgacagccacataccctgtgggtcacatgccatacggctggttgacggaaatccgtgctgtgtatcctgctttcgacaagaataaccccagcaacaaactggtgagcacgagcaacacagtcacggcagcccacatcaagaagttcaccttcgtctgcatggctctgtcactcacgctctgtttcgtgatgttttggacacccaacgtgtctgagaaaatcttgatagacatcatcggagtggactttgcctttgcagaactctgtgttgttcctttgcggatcttctccttcttcccagttccagtcacagtgagggcgcatctcaccgggtggctgatgacactgaagaaaaccttcgtccttgcccccagctctgtgctgcggatcatcgtcctcatcgccagcctcgtggtcctaccctacctgggggtgcacggtgcgaccctgggcgtgggctccctcctggcgggctttgtgggagaatccaccatggtcgccatcgctgcgtgctatgtctaccggaagcagaaaaagaagatggagaatgagtcggccacggagggggaagactctgccatgacagacatgcctccgacagaggaggtgacagacatcgtggaaatgagagaggagaatgaataaggcacgggacgccatgggcactgcagggacagtcagtcaggatgacacttcggcatcatctcttccctctcccatcgtattttgttcccttttttttgttttgttttggtaatgaaagaggccttgatttaaaggtttcgtgtcaattctctagcatactgggtatgccccttcctgatctaacattctgtttatgatctaggatttagaacgtcgtatgagatcctacaatggaagaataaaatcacctcattcttcatttcagatctgaacattagcagtgatctagatttttttttttttaaacaaaattaagtgtgcttagagtcattcctctacatgggctgtggctgtcagcccataggtttgtcagtttcacatcaaaactgtgggtataaactgttgaaaccaatcacattaaaatatttagctgggcacagtggtgtgcatctgtagtcccagctacttgggaggctgaggcaggaggatcgcttaagcacaggagttggaatccagcctgagcaacagagcaaaaccccgtctctaaaatacaaataaaatatttgtgtagtttttgattaaaattgactacagcggtcagtataaaatacatgtcgcttttaaggaagtgctctttatgtatctaacagatggaagtttttgcattggtaagagcatttatatatgctttgtttcagggtttatggatttgtattcatatattgtcaaataggtttcatactctaattttactttaagtaaagcttaaacacttggcatacaactg

SEQ ID NO: 230461 - DNA, 1479 bp, Artificial Sequence
  derived and/or modified sequence
atggtcaaattccctgccctgactcactattggcctctcatccggtttttagttcccctcggaattactaacatcgctatagattttggtgagcaggccctgaacagggggatcgctgccgtaaaagaagacgctgtcgagatgctcgctagctacggcctggcctactcgttgatgaagttctttaccggaccaatgagcgacttcaagaatgtcggactcgtcttcgtcaattcgaagagggacagaacaaaagcagtcctgtgcatggtggtagccggagcaatagctgccgtgtttcataccctgattgcctactcagatcttgggtattatataattaacaaactgcaccatgtggacgaatccgtcgggtcgaagacacgaagggcatttctgtatttagcagccttccccttcatggatgctatggcttggacccacgctggaattctgctaaagcacaagtacagttttctggtcggctgcgcctcgatcagcgatgttatcgcccaggtagttttcgtggccatcctgctgcacagtcacctggagtgtcgggaacccttgctgatccccatcctctccctatacatgggggcactggtgagatgcacaaccctctgtctcgggtattataagaatatccatgacataatccctgacagaagcggcccagagcttgggggagacgccaccatccgtaaaatgctgtctttttggtggcctctcgcgcttattctggcaacacagcgaatctcacgtcccatagttaacctttttgtgtcacgggaccttggcggatccagtgcagctaccgaagccgtggccattctgacagctacttatcccgtcggccatatgccgtacggctggttgaccgagatccgggcagtctaccctgctttcgacaaaaataacccctcaaacaaactagtgagcaccagcaacacagttaccgccgcacacatcaaaaagtttacatttgtctgcatggcactgtccctgaccctgtgctttgtgatgttttggacacccaacgtgtccgagaagatattgatagatattatcggggtggacttcgcgttcgccgaattgtgcgtggtgccattgagaatcttctccttcttcccagtgccggtgacagtgcgcgctcatctcaccggctggttaatgacactgaagaagactttcgtcctagctcccagttctgtgctcaggatcatcgtcttgatagcttcactcgtcgtcctcccatacctcggcgtgcatggagcaaccctgggggtgggaagcctgctggcgggatttgttggggagtcaacaatggtggccattgcggcttgttacgtctaccgcaagcagaaaaaaaagatggagaacgagtctgccactgagggggaggattcagctatgaccgatatgccgccaaccgaagaagttactgacattgtggagatgcgcgaggaaaacgagtag

SEQ ID NO: 230462 - DNA, 885 bp, Artificial Sequence
  derived and/or modified sequence
atgggtgccttagttagatgcaccacactttgcctgggctactataaaaacatccacgatatcatcccagaccgctccggccctgagcttggaggggacgcaactatccgcaagatgctgtccttttggtggccactggccctgatacttgctacgcagcgaattagccgcccaatcgtgaacctgtttgtgtccagggacctgggcggatcctccgcagcaaccgaggccgtggcaatcctgacagctacgtatccagtgggccacatgccttatggctggcttaccgaaatcagggctgtctatccggctttcgacaagaacaacccatccaacaaactcgtgagcacaagcaataccgtcaccgccgctcatattaagaagtttaccttcgtgtgtatggccctgtcactgaccctgtgtttcgtcatgttctggacgccaaacgtgagtgagaaaatcctgatagacataataggagtcgactttgcctttgctgaactttgcgtggtgcctctgcgtatcttcagcttttttcctgtgccagtcacagtccgtgcgcacctcaccggttggctgatgactttgaagaagactttcgttctggcaccatcctccgtcttgaggattatcgtactgatcgcgtctctggtcgtgctaccttaccttggcgtgcatggggctactctcggtgttgggtccctgcttgcaggcttcgtgggggagagtaccatggtagccatagctgcatgctacgtgtaccgtaagcagaaaaagaaaatggagaatgaaagcgcgacagagggggaggatagcgccatgactgatatgcctcctaccgaggaggtgacggacatcgttgaaatgcgagaggagaacgaatag

SEQ ID NO: 230463 - DNA, 1479 bp, Artificial Sequence
  derived and/or modified sequence
atggtgaagttccccgccctgacccactactggcccctgatcagattcctggtgcccctgggcatcaccaacatcgccatcgacttcggcgagcaggccctgaacagaggcatcgccgccgtgaaggaggacgccgtggagatgctggccagctacggcctggcctacagcctgatgaagttcttcaccggccccatgagcgacttcaagaacgtgggcctggtgttcgtgaacagcaagagagacagaaccaaggccgtgctgtgcatggtggtggccggcgccatcgccgccgtgttccacaccctgatcgcctacagcgacctgggctactacatcatcaacaagctgcaccacgtggacgagagcgtgggcagcaagaccagaagagccttcctgtacctggccgccttccccttcatggacgccatggcctggacccacgccggcatcctgctgaagcacaagtacagcttcctggtgggctgcgccagcatcagcgacgtgatcgcccaggtggtgttcgtggccatcctgctgcacagccacctggagtgcagagagcccctgctgatccccatcctgagcctgtacatgggcgccctggtgagatgcaccaccctgtgcctgggctactacaagaacatccacgacatcatccccgacagaagcggccccgagctgggcggcgacgccaccatcagaaagatgctgagcttctggtggcccctggccctgatcctggccacccagagaatcagcagacccatcgtgaacctgttcgtgagcagagacctgggcggcagcagcgccgccaccgaggccgtggccatcctgaccgccacctaccccgtgggccacatgccctacggctggctgaccgagatcagagccgtgtaccccgccttcgacaagaacaaccccagcaacaagctggtgagcaccagcaacaccgtgaccgccgcccacatcaagaagttcaccttcgtgtgcatggccctgagcctgaccctgtgcttcgtgatgttctggacccccaacgtgagcgagaagatcctgatcgacatcatcggcgtggacttcgccttcgccgagctgtgcgtggtgcccctgagaatcttcagcttcttccccgtgcccgtgaccgtgagagcccacctgaccggctggctgatgaccctgaagaagaccttcgtgctggcccccagcagcgtgctgagaatcatcgtgctgatcgccagcctggtggtgctgccctacctgggcgtgcacggcgccaccctgggcgtgggcagcctgctggccggcttcgtgggcgagagcaccatggtggccatcgccgcctgctacgtgtacagaaagcagaagaagaagatggagaacgagagcgccaccgagggcgaggacagcgccatgaccgacatgccccccaccgaggaggtgaccgacatcgtggagatgagagaggagaacgagtag

SEQ ID NO: 230464 - DNA, 885 bp, Artificial Sequence
  derived and/or modified sequence
atgggcgccctggtgagatgcaccaccctgtgcctgggctactacaagaacatccacgacatcatccccgacagaagcggccccgagctgggcggcgacgccaccatcagaaagatgctgagcttctggtggcccctggccctgatcctggccacccagagaatcagcagacccatcgtgaacctgttcgtgagcagagacctgggcggcagcagcgccgccaccgaggccgtggccatcctgaccgccacctaccccgtgggccacatgccctacggctggctgaccgagatcagagccgtgtaccccgccttcgacaagaacaaccccagcaacaagctggtgagcaccagcaacaccgtgaccgccgcccacatcaagaagttcaccttcgtgtgcatggccctgagcctgaccctgtgcttcgtgatgttctggacccccaacgtgagcgagaagatcctgatcgacatcatcggcgtggacttcgccttcgccgagctgtgcgtggtgcccctgagaatcttcagcttcttccccgtgcccgtgaccgtgagagcccacctgaccggctggctgatgaccctgaagaagaccttcgtgctggcccccagcagcgtgctgagaatcatcgtgctgatcgccagcctggtggtgctgccctacctgggcgtgcacggcgccaccctgggcgtgggcagcctgctggccggcttcgtgggcgagagcaccatggtggccatcgccgcctgctacgtgtacagaaagcagaagaagaagatggagaacgagagcgccaccgagggcgaggacagcgccatgaccgacatgccccccaccgaggaggtgaccgacatcgtggagatgagagaggagaacgagtag

SEQ ID NO: 230465 - protein, 338 aa, Artificial Sequence
  derived and/or modified sequence
MAGSHPYFNLPDSTHPSPPSAPPSLRWHQRCQPSGATNGLLVALLGGGLPAGFVGPLSRMAYQGSNLPSLELLICRCLFHLPIALLLKLRGDPLLGPPDIRGWACFCALLNVLSIGCAYSAVQVVPAGNAATVRKGSSTVCSAVLTLCLESQGLGGYEWCGLLGSILGLIIILGPGLWTLQEGTTGVYTTLGYVQAFLGGLALSLGLLVYRSLHFPSCLPTVAFLSGLVGLLGCVPGLFVLQTPVLPSDLLSWSCVGAEGILALVSFTCVGYAVTKAHPALVCAVLHSEVVVALILQYYMLHETVALSDIMGAGVVLGSIAIITARNLSCERTGKVEE

SEQ ID NO: 230466 - DNA, 1017 bp, Artificial Sequence
  derived and/or modified sequence
atggccggcagccacccctacttcaacctgcccgacagcacccaccccagcccccccagcgccccccccagcctgagatggcaccagagatgccagcccagcggcgccaccaacggcctgctggtggccctgctgggcggcggcctgcccgccggcttcgtgggccccctgagcagaatggcctaccagggcagcaacctgcccagcctggagctgctgatctgcagatgcctgttccacctgcccatcgccctgctgctgaagctgagaggcgaccccctgctgggcccccccgacatcagaggctgggcctgcttctgcgccctgctgaacgtgctgagcatcggctgcgcctacagcgccgtgcaggtggtgcccgccggcaacgccgccaccgtgagaaagggcagcagcaccgtgtgcagcgccgtgctgaccctgtgcctggagagccagggcctgggcggctacgagtggtgcggcctgctgggcagcatcctgggcctgatcatcatcctgggccccggcctgtggaccctgcaggagggcaccaccggcgtgtacaccaccctgggctacgtgcaggccttcctgggcggcctggccctgagcctgggcctgctggtgtacagaagcctgcacttccccagctgcctgcccaccgtggccttcctgagcggcctggtgggcctgctgggctgcgtgcccggcctgttcgtgctgcagacccccgtgctgcccagcgacctgctgagctggagctgcgtgggcgccgagggcatcctggccctggtgagcttcacctgcgtgggctacgccgtgaccaaggcccaccccgccctggtgtgcgccgtgctgcacagcgaggtggtggtggccctgatcctgcagtactacatgctgcacgagaccgtggccctgagcgacatcatgggcgccggcgtggtgctgggcagcatcgccatcatcaccgccagaaacctgagctgcgagagaaccggcaaggtggaggagtag

SEQ ID NO: 230467 - DNA, 1017 bp, Artificial Sequence
  derived and/or modified sequence
atggcgggctctcacccctactttaacctgcccgactctactcacccttctcctccctccgcgccaccctctctgcgatggcatcagcgttgtcaacccagcggcgctaccaatgggcttttggttgcactattgggaggtgggttgcctgcgggcttcgtcggcccgctgtcacgcatggcctatcagggaagcaatttaccttcacttgaactgctgatctgtagatgtctgtttcacctccctatcgcccttctactgaaactgcgtggcgaccccttgctgggcccacctgatattagaggctgggcatgtttctgtgcacttctcaacgtgctgagcattggctgtgcgtattctgccgtgcaggtggtgccagccggaaatgccgcaacagtcagaaaggggtcatccacagtatgttcagcggttctgactttatgcctggaatcccaggggttgggcgggtatgagtggtgcggcctgttggggtcgattctgggcctgatcataatactgggtcccggactgtggaccctacaagaaggcacaactggggtgtataccaccctggggtacgtccaggccttcctcggaggactggccctgtcattggggttactggtttatcgctcgttacactttccatcatgcctcccgactgttgccttcctgtctggcctggttggtctgctggggtgtgtaccagggttattcgtcttacaaacccctgtgctcccaagtgacctgctgagctggtcctgtgtcggagccgagggtatcctcgctctagtgtccttcacttgtgtgggctacgcggtaactaaggctcaccccgcactggtatgcgctgtactccattccgaggtggttgttgcactgattttgcagtactatatgcttcacgagacagtggcactgtcagatatcatgggagcaggagttgtgcttggctccatcgcaatcataacagcgagaaacctgtcatgtgagcgcacaggaaaagtcgaagaatag

SEQ ID NO: 230468 - DNA, 1017 bp, Artificial Sequence
  derived and/or modified sequence
atggccggcagccacccctacttcaacctgcctgacagcacccaccccagcccccccagcgccccacccagcctgcgctggcaccagcgctgccagcccagcggggccaccaacggcctgctggtggccctgctgggcggcggcctgcctgctggctttgtgggccccctgagcaggatggcctaccagggcagcaacctgcccagcctggagctgctgatctgccgctgcctcttccacctgcccatcgccctgctgctgaagctgcggggggaccccctgctgggccccccagacatccggggctgggcctgcttctgtgccctgctgaatgtgctgagcatcggctgtgcctacagcgctgtgcaggtggtgcctgctggaaatgctgccaccgtgaggaagggcagcagcacagtgtgcagcgctgtgctgaccctgtgcctggagagccagggcctgggcggctatgagtggtgtggcctgctgggcagcatcctgggcctcatcatcatcctgggccctggcctgtggaccctgcaggagggcaccactggagtgtacaccaccctgggctacgtgcaggccttcctgggcggcctggccctgagcctgggcctgctggtgtaccgcagcctgcacttccccagctgcctgcccaccgtggccttcctgagcggcctggtgggcctgctgggctgtgtgcccggcctgtttgtgctgcagacccctgtgctgcccagcgacctgctgtcctggagctgtgtgggcgctgagggcatcctggccctggtgtccttcacctgtgtgggctatgctgtgaccaaggcccacccagccctggtgtgtgctgtgctgcacagcgaggtggtggtggccctgatcctgcagtactacatgctgcacgagaccgtggccctgagtgacatcatgggcgccggcgtggtgctgggcagcatcgccatcatcacagccaggaacctgagctgtgagaggacaggcaaggtggaggagtag

SEQ ID NO: 230469 - DNA, 1017 bp, Artificial Sequence
  derived and/or modified sequence
atggccggcagccacccctacttcaacctgcccgacagcacccacccgagtcccccaagcgccccaccaagcctccgctggcaccaaagatgtcagccctcaggtgcgaccaacggacttctcgtggctttgttgggcggcggtctgccggccggatttgtaggaccgctatctcgcatggcgtaccaggggtccaatctgccaagccttgagctccttatttgccgatgtctgttccacctccccattgccctcctgctcaaacttaggggcgatccacttctgggacctcccgacatccggggctgggcatgcttctgtgctttgctgaacgtcctgagtattggttgcgcgtatagcgccgtgcaggtggtgccggcaggcaatgctgctacggtgcggaagggaagctccacggtgtgctcagccgtactgactctgtgcttggaatcacaggggctgggtggctacgagtggtgcggcctgttgggatccatacttgggttgattattattctgggcccgggactgtggacactgcaggaggggacaaccggggtgtataccacattggggtacgtgcaagccttcctgggtggtcttgccctttccctcgggttgcttgtttacagatccctgcactttcccagttgcctcccaacagttgccttcctgtctggtcttgttggcctcctggggtgcgtgccaggtctcttcgtccttcagaccccagtgctgccctctgacctgctgtcttggagctgtgttggcgctgaaggtatattggcccttgtttctttcacatgtgtggggtatgccgtgactaaagctcatccagccctagtctgcgccgttctgcactccgaagtcgtggtcgcgttgatcctgcagtactacatgctgcatgagacagtggcgctgtcagacatcatgggcgctggcgtcgtgctcggcagcattgccatcatcacggcacgcaacctcagctgcgagcggacaggaaaggtggaagagtag

SEQ ID NO: 230470 - DNA, 1017 bp, Artificial Sequence
  derived and/or modified sequence
atggctggttcccatccgtattttaacctcccggatagcactcatccgagtccacctagtgcgcctccctccctgcgttggcatcagaggtgccagcctagtggggctaccaacggcctgctagtcgccctcctcggtgggggactgcccgcagggtttgttggaccactgagtcggatggcataccagggctccaacctgccctccttagaactgctcatctgcaggtgcctcttccatctccccattgccctcctgctcaagttacgaggggacccactgttgggccctccggacattcgcggatgggcctgtttctgcgccttgctaaatgtcctcagcataggctgcgcttactcagccgtgcaggtagttccggcaggaaatgctgccaccgttagaaagggtagctccactgtgtgctcagccgttctcaccctatgcctggaaagccaggggttggggggatatgaatggtgcggccttctgggtagcatactggggctgattattattttgggcccaggactctggacactccaggagggcactaccggggtttatactactttagggtacgtccaagcatttctcgggggattagctctttctctgggactcctggtttaccggtcactgcacttcccttcatgtctccccaccgtcgctttcttgtcaggactggtgggccttctggggtgtgtacctggattattcgtgctgcagacacctgtgctcccttcagatttgctgtcttggtcctgcgttggagccgagggaatactggctcttgtgtctttcacctgtgttggatacgcggttactaaggcccacccagccctggtttgcgccgttctccatagcgaggttgttgtggccctgatcctccagtattacatgctgcacgaaactgtcgccctcagtgacatcatgggagctggcgttgtgcttggaagcatcgcgattattactgctcggaacttaagttgcgagagaaccggaaaagttgaagagtag

SEQ ID NO: 230471 - DNA, 1321 bp, Artificial Sequence
  derived and/or modified sequence
gcgagaaacacccaagaatgatcaattaaaaaaaaaaaaaagaaagaaagaaagaaagaaaagaagcagagttggactcagcgggaaaataggcgtgctaccacctcaggagagttccagggaagaaccccacccgcactccaatgaggtcacaatggctggagctctgaggggcccaggctccctgagccaggaggagaggagaaagtccaaggaaagatggctggcagtcacccctacttcaacctgcctgactccacacacccatcgccgccctccgctccacccagcctccgctggcaccagcgctgccagccctctggtgccaccaatggcctgctggtggccctgctgggtgggggcctgcctgctggcttcgtgggccccctttctcgtatggcttaccagggttccaacctgccctcgctggagctgctcatctgtcgatgcctcttccacctccctattgccctgctacttaaactgcgtggcgacccccttctgggacctcctgacatccgaggctgggcctgcttctgtgccctgctcaacgtcctcagcattggatgtgcctacagtgcagttcaggtggtgcccgctggcaacgctgccactgttcgcaaaggttcttccaccgtatgctccgctgtcctcaccctctgccttgagagccagggtctcggtggctacgagtggtgtggactgttgggcagcatcctaggactaatcatcattctgggacctggactctggacactacaggaggggaccacaggtgtctacaccaccctgggctatgtgcaggctttcctgggaggcctggcgctgtccctggggcttctggtctatcgttctctgcactttccctcctgcctcccaacagtggccttcctatctggcttggtggggctgctgggctgtgtgccaggcctctttgtgctgcagacccccgtgttgcccagtgacctcctgagttggagttgtgtgggggcagaggggatcctcgccttggtctccttcacatgtgtgggctatgcggtcaccaaggcccaccctgccctggtgtgcgctgtcctgcattccgaggtggttgtggcccttatactgcagtattatatgctccatgagactgtggcactttctgacatcatgggggcaggggttgtgctgggcagcattgccatcattacagcccggaacctcagctgtgagaggacagggaaggtggaggagtgagatagaacttgggagcccgggggttgggagggacagggataaataaagacaaagactgaagacaaaaaaaaaataaaagaaaaaa

SEQ ID NO: 230472 - DNA, 534 bp, Artificial Sequence
  derived and/or modified sequence
atgggctgctgcggctgcagccggggctgcggcagcggctgcggcggctgtggctcttcctgcggcggctgcggatccgggtgcggtgggtgtggaagcgggaggggcggttgcggatcaggatgcggaggatgcagttcttcctgcggggggtgcggcagtaggtgctatgtgcctgtgtgctgttgtaaacctgtttgcagttgggtgcccgcttgtagctgtacgtcttgtggctcatgcgggggctctaagggtgggtgcggctcatgtgggggatcaaagggcggctgcgggagctgcggcggcagcaaggggggctgcgggtcatgcggttgctcgcagtcctcatgttgcaaaccttgctgttgcagtagcgggtgcggcagtagttgttgtcagtcgtcatgttgtaagccttgctgctgccagtcaagctgttgtgtgccagtatgctgccagagctcttgctgcaaaccttgctgttgccaatcaaactgctgcgtcccagtgtgttgccaatgcaagatatag

SEQ ID NO: 230473 - protein, 322 aa, Artificial Sequence
  derived and/or modified sequence
MDSTIPVLGTELTPINGREETPCYKQTLSFTGLTCIVSLVALTGNAVVLWLLGCRMRRNAVSIYILNLVAADFLFLSGHIICSPLRLINIRHPISKILSPVMTFPYFIGLSMLSAISTERCLSILWPIWYHCRRPRYLSSVMCVLLWALSLLRSILEWMFCDFLFSGANSVWCETSDFITIAWLVFLCVVLCGSSLVLLVRILCGSRKMPLTRLYVTILLTVLVFLLCGLPFGIQWALFSRIHLDWKVLFCHVHLVSIFLSALNSSANPIIYFFVGSFRQRQNRQNLKLVLQRALQDTPEVDEGGGWLPQETLELSGSRLEQ

SEQ ID NO: 230474 - protein, 246 aa, Artificial Sequence
  derived and/or modified sequence
MDSTIPVLGTELTPINGREETPCYKQTLSFTGLTCIVSLVALTGNAVVLWLLGCRMRRNAVSIYILNLVAADFLFLSGHIICSPLRLINIRHPISKILSPVMTFPYFIGLSMLSAISTERCLSILWPIWYHCRRPRYLSSVMCVLLWALSLLRSILEWMFCDFLFSGANSVWCETSDFITIAWLVFLCVVLCGSSLVLLVRILCGSRKMPLTRLYVTILLTVLVFLLCGLPFGIQWALFSRIHLDW

SEQ ID NO: 230475 - DNA, 969 bp, Artificial Sequence
  derived and/or modified sequence
atggacagcaccatcccagtgctgggcacagagctgacgcccatcaacggacgggaggagacaccatgttacaagcagacgctatcatttaccgggttgacttgcatcgtaagtcttgtcgccctgaccggcaatgccgtggtgctgtggctgttggggtgcaggatgcggaggaacgcagtaagcatctacattcttaacctcgtcgcggccgacttcttatttttgagtggacatattatttgtagccccctgagattgatcaacatccgacatcctatctccaagattctgtctcccgtaatgacatttccatacttcatagggctttcgatgctgtccgccattagcacagagcgctgtttgtcgattttgtggcccatatggtaccattgcagacggccgcgatatctgtcctccgtaatgtgcgttctgctgtgggccctgtctctgctaagaagtatcttggagtggatgttctgcgattttctcttctcaggagccaatagcgtgtggtgcgagacatctgacttcataaccatagcatggctcgtgtttctgtgcgtggtcttgtgcggttcttctcttgtgcttctggttagaattctgtgtggatcacgcaaaatgccactcacaagactttacgtcaccattctactgacagtgcttgtctttttattatgtggactcccctttggtatccaatgggctctgttttctcggatccacttggattggaaggtcttgttttgccacgtccacctggtcagcatctttttgtctgcactgaactccagtgctaatccaattatatacttctttgtgggttcattcagacaacgtcagaaccgacagaatcttaagcttgtgttgcagagagccctccaggacaccccggaagtggacgagggcggggggtggctgccacaggaaactttagagctgagcggatcaaggttagaacagtag

SEQ ID NO: 230476 - DNA, 741 bp, Artificial Sequence
  derived and/or modified sequence
atggactcaacaatcccggtgttgggcacggagctgactccaatcaatgggcgcgaggaaactccttgctataaacagaccctgtcctttacaggcctgacatgtatcgttagtttggtggctttgaccgggaatgctgtcgtgctgtggctgctcgggtgcaggatgcggcggaacgcggttagtatatacattctgaatctggtggcggcagacttcctctttttatctggtcatattatatgtagcccactgaggctgatcaacatcaggcaccccatatccaagattctgtcccccgtaatgaccttcccctatttcattggcctttccatgctgtctgccatctctacggagaggtgcttgtccattctctggccaatctggtatcattgcagaagaccccggtatctctcatctgtaatgtgcgtgttgttatgggcactgagccttctccggtccattcttgaatggatgttttgtgactttctattttcaggtgccaacagcgtttggtgcgaaacatccgattttatcactatcgcctggctcgtctttctgtgtgttgtgctttgcggttcatcactagtcttgctggttcgtattctctgcggaagtcgtaagatgccgctgactcggctgtatgttacaatcctacttaccgtgctggtattcctcctatgtggtctgccctttggtatccagtgggccttgttcagccgcatccatctcgactggtag

SEQ ID NO: 230477 - DNA, 969 bp, Artificial Sequence
  derived and/or modified sequence
atggacagcaccatccctgtgctgggcacagagctgacccccatcaatggccgggaggagaccccctgctacaagcagaccctgtccttcaccggcctgacctgcatcgtgtccctggtggccctgactggaaatgctgtggtgctgtggctgctgggctgcaggatgagaagaaatgctgtgtccatctacatcctgaacctggtggccgctgacttcctgttcctgagcggccacatcatctgcagccccctgcggctcatcaacatccgccaccccatcagcaagatcctgagccctgtgatgaccttcccctacttcatcggcctgtccatgctgagcgccatcagcacagagcgctgcctgagcatcctgtggcccatctggtaccactgcagaagaccccgctacctgagctctgtgatgtgtgtgctgctgtgggccctgagcctgctgcggagcatcctggagtggatgttctgtgacttcctgttcagcggggccaacagcgtgtggtgtgagaccagtgacttcatcaccatcgcctggctggtgttcctgtgtgtggtgctgtgtggcagcagcctggtgctgctggtgcgcatcctgtgtggcagcaggaagatgcccctgacccggctgtatgtgaccatcctgctgactgtgctggtgttcctgctgtgtggcctgcccttcggcatccagtgggccctcttcagccgcatccacctggactggaaggtgctcttctgccacgtgcacctggtgtccatcttcctgagcgccctgaacagcagcgccaaccccatcatctacttctttgtgggcagcttccggcagaggcagaaccggcagaacctgaagctggtgctgcagagggccctgcaggacaccccagaggtggatgagggcggcggctggctgccccaggagaccctggagctgagcggcagccggctggagcagtag

SEQ ID NO: 230478 - DNA, 741 bp, Artificial Sequence
  derived and/or modified sequence
atggacagcaccatccctgtgctgggcacagagctgacccccatcaatggccgggaggagaccccctgctacaagcagaccctgtccttcaccggcctgacctgcatcgtgtccctggtggccctgactggaaatgctgtggtgctgtggctgctgggctgcaggatgagaagaaatgctgtgtccatctacatcctgaacctggtggccgctgacttcctgttcctgagcggccacatcatctgcagccccctgcggctcatcaacatccgccaccccatcagcaagatcctgagccctgtgatgaccttcccctacttcatcggcctgtccatgctgagcgccatcagcacagagcgctgcctgagcatcctgtggcccatctggtaccactgcagaagaccccgctacctgagctctgtgatgtgtgtgctgctgtgggccctgagcctgctgcggagcatcctggagtggatgttctgtgacttcctgttcagcggggccaacagcgtgtggtgtgagaccagtgacttcatcaccatcgcctggctggtgttcctgtgtgtggtgctgtgtggcagcagcctggtgctgctggtgcgcatcctgtgtggcagcaggaagatgcccctgacccggctgtatgtgaccatcctgctgactgtgctggtgttcctgctgtgtggcctgcccttcggcatccagtgggccctcttcagccgcatccacctggactggtag

SEQ ID NO: 230479 - DNA, 1639 bp, Artificial Sequence
  derived and/or modified sequence
gcccagtctggaaagtgaggagcgtctttgcccggccgccatcccatctaggaagtgaggagcgcctcttcccggccgccatcccatctaggaagtgaggagcgtctctgcccggccgcccatcgtctgagatgtggggagtgcctttgccccgccgccccgtctgggatgtgaggagcgcctctgcccggtcgcgaccccgtctgggagctcctgtaggcatctcctgaattaagcaacacagaaaagtcctctgaagtcactgaatcccataaaggctctctacctttagcacaagggaggtcttcaccactggacaaagaaggaacgataaggggtcatcagactggggtttctgagcatggattcaaccatcccagtcttgggtacagaactgacaccaatcaacggacgtgaggagactccttgctacaagcagaccctgagcttcacggggctgacgtgcatcgtttcccttgtcgcgctgacaggaaacgcggttgtgctctggctcctgggctgccgcatgcgcaggaacgctgtctccatctacatcctcaacctggtcgcggccgacttcctcttccttagcggccacattatatgttcgccgttacgcctcatcaatatccgccatcccatctccaaaatcctcagtcctgtgatgacctttccctactttataggcctaagcatgctgagcgccatcagcaccgagcgctgcctgtccatcctgtggcccatctggtaccactgccgccgccccagatacctgtcatcagtcatgtgtgtcctgctctgggccctgtccctgctgcggagtatcctggagtggatgttctgtgacttcctgtttagtggtgctaattctgtttggtgtgaaacgtcagatttcattacaatcgcgtggctggtttttttatgtgtggttctctgtgggtccagcctggtcctgctggtcaggattctctgtggatcccggaagatgccgctgaccaggctgtacgtgaccatcctcctcacagtgctggtcttcctcctctgtggcctgccctttggcattcagtgggccctgttttccaggatccacctggattggaaagtcttattttgtcatgtgcatctagtttccattttcctgtccgctcttaacagcagtgccaaccccatcatttacttcttcgtgggctcctttaggcagcgtcaaaataggcagaacctgaagctggttctccagagggctctgcaggacacgcctgaggtggatgaaggtggagggtggcttcctcaggaaaccctggagctgtcgggaagcagattggagcagtgaggaagaacctctgccctgtcagacaggactttgagagcaatgctgccctgccacccttgacaattatatgcatttttcttagccttctgcctcagaaatgtctcagtggtccctcaaggtcttcgaatagatgtttatctaacctgacagttgcagttttcacccatggaaagcattagtctgacagtacaatgtttggattctccttgatattaccaatacattttccctgttatcttgcactgaatctttcctactgaacactttttctgcacttttcattgtaataaaaggagttgctgtccacaa

SEQ ID NO: 230480 - DNA, 991 bp, Artificial Sequence
  derived and/or modified sequence
aaatacctctggcctctgatttgcccatagtcctcatacaggaaataacaagactgtccagcatcttcgtaagcctggattgctcaccagctttcatttcagctcctgtaggcatctcctgaattaagcaacacagaaaagtcctctgaagtcactgaatcccataaaggctctctacctttagcacaagggaggtcttcaccactggacaaagaaggaacgataaggggtcatcagactggggtttctgagcatggattcaaccatcccagtcttgggtacagaactgacaccaatcaacggacgtgaggagactccttgctacaagcagaccctgagcttcacggggctgacgtgcatcgtttcccttgtcgcgctgacaggaaacgcggttgtgctctggctcctgggctgccgcatgcgcaggaacgctgtctccatctacatcctcaacctggtcgcggccgacttcctcttccttagcggccacattatatgttcgccgttacgcctcatcaatatccgccatcccatctccaaaatcctcagtcctgtgatgacctttccctactttataggcctaagcatgctgagcgccatcagcaccgagcgctgcctgtccatcctgtggcccatctggtaccactgccgccgccccagatacctgtcatcagtcatgtgtgtcctgctctgggccctgtccctgctgcggagtatcctggagtggatgttctgtgacttcctgtttagtggtgctaattctgtttggtgtgaaacgtcagatttcattacaatcgcgtggctggtttttttatgtgtggttctctgtgggtccagcctggtcctgctggtcaggattctctgtggatcccggaagatgccgctgaccaggctgtacgtgaccatcctcctcacagtgctggtcttcctcctctgtggcctgccctttggcattcagtgggccctgttttccaggatccacctggattgg

SEQ ID NO: 230481 - DNA, 969 bp, Artificial Sequence
  derived and/or modified sequence
atggacagcaccatccccgtgctgggcaccgagctgacccccatcaacgggcgagaggagaccccctgttacaagcagaccctgagttttacgggccttacttgtatcgtgtcgctggtggccctgaccggtaacgccgtcgtgctgtggttgctgggttgcaggatgcgtaggaacgctgtgtccatatatattctgaacctggtggctgcagattttctgttcctaagcggacacataatttgctcaccacttcgtcttatcaatattcggcatcctatctcgaagattctgtcaccagtaatgacctttccttactttattggactgtccatgttgagcgccatttctacggagagatgcctatccattctgtggccaatctggtatcactgcaggcgtcctagatacctttcctcggtaatgtgcgttttgctgtgggcactgagcctgctccgaagtattctggaatggatgttctgtgactttctgtttagcggcgcgaattcagtatggtgcgagacctctgattttataactattgcctggctggtatttctgtgtgtggttctttgtgggtccagcctggttctgttggttcgcattctatgtggaagccgaaaaatgcccctcaccagactgtatgtgaccatcttgctcacagtgctggtgtttttattatgcgggcttccattcggtatccaatgggccctgttcagtcggatccacctggactggaaagtgctgttctgtcatgttcacctcgtctcaatctttctttccgctctcaatagcagtgccaaccctataatttattttttcgtgggtagctttagacagagacaaaaccgtcaaaatctgaagttagtactccagagagcattgcaagacacccccgaggtcgacgagggcggcggctggctcccacaagagactctggagctctccggaagtagactagaacagtag

SEQ ID NO: 230482 - DNA, 741 bp, Artificial Sequence
  derived and/or modified sequence
atggacagcaccatccccgtgctgggcaccgagctgacccccatcaatggccgcgaagaaactccctgttacaaacaaactctcagcttcaccgggcttacctgcatcgtgtctctggtcgcactgaccggcaatgctgtcgtcctgtggctgttaggctgccggatgcgccgtaacgccgtctcgatctacatattaaacctggtcgccgcagattttttgtttctgagcggtcacatcatatgtagccccctgcgcctgatcaacatccggcatcccatcagtaaaattctgtccccagtcatgaccttcccatatttcatcggcctctctatgctgtccgccataagtacagagaggtgtctaagcatcctgtggccgatctggtaccattgccgcagacccagatatctgtccagcgtgatgtgcgtgctgctgtgggccctgtccctcctgcgaagcattctggagtggatgttttgtgatttcctgttttccggcgctaatagtgtctggtgcgagactagtgatttcattactattgcttggctggtattcctttgcgttgtcctgtgtggctcaagcctcgtgctgctggtacggatactttgtggcagcagaaaaatgccactgaccagactgtatgttaccatcctgctgactgtgttggtattcctgctatgcggcttgccttttggtatccaatgggctctgttcagcaggatccacttagattggtag

SEQ ID NO: 230483 - DNA, 969 bp, Artificial Sequence
  derived and/or modified sequence
atggactcaaccatacctgtgctggggacggagctgacacccataaacgggcgagaggagacaccttgttacaaacagaccttatccttcacaggcttgacgtgtattgtgagcctggtggcactcactggaaatgcagtggtattgtggctgttagggtgccgaatgcgcagaaatgccgtcagcatctacatactgaacctggttgccgcagactttctctttctctctggccacatcatctgctcccctctgaggctcattaatataaggcatccgatcagtaagattttgagcccagtgatgacgttcccctacttcataggtctgtcaatgctctctgctatctcaactgagcgctgtttgagcatcctctggcccatctggtaccattgtagaagaccaaggtacctctcctccgtgatgtgcgtgctgctttgggccctgagtcttctgcggtccatcttggagtggatgttctgcgacttcctgttttcaggcgcaaattctgtttggtgcgaaacctctgacttcatcaccattgcttggctcgtgtttttgtgtgtggttctgtgtggttcctctctcgttcttctggtgcgtatactttgcggctcacgcaaaatgcccctgacgcggttgtatgttacaatcctgcttaccgtgctcgtgtttttactctgtggcctacccttcggtatccagtgggctctctttagtcgtatccacttagattggaaagtgctattctgccacgttcatctggtaagtatcttcttatcagccctgaacagctcagctaaccccattatctacttctttgttgggtcatttagacagcgtcagaaccgtcaaaacctcaaactggtcctgcagagagccctgcaggataccccagaggtggacgagggaggaggatggctgccgcaggaaacacttgagctgtcaggcagcaggttggaacagtag

SEQ ID NO: 230484 - DNA, 741 bp, Artificial Sequence
  derived and/or modified sequence
atggatagcacgatcccagttttgggaaccgagcttactcccatcaacggaagggaagagacaccttgctacaaacaaactctgtcatttacgggcctgacttgcatagtgtctcttgtggcactcaccgggaacgcagtggtgctttggctgcttgggtgtcgtatgcggagaaacgctgtctccatttatatcctgaatctcgtggcagctgatttcctgttcctctcaggtcacatcatctgctcaccgctccgtctgataaatatcaggcacccaatctcaaagattctttcacccgtgatgaccttcccttattttattggtctgtctatgttgagcgctatttctactgagagatgtctgtccattctgtggcctatatggtatcactgtcggaggccaagatatctgtcatctgtcatgtgcgtgctattatgggctctatctctgctccggagtattctagaatggatgttttgcgattttttgttctcaggtgccaatagcgtctggtgcgaaacatcagacttcataaccatagcgtggttagtttttctgtgtgtggtgctttgcggctcctcactggtattgttggtgcgaatactgtgtggcagtaggaaaatgccactgactagattgtacgtgaccatcctcctcaccgttttagtgtttctgctttgtgggcttccttttggcattcagtgggcccttttcagccgcatccacctggattggtag

SEQ ID NO: 230485 - DNA, 969 bp, Artificial Sequence
  derived and/or modified sequence
atggacagcaccatccccgtgctgggcaccgagctgacccccatcaacggcagagaggagaccccctgctacaagcagaccctgagcttcaccggcctgacctgcatcgtgagcctggtggccctgaccggcaacgccgtggtgctgtggctgctgggctgcagaatgagaagaaacgccgtgagcatctacatcctgaacctggtggccgccgacttcctgttcctgagcggccacatcatctgcagccccctgagactgatcaacatcagacaccccatcagcaagatcctgagccccgtgatgaccttcccctacttcatcggcctgagcatgctgagcgccatcagcaccgagagatgcctgagcatcctgtggcccatctggtaccactgcagaagacccagatacctgagcagcgtgatgtgcgtgctgctgtgggccctgagcctgctgagaagcatcctggagtggatgttctgcgacttcctgttcagcggcgccaacagcgtgtggtgcgagaccagcgacttcatcaccatcgcctggctggtgttcctgtgcgtggtgctgtgcggcagcagcctggtgctgctggtgagaatcctgtgcggcagcagaaagatgcccctgaccagactgtacgtgaccatcctgctgaccgtgctggtgttcctgctgtgcggcctgcccttcggcatccagtgggccctgttcagcagaatccacctggactggaaggtgctgttctgccacgtgcacctggtgagcatcttcctgagcgccctgaacagcagcgccaaccccatcatctacttcttcgtgggcagcttcagacagagacagaacagacagaacctgaagctggtgctgcagagagccctgcaggacacccccgaggtggacgagggcggcggctggctgccccaggagaccctggagctgagcggcagcagactggagcagtag

SEQ ID NO: 230486 - DNA, 741 bp, Artificial Sequence
  derived and/or modified sequence
atggacagcaccatccccgtgctgggcaccgagctgacccccatcaacggcagagaggagaccccctgctacaagcagaccctgagcttcaccggcctgacctgcatcgtgagcctggtggccctgaccggcaacgccgtggtgctgtggctgctgggctgcagaatgagaagaaacgccgtgagcatctacatcctgaacctggtggccgccgacttcctgttcctgagcggccacatcatctgcagccccctgagactgatcaacatcagacaccccatcagcaagatcctgagccccgtgatgaccttcccctacttcatcggcctgagcatgctgagcgccatcagcaccgagagatgcctgagcatcctgtggcccatctggtaccactgcagaagacccagatacctgagcagcgtgatgtgcgtgctgctgtgggccctgagcctgctgagaagcatcctggagtggatgttctgcgacttcctgttcagcggcgccaacagcgtgtggtgcgagaccagcgacttcatcaccatcgcctggctggtgttcctgtgcgtggtgctgtgcggcagcagcctggtgctgctggtgagaatcctgtgcggcagcagaaagatgcccctgaccagactgtacgtgaccatcctgctgaccgtgctggtgttcctgctgtgcggcctgcccttcggcatccagtgggccctgttcagcagaatccacctggactggtag

SEQ ID NO: 230487 - protein, 322 aa, Artificial Sequence
  derived and/or modified sequence
MDPTVPVFGTKLTPINGREETPCYNQTLSFTVLTCIISLVGLTGNAVVLWLLGYRMRRNAVSIYILNLAAADFLFLSFQIIRLPLRLINISHLIRKILVSVMTFPYFTGLSMLSAISTERCLSVLWPIWYRCRRPTHLSAVVCVLLWGLSLLFSMLEWRFCDFLFSGADSSWCETSDFIPVAWLIFLCVVLCVSSLVLLVRILCGSRKMPLTRLYVTILLTVLVFLLCGLPFGILGALIYRMHLNLEVLYCHVYLVCMSLSSLNSSANPIIYFFVGSFRQRQNRQNLKLVLQRALQDKPEVDKGEGQLPEESLELSGSRLGP

SEQ ID NO: 230488 - DNA, 969 bp, Artificial Sequence
  derived and/or modified sequence
atggaccccacagtgccggtttttggcaccaagctgacacctatcaatggaagagaggaaacgccatgctataaccagacactgtcctttaccgtcctgacgtgtattatcagccttgtgggcctcacaggcaacgcagtggtgctctggctgctgggttatcgtatgcgccgcaacgctgtgtcaatctacatcctgaatttggctgccgctgacttcctgtttctgtcattccagataataagactccctcttaggctgatcaatatctctcacttgatcaggaagatcttggtgtccgtgatgaccttcccatactttacagggctttccatgctgtccgccatttctacggaaagatgcctgagcgttttgtggccgatctggtacaggtgcagaaggcccacccatctctcagccgtggtgtgtgtgctgctctgggggctgtccctgttattcagcatgctggaatggagattttgcgactttctcttcagtggggctgatagtagctggtgtgagactagtgacttcatccccgttgcttggcttatattcctttgcgtagtgttatgcgtgagtagtctcgtgttgctcgtgcggatcctgtgcgggtcccggaagatgccccttacgagactttatgttaccatcctgttgaccgtactggtgttcctgctctgtggattgcccttcggcatattaggggcgctgatctatagaatgcatctcaaccttgaggttctgtactgtcacgtgtacctcgtttgtatgtctctgtcttctctcaattcatcagcgaacccaattatctatttctttgtgggatccttccgtcaaaggcaaaatagacagaatctgaaattggtgctccagcgtgccctccaggataaacctgaagtcgataaaggagagggtcagttgcctgaagagtcacttgaactgtccgggtctagacttggcccatag

SEQ ID NO: 230489 - DNA, 969 bp, Artificial Sequence
  derived and/or modified sequence
atggaccccaccgtgcctgtgtttggcaccaagctgacccccatcaatggccgggaggagaccccctgctacaaccagaccctgtccttcaccgtgctgacctgcatcatcagcctggtgggcctgactggaaatgctgtggtgctgtggctgctgggctacaggatgagaagaaatgctgtgtccatctacatcctgaacctggccgctgctgacttcctgttcctgtccttccagatcatccggctgcccctgcggctcatcaacatcagccacctgatcaggaagatcctggtgtctgtgatgaccttcccctacttcaccggcctgtccatgctgagcgccatcagcacagagcgctgcctgtctgtgctgtggcccatctggtaccgctgcagaagacccacccacctgtctgctgtggtgtgtgtgctgctgtggggcctgagcctgctcttctccatgctggagtggaggttctgtgacttcctgttcagcggggctgacagctcctggtgtgagaccagtgacttcatccctgtggcctggctgatcttcctgtgtgtggtgctgtgtgtgagcagcctggtgctgctggtgcgcatcctgtgtggcagcaggaagatgcccctgacccggctgtatgtgaccatcctgctgactgtgctggtgttcctgctgtgtggcctgcccttcggcatcctgggcgccctgatctacaggatgcacctgaacctggaggtgctgtactgccacgtgtacctggtgtgcatgagcctgagcagcctgaacagcagcgccaaccccatcatctacttctttgtgggcagcttccggcagaggcagaaccggcagaacctgaagctggtgctgcagagggccctgcaggacaagccagaggtggacaagggggagggccagctgcctgaggagagcctggagctgagcggcagccggctgggcccctag

SEQ ID NO: 230490 - DNA, 1444 bp, Artificial Sequence
  derived and/or modified sequence
cttcctgtccatggatgaccagtcctagtcacgagtgtgtcacaaccacctctttgtgtatctgaattcctccacctgaaagaaaatttcagacccaggatagattaatcatcgggtccaaagccctggccggatgagtgggggtgttttgatcctaatgttattcccatgtcagcacagaacttgtgtggcagtagagagatgtcaggcttcagagtcaacaagaactggatttcaaactggatttgaggacccccacctttggtaagtgacttattatctgcgagcctctgtttctctcttctttaaatgaggacagtaaatcccatacggcagggtggtggggagaatcagagatgatacagctggtgatcacatctggtttgtgttcccaggggcaccagactagggtttctgagcatggatccaaccgtcccagtcttcggtacaaaactgacaccaatcaacggacgtgaggagactccttgctacaatcagaccctgagcttcacggtgctgacgtgcatcatttcccttgtcggactgacaggaaacgcggttgtgctctggctcctgggctaccgcatgcgcaggaacgctgtctccatctacatcctcaacctggccgcagcagacttcctcttcctcagcttccagattatacgtttgccattacgcctcatcaatatcagccatctcatccgcaaaatcctcgtttctgtgatgacctttccctactttacaggcctgagtatgctgagcgccatcagcaccgagcgctgcctgtctgttctgtggcccatctggtaccgctgccgccgccccacacacctgtcagcggtcgtgtgtgtcctgctctggggcctgtccctgctgtttagtatgctggagtggaggttctgtgacttcctgtttagtggtgctgattctagttggtgtgaaacgtcagatttcatcccagtcgcgtggctgatttttttatgtgtggttctctgtgtttccagcctggtcctgctggtcaggatcctctgtggatcccggaagatgccgctgaccaggctgtacgtgaccatcctgctcacagtgctggtcttcctcctctgcggcctgcccttcggcattctgggggccctaatttacaggatgcacctgaatttggaagtcttatattgtcatgtttatctggtttgcatgtccctgtcctctctaaacagtagtgccaaccccatcatttacttcttcgtgggctcctttaggcagcgtcaaaataggcagaacctgaagctggttctccagagggctctgcaggacaagcctgaggtggataaaggtgaagggcagcttcctgaggaaagcctggagctgtcgggaagcagattggggccatgagggagagcctctgccctgtcagtcagacgggactttgagagcaacactgtcctgc

SEQ ID NO: 230491 - DNA, 969 bp, Artificial Sequence
  derived and/or modified sequence
atggaccccaccgtgcccgtgttcggcaccaagctgacccccatcaatggcagagaagagaccccatgttataaccagacactcagctttactgtgctgacatgcataatatcccttgtcggtcttactggaaacgcagtggtcttgtggctgttgggatacaggatgcgacggaacgcagttagcatttatatactgaatctggccgcggccgattttttattcctttcatttcaaattattcgactcccattgagactgatcaacatctctcacttgatacgcaaaatactggtttccgtaatgaccttcccctattttaccggcctgagtatgcttagcgccatttccacggaaagatgtctgtcggttctgtggcctatctggtatagatgtcggcggcctacacatctgagcgcggttgtgtgtgtactcctgtggggactgtccttattgttttctatgctcgagtggcgtttctgcgatttcctcttcagcggggccgatagctcctggtgtgagacttccgatttcatccctgtggcatggcttatattcctgtgcgtggtcctttgcgtgagcagtctcgtgttattggtgcggatcctctgcggctccagaaagatgccattaactagactatacgtcactatcctgcttaccgtgctcgtcttccttctctgcgggctaccctttggaatcctgggcgccctgatataccgcatgcatctgaacttggaagttttatattgtcacgtgtatctcgtctgcatgtccctcagcagcctgaatagttccgccaatcctattatctactttttcgtcgggtccttccggcagaggcagaatagacaaaaccttaagctggtgctgcagagagcccttcaggacaagccagaagtggataagggggaagggcagcttcccgaagagtcactggaactgagcggcagccgactggggccgtag

SEQ ID NO: 230492 - DNA, 969 bp, Artificial Sequence
  derived and/or modified sequence
atggatcctaccgtgccagtctttggtaccaagttaacacctattaacggccgagaagagactccatgctacaaccaaacattgtcttttaccgtgctcacgtgtattatctcgctggtgggactcaccggaaatgctgtggtgctttggcttctggggtaccgtatgcgaagaaatgccgtgagtatatacattctgaatttggctgccgctgactttctgttcctttctttccagataatccggcttcctctgagacttatcaatatctctcatctaatccgtaagattctcgtatcggtgatgacattcccttatttcaccgggctgtcaatgctgagtgccatcagcaccgagcggtgtctctcagtgctctggcccatatggtataggtgtcgtagaccaacccacctgtcggctgtcgtgtgtgtgctgttgtggggcctgtctctgctattttcaatgttagaatggcggttttgcgactttctgttctctggggcagattctagctggtgcgagacctccgactttatcccagtcgcctggctcatattcctgtgcgtggtgttatgtgtgagttccctcgtcctcctggtaagaattctgtgcggtagccggaagatgccactgacacgtctgtacgtgaccatcctcctgacggtacttgttttccttctgtgtggactgcctttcggcattcttggagcccttatttaccggatgcacctgaacctcgaagtgctgtactgtcatgtgtatctcgtctgcatgagcctgtcctctctgaattcgtctgccaaccccatcatctactttttcgtgggttcttttcggcagagacaaaacaggcaaaatcttaaactggtcctgcaacgcgcactgcaggacaagccagaagtcgataagggcgaggggcagctcccagaagagtcactagagctctcaggaagcaggctggggccatag

SEQ ID NO: 230493 - DNA, 969 bp, Artificial Sequence
  derived and/or modified sequence
atggaccccaccgtgcccgtgttcggcaccaagctgacccccatcaacggcagagaggagaccccctgctacaaccagaccctgagcttcaccgtgctgacctgcatcatcagcctggtgggcctgaccggcaacgccgtggtgctgtggctgctgggctacagaatgagaagaaacgccgtgagcatctacatcctgaacctggccgccgccgacttcctgttcctgagcttccagatcatcagactgcccctgagactgatcaacatcagccacctgatcagaaagatcctggtgagcgtgatgaccttcccctacttcaccggcctgagcatgctgagcgccatcagcaccgagagatgcctgagcgtgctgtggcccatctggtacagatgcagaagacccacccacctgagcgccgtggtgtgcgtgctgctgtggggcctgagcctgctgttcagcatgctggagtggagattctgcgacttcctgttcagcggcgccgacagcagctggtgcgagaccagcgacttcatccccgtggcctggctgatcttcctgtgcgtggtgctgtgcgtgagcagcctggtgctgctggtgagaatcctgtgcggcagcagaaagatgcccctgaccagactgtacgtgaccatcctgctgaccgtgctggtgttcctgctgtgcggcctgcccttcggcatcctgggcgccctgatctacagaatgcacctgaacctggaggtgctgtactgccacgtgtacctggtgtgcatgagcctgagcagcctgaacagcagcgccaaccccatcatctacttcttcgtgggcagcttcagacagagacagaacagacagaacctgaagctggtgctgcagagagccctgcaggacaagcccgaggtggacaagggcgagggccagctgcccgaggagagcctggagctgagcggcagcagactgggcccctag

SEQ ID NO: 230494 - protein, 80 aa, Artificial Sequence
  derived and/or modified sequence
MGVEIETISPGDGRTFPKKGQTCVVHYTGMLQNGKKFDSSRDRNKPFKFRIGKQEVIKGFEEGAAQLGPLSPLPICPHPC

SEQ ID NO: 230495 - DNA, 243 bp, Artificial Sequence
  derived and/or modified sequence
atgggcgttgagatagaaactatcagccccggcgacggccgcacttttcctaagaagggccaaacatgtgttgtacactacactggcatgttacagaatggcaaaaaatttgattcctcccgcgaccgtaacaagccattcaagttccggatcggcaagcaggaggtcatcaaaggctttgaggagggtgccgcgcagctggggccgctgtcccccttgcctatttgcccacacccctgttag

SEQ ID NO: 230496 - DNA, 243 bp, Artificial Sequence
  derived and/or modified sequence
atgggcgtggagattgagaccatcagccctggagatggccgcaccttccccaagaagggccagacctgtgtggtgcactacacaggcatgctgcagaatggcaagaagtttgacagcagccgggacaggaacaagcccttcaagttcagaattggcaagcaggaggtgatcaagggctttgaggagggcgccgcccagctgggccccctgagccccctgcccatctgcccccacccctgctag

SEQ ID NO: 230497 - DNA, 243 bp, Artificial Sequence
  derived and/or modified sequence
atgggcgtggagatcgagaccatcagccccggcgacggccggacctttcctaagaagggccagacatgcgtggtgcactataccggaatgctgcagaatgggaaaaaatttgacagcagccgggatcgtaacaaacccttcaaattccgcattggcaaacaggaggtcattaagggcttcgaggaaggcgcagcccagctaggaccattgtctcccctcccaatttgtccccacccatgctag

SEQ ID NO: 230498 - DNA, 243 bp, Artificial Sequence
  derived and/or modified sequence
atgggagtagagatagaaacaatatctccaggcgatggcaggacattccctaaaaagggacagacctgtgtggtgcactatactggcatgctgcagaatgggaagaagtttgattcttccagggaccgcaataagcctttcaagtttaggatcggtaagcaagaggttattaaagggttcgaagagggagcagctcaacttggaccactgtctccccttcccatctgcccacacccctgttag

SEQ ID NO: 230499 - DNA, 243 bp, Artificial Sequence
  derived and/or modified sequence
atgggcgtggagatcgagaccatcagccccggcgacggcagaaccttccccaagaagggccagacctgcgtggtgcactacaccggcatgctgcagaacggcaagaagttcgacagcagcagagacagaaacaagcccttcaagttcagaatcggcaagcaggaggtgatcaagggcttcgaggagggcgccgcccagctgggccccctgagccccctgcccatctgcccccacccctgctag

SEQ ID NO: 230500 - protein, 26 aa, Artificial Sequence
  derived and/or modified sequence
MLRGPGPGLLLLAVQCLGTAVPSTGA

SEQ ID NO: 230501 - DNA, 1974 bp, Artificial Sequence
  derived and/or modified sequence
atgctgagaggccccggccccggcctgctgctgctggccgtgcagtgcctgggcaccgccgtgcccagcaccggcgccagcaagagcaagagacaggcccagcagatggtgcagccccagagccccgtggccgtgagccagagcaagcccggctgctacgacaacggcaagcactaccagatcaaccagcagtgggagagaacctacctgggcaacgccctggtgtgcacctgctacggcggcagcagaggcttcaactgcgagagcaagcccgaggccgaggagacctgcttcgacaagtacaccggcaacacctacagagtgggcgacacctacgagagacccaaggacagcatgatctgggactgcacctgcatcggcgccggcagaggcagaatcagctgcaccatcgccaacagatgccacgagggcggccagagctacaagatcggcgacacctggagaagaccccacgagaccggcggctacatgctggagtgcgtgtgcctgggcaacggcaagggcgagtggacctgcaagcccatcgccgagaagtgcttcgaccacgccgccggcaccagctacgtggtgggcgagacctgggagaagccctaccagggctggatgatggtggactgcacctgcctgggcgagggcagcggcagaatcacctgcaccagcagaaacagatgcaacgaccaggacaccagaaccagctacagaatcggcgacacctggagcaagaaggacaacagaggcaacctgctgcagtgcatctgcaccggcaacggcagaggcgagtggaagtgcgagagacacaccagcgtgcagaccaccagcagcggcagcggccccttcaccgacgtgagagccgccgtgtaccagccccagccccacccccagccccccccctacggccactgcgtgaccgacagcggcgtggtgtacagcgtgggcatgcagtggctgaagacccagggcaacaagcagatgctgtgcacctgcctgggcaacggcgtgagctgccaggagaccgccgtgacccagacctacggcggcaacagcaacggcgagccctgcgtgctgcccttcacctacaacggcagaaccttctacagctgcaccaccgagggcagacaggacggccacctgtggtgcagcaccaccagcaactacgagcaggaccagaagtacagcttctgcaccgaccacaccgtgctggtgcagaccagaggcggcaacagcaacggcgccctgtgccacttccccttcctgtacaacaaccacaactacaccgactgcaccagcgagggcagaagagacaacatgaagtggtgcggcaccacccagaactacgacgccgaccagaagttcggcttctgccccatggccgcccacgaggagatctgcaccaccaacgagggcgtgatgtacagaatcggcgaccagtgggacaagcagcacgacatgggccacatgatgagatgcacctgcgtgggcaacggcagaggcgagtggacctgcatcgcctacagccagctgagagaccagtgcatcgtggacgacatcacctacaacgtgaacgacaccttccacaagagacacgaggagggccacatgctgaactgcacctgcttcggccagggcagaggcagatggaagtgcgaccccgtggaccagtgccaggacagcgagaccggcaccttctaccagatcggcgacagctgggagaagtacgtgcacggcgtgagataccagtgctactgctacggcagaggcatcggcgagtggcactgccagcccctgcagacctaccccagcagcagcggccccgtggaggtgttcatcaccgagacccccagccagcccaacagccaccccatccagtggaacgccccccagcccagccacatcagcaagtacatcctgagatggagacccgtgagcatcccccccagaaacctgggctactag

SEQ ID NO: 230502 - DNA, 1974 bp, Artificial Sequence
  derived and/or modified sequence
atgctgcgcggccctggccctgggcttctgctgctggctgtgcagtgtctggggacggccgtaccctcaacaggagcttccaagtcgaaaaggcaggcccagcagatggtgcagccacagtccccggtggctgtgtcccagtcaaagccaggctgttatgacaacggaaaacactatcagattaatcagcagtgggaacgaacttatctgggcaacgcacttgtatgcacctgttacggcgggtcacgcggcttcaactgtgaatcaaaaccggaagccgaagaaacatgcttcgacaagtataccgggaacacctacagggtgggagatacatacgagcgaccgaaggactctatgatctgggattgtacatgcattggggccggccgtgggcggatttcctgcaccatcgcaaaccggtgccatgagggtggtcagtcctataaaatcggggatacatggagacggccacatgagacaggcggctacatgttagagtgtgtgtgcctaggaaatgggaagggagagtggacctgtaagccgatcgctgaaaaatgcttcgaccatgcggccgggacctcatatgtggttggcgagacctgggagaagccttaccagggctggatgatggtcgactgtacatgcttgggcgaggggtcggggagaatcacctgtacaagccgcaaccgctgtaatgaccaggatacccggacatcttatcggattggagatacgtggtccaagaaagacaatagaggtaatctccttcagtgcatctgtacaggcaacgggcggggagagtggaaatgcgaacgtcatacgtcggtgcagactacttcatccggcagtggccccttcactgacgttagagctgccgtttaccagccgcagccgcacccacagcctcctccctatgggcactgcgttacagacagtggcgtagtgtactctgtcggtatgcaatggctgaagactcagggcaacaaacaaatgctgtgtacttgcttgggaaatggagtgagctgccaggagacagctgtcacacaaacgtacgggggcaactcgaatggggaaccttgtgttcttccattcacctacaacgggcgcaccttttacagctgcacaacagaagggcggcaggacggacacttatggtgtagtaccacttctaactacgagcaagaccagaaatactcattttgcacagaccataccgttctggtccagacccggggcggaaattccaatggggcattatgtcattttccattcctctataacaatcataactacaccgattgcacaagtgaggggcgccgcgacaacatgaagtggtgcggcaccacacagaactatgacgctgatcaaaaattcggattctgcccaatggctgctcacgaagagatctgtactaccaacgaaggggtaatgtaccgcataggggatcagtgggacaagcaacatgacatgggtcatatgatgcgctgtacctgtgtaggtaacggaagaggcgagtggacctgcattgcctactctcaactgagggatcagtgtatcgtggacgacatcacctacaacgttaatgatacctttcataagaggcatgaggaaggtcacatgctcaattgcacttgttttggtcaggggcgcgggaggtggaaatgcgacccagtggatcagtgtcaggatagcgagactgggaccttttatcagatcggagactcttgggagaaatatgtacatggagtgcgataccaatgttattgctatggccgcggaatcggtgagtggcactgccagccactgcagacctacccatcaagcagtgggcccgtggaagtgtttattaccgagacccctagtcagccgaatagtcatcccatacaatggaatgccccccagccatcccatatctcaaagtacatactgcggtggcgaccagtctccatcccccccagaaatctgggatattag

SEQ ID NO: 230503 - DNA, 2388 bp, Artificial Sequence
  derived and/or modified sequence
cggacgcccgcgccggctgtgctgcacagggggaggagagggaaccccaggcgcgagcgggaagaggggacctgcagccacaacttctctggtcctctgcatcccttctgtccctccacccgtccccttccccaccctctggcccccaccttcttggaggcgacaacccccgggaggcattagaagggatttttcccgcaggttgcgaagggaagcaaacttggtggcaacttgcctcccggtgcgggcgtctctcccccaccgtctcaacatgcttaggggtccggggcccgggctgctgctgctggccgtccagtgcctggggacagcggtgccctccacgggagcctcgaagagcaagaggcaggctcagcaaatggttcagccccagtccccggtggctgtcagtcaaagcaagcccggttgttatgacaatggaaaacactatcagataaatcaacagtgggagcggacctacctaggcaatgcgttggtttgtacttgttatggaggaagccgaggttttaactgcgagagtaaacctgaagctgaagagacttgctttgacaagtacactgggaacacttaccgagtgggtgacacttatgagcgtcctaaagactccatgatctgggactgtacctgcatcggggctgggcgagggagaataagctgtaccatcgcaaaccgctgccatgaagggggtcagtcctacaagattggtgacacctggaggagaccacatgagactggtggttacatgttagagtgtgtgtgtcttggtaatggaaaaggagaatggacctgcaagcccatagctgagaagtgttttgatcatgctgctgggacttcctatgtggtcggagaaacgtgggagaagccctaccaaggctggatgatggtagattgtacttgcctgggagaaggcagcggacgcatcacttgcacttctagaaatagatgcaacgatcaggacacaaggacatcctatagaattggagacacctggagcaagaaggataatcgaggaaacctgctccagtgcatctgcacaggcaacggccgaggagagtggaagtgtgagaggcacacctctgtgcagaccacatcgagcggatctggccccttcaccgatgttcgtgcagctgtttaccaaccgcagcctcacccccagcctcctccctatggccactgtgtcacagacagtggtgtggtctactctgtggggatgcagtggctgaagacacaaggaaataagcaaatgctttgcacgtgcctgggcaacggagtcagctgccaagagacagctgtaacccagacttacggtggcaactcaaatggagagccatgtgtcttaccattcacctacaatggcaggacgttctactcctgcaccacagaagggcgacaggacggacatctttggtgcagcacaacttcgaattatgagcaggaccagaaatactctttctgcacagaccacactgttttggttcagactcgaggaggaaattccaatggtgccttgtgccacttccccttcctatacaacaaccacaattacactgattgcacttctgagggcagaagagacaacatgaagtggtgtgggaccacacagaactatgatgccgaccagaagtttgggttctgccccatggctgcccacgaggaaatctgcacaaccaatgaaggggtcatgtaccgcattggagatcagtgggataagcagcatgacatgggtcacatgatgaggtgcacgtgtgttgggaatggtcgtggggaatggacatgcattgcctactcgcagcttcgagatcagtgcattgttgatgacatcacttacaatgtgaacgacacattccacaagcgtcatgaagaggggcacatgctgaactgtacatgcttcggtcagggtcggggcaggtggaagtgtgatcccgtcgaccaatgccaggattcagagactgggacgttttatcaaattggagattcatgggagaagtatgtgcatggtgtcagataccagtgctactgctatggccgtggcattggggagtggcattgccaacctttacagacctatccaagctcaagtggtcctgtcgaagtatttatcactgagactccgagtcagcccaactcccaccccatccagtggaatgcaccacagccatctcacatttccaagtacattctcaggtggagacctgtgagtatcccacccagaaaccttggatactgagtctcctaatcttatcaattctgatggtttctttttttcccagcttttgagccaacaactctgattaactattcctatagcatttactatatttgtttagtgaacaaacaatatgtggtcaattaaattgacttgtagactga

SEQ ID NO: 230504 - DNA, 1974 bp, Artificial Sequence
  derived and/or modified sequence
atgctgcggggccctggccctggcctgctgctgctggccgtgcagtgcctgggcacagctgtgcccagcactggagccagcaagagcaagaggcaggcccagcagatggtgcagccccagagccctgtggccgtgtcccagagcaagccaggctgctatgacaatggcaagcactaccagatcaaccagcagtgggagaggacctacctgggcaatgccctggtgtgcacctgctatggaggcagccggggcttcaactgtgagagcaagccagaggccgaggagacctgctttgacaagtacacaggcaacacctacagagtgggggacacctatgaaagacccaaggacagcatgatctgggactgcacctgcatcggggccggccggggccgcatcagctgcaccatcgccaaccgctgccacgagggcggccagagctacaagatcggggacacctggaggcggccccatgagaccggcggctacatgctggagtgtgtgtgcctgggcaatggcaagggggagtggacctgcaagcccatcgccgagaagtgctttgaccacgccgccggcaccagctatgtggtgggggagacctgggagaagccctaccagggctggatgatggtggactgcacctgcctgggggagggcagcggccgcatcacctgcaccagcaggaaccgctgcaatgaccaggacaccaggaccagctaccgcatcggggacacctggagcaagaaggacaacagaggcaacctgctgcagtgcatctgcacaggaaatggccgcggggagtggaagtgtgagcggcacacctctgtgcagaccaccagcagcggcagcggccccttcacagatgtgcgggctgctgtgtaccagccccagccccacccccagcccccaccctacggccactgtgtgacagacagcggcgtggtgtacagcgtgggcatgcagtggctgaagacccagggcaacaagcagatgctgtgcacctgcctgggcaatggagtgtcctgccaggagacagctgtgacccagacctatggaggcaacagcaatggagagccctgtgtgctgcccttcacctacaatggaagaaccttctacagctgcaccacagagggccggcaggacggccacctgtggtgcagcaccaccagcaactatgagcaggaccagaagtacagcttctgcacagaccacacagtgctggtgcagacccggggcggcaacagcaatggagccctgtgccacttccccttcctgtacaacaaccacaactacacagactgcaccagcgagggcagaagagacaacatgaagtggtgtggcaccacccagaactatgatgctgaccagaagtttggcttctgccccatggccgcccacgaggagatctgcaccaccaatgaaggagtgatgtaccgcatcggggaccagtgggacaagcagcacgacatgggccacatgatgcgctgcacctgtgtgggcaatggccgcggggagtggacctgcatcgcctacagccagctgcgggaccagtgcatcgtggatgacatcacctacaacgtgaatgacaccttccacaagagacatgaggagggccacatgctgaactgcacctgcttcggccagggccggggccgctggaagtgtgaccctgtggaccagtgccaggacagcgagaccggcaccttctaccagatcggggacagctgggagaagtatgtgcatggagtgcgctaccagtgctactgctacggccggggcatcggggagtggcactgccagcccctgcagacctaccccagcagcagcggccctgtggaggtgttcatcacagagacccccagccagcccaacagccaccccatccagtggaatgccccccagcccagccacatcagcaagtacatcctgcgctggaggcctgtgtccatccccccaagaaacctgggctactag

SEQ ID NO: 230505 - DNA, 1974 bp, Artificial Sequence
  derived and/or modified sequence
atgctgcggggccccggccccggcctgctgctgctggccgtgcagtgtctcggtactgctgttcccagcaccggcgctagcaagtcaaagaggcaagcccaacagatggttcaaccacagagtcccgtggccgtgtcccagtccaagccagggtgctatgacaacggcaaacactatcagatcaaccaacagtgggagcggacctacttggggaatgccctagtgtgcacatgctacggcggctccagagggtttaactgcgagagtaagccagaagccgaggagacatgcttcgataagtacaccggcaatacttatcgggtcggagatacatatgagcggccgaaggactccatgatctgggactgtacgtgcatcggcgcagggcggggcagaataagttgcactattgccaatagatgccacgagggcggtcaatcctataagatcggagacacctggcggaggccccacgagacaggaggctatatgttagagtgtgtgtgtctggggaacggaaaaggagaatggacatgtaagccaatcgcagaaaaatgtttcgaccatgccgcaggaacttcgtacgttgttggcgaaacatgggaaaagccctaccaggggtggatgatggtggattgcacatgtttaggtgaaggcagcggccgaattacgtgtactagcagaaataggtgcaacgaccaggatacgcgcactagttaccgcataggagacacatggagtaaaaaagataatagagggaacctgttacagtgtatatgcacaggaaacggacgaggcgagtggaaatgcgaaaggcacacttcagtgcagaccaccagctccggcagcgggcccttcacagacgtccgcgctgccgtgtatcagccccagcctcatccacagccgccaccttatgggcactgtgttactgatagcggcgtggtgtattctgttggcatgcaatggctcaagacacagggaaacaaacaaatgctctgcacatgtctcggtaatggtgtaagctgtcaggaaaccgccgtcacgcagacctatggtgggaatagcaatggcgagccctgcgtgctccctttcacatataacgggagaactttctactcctgtactacggaaggacggcaggacggtcatctctggtgttcaacaacatccaattatgaacaggatcaaaaatactccttctgtaccgaccacactgtgctcgtccagaccagaggtggcaactcgaatggggcgctttgtcattttccctttctgtataataatcataactatacggactgtacgtccgaaggacggagagataatatgaagtggtgtgggacaactcaaaattatgacgccgatcagaaattcggattttgtcctatggctgcccatgaggagatttgcaccacgaacgagggagtgatgtatcgaatcggggatcagtgggacaagcagcacgacatgggacatatgatgcggtgtacttgtgtggggaacggtcgtggcgaatggacctgtattgcttatagtcagctacgcgatcagtgtattgtggacgatataacatataatgtgaatgatacctttcacaagcgccacgaagaaggccacatgctcaattgcacttgtttcggtcaggggcgaggccggtggaagtgtgatcctgtcgaccagtgtcaggactcagaaacaggaactttctatcagattggtgacagttgggagaagtatgtgcacggagtccgttaccaatgttactgctacggccgtggcattggcgagtggcattgccagcccctgcagacataccctagcagttccggacctgtggaggtgttcataactgaaaccccctcccagcctaactcacaccctattcagtggaacgcgcctcagccttcacacatctctaaatatattctgaggtggcgcccagtgtccatccccccccggaacctcggttattag

SEQ ID NO: 230506 - DNA, 1974 bp, Artificial Sequence
  derived and/or modified sequence
atgctgcgcggacccggtcccggtttgctgctgctagcagtccagtgtcttgggaccgctgtccctagcactggggcttccaagtccaaaagacaggctcagcagatggtgcaaccacaatcaccagtcgctgtttctcaaagtaagcctggctgttacgataacgggaaacactaccaaatcaatcaacagtgggagagaacttatttgggtaacgcgctggtgtgtacctgctacggaggcagtcggggatttaactgcgagtcgaaacccgaagccgaagaaacctgttttgacaagtacaccggcaacacttaccgtgtcggagacacctatgaacgacccaaagacagcatgatctgggattgtacttgtatcggggctggcaggggtcggatctcctgcacgatcgccaaccgttgccatgaggggggtcagtcttacaagataggggacacatggcgccgtcctcacgaaacgggcggatatatgttggagtgtgtgtgtctgggcaatggcaaaggtgagtggacatgtaagccaatcgccgaaaagtgtttcgaccatgccgctggcacatcttacgtggtcggcgagacctgggaaaaaccataccaaggctggatgatggtggactgcacgtgtctcggagaagggagcgggcgtatcacgtgtactagtaggaacaggtgcaatgaccaagatactcgaacatcctacagaatcggagatacttggagtaaaaaagataatcggggaaacctcctgcagtgcatctgtaccgggaatggcaggggcgagtggaaatgcgaaaggcacaccagcgtacagaccactagctctggctcaggcccatttactgacgtgagagcagctgtataccagccccagccacaccctcaaccccctccctatggccactgcgtgacagatagcggagtggtatactcagtgggcatgcaatggctgaaaacccaagggaacaaacaaatgctgtgcacatgtcttgggaacggcgtgtcttgccaggagactgctgtgactcaaacatacggcggtaactctaatggggagccgtgtgtactaccattcacatacaacggcaggactttttactcatgcacaaccgagggaaggcaagacggacacctttggtgcagcactactagtaattacgagcaagaccagaagtactcattttgtactgaccataccgtgttggtgcagacacgcggaggtaatagtaatggtgccttgtgccactttcctttcttatataacaatcacaactacaccgattgtacctctgagggcaggagggacaatatgaaatggtgtgggacaactcaaaactatgacgcagaccagaagtttgggttttgtccaatggctgcccacgaggagatttgcaccaccaatgagggggtgatgtatcgcatcggcgaccaatgggacaaacagcacgatatggggcacatgatgcggtgcacctgcgtgggtaacggccgaggagagtggacctgcatcgcctattcacagttgcgggaccaatgcattgtggacgacattacttataacgttaatgacacattccacaagaggcatgaagaggggcacatgctcaattgtacctgtttcggacagggccgaggacggtggaaatgcgatcccgttgaccagtgccaggactccgagacaggcaccttttatcagatcggagacagctgggagaaatatgtgcatggcgtgagatatcagtgctattgttatggtagaggaatcggtgaatggcactgccagcctctccagacctacccaagctcgtctggtccagtggaggtattcatcacagaaaccccgtctcagccaaacagtcaccccattcagtggaacgcccctcagccttcgcatatctcaaagtatatcctgcgctggcgtccagtgagcatacctcctaggaacttgggatattag

SEQ ID NO: 230507 - DNA, 1974 bp, Artificial Sequence
  derived and/or modified sequence
atgctgaggggtcctggccctggcttgcttctcctggctgtgcaatgcctgggcacagctgtacccagtaccggggctagtaagagcaagcgacaggcccaacagatggtgcagccacagtctcccgtcgcagtgagtcagtctaaaccaggctgttacgacaatggcaaacattatcagattaatcagcaatgggagcgcacttatcttgggaatgctcttgtctgtacctgctatggaggctcaagaggctttaactgtgaatccaaaccagaggccgaggagacctgtttcgacaagtacaccggaaacacctaccgggtgggggacacttatgaacgccctaaggatagtatgatttgggattgcacctgtatcggcgcagggagaggacggatctcctgcactatagcgaatcggtgccacgaaggcgggcagtcatacaagatcggggatacttggcgcaggccacatgagacaggtggttacatgctggagtgcgtgtgcctcggaaacggaaagggtgagtggacctgcaaacccattgccgagaaatgcttcgaccatgcggctggcacatcatacgtggtgggcgagacgtgggaaaagccataccagggatggatgatggttgactgcacatgtctaggagaagggagtgggcgcattacatgtactagcaggaatcgttgtaatgaccaagatacaagaacatcatatcgaattggcgatacatggtctaaaaaagataaccggggaaatctccttcagtgcatttgtacaggaaatggcaggggagaatggaaatgtgaaagacatacaagcgtacagacaacttctagtggatcaggcccattcacggacgtcagagccgcagtgtatcagccccagccacatccccaaccgccgccctatggtcactgcgtcaccgattcaggggtggtgtattccgtggggatgcaatggctgaagacgcaaggtaataaacagatgctttgcacctgcctggggaacggagtctcctgccaggaaacagcagttacgcaaacttacggtggaaattccaacggagagccatgcgtgctaccttttacctataacggaaggaccttttacagttgcacaactgagggaagacaggatggccacttgtggtgttcaacaaccagcaactatgaacaggaccagaaatactctttttgtaccgaccatactgtgctggtccagacaagaggaggtaattctaatggggctctgtgccactttccgtttctatacaacaatcataactacaccgactgtacttctgaggggagacgggacaatatgaaatggtgtgggaccacacagaactatgacgctgaccagaagttcgggttttgccccatggctgcccatgaagaaatctgtactacaaatgagggggtaatgtatcggataggagatcagtgggacaaacagcatgacatgggccatatgatgcggtgtacttgcgtgggaaacggacggggagagtggacatgtattgcgtacagtcagctgcgtgaccagtgtatcgtagacgacatcacttacaatgttaacgacacattccacaaacgccacgaagagggacacatgctgaattgtacctgtttcggtcagggcagggggagatggaagtgcgatcctgtcgaccagtgccaggactccgaaaccgggaccttttatcagatcggtgactcatgggagaagtacgtccatggcgtcagataccaatgttactgctacggaagggggatcggtgaatggcattgccaacctttacaaacataccccagcagctcggggccggtggaggtatttataacagagactccctcacagcccaattcacatcctattcaatggaatgcccctcagccatcgcatatcagtaagtacattcttaggtggcgaccagtctcaattccacccagaaacttgggttattag

SEQ ID NO: 230508 - DNA, 1974 bp, Artificial Sequence
  derived and/or modified sequence
atgctgaggggaccgggccctggcctcctgttattagccgtacaatgtctgggcacagccgttcctagcacgggagcatcaaagtctaagcgccaggcacaacaaatggtccagccccagtctcccgtcgccgtctcccagtccaaaccaggatgctatgacaatggaaaacactatcagatcaaccagcagtgggaacggacatacctgggcaatgccctcgtctgcacctgttatggaggttctaggggcttcaattgtgaatctaagcctgaggcggaggaaacctgcttcgataaatatactgggaatacataccgcgtgggggacacatacgaacgaccaaaggacagcatgatctgggattgtacttgcatcggagccggtcgcggcagaatatcatgtactattgccaatcggtgccatgaaggaggccaatcttataaaattggcgatacatggagaagacctcacgagactggggggtacatgcttgagtgcgtgtgcctgggaaatggaaagggcgaatggacttgtaaaccgatcgcggaaaaatgctttgatcacgccgcagggacatcttatgtggttggagagacctgggaaaagccataccagggatggatgatggttgactgcacatgtctaggagaagggagtgggcgcattacatgtactagcaggaatcgttgtaatgaccaagatacaagaacatcatatcgaattggcgatacatggtctaaaaaagataaccggggaaatctccttcagtgcatttgtacaggaaatggcaggggagaatggaaatgtgaaagacatacaagcgtacagacaacttctagtggatcaggcccattcacggacgtcagagccgcagtgtatcagccccagccacatccccaaccccctccctacgggcattgtgtgacggacagcggggtggtctacagcgtggggatgcagtggctcaagacacaaggaaataagcagatgttatgcacttgtctcggcaatggagtatcatgccaggaaactgcggtgacacagacttatggcggtaattccaacggtgaaccatgcgtattgccatttacatacaacggacgtactttttactcgtgtacaactgaaggccgccaggacgggcacctgtggtgtagcactacaagcaattacgaacaagatcagaagtactccttttgtactgatcacaccgttctggtccaaacaagaggaggtaactcaaacggagcattgtgccactttccattcttgtataacaatcacaactataccgactgtacttctgagggcaggagggacaatatgaagtggtgtggaactactcagaactacgatgcagatcagaaattcggtttctgtcctatggctgcccatgaggaaatttgcacaactaatgaaggcgtcatgtacagaattggagatcaatgggacaaacagcacgatatgggtcatatgatgcgctgtacgtgtgttggaaacggacgtggcgagtggacctgtattgcatattctcagctcagggatcagtgtatagtcgatgatatcacatacaatgtgaacgatacctttcacaagagacacgaggagggacatatgctcaactgtacctgctttggccagggcaggggccggtggaagtgcgaccccgtggatcagtgccaggactcagagactggaacgttttaccagatcggcgacagctgggagaaatacgtgcatggcgtaagatatcaatgttattgttatggtaggggaattggtgagtggcactgccaacccctgcaaacatacccatcctcatccggaccagtggaagtgtttattaccgagacccccagccagccaaatagtcaccctatccagtggaacgcccctcaacctagccatatttccaagtacattctcagatggcgccccgtgtctattcccccacggaacctaggctactag

SEQ ID NO: 230509 - RNA, 1974 nt, Artificial Sequence
  derived and/or modified sequence
augcugagggguccuggcccuggcuugcuucuccuggcugugcaaugccugggcacagcuguacccaguaccggggcuaguaagagcaagcgacaggcccaacagauggugcagccacagucucccgucgcagugagucagucuaaaccaggcuguuacgacaauggcaaacauuaucagauuaaucagcaaugggagcgcacuuaucuugggaaugcucuugucuguaccugcuauggaggcucaagaggcuuuaacugugaauccaaaccagaggccgaggagaccuguuucgacaaguacaccggaaacaccuaccgggugggggacacuuaugaacgcccuaaggauaguaugauuugggauugcaccuguaucggcgcagggagaggacggaucuccugcacuauagcgaaucggugccacgaaggcgggcagucauacaagaucggggauacuuggcgcaggccacaugagacaggugguuacaugcuggagugcgugugccucggaaacggaaagggugaguggaccugcaaacccauugccgagaaaugcuucgaccaugcggcuggcacaucauacguggugggcgagacgugggaaaagccauaccagggauggaugaugguugacugcacaugucuaggagaagggagugggcgcauuacauguacuagcaggaaucguuguaaugaccaagauacaagaacaucauaucgaauuggcgauacauggucuaaaaaagauaaccggggaaaucuccuucagugcauuuguacaggaaauggcaggggagaauggaaaugugaaagacauacaagcguacagacaacuucuaguggaucaggcccauucacggacgucagagccgcaguguaucagccccagccacauccccaaccgccgcccuauggucacugcgucaccgauucaggggugguguauuccguggggaugcaauggcugaagacgcaagguaauaaacagaugcuuugcaccugccuggggaacggagucuccugccaggaaacagcaguuacgcaaacuuacgguggaaauuccaacggagagccaugcgugcuaccuuuuaccuauaacggaaggaccuuuuacaguugcacaacugagggaagacaggauggccacuugugguguucaacaaccagcaacuaugaacaggaccagaaauacucuuuuuguaccgaccauacugugcugguccagacaagaggagguaauucuaauggggcucugugccacuuuccguuucuauacaacaaucauaacuacaccgacuguacuucugaggggagacgggacaauaugaaauggugugggaccacacagaacuaugacgcugaccagaaguucggguuuugccccauggcugcccaugaagaaaucuguacuacaaaugaggggguaauguaucggauaggagaucagugggacaaacagcaugacaugggccauaugaugcgguguacuugcgugggaaacggacggggagaguggacauguauugcguacagucagcugcgugaccaguguaucguagacgacaucacuuacaauguuaacgacacauuccacaaacgccacgaagagggacacaugcugaauuguaccuguuucggucagggcagggggagauggaagugcgauccugucgaccagugccaggacuccgaaaccgggaccuuuuaucagaucggugacucaugggagaaguacguccauggcgucagauaccaauguuacugcuacggaagggggaucggugaauggcauugccaaccuuuacaaacauaccccagcagcucggggccgguggagguauuuauaacagagacucccucacagcccaauucacauccuauucaauggaaugccccucagccaucgcauaucaguaaguacauucuuagguggcgaccagucucaauuccacccagaaacuuggguuauuag

SEQ ID NO: 230510 - RNA, 1974 nt, Artificial Sequence
  derived and/or modified sequence
augcugaggggaccgggcccuggccuccuguuauuagccguacaaugucugggcacagccguuccuagcacgggagcaucaaagucuaagcgccaggcacaacaaaugguccagccccagucucccgucgccgucucccaguccaaaccaggaugcuaugacaauggaaaacacuaucagaucaaccagcagugggaacggacauaccugggcaaugcccucgucugcaccuguuauggagguucuaggggcuucaauugugaaucuaagccugaggcggaggaaaccugcuucgauaaauauacugggaauacauaccgcgugggggacacauacgaacgaccaaaggacagcaugaucugggauuguacuugcaucggagccggucgcggcagaauaucauguacuauugccaaucggugccaugaaggaggccaaucuuauaaaauuggcgauacauggagaagaccucacgagacugggggguacaugcuugagugcgugugccugggaaauggaaagggcgaauggacuuguaaaccgaucgcggaaaaaugcuuugaucacgccgcagggacaucuuaugugguuggagagaccugggaaaagccauaccagggauggaugaugguugacugcacaugucuaggagaagggagugggcgcauuacauguacuagcaggaaucguuguaaugaccaagauacaagaacaucauaucgaauuggcgauacauggucuaaaaaagauaaccggggaaaucuccuucagugcauuuguacaggaaauggcaggggagaauggaaaugugaaagacauacaagcguacagacaacuucuaguggaucaggcccauucacggacgucagagccgcaguguaucagccccagccacauccccaacccccucccuacgggcauugugugacggacagcgggguggucuacagcguggggaugcaguggcucaagacacaaggaaauaagcagauguuaugcacuugucucggcaauggaguaucaugccaggaaacugcggugacacagacuuauggcgguaauuccaacggugaaccaugcguauugccauuuacauacaacggacguacuuuuuacucguguacaacugaaggccgccaggacgggcaccugugguguagcacuacaagcaauuacgaacaagaucagaaguacuccuuuuguacugaucacaccguucugguccaaacaagaggagguaacucaaacggagcauugugccacuuuccauucuuguauaacaaucacaacuauaccgacuguacuucugagggcaggagggacaauaugaagugguguggaacuacucagaacuacgaugcagaucagaaauucgguuucuguccuauggcugcccaugaggaaauuugcacaacuaaugaaggcgucauguacagaauuggagaucaaugggacaaacagcacgauaugggucauaugaugcgcuguacguguguuggaaacggacguggcgaguggaccuguauugcauauucucagcucagggaucaguguauagucgaugauaucacauacaaugugaacgauaccuuucacaagagacacgaggagggacauaugcucaacuguaccugcuuuggccagggcaggggccgguggaagugcgaccccguggaucagugccaggacucagagacuggaacguuuuaccagaucggcgacagcugggagaaauacgugcauggcguaagauaucaauguuauuguuaugguaggggaauuggugaguggcacugccaaccccugcaaacauacccauccucauccggaccaguggaaguguuuauuaccgagacccccagccagccaaauagucacccuauccaguggaacgccccucaaccuagccauauuuccaaguacauucucagauggcgccccgugucuauucccccacggaaccuaggcuacuag

SEQ ID NO: 230511 - protein, 220 aa, Artificial Sequence
  derived and/or modified sequence
MKVKKGGGGAGTATESAPGPSGQSVAPIPQPPAESESGSESEPDAGPGPRPGPLQRKQPIGPEDVLGLQRITGDYLCSPEENIYKIDFVRFKIRDMDSGTVLFEIKKPPVSERLPINRRDLDPNAGRFVRYQFTPAFLRLRQVGATVEFTVGDKPVNNFRMIERHYFRNQLLKSFDFHFGFCIPSSKNTCEHIYDFPPLSEELSARAGSSGSGEVGASRD

SEQ ID NO: 230512 - protein, 208 aa, Artificial Sequence
  derived and/or modified sequence
MKVKKGGGGAGTATESAPGPSGQSVAPIPQPPAESESGSESEPDAGPGPRPGPLQRKQPIGPEDVLGLQRITGGARPLFPAWRFKIRDMDSGTVLFEIKKPPVSERLPINRRDLDPNAGRFVRYQFTPAFLRLRQVGATVEFTVGDKPVNNFRMIERHYFRNQLLKSFDFHFGFCIPSSKNTCEHIYDFPPLSEELSARAGSSGSGEV

SEQ ID NO: 230513 - DNA, 663 bp, Artificial Sequence
  derived and/or modified sequence
atgaaggtgaagaagggcggcggcggcgccggcaccgccaccgagagcgcccccggccccagcggccagagcgtggcccccatcccccagccccccgccgagagcgagagcggcagcgagagcgagcccgacgccggccccggccccagacccggccccctgcagagaaagcagcccatcggccccgaggacgtgctgggcctgcagagaatcaccggcgactacctgtgcagccccgaggagaacatctacaagatcgacttcgtgagattcaagatcagagacatggacagcggcaccgtgctgttcgagatcaagaagccccccgtgagcgagagactgcccatcaacagaagagacctggaccccaacgccggcagattcgtgagataccagttcacccccgccttcctgagactgagacaggtgggcgccaccgtggagttcaccgtgggcgacaagcccgtgaacaacttcagaatgatcgagagacactacttcagaaaccagctgctgaagagcttcgacttccacttcggcttctgcatccccagcagcaagaacacctgcgagcacatctacgacttcccccccctgagcgaggagctgagcgccagagccggcagcagcggcagcggcgaggtgggcgccagcagagactag

SEQ ID NO: 230514 - DNA, 627 bp, Artificial Sequence
  derived and/or modified sequence
atgaaggtgaagaagggcggcggcggcgccggcaccgccaccgagagcgcccccggccccagcggccagagcgtggcccccatcccccagccccccgccgagagcgagagcggcagcgagagcgagcccgacgccggccccggccccagacccggccccctgcagagaaagcagcccatcggccccgaggacgtgctgggcctgcagagaatcaccggcggcgccagacccctgttccccgcctggagattcaagatcagagacatggacagcggcaccgtgctgttcgagatcaagaagccccccgtgagcgagagactgcccatcaacagaagagacctggaccccaacgccggcagattcgtgagataccagttcacccccgccttcctgagactgagacaggtgggcgccaccgtggagttcaccgtgggcgacaagcccgtgaacaacttcagaatgatcgagagacactacttcagaaaccagctgctgaagagcttcgacttccacttcggcttctgcatccccagcagcaagaacacctgcgagcacatctacgacttcccccccctgagcgaggagctgagcgccagagccggcagcagcggcagcggcgaggtgtag

SEQ ID NO: 230515 - DNA, 663 bp, Artificial Sequence
  derived and/or modified sequence
atgaaggttaagaaggggggtggaggagctggcacagcaactgaatccgcccccggcccctcaggacaaagcgtagcaccaatcccacagccccctgctgagtccgagtctggcagcgaatctgaacctgacgctggtcctgggcccagaccggggccactacagcgcaaacagcccattggcccagaggacgttttgggcctacagcgaattacaggcgactatctgtgttctcccgaggagaacatttacaagattgattttgtccgtttcaagatccgggatatggacagcgggacagtattattcgaaatcaaaaagccccccgtttcagagagactaccaatcaaccgacgcgacctggatccaaatgccggcaggttcgtccgctaccaatttactccggcgtttctgaggctgagacaggtcggcgccaccgtcgaatttaccgtgggtgacaaaccggtcaacaacttccgcatgatcgaaaggcactactttcgaaaccagctccttaagtctttcgacttccattttgggttctgtataccatctagtaagaatacttgcgagcatatatacgattttccgccgttatctgaggaactttcagcacgcgctgggtctagtggctctggagaggtgggagcctcaagagattag

SEQ ID NO: 230516 - DNA, 627 bp, Artificial Sequence
  derived and/or modified sequence
atgaaggtgaagaaaggcggtggcggggcaggcaccgccactgaatctgcacctgggccaagcggacagtccgtagctccaatcccccaaccgcccgcagagtcagaatccggttctgagtctgagcctgatgcaggacccggacctcggccaggcccactgcaacgcaagcagcccatcgggccggaagatgttctgggattgcagaggatcacgggcggagcccggcccctgttccccgcgtggcggttcaagattcgcgatatggattcaggcacagtgctctttgagatcaaaaagccccctgttagcgaacgactgcctattaatcgccgcgatctggacccaaatgctggacgctttgtgcgataccagttcacgcctgcgttcctgagattgcgccaggtaggggcaactgtcgaatttaccgtaggggataaacccgtaaataatttccgaatgattgagaggcattacttccggaatcagctgctaaaaagctttgacttccacttcggcttttgcattcccagctctaaaaacacgtgcgaacacatctacgattttcctcctcttagtgaggagttaagcgctagagcagggtcaagtggcagcggagaagtctag

SEQ ID NO: 230517 - DNA, 663 bp, Artificial Sequence
  derived and/or modified sequence
atgaaggtgaagaagggcggcggcggggccggcacagccacagagagcgcccctggccccagcggccagagcgtggcccccatcccccagcccccagctgagagcgagagcggcagcgagagcgagccagatgctggccctggccccaggcctggccccctgcagaggaagcagcccatcggcccagaagatgtgctgggcctgcagaggatcaccggggactacctgtgcagccctgaggagaacatctacaagattgactttgtgcgcttcaagatccgggacatggacagcggcaccgtgctgtttgagatcaagaagccccctgtgtctgagcggctgcccatcaacagaagagacctggaccccaatgccggccgctttgtgcgctaccagttcaccccagccttcctgcggctgcggcaggtgggcgccaccgtggagttcaccgtgggggacaagcctgtgaacaacttcaggatgattgaaagacactacttcaggaaccagctgctgaagagctttgacttccacttcggcttctgcatccccagcagcaagaacacctgtgagcacatctatgacttcccccccctgtctgaggagctgagcgcccgggccggcagcagcggcagcggggaggtgggcgccagccgggactag

SEQ ID NO: 230518 - DNA, 627 bp, Artificial Sequence
  derived and/or modified sequence
atgaaggtgaagaagggcggcggcggggccggcacagccacagagagcgcccctggccccagcggccagagcgtggcccccatcccccagcccccagctgagagcgagagcggcagcgagagcgagccagatgctggccctggccccaggcctggccccctgcagaggaagcagcccatcggcccagaagatgtgctgggcctgcagaggatcaccggcggggcccggcccctcttccctgcctggaggttcaagatccgggacatggattctggaacagtgctgtttgagatcaagaagccccctgtgtctgagcggctgcccatcaacagaagagacctggaccccaatgccggccgctttgtgcgctaccagttcaccccagccttcctgcggctgcggcaggtgggcgccaccgtggagttcaccgtgggggacaagcctgtgaacaacttcaggatgattgagcggcactacttcaggaaccagctgctgaagagctttgacttccacttcggcttctgcatccccagcagcaagaacacctgtgagcacatctatgacttcccccccctgtctgaggagctgagcgcccgggccggcagcagcggcagcggggaggtgtag

SEQ ID NO: 230519 - DNA, 663 bp, Artificial Sequence
  derived and/or modified sequence
atgaaggtgaagaagggcggcggcggcgccggcaccgccaccgagtccgcgcccggaccatcaggacaatctgtggccccaattccacagcctcccgccgaatccgagtctggctccgaaagcgaaccagacgctgggccaggtccaagacctgggccgctccagcgcaaacaaccaattggcccagaagacgtattaggtctgcagcggattactggagactacctgtgcagtcccgaagagaatatctacaaaatagacttcgttcggtttaagatcagggacatggacagcgggaccgttctctttgaaattaagaaacccccggttagtgagcgactaccgatcaataggagagatttggatccgaatgcaggaagatttgtgcggtaccagttcacccctgcctttctgcgcctgaggcaggtgggcgctaccgtggaattcacagtcggcgacaaacctgtcaataacttcagaatgatcgagcggcattactttcggaaccagctgttgaaaagtttcgattttcattttggattctgcatcccatcatctaaaaatacttgcgagcatatctatgacttccctccgttgtcagaagagctgtctgcgagagccggctctagcggcagcggcgaagtgggcgcctccagggactag

SEQ ID NO: 230520 - DNA, 627 bp, Artificial Sequence
  derived and/or modified sequence
atgaaggtgaagaagggcggcggcggcgccggcaccgccaccgagagcgcacctggacccagcggtcaatcggtggccccaattcctcagccgcctgcagaaagtgagtccggtagcgagtccgaacctgacgccggacctgggcctagaccaggccccttacagagaaaacagcctatcggccctgaagatgtgctgggactgcagcgcataaccggtggtgcccgccccctgttccctgcatggcgatttaagatccgtgatatggactccggaacggtgctgttcgagataaagaaacctccggtgtccgaacggcttcccataaatcgacgagatctggatcctaatgccggaagatttgtacggtaccagttcacgcctgcatttctgaggctcagacaggtcggcgccaccgtcgagtttaccgtgggtgataagccagtgaataactttcgcatgattgagcgccattatttccggaatcagctgctcaagagctttgacttccattttggcttctgtattccatcatccaagaacacctgcgagcatatctatgatttcccacccctgtccgaggaactgtcagcacgtgcaggatcaagcgggtcaggtgaggtgtag

SEQ ID NO: 230521 - DNA, 663 bp, Artificial Sequence
  derived and/or modified sequence
atgaaggtaaagaaagggggtgggggagctggcaccgcaacagagtcagcaccaggcccatcggggcaatctgtggcgccaattccgcagccacctgcagagtcagagtccggcagcgaaagtgaacctgatgctggacccggtcccaggcccggtccccttcagcgcaaacagcctatcggtcctgaagatgtactgggactgcaacgaatcacaggcgattatctgtgctcgccagaagaaaatatttataagatcgattttgttcggttcaaaatccgtgacatggacagcggtacggtgctgtttgagattaaaaagcctcctgtatccgagcgattacccattaaccggagggatctagatcctaacgctggtcgttttgtcagataccaattcactccagccttccttaggctgaggcaggtaggggctacagttgaatttacggtgggagataaaccagtgaacaacttccgcatgatagagcgccattattttcggaaccagctgctcaagtcatttgactttcattttggtttctgcattccatccagtaagaatacctgcgaacatatctacgatttccctccactttcagaggagctatcagccagggccggttcgtccggatctggcgaggtcggtgcttctcgggactag

SEQ ID NO: 230522 - DNA, 627 bp, Artificial Sequence
  derived and/or modified sequence
atgaaggtgaagaaggggggtggcggagctggaacggctaccgaatcagcacccggaccatccggacagagcgtggcccctatccctcaacctccggctgagtccgaaagcggctccgaatctgaacctgacgccggaccaggacccaggcctggcccactgcagagaaagcagcccattgggcctgaagatgtgttggggctccagcggatcactgggggtgccaggcctctgttccctgcctggcgttttaagattcgtgacatggacagtggaacagtgcttttcgaaatcaagaagccaccagtatctgagagactgcctataaacaggcgagaccttgacccgaacgctggcagattcgtgcggtatcagttcacccccgcttttctcagactgcggcaggttggtgccacagttgagtttacagttggagataaaccggtgaacaattttaggatgatagagcgtcattacttcaggaaccagctgctgaaatcttttgacttccattttggattctgtatcccctccagcaagaatacgtgcgagcacatatacgatttcccccctctgagtgaagaactcagtgctagggccggatcaagcgggtccggcgaagtgtag

SEQ ID NO: 230523 - DNA, 1582 bp, Artificial Sequence
  derived and/or modified sequence
gccatgaaggtgaagaagggcggcggtggggccgggacggcgacggagtccgctccggggccctcgggccagagcgtggcccccataccacagccgcctgcggaatccgaatctgggtccgagtcggagccggacgcaggcccagggcccaggccggggccgctgcagaggaagcagccgatcgggccggaggacgtgctggggctgcagcggatcaccggtgactacctctgctcccctgaggagaatatctacaagatcgactttgtcaggtttaagattcgggacatggactcaggcactgtcctctttgaaatcaagaagcccccagtctcagaacggttgcccatcaaccggcgggacctggaccccaatgctgggcgctttgtccgctaccagttcacgcctgccttcctccgcctgaggcaggtgggagccacggtggagttcacagtgggagacaagcctgtcaacaacttccgcatgatcgagaggcactacttccgcaaccagctactcaaaagcttcgacttccactttggcttctgcatccccagcagcaagaacacctgcgagcacatttacgacttcccccctctctccgaggagctgagtgcgcgggcagggtcttctgggagtggggaagtgggggcgtctagagactgagctgcgggagggagagggacttgtgggtctgatcccatttctccccaccctggggctcttctgtgtctgccaccattcccatatcatccgtagagaaagaggctggggatatttcaggctgtttggctgtccctgtaccccagtcctgaagcccctgcagtggcgggactcaagctcctgacctttgcccggcctggctgggcctctcttgcagtcagcgagatgatccgccacccgtatgagacccagtctgacagcttctacttcgtggatgaccggctggtgatgcacaataaagcagactattcctacagcgggacaccctgaccccacggctgccctgaccccaggaggctccagttctgggctgggagctgtgacctccccaacgctcacccctcaaccccaagtcctctgcttggggagttctccaggagctccggaccctgagtcaatgttgggaggaagggtacctggtgtccccagtcaagcccatgaagcccatgcggcctgctacatggggtggggtcgtagggaggctgtttgcctccacgtctaggaaggcctgtgagaggagcagtcaggacttccggacaacttagctgggccctacttgggcccaagtttcagaatagtgttcccctatcaaggctgtgactagatcaggcagggatccattccctgtcccctgcccactaccttcaggccatttagagttgtaaatttacaaagatccacggtgggctccagctgccaagccacccaagggagtctgggccctaggcctagccccatccctccccatgaggggccaagacactgcctaaggtgtgggagggactggctgagattgcagcccatggtaggagctggaccaactgtatatagttttcaataaactttttccttttctgtt

SEQ ID NO: 230524 - DNA, 676 bp, Artificial Sequence
  derived and/or modified sequence
gccggcgcaggcagcggcggcagcagcaggcgagcctcggccccgcaaggccatgaaggtgaagaagggcggcggtggggccgggacggcgacggagtccgctccggggccctcgggccagagcgtggcccccataccacagccgcctgcggaatccgaatctgggtccgagtcggagccggacgcaggcccagggcccaggccggggccgctgcagaggaagcagccgatcgggccggaggacgtgctggggctgcagcggatcaccggtggggcccgtccccttttcccagcgtggaggtttaagattcgggacatggactcaggcactgtcctctttgaaatcaagaagcccccagtctcagaacggttgcccatcaaccggcgggacctggaccccaatgctgggcgctttgtccgctaccagttcacgcctgccttcctccgcctgaggcaggtgggagccacggtggagttcacagtgggagacaagcctgtcaacaacttccgcatgatcgagaggcactacttccgcaaccagctactcaaaagcttcgacttccactttggcttctgcatccccagcagcaagaacacctgcgagcacatttacgacttcccccctctctccgaggagctgagtgcgcgggcagggtcttctgggagtggggaagtg

SEQ ID NO: 230525 - protein, 313 aa, Artificial Sequence
  derived and/or modified sequence
MSPENQSSVSEFLLLGLPIRPEQQAVFFTLFLGMYLTTVLGNLLIMLLIQLDSHLHTPMYFFLSHLALTDISFSSVTVPKMLMDMRTKYKSILYEECISQMYFFIFFTDLDSFLITSMAYDRYVAICHPLHYTVIMREELCVFLVAVSWILSCASSLSHTLLLTRLSFCAANTIPHVFCDLAALLKLSCSDIFLNELVMFTVGVVVITLPFMCILVSYGYIGATILRVPSTKGIHKALSTCGSHLSVVSLYYGSIFGQYLFPTVSSSIDKDVIVALMYTVVTPMLNPFIYSLRNRDMKEALGKLFSRATFFSW

SEQ ID NO: 230526 - protein, 313 aa, Artificial Sequence
  derived and/or modified sequence
MSPENQSSVSEFLLLGLPIRPEQQAVFFTLFLGMYLTTVLGNLLIMLLIQLDSHLHTPMYFFLSHLALTDISFSSVTVPKMLMDMRTKYKSILYEECISQMYFFIFFTDLDSFLITSMAYDRYVAICHPLHYTVIMREELCVFLVAVSWILSCASSLSHTLLLTRLMKRENQSSVSEFLLLDLPIWPEQQAVFFTLFLGMYLITVLGNLLIILLIRLDSHLHTPMFFFLSHLALTDISLSSVTVPKMLLSMQTQDQSILYAGCVTQMYFFIFFTDLDNFLLTSMAYDRYVAICHPLRYTTIMKEGLCNLLVTV

SEQ ID NO: 230527 - DNA, 942 bp, Artificial Sequence
  derived and/or modified sequence
atgagccccgagaaccagagcagcgtgagcgagttcctgctgctgggcctgcccatcagacccgagcagcaggccgtgttcttcaccctgttcctgggcatgtacctgaccaccgtgctgggcaacctgctgatcatgctgctgatccagctggacagccacctgcacacccccatgtacttcttcctgagccacctggccctgaccgacatcagcttcagcagcgtgaccgtgcccaagatgctgatggacatgagaaccaagtacaagagcatcctgtacgaggagtgcatcagccagatgtacttcttcatcttcttcaccgacctggacagcttcctgatcaccagcatggcctacgacagatacgtggccatctgccaccccctgcactacaccgtgatcatgagagaggagctgtgcgtgttcctggtggccgtgagctggatcctgagctgcgccagcagcctgagccacaccctgctgctgaccagactgagcttctgcgccgccaacaccatcccccacgtgttctgcgacctggccgccctgctgaagctgagctgcagcgacatcttcctgaacgagctggtgatgttcaccgtgggcgtggtggtgatcaccctgcccttcatgtgcatcctggtgagctacggctacatcggcgccaccatcctgagagtgcccagcaccaagggcatccacaaggccctgagcacctgcggcagccacctgagcgtggtgagcctgtactacggcagcatcttcggccagtacctgttccccaccgtgagcagcagcatcgacaaggacgtgatcgtggccctgatgtacaccgtggtgacccccatgctgaaccccttcatctacagcctgagaaacagagacatgaaggaggccctgggcaagctgttcagcagagccaccttcttcagctggtag

SEQ ID NO: 230528 - DNA, 942 bp, Artificial Sequence
  derived and/or modified sequence
atgagccccgagaaccagagcagcgtgagcgagttcctgctgctgggcctgcccatcagacccgagcagcaggccgtgttcttcaccctgttcctgggcatgtacctgaccaccgtgctgggcaacctgctgatcatgctgctgatccagctggacagccacctgcacacccccatgtacttcttcctgagccacctggccctgaccgacatcagcttcagcagcgtgaccgtgcccaagatgctgatggacatgagaaccaagtacaagagcatcctgtacgaggagtgcatcagccagatgtacttcttcatcttcttcaccgacctggacagcttcctgatcaccagcatggcctacgacagatacgtggccatctgccaccccctgcactacaccgtgatcatgagagaggagctgtgcgtgttcctggtggccgtgagctggatcctgagctgcgccagcagcctgagccacaccctgctgctgaccagactgatgaagagagagaaccagagcagcgtgagcgagttcctgctgctggacctgcccatctggcccgagcagcaggccgtgttcttcaccctgttcctgggcatgtacctgatcaccgtgctgggcaacctgctgatcatcctgctgatcagactggacagccacctgcacacccccatgttcttcttcctgagccacctggccctgaccgacatcagcctgagcagcgtgaccgtgcccaagatgctgctgagcatgcagacccaggaccagagcatcctgtacgccggctgcgtgacccagatgtacttcttcatcttcttcaccgacctggacaacttcctgctgaccagcatggcctacgacagatacgtggccatctgccaccccctgagatacaccaccatcatgaaggagggcctgtgcaacctgctggtgaccgtgtag

SEQ ID NO: 230529 - DNA, 942 bp, Artificial Sequence
  derived and/or modified sequence
atgtctcccgagaaccagtcgtctgtgagcgaatttctgttgttgggtttgccaatacgcccagaacagcaagcggttttttttaccctctttctgggcatgtacctgacaaccgtgctggggaacctcctgatcatgttattaattcagttagactcccatctccatacccctatgtatttcttccttagccacttagcactaaccgatatatcttttagctctgtcaccgttccaaagatgctcatggatatgcgaacaaagtataagagcatcctctacgaagagtgcatctcacaaatgtatttttttatattttttacggatctcgactccttcctcattacttcaatggcttacgatcgttatgttgccatctgccatccacttcactacacggtgattatgcgggaggagttatgtgtcttcctggtggcagtgagttggattttgagctgtgcttcctcactgtctcacaccctcctgctgacaagactgagcttctgtgctgccaacaccatccctcatgtattctgtgacctggcagccctgctcaagctgtcatgttctgacatattcctgaacgagctggtgatgtttactgtgggggttgtggtcattacactcccctttatgtgcattctggtgtcctatggatatatcggtgcgacgatattgagggttccttcaactaagggcatccataaagcactctcgacttgtggaagccatctttcagtcgtctctctttattacgggtcaatattcgggcagtatctttttccaaccgtttctagcagtattgacaaggatgttatcgtggcgcttatgtacactgtcgtgactccgatgctgaatcccttcatttactccctccgtaaccgcgatatgaaggaagcgctgggaaagctattctcgcgtgctaccttcttctcctggtag

SEQ ID NO: 230530 - DNA, 942 bp, Artificial Sequence
  derived and/or modified sequence
atgtcccctgagaaccagtcaagcgtgtctgagtttctgttgctagggctaccaattaggcccgaacagcaggctgtgttcttcacactgttcttgggcatgtacctaaccaccgtgttgggcaatctgctgatcatgttgctgattcagctggattcccatcttcacactccaatgtattttttccttagccacctggctctgactgatatcagttttagctccgtaacagtgcctaaaatgctgatggacatgagaaccaagtataagtctattttgtacgaggagtgcatttctcagatgtactttttcattttttttaccgatcttgacagttttctgatcacttcaatggcgtatgacagatatgttgccatatgccacccccttcattacactgtaatcatgagagaagaactgtgcgtctttcttgtggctgtctcatggatcctgtcctgcgcctctagcctctctcacaccctcctgcttacaagactgatgaagagggaaaatcagtcaagtgtaagtgagttcctcctactggacctgcccatttggcctgagcagcaggctgtatttttcactctgttccttggcatgtatctgatcactgttctgggcaacctgcttattattttactcattagattggactcacacctccacacccccatgttcttcttcctatcccatctggcgctcaccgatatcagcctgtcatcagtcactgtacccaaaatgctgctctcaatgcagactcaggaccagagcattttatacgcgggatgcgtaacccagatgtattttttcatcttctttacggacctcgacaatttcctgctgacttctatggcctacgatcggtacgtggctatctgccatccgctcaggtacacaacgatcatgaaagagggtctgtgcaacctcctagtgacggtttag

SEQ ID NO: 230531 - DNA, 942 bp, Artificial Sequence
  derived and/or modified sequence
atgagccctgagaaccagagctctgtgtctgagttcctgctgctgggcctgcccatccggcctgagcagcaggccgtgttcttcaccctcttcctgggcatgtacctgaccaccgtgctgggcaacctgctgatcatgctgctgatccagctggacagccacctgcacacccccatgtacttcttcctgagccacctggccctgacagacatctccttcagctctgtgacagtgcccaagatgctgatggacatgaggaccaagtacaagagcatcctgtatgaggagtgcatcagccagatgtacttcttcatcttcttcacagacctggacagcttcctgatcacctccatggcctatgacagatatgtggccatctgccaccccctgcactacaccgtcatcatgagggaggagctgtgtgtgttcctggtggccgtgtcctggatcctgagctgtgccagcagcctgagccacaccctgctgctgacccggctgtccttctgtgccgccaacaccatcccccacgtgttctgtgacctggccgccctgctgaagctgagctgcagcgacatcttcctgaatgagctggtgatgttcaccgtgggcgtggtggtgatcaccctgcccttcatgtgcatcctggtgtcctatggctacatcggggccaccatcctgcgggtgcccagcaccaagggcatccacaaggccctgagcacctgtggcagccacctgtctgtggtgtccctgtactacggcagcatcttcggccagtacctgttccccaccgtgagcagcagcattgacaaggatgtgattgtggccctgatgtacacagtggtgacccccatgctgaaccccttcatctacagcctgaggaacagagacatgaaggaggccctgggcaagctgttcagccgggccaccttcttctcctggtag

SEQ ID NO: 230532 - DNA, 942 bp, Artificial Sequence
  derived and/or modified sequence
atgagccctgagaaccagagctctgtgtctgagttcctgctgctgggcctgcccatccggcctgagcagcaggccgtgttcttcaccctcttcctgggcatgtacctgaccaccgtgctgggcaacctgctgatcatgctgctgatccagctggacagccacctgcacacccccatgtacttcttcctgagccacctggccctgacagacatctccttcagctctgtgacagtgcccaagatgctgatggacatgaggaccaagtacaagagcatcctgtatgaggagtgcatcagccagatgtacttcttcatcttcttcacagacctggacagcttcctgatcacctccatggcctatgacagatatgtggccatctgccaccccctgcactacaccgtcatcatgagggaggagctgtgtgtgttcctggtggccgtgtcctggatcctgagctgtgccagcagcctgagccacaccctgctgctgacccggctgatgaagcgggagaaccagagctctgtgtctgagttcctgctgctggacctgcccatctggccagagcagcaggccgtgttcttcaccctcttcctgggcatgtacctgatcaccgtgctgggcaacctgctgatcatcctgctgatccggctggacagccacctgcacacccccatgttcttcttcctgagccacctggccctgacagacatcagcctgagctctgtgacagtgcccaagatgctgctgtccatgcagacccaggaccagagcatcctgtatgccggctgtgtgacccagatgtacttcttcatcttcttcacagacctggacaacttcctgctgacctccatggcctatgacagatatgtggccatctgccaccccctgcgctacaccaccatcatgaaggagggcctgtgcaacctgctggtgacagtgtag

SEQ ID NO: 230533 - DNA, 942 bp, Artificial Sequence
  derived and/or modified sequence
atgagccctgagaaccagagcagcgtgtccgagttcctccttctgggcctccccatccggccagagcagcaggctgtgttcttcaccctgttcctgggcatgtacctgaccacggtgctggggaacctgctcatcatgctgctcatccagctggactctcaccttcacacccccatgtacttcttcctcagccacttggctctcactgacatctccttttcatctgtcactgtccctaagatgctgatggacatgcggactaagtacaaatcgatcctctatgaggaatgcatttctcagatgtatttttttatattttttactgacctggacagcttccttattacatcaatggcatatgaccgatatgttgccatatgtcaccctctccactacactgtcatcatgagggaagagctctgtgtcttcttagtggctgtatcttggattctgtcttgtgccagctccctctctcacacccttctcctgacccggctgtctttctgtgctgcgaacaccatcccccatgtcttctgtgaccttgctgccctgctcaagctgtcctgctcagatatcttcctcaatgagctggtcatgttcacagtaggggtggtggtcattaccctgccattcatgtgtatcctggtatcatatggctacattggggccaccatcctgagggtcccttcaaccaaagggatccacaaagcattgtccacatgtggctcccatctctctgtggtgtctctctattatgggtcaatatttggccagtaccttttcccgactgtaagcagttctattgacaaggatgtcattgtggctctcatgtacacggtggtcacacccatgttgaacccctttatctacagccttaggaacagggacatgaaagaggcccttgggaaactcttcagtagagcaacatttttctcttggtga

SEQ ID NO: 230534 - DNA, 939 bp, Artificial Sequence
  derived and/or modified sequence
atgagccctgagaaccagagcagcgtgtccgagttcctccttctgggcctccccatccggccagagcagcaggctgtgttcttcaccctgttcctgggcatgtacctgaccacggtgctggggaacctgctcatcatgctgctcatccagctggactctcaccttcacacccccatgtacttcttcctcagccacttggctctcactgacatctccttttcatctgtcactgtccctaagatgctgatggacatgcggactaagtacaaatcgatcctctatgaggaatgcatttctcagatgtatttttttatattttttactgacctggacagcttccttattacatcaatggcatatgaccgatatgttgccatatgtcaccctctccactacactgtcatcatgagggaagagctctgtgtcttcttagtggctgtatcttggattctgtcttgtgccagctccctctctcacacccttctcctgacccggctcatgaagagggagaatcagagcagtgtgtctgagttcctcctcctggacctccccatctggccagagcagcaggctgtgttcttcaccctgttcttgggcatgtacctgatcacggtgctggggaacctgctcatcatcctgctcatccggctggactctcaccttcacacccccatgttcttcttcctcagccacttggctctcactgacatctccctttcatctgtcactgtcccaaagatgttattaagcatgcaaactcaggatcaatccattctttatgcagggtgtgtaactcagatgtattttttcatatttttcactgatctagacaatttccttctcacttcaatggcatacgatcggtatgtggccatctgtcaccccctccgctacaccactatcatgaaagagggactgtgtaacttactagtcactgtg

SEQ ID NO: 230535 - DNA, 942 bp, Artificial Sequence
  derived and/or modified sequence
atgagccccgagaaccagagcagcgtgagcgagttcctgctgctgggcctgcccatccggcctgagcagcaggccgtgttcttcactctgttcctcggcatgtacctgactaccgtgctgggcaacctgctcattatgctacttattcagttggactcccacctacacacaccaatgtacttcttcttgtcgcatcttgctctcaccgacatcagctttagctctgtgactgtaccaaaaatgctaatggatatgcggacaaaatataagagtattctctacgaagagtgtatcagtcagatgtactttttcatcttcttcactgaccttgacagcttcctgataacatcgatggcttacgaccgttatgtcgcaatttgccacccgctgcactacacagtgattatgcgggaagaactgtgtgtgtttctggtggccgtgagctggatactaagttgcgcttcatctctgtctcatacactccttctgacccggcttagcttttgtgccgccaacaccattccccacgtgttttgcgacctggcagcgcttctcaagctgtcttgtagtgatatctttctgaacgagctggtgatgttcaccgtgggggtcgtagtgatcacgctgcctttcatgtgtattcttgtatcttacggatatatcggcgccacaatacttcgggtgcccagtaccaagggcatccataaagcactctctacgtgtggttcacacctcagcgtggtttccctgtattacgggtcaattttcggccagtatctgtttccgaccgtcagtagttccatcgacaaagacgtcatagtggcactaatgtacaccgttgtcactcccatgctgaaccctttcatctattccctccgtaatcgagacatgaaggaggcgctggggaagctattttctagagcaacattcttctcatggtag

SEQ ID NO: 230536 - DNA, 942 bp, Artificial Sequence
  derived and/or modified sequence
atgagccccgagaaccagagcagcgtgagcgagttcctgctgctgggcctgccgattcgacctgaacagcaggctgttttttttaccttattcttgggtatgtacctgacgacagttttaggcaatctgcttataatgctgctgattcagctcgacagtcacctgcacactccaatgtacttctttcttagccacttagctttgaccgacattagttttagttccgttacggtccccaagatgcttatggatatgcgaaccaagtacaagtctattttgtatgaggagtgtatcagccagatgtattttttcattttttttacagacctggattccttcttaattactagtatggcttatgaccggtatgtcgcgatatgccatccactccattacacagttatcatgcgggaggagttgtgtgtgttcttagttgcagtctcctggatcctgagctgtgcgtcaagcctcagtcataccctgttgttgacacgattgatgaagcgggagaaccagagttcagtgagtgagtttctgttactggacctgccaatatggccagagcagcaggcagtttttttcactcttttcctggggatgtacctaattactgtcttaggcaacttgttgatcatcctgctaatccgcctcgactcacacctgcatacgccaatgttctttttcctcagccaccttgcactgaccgacatttcactcagcagcgtgactgtaccgaaaatgcttctgagtatgcagacccaagatcagtccatcctttatgccggttgcgtgactcagatgtacttttttatcttctttaccgatctggataatttcctgctgacgagcatggcatacgatagatacgtcgcaatctgtcatcccctgcgatatacaaccatcatgaaggaggggctatgtaacctactggtcactgtgtag

SEQ ID NO: 230537 - DNA, 942 bp, Artificial Sequence
  derived and/or modified sequence
atgtcacctgagaaccagagctccgtctccgagtttctgcttctgggactacctataaggccggaacaacaggctgtgttcttcaccctgttcctcggcatgtacctgacgaccgttctgggaaatctgctcatcatgcttctcatccagcttgattcccacttgcacaccccaatgtatttttttctttcccatcttgctcttacagatatttcattcagctctgtgaccgtaccgaagatgctcatggacatgcgcacaaaatacaagtctattctgtacgaagaatgtatttcccagatgtatttcttcatctttttcaccgatctagactccttcctcattacctctatggcttacgatcggtacgtcgccatttgccacccactgcactacaccgttattatgagggaggaactttgtgtattcttggtggccgtaagttggatcctctcctgtgccagtagtctgtcccacaccctgttgctaactaggctgagcttctgcgctgcaaacaccattcctcatgtgttttgcgacctagccgctcttctaaaactgagttgctcggacatcttcctgaatgagctcgtcatgtttacagtgggggttgtggttattactctgccattcatgtgtattctggtgagttacggttacattggcgcaacgatcctgcgggtgccaagcaccaaagggatccataaagccctttcgacatgtgggagccatctgtctgttgtatcgctgtactacggatcgatattcgggcagtacttgtttcctactgtttcttctagcatcgataaggacgtaattgtagccttgatgtataccgtggtgacccctatgctcaatccattcatctatagcctgcgcaaccgggatatgaaggaagctttaggtaagctgttctcacgtgccacgtttttctcatggtag

SEQ ID NO: 230538 - DNA, 942 bp, Artificial Sequence
  derived and/or modified sequence
atgtctcccgagaatcagtcttccgtttccgaatttttgctactgggcctgcctatccgccctgagcagcaggcggtgttcttcaccttgttcttaggcatgtatctgactactgtgctcggtaacctcctgatcatgttgttaatccagctcgacagccacctgcacacccccatgtatttttttctctcccatctcgcgctcaccgacattagcttttctagtgttacagtcccaaaaatgctcatggacatgagaaccaaatacaagtctattctttacgaagagtgcatttcccagatgtacttttttatttttttcactgacctggatagcttcctgattacaagtatggcctacgataggtacgtggctatctgccacccattacactacactgtgattatgcgggaggagctgtgcgtctttctggtagctgtctcttggatcctgtcttgtgcgtcctccctgagccacacattgttgctgaccaggttaatgaagcgcgagaatcagtcttcggtgtccgaatttctgctgctcgatctgcctatctggccggaacagcaggcagtgttctttacactgtttctgggcatgtacttaataacagtcctgggaaacctccttatcattcttcttatacgcctggacagtcacttacacacccctatgttcttcttcctctcacacctggctctaacagatatatctctctcgtccgtgacagttccaaagatgcttctttccatgcagacacaggaccaaagcatcctatatgctggctgcgtgacccagatgtactttttcatctttttcacagatttggataattttctcctcacttcaatggcctacgacagatatgtcgccatctgccatccactgcgctatacgacaattatgaaagaggggctttgcaatctgctggttacagtttag

SEQ ID NO: 230539 - protein, 639 aa, Artificial Sequence
  derived and/or modified sequence
MLLRKRYRHRPCRLQFLLLLLMLGCVLMMVAMLHPPHHTLHQTVTAQASKHSPEARYRLDFGESQDWVLEAEDEGEEYSPLEGLPPFISLREDQLLVAVALPQARRNQSQGRRGGSYRLIKQPRRQDKEAPKRDWGADEDGEVSEEEELTPFSLDPRGLQEALSARIPLQRALPEVRHPLCLQQHPQDSLPTASVILCFHDEAWSTLLRTVHSILDTVPRAFLKEIILVDDLSQQGQLKSALSEYVARLEGVKLLRSNKRLGAIRARMLGATRATGDVLVFMDAHCECHPGWLEPLLSRIAGDRSRVVSPVIDVIDWKTFQYYPSKDLQRGVLDWKLDFHWEPLPEHVRKALQSPISPIRSPVVPGEVVAMDRHYFQNTGAYDSLMSLRGGENLELSFKAWLCGGSVEILPCSRVGHIYQNQDSHSPLDQEATLRNRVRIAETWLGSFKETFYKHSPEAFSLSKAEKPDCMERLQLQRRLGCRTFHWFLANVYPELYPSEPRPSFSGKLHNTGLGLCADCQAEGDILGCPMVLAPCSDSRQQQYLQHTSRKEIHFGSPQHLCFAVRQEQVILQNCTEEGLAIHQQHWDFQENGMIVHILSGKCMEAVVQENNKDLYLRPCDGKARQQWRFDQINAVDER

SEQ ID NO: 230540 - protein, 196 aa, Artificial Sequence
  derived and/or modified sequence
MERLQLQRRLGCRTFHWFLANVYPELYPSEPRPSFSGKLHNTGLGLCADCQAEGDILGCPMVLAPCSDSRQQQYLQHTSRKEIHFGSPQHLCFAVRQEQVILQNCTEEGLAIHQQHWDFQENGMIVHILSGKCMEAVVQENNKDLYLRPCDEKPASSGVLTRSMLWMNDECQCQKEKRILAIKIQLQVNLKSLYIS

SEQ ID NO: 230541 - DNA, 1920 bp, Artificial Sequence
  derived and/or modified sequence
atgctgctgagaaagagatacagacacagaccctgcagactgcagttcctgctgctgctgctgatgctgggctgcgtgctgatgatggtggccatgctgcaccccccccaccacaccctgcaccagaccgtgaccgcccaggccagcaagcacagccccgaggccagatacagactggacttcggcgagagccaggactgggtgctggaggccgaggacgagggcgaggagtacagccccctggagggcctgccccccttcatcagcctgagagaggaccagctgctggtggccgtggccctgccccaggccagaagaaaccagagccagggcagaagaggcggcagctacagactgatcaagcagcccagaagacaggacaaggaggcccccaagagagactggggcgccgacgaggacggcgaggtgagcgaggaggaggagctgacccccttcagcctggaccccagaggcctgcaggaggccctgagcgccagaatccccctgcagagagccctgcccgaggtgagacaccccctgtgcctgcagcagcacccccaggacagcctgcccaccgccagcgtgatcctgtgcttccacgacgaggcctggagcaccctgctgagaaccgtgcacagcatcctggacaccgtgcccagagccttcctgaaggagatcatcctggtggacgacctgagccagcagggccagctgaagagcgccctgagcgagtacgtggccagactggagggcgtgaagctgctgagaagcaacaagagactgggcgccatcagagccagaatgctgggcgccaccagagccaccggcgacgtgctggtgttcatggacgcccactgcgagtgccaccccggctggctggagcccctgctgagcagaatcgccggcgacagaagcagagtggtgagccccgtgatcgacgtgatcgactggaagaccttccagtactaccccagcaaggacctgcagagaggcgtgctggactggaagctggacttccactgggagcccctgcccgagcacgtgagaaaggccctgcagagccccatcagccccatcagaagccccgtggtgcccggcgaggtggtggccatggacagacactacttccagaacaccggcgcctacgacagcctgatgagcctgagaggcggcgagaacctggagctgagcttcaaggcctggctgtgcggcggcagcgtggagatcctgccctgcagcagagtgggccacatctaccagaaccaggacagccacagccccctggaccaggaggccaccctgagaaacagagtgagaatcgccgagacctggctgggcagcttcaaggagaccttctacaagcacagccccgaggccttcagcctgagcaaggccgagaagcccgactgcatggagagactgcagctgcagagaagactgggctgcagaaccttccactggttcctggccaacgtgtaccccgagctgtaccccagcgagcccagacccagcttcagcggcaagctgcacaacaccggcctgggcctgtgcgccgactgccaggccgagggcgacatcctgggctgccccatggtgctggccccctgcagcgacagcagacagcagcagtacctgcagcacaccagcagaaaggagatccacttcggcagcccccagcacctgtgcttcgccgtgagacaggagcaggtgatcctgcagaactgcaccgaggagggcctggccatccaccagcagcactgggacttccaggagaacggcatgatcgtgcacatcctgagcggcaagtgcatggaggccgtggtgcaggagaacaacaaggacctgtacctgagaccctgcgacggcaaggccagacagcagtggagattcgaccagatcaacgccgtggacgagagatag

SEQ ID NO: 230542 - DNA, 591 bp, Artificial Sequence
  derived and/or modified sequence
atggagagactgcagctgcagagaagactgggctgcagaaccttccactggttcctggccaacgtgtaccccgagctgtaccccagcgagcccagacccagcttcagcggcaagctgcacaacaccggcctgggcctgtgcgccgactgccaggccgagggcgacatcctgggctgccccatggtgctggccccctgcagcgacagcagacagcagcagtacctgcagcacaccagcagaaaggagatccacttcggcagcccccagcacctgtgcttcgccgtgagacaggagcaggtgatcctgcagaactgcaccgaggagggcctggccatccaccagcagcactgggacttccaggagaacggcatgatcgtgcacatcctgagcggcaagtgcatggaggccgtggtgcaggagaacaacaaggacctgtacctgagaccctgcgacgagaagcccgccagcagcggcgtgctgaccagaagcatgctgtggatgaacgacgagtgccagtgccagaaggagaagagaatcctggccatcaagatccagctgcaggtgaacctgaagagcctgtacatcagctag

SEQ ID NO: 230543 - DNA, 1920 bp, Artificial Sequence
  derived and/or modified sequence
atgctgctgagaaaaagataccggcatcggccctgtcgactgcagtttctgctgctgttgctgatgctcgggtgtgtgctcatgatggttgcgatgctccatcccccacatcatacactgcaccaaactgttacagctcaggctagtaaacattcaccagaagctaggtaccgcctggacttcggagaaagccaagattgggtgcttgaggctgaggatgagggcgaagagtactccccactggagggcctgccaccgtttataagtctgagggaggaccagctgttagtggcagtcgctctaccccaggcacggcgcaaccaaagccaggggcggcggggaggaagctacaggctgataaagcagccccgccggcaagataaggaggctcctaagcgggattggggggccgatgaggatggagaagtctcagaagaggaggagttaacccccttctccctggacccacgcggcctacaggaggccctctcggcaaggatcccactacagagagcactcccagaggtgcggcaccccttgtgcttgcagcaacaccctcaggattccttacctacggcttctgttatcctatgctttcatgatgaggcctggagcaccctgctacggacagttcattcgatcctcgacaccgtgccccgggccttcctgaaggaaattattctggtggacgacctttctcagcaggggcagctgaagtctgcactttctgagtacgtggcgaggcttgagggcgtgaagttactccggagcaacaagagactcggtgcaattcgtgcacgcatgctaggggctactagggctactggcgacgtactggtcttcatggacgctcactgcgagtgtcaccccgggtggctggagcccctgctgtctagaatcgctggggatagatcaagagtggtgtccccagtcatcgacgtcattgattggaaaacttttcagtattacccttccaaagatctacagagaggggttctggactggaaactcgactttcattgggaaccactacccgaacatgtgcgaaaggccctgcaatctccaatatcccctattcgctctccagtcgtgcctggcgaagtcgtggccatggaccgccactactttcagaacacaggggcatatgacagcctgatgtcacttcgcggaggcgaaaatttggaattgagcttcaaggcatggctgtgcgggggcagtgtggaaatacttccatgctcccgtgtgggtcatatctaccagaatcaggattcccacagccccttggaccaggaggccactctgcgcaatcgcgtgagaattgctgaaacctggctgggcagctttaaagagactttttataaacatagcccagaggcattctctctgtcaaaggcagaaaaacccgactgcatggaacgactgcagctgcaaaggagactgggttgtagaacattccactggttccttgctaacgtttatccggagttatatccttcagagcccagaccctccttttctgggaagctgcataatacgggcctgggactttgcgccgactgtcaggcagaaggagatattcttggatgtcctatggttctagcaccatgcagcgatagcagacaacagcagtatctgcagcacacaagcagaaaggaaatccattttggaagcccacagcacctctgtttcgctgtgcgccaggagcaagtgattcttcaaaactgcaccgaagagggcctcgctatccatcagcagcactgggactttcaggagaacggtatgatcgtgcacatactgtccgggaaatgtatggaggcagtcgtgcaggaaaacaataaggacctgtatctgaggccttgcgacgggaaggcgcgtcagcaatggagattcgaccagatcaatgcagtggacgagcggtag

SEQ ID NO: 230544 - DNA, 591 bp, Artificial Sequence
  derived and/or modified sequence
atggaacgcctgcaactgcagagacgcctggggtgtaggactttccattggttcttggccaacgtgtacccagagttgtaccccagcgagccccggcccagcttctccggcaaactccataatactggtctgggtctctgcgccgactgccaagctgaaggagacattctgggctgtcccatggtgcttgcgccttgctcagactctaggcaacagcagtaccttcagcacacatcaagaaaagagattcacttcggctccccccagcacctctgctttgccgttcggcaggaacaggtcattctccaaaattgtactgaggaaggcctcgctatccaccagcaacactgggactttcaggagaacggaatgatagtgcacatcctaagtggaaagtgcatggaggccgtggttcaagaaaataacaaagacctgtatttgcggccatgtgacgagaagcccgcatcttccggcgtcctgacccgttcgatgctatggatgaatgacgagtgccaatgccagaaggagaaaagaattctggctatcaagatacagctgcaagtgaacctgaagtccctgtatatctcctag

SEQ ID NO: 230545 - DNA, 1920 bp, Artificial Sequence
  derived and/or modified sequence
atgctgctgaggaagcgctaccgccaccggccctgccgcctgcagttcctgctgctgctgctgatgctgggctgtgtgctgatgatggtggccatgctgcaccccccccaccacaccctgcaccagacagtgacagcccaggccagcaagcacagccctgaggcccgctaccgcctggactttggagagagccaggactgggtgctggaggccgaggatgaaggagaggagtacagccccctggagggcctgccccccttcatcagcctgcgggaggaccagctgctggtggccgtggccctgccccaggcccggaggaaccagagccagggccggcggggcggcagctaccgcctcatcaagcagccccggcggcaggacaaggaggcccccaagagggactggggcgcagatgaagatggagaggtgtctgaggaggaggagctgacccccttcagcctggacccccggggcctgcaggaggccctgagcgcccgcatccccctgcagagggccctgcctgaggtgcgccaccccctgtgcctgcagcagcacccccaggacagcctgcccacagccagcgtcatcctgtgcttccatgatgaggcctggagcaccctgctgaggacagtgcacagcatcctggacacagtgccccgggccttcctgaaggagatcatcctggtggatgacctgagccagcagggccagctgaagagcgccctgtctgaatatgtggcccggctggagggcgtgaagctgctgcggagcaacaagaggctgggcgccatccgggccaggatgctgggcgccacccgggccactggagatgtgctggtgttcatggatgcccactgtgagtgccaccctggctggctggagcccctgctgagcagaattgctggggacaggagccgggtggtgtcccctgtgattgatgtgattgactggaagaccttccagtactaccccagcaaggacctgcagaggggcgtgctggactggaagctggacttccactgggagcccctgcctgagcacgtgaggaaggccctgcagagccccatcagccccatccgcagccctgtggtgcctggagaggtggtggccatggacagacactacttccagaacacaggagcctatgacagcctgatgagcctgcggggcggggagaacctggagctgtccttcaaggcctggctgtgtggcggctctgtggagatcctgccctgcagccgggtgggccacatctaccagaaccaggacagccacagccccctggaccaggaggccaccctgaggaacagagtgagaattgctgagacctggctgggcagcttcaaggagaccttctacaagcacagccctgaggccttcagcctgagcaaggccgagaagccagactgcatggagcggctgcagctgcagaggcggctgggctgcaggaccttccactggttcctggccaacgtgtacccagagctgtaccccagcgagccccggcccagcttcagcggcaagctgcacaacacaggcctgggcctgtgtgccgactgccaggccgagggggacatcctgggctgccccatggtgctggccccctgcagcgacagccggcagcagcagtacctgcagcacaccagcaggaaggagatccacttcggcagcccccagcacctgtgctttgctgtgcggcaggagcaggtgatcctgcagaactgcacagaggagggcctggccatccaccagcagcactgggacttccaggagaatggcatgattgtgcacatcctgagcggcaagtgcatggaggccgtggtgcaggagaacaacaaggacctgtacctgcggccctgtgatggcaaggcccggcagcagtggaggtttgaccagatcaatgctgtggatgaaagatag

SEQ ID NO: 230546 - DNA, 591 bp, Artificial Sequence
  derived and/or modified sequence
atggagcggctgcagctgcagaggcggctgggctgcaggaccttccactggttcctggccaacgtgtacccagagctgtaccccagcgagccccggcccagcttcagcggcaagctgcacaacacaggcctgggcctgtgtgccgactgccaggccgagggggacatcctgggctgccccatggtgctggccccctgcagcgacagccggcagcagcagtacctgcagcacaccagcaggaaggagatccacttcggcagcccccagcacctgtgctttgctgtgcggcaggagcaggtgatcctgcagaactgcacagaggagggcctggccatccaccagcagcactgggacttccaggagaatggcatgattgtgcacatcctgagcggcaagtgcatggaggccgtggtgcaggagaacaacaaggacctgtacctgcggccctgtgatgagaagccagccagcagtggagtgctgaccaggtccatgctgtggatgaatgatgagtgccagtgccagaaggagaagaggatcctggccatcaagatccagctgcaggtgaacctgaagagcctgtacatctcctag

SEQ ID NO: 230547 - DNA, 1920 bp, Artificial Sequence
  derived and/or modified sequence
atgctgctgcggaagcggtaccggcaccggccctgccggctgcagttcttgctgctgctgttgatgttgggctgcgtgctgatgatggtggcgatgctccacccccctcatcacaccctgcaccagaccgtgaccgcgcaggcatccaagcatagccccgaagccagataccgacttgatttcggcgagagtcaggactgggtcctggaagccgaagatgagggtgaagagtattctccattggaagggcttccacccttcatctcactacgagaagaccaactgcttgtggcggtcgcccttcctcaagcccgcaggaaccagtctcagggtcgaaggggcggctcataccgcctcatcaagcagccacgtagacaggacaaagaagccccaaaaagggattggggggctgatgaggacggcgaagtgagcgaagaggaggaacttacacccttctccctcgaccctagaggactccaagaagctctatcagcccgaatacccctgcagcgcgctctcccagaggttaggcaccctttgtgtctccaacagcacccacaggattcgttgccgaccgccagcgtgattctatgtttccacgatgaggcttggtctacacttctgcgtacagtgcactccatcctagacactgtgccaagggcctttctgaaagaaatcatccttgtggacgacctatcccagcaggggcagctgaagtcagctttgtctgagtacgtggcaagactggagggagtgaagcttctccgaagcaacaaacgcctcggcgccatcagagccaggatgctgggtgctactcgcgcaactggcgatgtactggtgttcatggacgcacattgcgagtgccaccccggctggctggagccactgctgtcaaggatagcaggtgataggtcacgggtggtgtcaccagtcatcgacgtgatcgactggaagaccttccaatactatcctagtaaggacctccaacgcggcgtcctggattggaagctcgactttcattgggagcccctgcccgagcatgtgaggaaggcactgcaatcccctatatcacccattcgctcacctgttgtcccaggggaggtggtcgcaatggacaggcattacttccagaacaccggcgcgtatgatagtctgatgtcccttcgcggcggcgaaaacctggagctgagttttaaagcttggctttgcggcggatcagtggagatcctgccctgctctcgtgtaggccatatttaccaaaatcaggattcacatagccccctggatcaggaagcaactcttcgaaacagggtcagaattgctgaaacttggctgggcagctttaaagagaccttctataagcacagtccagaggcattctcattgagcaaagccgaaaaacccgactgtatggagagacttcagctccagcgccggttaggctgcaggacctttcattggtttttggccaatgtgtacccagaactgtacccttctgaacctcgcccttccttctccggcaaactgcataataccggactcggactgtgcgcagattgccaggccgaaggcgatatcctcgggtgtccaatggtgttagcaccctgttcagatagccggcaacagcagtatctccagcacacatccaggaaggaaatccacttcggctcgccccagcatctctgctttgccgtcaggcaggagcaggtgatactccagaattgcactgaggaaggacttgcgatccatcagcaacactgggatttccaggagaacggtatgatcgtgcatattctcagcgggaaatgcatggaggcagtcgtccaggaaaacaataaggacctgtatcttagaccttgcgatgggaaggctaggcaacagtggcggtttgatcagataaatgctgtggacgagcgctag

SEQ ID NO: 230548 - DNA, 591 bp, Artificial Sequence
  derived and/or modified sequence
atggagcggctgcagctgcagcggcggctgggctgccggaccttccattggttcctggctaacgtctatccagagctctatcccagcgaaccacggcctagcttttctgggaaactccacaacactggccttggtctctgtgcggattgccaggccgaaggggatatcctgggctgtccgatggtccttgcaccatgcagcgatagcagacagcagcaatatctgcagcatacttcccggaaggaaatacatttcgggtccccccagcatctatgtttcgcggttagacaggagcaggtcatactgcagaattgtaccgaagaaggcttagcaatccaccaacaacactgggatttccaggaaaatggtatgattgttcacatacttagcggcaaatgtatggaagcagtcgtgcaggaaaacaataaggacttatatctgcgaccctgcgatgaaaaacccgcatcatccggtgtattgacccgctccatgctttggatgaacgacgagtgccagtgccagaaagagaaaaggatactcgcgatcaaaatccagctgcaagtgaatttaaagtcactgtatattagctag

SEQ ID NO: 230549 - DNA, 1920 bp, Artificial Sequence
  derived and/or modified sequence
atgttgctgcgcaaacggtaccggcatcggccatgtcgtctacagtttctcctgctcttattaatgcttggctgtgtgctcatgatggtggccatgctgcacccccctcaccacactctccaccagaccgttaccgctcaggctagcaagcacagcccagaagccaggtatcgtcttgacttcggcgagagtcaggattgggtgctcgaggcggaggacgaaggcgaggagtactcccctttagagggtcttccaccgtttattagtcttagggaggaccagcttctggtagcagtagctctacctcaggctcgccgaaatcagtcccagggtcgcagggggggaagttaccgcctcataaaacagccaagacgccaggacaaagaagctcccaaaagggattggggggctgacgaggatggcgaggtgtctgaggaggaagaactcaccccatttagccttgatccgcgaggtctgcaggaggccctgtcagctcggattccgctgcagagagccctgcctgaggtaagacacccgctatgcctgcaacagcaccctcaggattctcttccaacggcgagtgtcatcttatgttttcacgacgaggcttggtcgacattgctgcggacggtacactccattctagacaccgttcctagagcttttctgaaagagataattctggttgatgatttatcacagcaaggccagctaaaaagcgccctgagcgaatacgttgccaggctggagggggttaaactactacggtctaacaaacgcctgggcgcaatacgcgctagaatgttgggcgcaacaagggcgacgggtgacgtcctggtgttcatggacgctcattgcgagtgccatccgggatggttggagccccttctgtcccggatagccggagataggagccgcgtggttagtcccgtgattgacgtcatcgattggaagacattccagtattaccccagcaaagaccttcagaggggagtcctggattggaaacttgattttcactgggaaccattaccggaacatgtcaggaaggcccttcagagtcccatttcacccatcagaagtcccgttgttccaggcgaagtggttgcaatggatcgtcactattttcagaatacaggcgcttatgattcactcatgtctctgaggggtggtgaaaacctcgagttgtcattcaaagcctggctctgcgggggatccgtggaaatattaccctgttcacgggtgggacacatttatcagaaccaggattcacacagtcctctggaccaggaggccacccttaggaatcgggtgaggattgccgaaacttggctgggtagtttcaaggagacgttctacaagcactccccagaagctttttccctgtcaaaggcagagaagccggattgcatggaaaggttacagctgcagcggcgacttggatgtagaacgttccattggtttctcgcgaatgtgtacccagagctatacccctcagagccaagacccagcttctcaggtaagctgcacaatactggtctgggtttgtgtgccgactgccaggctgaaggtgacatactcggctgcccaatggttttggccccttgctctgacagtagacagcaacaatatctccagcacacatcacgcaaggagatccacttcggtagcccccagcatctgtgcttcgccgtcagacaggaacaggtgatccttcagaactgcacggaagaaggtcttgctattcatcagcaacactgggatttccaggaaaatggaatgattgtgcacattctatccgggaaatgtatggaagccgttgtgcaggagaacaacaaggacttgtatctaagaccctgcgacgggaaggccaggcagcaatggcggtttgaccagatcaatgcagtagatgagcgctag

SEQ ID NO: 230550 - DNA, 591 bp, Artificial Sequence
  derived and/or modified sequence
atggaacgcttacagctccagagaaggctcggttgccgaactttccactggtttttggcaaacgtgtatccggagctgtatccaagtgaacccaggccttctttcagcggcaaactgcataatactggattaggcctgtgcgctgattgtcaggctgagggagatatcctcggctgccccatggtgttggcgccatgctccgactcaaggcagcagcaatacctccagcacacttcccgaaaggaaatccacttcggctctcctcagcatttatgtttcgctgtgcgtcaggagcaggtaatccttcaaaactgcacagaagaaggcctggccatacaccagcaacactgggattttcaggaaaacggaatgattgtacacatcttgagcggtaaatgcatggaagcggtcgttcaggagaataataaggacctgtacttgcggccatgcgatgaaaagcccgcaagcagcggcgtccttaccagaagcatgctctggatgaacgatgaatgccagtgtcagaaagaaaagcgaatcttagccatcaaaattcaactccaagtaaacctgaaatccttatatatctcatag

SEQ ID NO: 230551 - DNA, 4669 bp, Artificial Sequence
  derived and/or modified sequence
gaaaggaaaccaggcactgcctgccggctttacatctgttgatctgacctgactggaagcgtccaaagagggacggctgtcagccctgcttgactgagaacccaccagctcatcccagacacctcatagcaacctatttatacaaagggggaaagaaacacctgagcagaatggaatcattatttttttcccaaggagaaaaccggggtaaagggagggaagcaattcaatttgaagtccctgtgaatgggctttcagaaggcaattaaagaaatccactcagagaggacttggggtgaaacttgggtcctgtggttttctgattgtaagtggaagcaggtcttgcacacgctgttggcaaatgtcaggaccaggttaagtgactggcagaaaaacttccaggtggaacaagcaacccaggttctgctgcaagcttgaaggagcctggagcgggagaaagctaacttgaacatgacctgttgcatttggcaagttctagcaacatgctcctaaggaagcgatacaggcacagaccatgcagactccagttcctcctgctgctcctgatgctgggatgcgtcctgatgatggtggcgatgttgcaccctccccaccacaccctgcaccagactgtcacagcccaagccagcaagcacagccctgaagccaggtaccgcctggactttggggaatcccaggattgggtactggaagctgaggatgagggtgaagagtacagccctctggagggcctgccaccctttatctcactgcgggaggatcagctgctggtggccgtggccttaccccaggccagaaggaaccagagccagggcaggagaggtgggagctaccgcctcatcaagcagccaaggaggcaggataaggaagccccaaagagggactggggggctgatgaggacggggaggtgtctgaagaagaggagttgaccccgttcagcctggacccacgtggcctccaggaggcactcagtgcccgcatccccctccagagggctctgcccgaggtgcggcacccactgtgtctgcagcagcaccctcaggacagcctgcccacagccagcgtcatcctctgtttccatgatgaggcctggtccactctcctgcggactgtacacagcatcctcgacacagtgcccagggccttcctgaaggagatcatcctcgtggacgacctcagccagcaaggacaactcaagtctgctctcagcgaatatgtggccaggctggagggggtgaagttactcaggagcaacaagaggctgggtgccatcagggcccggatgctgggggccaccagagccaccggggatgtgctcgtcttcatggatgcccactgcgagtgccacccaggctggctggagcccctcctcagcagaatagctggtgacaggagccgagtggtatctccggtgatagatgtgattgactggaagactttccagtattacccctcaaaggacctgcagcgtggggtgttggactggaagctggatttccactgggaacctttgccagagcatgtgaggaaggccctccagtcccccataagccccatcaggagccctgtggtgcccggagaggtggtggccatggacagacattacttccaaaacactggagcgtatgactctcttatgtcgctgcgaggtggtgaaaacctcgaactgtctttcaaggcctggctctgtggtggctctgttgaaatccttccctgctctcgggtaggacacatctaccaaaatcaggattcccattcccccctcgaccaggaggccaccctgaggaacagggttcgcattgctgagacctggctggggtcattcaaagaaaccttctacaagcatagcccagaggccttctccttgagcaaggctgagaagccagactgcatggaacgcttgcagctgcaaaggagactgggttgtcggacattccactggtttctggctaatgtctaccctgagctgtacccatctgaacccaggcccagtttctctggaaagctccacaacactggacttgggctctgtgcagactgccaggcagaaggggacatcctgggctgtcccatggtgttggctccttgcagtgacagccggcagcaacagtacctgcagcacaccagcaggaaggagattcactttggcagcccacagcacctgtgctttgctgtcaggcaggagcaggtgattcttcagaactgcacggaggaaggcctggccatccaccagcagcactgggacttccaggagaatgggatgattgtccacattctttctgggaaatgcatggaagctgtggtgcaagaaaacaataaagatttgtacctgcgtccgtgtgatggaaaagcccgccagcagtggcgttttgaccagatcaatgctgtggatgaacgatgaatgtcaatgtcagaaggaaaagagaattttggccatcaaaatccagctccaagtgaacttaaagagcttatatatttcatgaagctgatccttttgtgtgtgtgctcctggtgttaggagagaaaaaagctctatgaaagaatataggaagtttctccttttcacaccttatttcattgactgctggctgctttaaaaaaaaaaaaaaaggatccattgtaccgttgtcttcatcactgggaaatgattattacatagtacagaagattctttgtttttctccactgagcacttaacaattgctttctctctggcctggacattctctggcagcacctccaggatacataaattcaatggatcaatttatttgtcttcaaatggccttaacttggattgtctgtttggccaaccatgaaaattaaagagtgaagcagatgtaatggcctgacattccaaaaactctgaattgggtttattagcacaaatgttgtgttcatttgttgagccatatctcagaagaaggaaagggagctacagaaaggaggtttaggattgcagagaagatgcaagagcactttggcccaattctccagctcaacccagcagctgaaaagcttcaagagatctaggaaaagacattttcatgttaatgagaatttccaccattgtagagaatttccttcctactgagaatctacctctattccccctgccctagctcttctctaacttggttaaccataaccataaccagattcccttgcaatcgatttctctttagtcgttggtgttagaagtaccagcacaatttgagcattcccattaacaaaggtgttcacagttgagaaactctcctgccgggcgcggtggctcatgcctgtaattccagcactttgggaggcagagttgggaggatcacctgatgtcaggggtttgagaccagcctggtcaacattgcaaaaccttgtctctactaaaaatacaaaaattagctgggcatggtggcgcatacctgtaatcccagctacttgggaggctgaggcaagagaatcgcttgaacccaggaggcagaggttgcagtgagctgagatcatgccattgcactccaacctgggtgacagagtgagactccatctcaaaaaaaaaaaaaaagagagaaactctcctgatgccctgttacagggtttgcactgactggagcagaaacagcaacctttctaaaaaagcaaacctttttcctgggaggaaaatgccagagcctgagccaaaattcttatgacaggtaacatttgggtgttaatgtccatgagagctgacagggccatctctgagcccatataactgtctggaacccccaaatgtgtccacaggttgaatgtccatgagtgtgggaagaacacggctcatctggagcacagctgaggctagtaagagctaaatgactttccttgctatgacttggcttacctgaattagctgtaagagttgccgaatgggatgggttctgctatttaataaacagcattcatattcatttttccccagatggagttacctacctttccacatggtcagcttagaaatcttcccctaaagatgctaatctcctttgggctgtctcagaacacagtatccttcaaataagaaaaactgagtgggaagtgcagtgtttccaaacaatacctatcataactacgtattcattgtctacctgctaagtcaagggttcactgcatttctccttcctcagaatacactctggacctgtgctgtctaatatggtagccactaacaaaatgtggccattttgatggaaatccattaaaatcaaagaaaatttaaaactcaattcctcaattgggctggccacatttcaaatgctcactacccacctgtggctagggtctacttctactgtattggcgagcatggatatagaacatttcatcacagttctgttggaccaatctagatagattcattatcccatctagagaagagactttagtcactgtcttcttgcttcagacccatctatatttaaaacaaatttccctaaatcctgagactgagacggagctacaaattctcagatggcgaccgtgtaaatggtattagcggctgaagaaaaaaaatttttcaagacctctgttttttaactgaactttatcattggcattgtgggtctttgaagttgctgggataaattaatataattaaataaaagactgaatttaattgca

SEQ ID NO: 230552 - DNA, 2775 bp, Artificial Sequence
  derived and/or modified sequence
caggctgagaagccagactgcatggaacgcttgcagctgcaaaggagactgggttgtcggacattccactggtttctggctaatgtctaccctgagctgtacccatctgaacccaggcccagtttctctggaaagctccacaacactggacttgggctctgtgcagactgccaggcagaaggggacatcctgggctgtcccatggtgttggctccttgcagtgacagccggcagcaacagtacctgcagcacaccagcaggaaggagattcactttggcagcccacagcacctgtgctttgctgtcaggcaggagcaggtgattcttcagaactgcacggaggaaggcctggccatccaccagcagcactgggacttccaggagaatgggatgattgtccacattctttctgggaaatgcatggaagctgtggtgcaagaaaacaataaagatttgtacctgcgtccgtgtgatgaaaagcccgccagcagtggcgttttgaccagatcaatgctgtggatgaacgatgaatgtcaatgtcagaaggaaaagagaattttggccatcaaaatccagctccaagtgaacttaaagagcttatatatttcatgaagctgatccttttgtgtgtgtgctcctggtgttaggagagaaaaaagctctatgaaagaatataggaagtttctccttttcacaccttatttcattgactgctggctgctttaaaaaaaaaaaaaaaggatccattgtaccgttgtcttcatcactgggaaatgattattacatagtacagaagattctttgtttttctccactgagcacttaacaattgctttctctctggcctggacattctctggcagcacctccaggatacataaattcaatggatcaatttatttgtcttcaaatggccttaacttggattgtctgtttggccaaccatgaaaattaaagagtgaagcagatgtaatggcctgacattccaaaaactctgaattgggtttattagcacaaatgttgtgttcatttgttgagccatatctcagaagaaggaaagggagctacagaaaggaggtttaggattgcagagaagatgcaagagcactttggcccaattctccagctcaacccagcagctgaaaagcttcaagagatctaggaaaagacattttcatgttaatgagaatttccaccattgtagagaatttccttcctactgagaatctacctctattccccctgccctagctcttctctaacttggttaaccataaccataaccagattcccttgcaatcgatttctctttagtcgttggtgttagaagtaccagcacaatttgagcattcccattaacaaaggtgttcacagttgagaaactctcctgccgggcgcggtggctcatgcctgtaattccagcactttgggaggcagagttgggaggatcacctgatgtcaggggtttgagaccagcctggtcaacattgcaaaaccttgtctctactaaaaatacaaaaattagctgggcatggtggcgcatacctgtaatcccagctacttgggaggctgaggcaagagaatcgcttgaacccaggaggcagaggttgcagtgagctgagatcatgccattgcactccaacctgggtgacagagtgagactccatctcaaaaaaaaaaaaaaagagagaaactctcctgatgccctgttacagggtttgcactgactggagcagaaacagcaacctttctaaaaaagcaaacctttttcctgggaggaaaatgccagagcctgagccaaaattcttatgacaggtaacatttgggtgttaatgtccatgagagctgacagggccatctctgagcccatataactgtctggaacccccaaatgtgtccacaggttgaatgtccatgagtgtgggaagaacacggctcatctggagcacagctgaggctagtaagagctaaatgactttccttgctatgacttggcttacctgaattagctgtaagagttgccgaatgggatgggttctgctatttaataaacagcattcatattcatttttccccagatggagttacctacctttccacatggtcagcttagaaatcttcccctaaagatgctaatctcctttgggctgtctcagaacacagtatccttcaaataagaaaaactgagtgggaagtgcagtgtttccaaacaatacctatcataactacgtattcattgtctacctgctaagtcaagggttcactgcatttctccttcctcagaatacactctggacctgtgctgtctaatatggtagccactaacaaaatgtggccattttgatggaaatccattaaaatcaaagaaaatttaaaactcaattcctcaattgggctggccacatttcaaatgctcactacccacctgtggctagggtctacttctactgtattggcgagcatggatatagaacatttcatcacagttctgttggaccaatctagatagattcattatcccatctagagaagagactttagtcactgtcttcttgcttcagacccatctatatttaaaacaaatttccctaaatcctgagactgagacggagctacaaattctcagatggcgaccgtgtaaatggtattagcggctgaagaaaaaaaatttttcaagacctctgttttttaactgaactttatcattggcattgtgggtctttgaagttgctgggataaattaatataattaaataaaagactgaatttaattgc

SEQ ID NO: 230553 - protein, 553 aa, Artificial Sequence
  derived and/or modified sequence
MGALEMQDEEDRIEALKQVADKLPRPNLLLLKHLVYVLHLISKNSEVNRMDSSNLAICIGPNMLTLENDQSLSFEAQKDLNNKVKTLVEFLIDNCFEIFGENIPVHSSITSDDSLEHTDSSDVSTLQNDSAYDSNDPDVESNSSSGISSPSRQPQVPMATAAGLDSAGPQDAREVSPEPIVSTVARLKSSLAQPDRRYSEPSMPSSQECLESRVTNQTLTKSEGDFPVPRVGSRLESEEAEDPFPEEVFPAVQGKTKRPVDLKIKNLAPGSVLPRALVLKAFSSSSLDASSDSSPVASPSSPKRNFFSRHQSFTTKTEKGKPSREIKKHSMSFTFAPHKKVLTKNLSAGSGKSQDFTRDHVPRGVRKESQLAGRIVQENGCETHNQTARGFCLRPHALSVDDVFQGADWERPGSPPSYEEAMQGPAARLVASESQTVGSMTVGSMRARMLEAHCLLPPLPPAHHVEDSRHRGSKEPLPGHGLSPLPERWKQSRTVHASGDSLGHVSGPGRPELLPLRTVSESVQRNKRDCLVRRCSQPVFEADQFQYAKESYI

SEQ ID NO: 230554 - protein, 731 aa, Artificial Sequence
  derived and/or modified sequence
MKLRSSHNASKTLNANNMETLIECQSEGDIKEHPLLASCESEDSICQLIEVKKRKKVLSWPFLMRRLSPASDFSGALETDLKASLFDQPLSIICGDSDTLPRPIQDILTILCLKGPSTEGIFRRAANEKARKELKEELNSGDAVDLERLPVHLLAVVFKDFLRSIPRKLLSSDLFEEWMGALEMQDEEDRIEALKQVADKLPRPNLLLLKHLVYVLHLISKNSEVNRMDSSNLAICIGPNMLTLENDQSLSFEAQKDLNNKVKTLVEFLIDNCFEIFGENIPVHSSITSDDSLEHTDSSDVSTLQNDSAYDSNDPDVESNSSSGISSPSRQPQVPMATAAGLDSAGPQDAREVSPEPIVSTVARLKSSLAQPDRRYSEPSMPSSQECLESRVTNQTLTKSEGDFPVPRVGSRLESEEAEDPFPEEVFPAVQGKTKRPVDLKIKNLAPGSVLPRALVLKAFSSSSLDASSDSSPVASPSSPKRNFFSRHQSFTTKTEKGKPSREIKKHSMSFTFAPHKKVLTKNLSAGSGKSQDFTRDHVPRGVRKESQLAGRIVQENGCETHNQTARGFCLRPHALSVDDVFQGADWERPGSPPSYEEAMQGPAARLVASESQTVGSMTVGSMRARMLEAHCLLPPLPPAHHVEDSRHRGSKEPLPGHGLSPLPERWKQSRTVHASGDSLGHVSGPGRPELLPLRTVSESVQRNKRDCLVRRCSQPVFEADQFQYAKESYI

SEQ ID NO: 230555 - protein, 275 aa, Artificial Sequence
  derived and/or modified sequence
MATAAGLDSAGPQDAREVSPEPIVSTVARLKSSLAQPDRRYSEPSMPSSQECLESRVTNQTLTKSEGDFPVPRVGSRLESEEAEDPFPEEVFPAVQGKTKRPVDLKIKNLAPGSVLPRALVLKAFSSSSLDASSDSSPVASPSSPKRNFFSRHQSFTTKTEKGKPSREIKKHSMSFTFAPHKKVLTKNLSAGSGKSQDFTRDHVPRGVRKESQLAGRIVQENGCETHNQTARGFCLRPHALSVDDVFQGADWERPGSPPSYEEAMQGPAARPWGA

SEQ ID NO: 230556 - DNA, 2196 bp, Artificial Sequence
  derived and/or modified sequence
atgaagctgagaagcagccacaacgccagcaagaccctgaacgccaacaacatggagaccctgatcgagtgccagagcgagggcgacatcaaggagcaccccctgctggccagctgcgagagcgaggacagcatctgccagctgatcgaggtgaagaagagaaagaaggtgctgagctggcccttcctgatgagaagactgagccccgccagcgacttcagcggcgccctggagaccgacctgaaggccagcctgttcgaccagcccctgagcatcatctgcggcgacagcgacaccctgcccagacccatccaggacatcctgaccatcctgtgcctgaagggccccagcaccgagggcatcttcagaagagccgccaacgagaaggccagaaaggagctgaaggaggagctgaacagcggcgacgccgtggacctggagagactgcccgtgcacctgctggccgtggtgttcaaggacttcctgagaagcatccccagaaagctgctgagcagcgacctgttcgaggagtggatgggcgccctggagatgcaggacgaggaggacagaatcgaggccctgaagcaggtggccgacaagctgcccagacccaacctgctgctgctgaagcacctggtgtacgtgctgcacctgatcagcaagaacagcgaggtgaacagaatggacagcagcaacctggccatctgcatcggccccaacatgctgaccctggagaacgaccagagcctgagcttcgaggcccagaaggacctgaacaacaaggtgaagaccctggtggagttcctgatcgacaactgcttcgagatcttcggcgagaacatccccgtgcacagcagcatcaccagcgacgacagcctggagcacaccgacagcagcgacgtgagcaccctgcagaacgacagcgcctacgacagcaacgaccccgacgtggagagcaacagcagcagcggcatcagcagccccagcagacagccccaggtgcccatggccaccgccgccggcctggacagcgccggcccccaggacgccagagaggtgagccccgagcccatcgtgagcaccgtggccagactgaagagcagcctggcccagcccgacagaagatacagcgagcccagcatgcccagcagccaggagtgcctggagagcagagtgaccaaccagaccctgaccaagagcgagggcgacttccccgtgcccagagtgggcagcagactggagagcgaggaggccgaggaccccttccccgaggaggtgttccccgccgtgcagggcaagaccaagagacccgtggacctgaagatcaagaacctggcccccggcagcgtgctgcccagagccctggtgctgaaggccttcagcagcagcagcctggacgccagcagcgacagcagccccgtggccagccccagcagccccaagagaaacttcttcagcagacaccagagcttcaccaccaagaccgagaagggcaagcccagcagagagatcaagaagcacagcatgagcttcaccttcgccccccacaagaaggtgctgaccaagaacctgagcgccggcagcggcaagagccaggacttcaccagagaccacgtgcccagaggcgtgagaaaggagagccagctggccggcagaatcgtgcaggagaacggctgcgagacccacaaccagaccgccagaggcttctgcctgagaccccacgccctgagcgtggacgacgtgttccagggcgccgactgggagagacccggcagcccccccagctacgaggaggccatgcagggccccgccgccagactggtggccagcgagagccagaccgtgggcagcatgaccgtgggcagcatgagagccagaatgctggaggcccactgcctgctgccccccctgccccccgcccaccacgtggaggacagcagacacagaggcagcaaggagcccctgcccggccacggcctgagccccctgcccgagagatggaagcagagcagaaccgtgcacgccagcggcgacagcctgggccacgtgagcggccccggcagacccgagctgctgcccctgagaaccgtgagcgagagcgtgcagagaaacaagagagactgcctggtgagaagatgcagccagcccgtgttcgaggccgaccagttccagtacgccaaggagagctacatctag

SEQ ID NO: 230557 - DNA, 2196 bp, Artificial Sequence
  derived and/or modified sequence
atgaagctgaggtcgtctcataacgcgagcaagacattgaatgctaataatatggagacacttattgaatgtcagtctgagggggatattaaggagcacccgctgctcgctagctgtgaatctgaggactccatatgtcaattaatcgaggttaagaaaaggaagaaagtcctgtcatggccgtttttgatgagacggctgagcccggctagcgacttctcaggcgcgttggagacggacctcaaggccagcctcttcgaccagcccctgagtataatctgtggagacagtgacacactcccaagacctatccaagacatcctgaccatattgtgcttgaaggggccaagtactgagggaatctttaggagggccgctaatgaaaaggctagaaaagaactcaaggaggagctcaattcgggcgacgccgtggatctggagagactcccagtgcatctgcttgctgtggtcttcaaagactttctgcgctcgatcccccgtaaacttctgtcttccgatctgtttgaagagtggatgggtgccctcgagatgcaggatgaggaggatcgaatcgaggcactgaagcaggttgctgataagctgccacgacctaacttactgctgttaaagcatctggtgtacgttctgcacctgatcagtaaaaactccgaggtcaaccgcatggactcaagcaacctagccatatgtatcgggcccaacatgttaactctggagaatgatcagagcctttctttcgaggctcagaaggacttgaacaataaagtgaagactttggttgaattcctgatcgacaactgttttgagattttcggcgagaatatccccgtgcactcctccatcactagcgatgacagtttggagcacactgactctagtgacgtcagtactctgcagaacgattcagcttatgactccaacgaccccgatgtggaaagcaattcaagctctggcatcagcagtccaagcagacaaccgcaagtgcctatggcgacagccgccggcctggatagcgccggtccccaggacgccagagaggttagtcctgagcccatcgtgtccacagtggctcgcttgaagtccagtctggcgcagcccgatcggagatactcagagcctagtatgccaagctcacaagaatgtttggaatcaagagtgaccaaccagacgctaaccaagtccgagggtgacttccctgtgcctagggtaggaagcagactggagagcgaggaagcggaggatcccttcccagaggaggttttccctgctgttcagggaaagactaagcggccggtggatctcaaaataaagaatttggctcccgggagcgtcctgccacgcgcgcttgtcctgaaggctttcagttcgagttcactcgacgcatcaagtgatagttctcctgtagcctccccttcatctcctaaacggaatttcttttcacgccatcagtctttcacaactaagaccgagaagggtaagcccagcagggagataaaaaaacatagcatgtcattcactttcgcgccacacaaaaaggtgttaaccaagaacctgtctgcaggttcaggcaaatcccaagatttcaccagagatcatgtgcctaggggcgtgcggaaggagtctcaactggccggacggatcgtgcaagaaaatggatgtgagacccataatcagacggcccgggggttctgccttaggccacacgctctgagcgttgacgatgtgttccagggagcggattgggaaaggcctgggtctccccctagctacgaggaggccatgcaggggccagcagcccgcctcgttgcctcagaatcccagacagtcgggagcatgactgtgggcagcatgcgtgcaaggatgctggaggcccactgtctgctccctcctctgcctcccgcccatcatgtcgaagattctaggcaccgcgggtcgaaagaaccactgcctggccacggcctgagtccactcccagagcggtggaaacaatcccggacagtgcacgcctctggcgatagcctgggccatgtgtctggaccaggtcgccctgagctgctccccctaaggacagtgagcgagagcgttcagcgcaataagagagactgtctggtacgccggtgcagtcaaccagtttttgaggcagatcaattccagtacgcaaaggagtcctacatttag

SEQ ID NO: 230558 - DNA, 2196 bp, Artificial Sequence
  derived and/or modified sequence
atgaagctgcggagcagccacaatgccagcaagaccctgaatgccaacaacatggagaccctgattgagtgccagagcgagggggacatcaaggagcaccccctgctggccagctgtgagagcgaggacagcatctgccagctgattgaggtgaagaagaggaagaaggtgctgtcctggcccttcctgatgaggcggctgagccctgccagtgacttcagcggggccctggagacagacctgaaggccagcctgtttgaccagcccctgagcatcatctgtggggacagcgacaccctgccccggcccatccaggacatcctgaccatcctgtgcctgaagggccccagcacagagggcatcttcagaagagctgccaatgagaaggccaggaaggagctgaaggaggagctgaacagcggagatgctgtggacctggagcggctgcctgtgcacctgctggccgtggtgttcaaggacttcctgcggagcatccccaggaagctgctgagcagtgacctgtttgaggagtggatgggcgccctggagatgcaggatgaggaggacagaattgaggccctgaagcaggtggccgacaagctgccccggcccaacctgctgctgctgaagcacctggtgtatgtgctgcacctgatcagcaagaacagcgaggtgaacaggatggacagcagcaacctggccatctgcatcggccccaacatgctgaccctggagaatgaccagagcctgagctttgaggcccagaaggacctgaacaacaaggtgaagaccctggtggagttcctgattgacaactgctttgagatctttggagagaacatccctgtgcacagcagcatcaccagtgatgacagcctggagcacacagacagcagtgatgtgtccaccctgcagaatgacagcgcctatgacagcaatgaccctgatgtggagagcaacagcagcagcggcatcagcagccccagccggcagccccaggtgcccatggccacagctgctggcctggacagcgctggcccccaggatgcccgggaggtgtccccagagcccatcgtgtccacagtggcccggctgaagagcagcctggcccagcctgaccggcgctacagcgagcccagcatgcccagcagccaggagtgcctggagagccgggtgaccaaccagaccctgaccaagtctgagggggacttccctgtgccccgggtgggcagccggctggagagcgaggaggccgaggaccccttccctgaggaggtgtttcctgctgtgcagggcaagaccaagaggcctgtggacctgaagatcaagaacctggcccctggctctgtgctgccccgggccctggtgctgaaggccttcagcagcagcagcctggatgccagcagtgacagcagccctgtggccagccccagcagccccaagaggaacttcttcagccgccaccagagcttcaccaccaagacagagaagggcaagcccagccgggagatcaagaagcacagcatgtccttcacctttgccccccacaagaaggtgctgaccaagaacctgtctgctggcagcggcaagagccaggacttcacccgggaccacgtgccccggggcgtgaggaaggagagccagctggccggcagaattgtgcaggagaatggctgtgagacccacaaccagacagcccggggcttctgcctgcggccccacgccctgtctgtggatgatgtgttccagggcgctgactgggagcggcccggcagccccccatcctatgaggaggccatgcagggccctgctgcccggctggtggccagcgagagccagacagtgggctccatgacagtgggctccatgagggccaggatgctggaggcccactgcctgctgccccccctgcccccagcccaccacgtggaggacagccgccaccggggcagcaaggagcccctgcccggccacggcctgagccccctgcctgagcgctggaagcagagcaggacagtgcacgccagcggggacagcctgggccacgtgtctggccctggccggcctgagctgctgcccctgaggacagtgtctgagagcgtgcagaggaacaagagggactgcctggtgcggcgctgcagccagcctgtgtttgaggccgaccagttccagtatgccaaggagagctacatctag

SEQ ID NO: 230559 - DNA, 2196 bp, Artificial Sequence
  derived and/or modified sequence
atgaagctgcggagcagccacaacgccagcaagaccctgaacgccaataacatggaaacactgatcgagtgccagtccgaaggcgacattaaagagcatcctctgctcgcttcttgtgagtcggaagacagcatatgccagctgatcgaggtcaagaagcggaaaaaagtgctatcctggcctttccttatgcgaagactgtcccctgcaagcgattttagtggcgccctcgaaacagacctcaaggctagcctgtttgatcaaccgctgagcataatatgcggggattcagacacactgcccaggcctattcaggatattctgactatcttgtgcctgaagggcccatccactgaggggattttccgccgcgctgccaatgaaaaggccagaaaggaactcaaagaggagttaaatagtggtgatgctgtggacctggagaggctgcccgtgcacctcctggccgtcgtctttaaagatttcctgcggagtatccccaggaaactgctatctagtgatctgtttgaagagtggatgggagctttggagatgcaggatgaagaagaccgcatagaagccctgaagcaggtcgccgacaagctgccgcgccccaatctcttacttctgaagcaccttgtttacgtgctgcatctgatcagcaagaactccgaggttaatcgaatggactcaagtaacttggctatatgtataggtcccaatatgcttaccctcgagaatgaccagagcttaagcttcgaggcccagaaggatctgaacaataaagttaagactctggttgaatttctgatcgataactgcttcgagatcttcggcgagaacatacccgttcatagctctattacaagcgatgactcccttgaacacaccgattccagcgacgtttccactttgcagaacgattccgcgtatgatagcaacgatcctgacgtggaaagtaattctagttcgggcatcagtagcccttcgaggcaaccacaggtgccgatggccaccgctgccggactggattctgccggaccacaagatgcacgggaggtgtcacccgagccaattgtcagtactgttgctcgcctgaaatcttccttggctcaaccagaccggcggtacagtgagccatccatgccgagttcccaggagtgtctggaatcaagagtgaccaaccaaaccctgactaaatctgagggggattttcctgtaccgagggtgggatcgagactggaaagtgaggaagccgaagacccatttccagaagaagtgtttcccgcagtccaaggtaagaccaaacggcctgtggaccttaagattaaaaatctagctcctgggtctgtgttgcctcgtgcccttgtgcttaaggctttcagcagtagctcactggatgctagctcagacagctctcccgtggcttctccctcaagtcccaagcgcaacttcttctctcggcaccagtcctttacgacaaaaacagagaaggggaagcctagtagggagatcaaaaagcattccatgagctttaccttcgccccccacaagaaggtgctcaccaagaacctctccgccggatcaggaaagtcccaggattttacacgagaccatgtgccacgcggagtgcgcaaagagtcacagctggcgggaaggattgtgcaggagaacggctgcgaaacccacaaccagacagccagaggcttttgcctccggccccatgccctgtcagtggatgacgtgttccaaggtgccgattgggagagacccggctcaccgccttcttatgaggaggccatgcagggtcccgcagcacgtctggtggcaagcgagtcccaaacagtcgggtcaatgaccgtaggctccatgagggccaggatgcttgaggcacactgcctgctgccaccacttcctcctgcacatcatgtggaagactcgcgccacagggggtctaaggaacctcttcctggacacggtctgtctccacttcccgaaagatggaagcagagcaggaccgtgcacgctagtggcgactccttaggccacgtgagtgggccggggcgtcctgagttactgcctctgcggacagtgtcagagagcgtacagaggaacaaacgggactgcctagttagacgctgcagccagcctgttttcgaggccgaccagtttcagtatgccaaggaatcctatatctag

SEQ ID NO: 230560 - DNA, 2196 bp, Artificial Sequence
  derived and/or modified sequence
atgaaactcagaagttcccataacgcgtcaaaaactctcaatgcaaataatatggagactctcattgaatgtcagtctgaaggtgacatcaaagagcacccgctgttggctagttgcgaaagtgaagatagcatttgccagctgatcgaggtcaaaaagcgaaaaaaggtgctgagttggccgtttctaatgcgtaggctgagcccggctagcgacttcagcggggcactagagaccgatctcaaggcatcgttgttcgaccagcccctgagcattatttgcggggatagtgacacgctgccccgacctattcaagacattctgacaatcctttgcttgaagggcccaagtacagagggtatctttagacgcgctgccaacgaaaaagcacgcaaagaactcaaggaggagttgaatagtggcgatgccgtcgatctggaacggcttcctgtccatctattggccgttgtatttaaggacttcctacgcagcattcctcgaaaactactatcatctgatctcttcgaagagtggatgggagcactcgaaatgcaagatgaggaagacagaatcgaagccttaaagcaggtggcagataagctcccccgaccaaatttactgttactgaagcacctggtgtacgtactgcatttgattagcaagaacagcgaggtcaaccggatggactccagcaatctagccatatgtattggccctaatatgttgacactggaaaatgaccagtccctcagcttcgaagcccagaaggatctcaacaacaaagtgaaaacactggtcgaatttcttatcgacaattgctttgaaatcttcggcgagaacattcccgtgcacagcagtattacttccgatgatagcttagagcatacggatagctcggatgtgagcaccctgcagaacgactccgcctacgactccaacgaccccgatgtcgagtctaactcaagctctggcataagtagtccaagcaggcagccccaggtgcctatggccacggccgctggacttgacagcgctggaccacaggatgccagagaggtgagtccagagcccattgtttccaccgtagccagactgaagtcatccctggcccagccggatcgcagatactccgagccctcaatgccttcttctcaggagtgcctggagtccagggtcacaaaccagactctcactaaatccgaaggtgatttcccagtgcccagagtgggttcacggctcgaaagcgaggaggcagaggatcccttcccggaagaagtcttcccggcagtccagggaaagaccaagaggcctgtggatcttaagataaaaaacctggcaccaggctccgtgctgccacgcgctctggtgcttaaagcctttagttcatcctctctcgacgcgtctagcgactcttctccagtcgcatcaccctcctctcccaaaagaaattttttttcgcgacaccagagctttaccactaagaccgaaaaaggaaagccaagtagggaaataaagaaacattccatgtcatttacgttcgcaccccataagaaggtcctaacgaagaatttgtccgccggtagcggaaagtctcaggattttacccgcgatcacgtgcccaggggggtgagaaaagagtcccagctggccggaagaatagtgcaggagaatggatgcgagactcacaatcaaaccgccagggggttttgtctgcgcccacacgctctgagcgttgacgacgtgtttcagggagcggactgggagagacccggatctcctccttcatacgaggaggccatgcaaggtccagctgccagactcgtggcttctgaatctcagaccgtgggaagcatgactgtgggcagtatgagagctaggatgctggaagcccattgcctgcttcctcctctaccacccgctcatcatgttgaagattcacgtcatagggggagcaaggagcccctgcccggacacgggctgtcccccctgcccgagaggtggaagcaaagcagaacagtacatgcatctggcgactccctgggtcatgtgtctgggcctggtaggcctgaactgctgccgttgcgaacagtgtccgagtctgtacagcgaaacaaaagggattgtctggtgcgtagatgttcacagccggtattcgaggcggatcagttccaatacgcaaaagagtcctacatatag

SEQ ID NO: 230561 - DNA, 3887 bp, Artificial Sequence
  derived and/or modified sequence
gacatagctgccctaaaaggaatgaggaagcgagagctctccagtgtctggctggctccgtccgtgtgacagcccatgatgttctttccggtctctgtaatattctgaatttccacctgcccgccccttcgcttataatgcagagcatgtgaagggagaccggctcggtctctctctctcccagtggactagaaggagcagagagttatgctgtttctcccattctttacagctcaccggatgtaaaagaactctggctagagaccctccaaggacagaggcacagccacacgggagtgaaatccacccctggacagtcagccgcaatactgatgaagctgagaagcagccacaatgcttcaaaaacactaaacgccaataatatggagacactaatcgaatgtcaatcagagggtgatatcaaggaacatcccctgttggcatcatgtgagagtgaagacagtatttgccagctcattgaagttaagaagagaaagaaggtgctgtcctggccctttctcatgagaaggctctcccctgcatcagatttttctggggctttggagacagacttgaaagcatcgctatttgatcagcccttgtcaattatctgcggtgacagtgacacactccccagacccatccaggacattctcactattctatgccttaaaggcccttcaacggaagggatattcaggagagcagccaacgagaaagcccgtaaggagctgaaggaggagctcaactctggggatgcggtggatctggagaggctccccgtgcacctcctcgctgtggtctttaaggacttcctcagaagtatcccccggaagctactttcaagcgacctctttgaggagtggatgggtgctctggagatgcaggacgaggaggacagaatcgaggccctgaaacaggttgcagataagctcccccggcccaacctcctgctactcaagcacttggtctatgtgctgcacctcatcagcaagaactctgaggtgaacaggatggactccagcaatctggccatctgcattggacccaacatgctcaccctggagaatgaccagagcctgtcatttgaagcccagaaggacctgaacaacaaggtgaagacactggtggaattcctcattgataactgctttgaaatatttggggagaacattccagtgcattccagtatcacttctgatgactccctggagcacactgacagttcagatgtgtcgaccctgcagaatgactcagcctacgacagcaacgaccctgatgtggaatccaacagcagcagtggcatcagctctcccagcaggcagccccaggtgcccatggccacagctgctggcttggatagcgcgggcccacaggatgcccgagaggtcagcccagagcccattgtgagcaccgtggccaggctgaaaagctccctcgcacagcccgataggagatactcagagcccagcatgccatcctcccaggagtgcctcgagagccgggtgacaaaccaaacactaacaaagagtgaaggggacttccccgtgccccgggtaggctctcgtttggaaagtgaggaggctgaagacccatttccagaggaggtcttccctgcagtgcaaggcaaaaccaagaggccggtggacctgaagatcaagaacttggccccgggttcggtgctcccgcgggcactggttctcaaagccttctccagcagctcgctggacgcgtcctctgacagctcgcccgtggcttctccttccagtcccaaaagaaatttcttcagcagacatcagtctttcaccacaaagacagagaaaggcaagcccagccgagaaattaaaaagcactccatgtctttcacctttgcccctcacaaaaaagtgctgaccaaaaacctcagcgcgggctctgggaaatcgcaagactttaccagggaccacgtcccgaggggtgtcagaaaggaaagccagcttgccggccgaatcgtgcaggaaaatgggtgtgaaacccacaaccaaacagcccgcggcttctgcctgagaccccacgccctctcggtggatgatgtgttccagggagctgactgggagaggcctggaagcccaccctcttatgaagaggccatgcagggcccggcagccagactagtggcctccgagagccagaccgtggggagcatgacggtggggagcatgagggcgaggatgctggaggcgcactgcctcctaccccctcttccacctgctcaccacgtagaggactcaagacacaggggcagcaaagagccactccctggccacggactctctcccctgcctgagcgatggaaacagagcagaactgtccatgcttctggggactctctggggcacgtgtctggcccagggagacctgagctcctcccgctgaggaccgtctccgagtccgtgcagaggaataagcgggactgtctcgtgcgacgatgtagccagccggtctttgaggctgaccaattccaatatgccaaagaatcgtatatttaggagggaggccatacgccatgccatagcttgtgctatctgtaaatatgagacttgtaaagaactgcctgtagattgtttttaaaaggtcttgaataagctccttgagaaagttgtggaaagccctcctcagtgaggatagctacaccatggccatggcgcatcagatagtctctgtgtacctggatttgtgcaatatgtaaaaatgtatcaaatgtattatagataaggtgttaggtgcaaaggatgtctaataatccctgcacacgttttgaacttgcagtgaagtacactgctgttccttgcttcctggggcacttttctcttggttagtgtttaaaaattatcttcgcttttttaatgtggcctcaaatgtcatgccaattttcacatcttccacaaactccatttagggagaaatgtttaaatctctggtataagtttactccataccagagtaaactatatattactctatataagcagtcttgcaataactaatcaccaccatagaagaaagaaacagactgcaaggaacagagttgagtgtctggagtcatcaaaggcattaaaaactccagtaaaagctggggccgtagcaaaaatcatgaaaaacacttcaacgtgtcctttcaatcatccaattaaatgtgggtagattaatgaaaatgtattacatcaatattaactcatctatagcactttgagtatctttgtagttcatgatatcctatcctataatgtggaggtaaatgattttatatgcattgggggtcatatataaaacttcaatgtaatttcactacaataaattgccttccttatttgaaagtaaaaatgttctttttttattgacatgttaactcctttccctcaattaatagaaatccactaagaaaatcattcacatattggttcactcaacaagcatttattaaatatatattcactattctagactaatagcaagaccggggatcttgtttaggaagaagcagtccctgttctccagaatttgcaaaaccattaaaaaagcacctactttaagccattttttttcagcaaggagtcattctgccagaaaaatgtagtacacaaatacaggataatataacaaatgtaaaatttctcatttctagtgaattaaactttccagtaattttacatctcacctcattcttatgatgctcagtttgcttaattattggcaaacataatggtaaaatgtttgtactgtattagagctttactgttcgattattaagatatttatccagtatcttagagatgctggacttcaattttccttattttatctttttaaaataaaatatcatgcatgcttctgatttgttatagaaa

SEQ ID NO: 230562 - protein, 629 aa, Artificial Sequence
  derived and/or modified sequence
MSRQASKTSGGGSQGFSGRSAVVSGSSRMSCVAHSGGAGGGAYGFRSGAGGFGSRSLYNLGGNKSISISVAAGGSRAGGFGGGRSSCAFAGGYGGGFGSGYGGGFGGGFGGGRGMGGGFGGAGGFGGAGGFGGAGGFGGPGGFGGSGGFGGPGSLGSPGGFGPGGFPGGIQEVTINQSLLQPLNVEIDPQIGQVKAQEREQIKTLNNKFASFIDKVRFLEQQNKVLETKWNLLQQQGTSSISGTNNLEPLFENHINYLRSYLDNILGERGRLDSELKNMEDLVEDFKKKYEDEINKRTAAENEFVTLKKDVDSAYMNKVELQAKVDALIDEIDFLRTLYDAELSQMQSHISDTSVVLSMDNNRSLDLDSIIAEVRAQYEDIAQRSKAEAEALYQTKLGELQTTAGRHGDDLRNTKSEIIELNRMIQRLRAEIEGVKKQNANLQTAIAEAEQHGEMALKDANAKLQELQAALQQAKDDLARLLRDYQELMNVKLALDVEIATYRKLLEGEEYSRMSGECPSAVSISVVSSSTTSASAGGYGGGYGGGMGGGLGGGFSAGGGSGSGFGRGGGGGIGGGFGGGSSGFSGGSGFGSISGARYGVSGGGFSSASNRGGSIKFSQSSQSSQRYSR

SEQ ID NO: 230563 - protein, 628 aa, Artificial Sequence
  derived and/or modified sequence
MSRQASKTSGGGSQGFSGRSAVVSGSSRMSCVAHSGGAGGGAYGFRSGAGGFGSRSLYNLGGNKSISISVAAGGSRAGGFGGGRSSCAFAGGYGGGFGSGYGGGFGGGFGGGRGMGGGFGGAGGFGGAGGFGGAGGFGGPGGFGGSGGFGGPGSLGSPGGFGPGGFPGGIQEVTINQSLLQPLNVEIDPQIGQVKAQEREQIKTLNNKFASFIDKVRFLEQQNKVLETKWNLLQQQGTSSISGTNNLEPLFENHINYLRSYLDNILGERGRLDSELKNMEDLVEDFKKKYEDEINKRTAAENEFVTLKKDVDSAYMNKVELQAKVDALIDEIDFLRTLYDAELSQMQSHISDTSVVLSMDNNRSLDLDSIIAEVRAQYEDIAQRSKAEAEALYQTKLGELQTTAGRHGDDLRNTKSEIIELNRMIQRLRAEIEGVKKQNANLQTAIAEAEQHGEMALKDANAKLQELQAALQQAKDDLARLLRDYQELMNVKLALDVEIATYRKLLEGEEYRMSGECPSAVSISVVSSSTTSASAGGYGGGYGGGMGGGLGGGFSAGGGSGSGFGRGGGGGIGGGFGGGSSGFSGGSGFGSISGARYGVSGGGFSSASNRGGSIKFSQSSQSSQRYSR

SEQ ID NO: 230564 - DNA, 1890 bp, Artificial Sequence
  derived and/or modified sequence
atgagccggcaagcctctaaaacctccggtggggggtcccagggatttagcggcaggtccgccgtggtgagtggcagctcacgaatgagctgcgtggcccactccggcggggctggcggtggtgcttacgggttcagatccggagctggggggtttggctcacgtagtctatataatctgggaggtaacaagtcaatcagcatctctgtcgccgccgggggatcacgagccgggggtttcggtggggggcgatcgtcctgcgccttcgcgggaggatacggcggagggtttgggagcggttacggggggggctttggcggtggattcggtggggggagaggcatgggaggtggttttggaggtgccggggggttcgggggcgccggaggcttcgggggagcgggagggttcggaggccctggagggtttggcgggagtggcggcttcggcggacctggaagcttgggctctccgggtggatttggaccaggcggattcccaggcgggattcaggaagtgactataaatcagtccctgctgcaaccactcaacgtcgagattgaccctcagatcggtcaggtgaaggcacaagaaagggagcagatcaaaactcttaataacaaattcgcaagcttcattgataaggtgcgatttctggaacaacagaataaggtactggagaccaagtggaacctgctgcaacagcaaggaacttcatccatcagcggcacaaataacctggaaccactgttcgaaaaccacatcaactatctgaggtcgtacctcgacaacatactcggggaacgggggcggctggatagcgagttaaaaaacatggaagacctggttgaggatttcaagaagaagtatgaggatgaaattaacaagcgcacggcagctgaaaacgaatttgtgactctaaaaaaggatgtagatagtgcatacatgaataaggtcgaactccaggcaaaggtggatgctttgatcgacgaaatcgatttcttgagaacactttatgatgccgaactgagtcagatgcagagtcacatctcagacaccagtgtcgtgctgtcaatggacaataacaggtctctggatctagacagcatcattgctgaagtaagggcccagtatgaggacatcgcacagcgatcgaaggctgaagcggaagccctgtatcagactaaattaggtgagctgcagacgaccgcgggtaggcatggcgatgatctgcgtaatactaagtctgagattatcgagctgaacagaatgatccagagactgcgcgccgagatcgagggcgtgaagaagcagaacgctaacctgcagacagccatcgccgaagcagagcagcatggggagatggcccttaaggatgccaatgccaaactgcaggagttgcaggccgcgttacaacaggccaaagatgacctggcccgtttgctgcgcgattatcaggaactaatgaatgtgaaactggccctggacgtcgaaatcgctacttacagaaagctgctggagggggaggaatacagccggatgagcggtgagtgtccatcagctgtctctatttctgtagttagttcttctaccacttccgcaagtgctgggggctatggcggcgggtacggcggagggatgggaggcggtctgggagggggattcagtgccgggggtggttccggctccggattcgggcggggaggcggtggaggcattggtggagggttcggcggagggagtagtggattcagcgggggcagcgggtttgggagtataagtggagcacgctacggggtcagtgggggaggattctcctcagcaagcaatcgcggcggctcgattaaattctcgcagtctagccagagcagccagcggtactcaaggtag

SEQ ID NO: 230565 - DNA, 1887 bp, Artificial Sequence
  derived and/or modified sequence
atgtccagacaggcgtctaagacatccggcggggggtcccagggcttttcggggcgctccgctgtggtgtccgggtcctctcgaatgtcctgtgtggctcatagtggcggggctgggggcggcgcatacgggttcaggagcggagctggcggatttggtagcaggtctttatataatctggggggcaataaatccattagcatctccgttgcagcaggcggatcaagagctgggggattcggaggcggacgttcgtcctgtgcctttgcaggcggctacggtggaggcttcggttctggctatggcggcggctttggaggcggatttggcggcggacgcggaatggggggtggattcggcggtgccggtggtttcggcggcgcaggtgggttcggtggtgccggcggcttcgggggccctggcggtttcggtggctctggaggctttggcggtcctggctctcttggctcccccggtgggttcggccctgggggattcccaggaggcatccaggaagtcaccatcaaccagtccctattacagccactgaatgttgagattgacccacaaattgggcaggtgaaagcacaggagagggaacagattaaaaccctcaataacaaatttgcaagcttcattgataaagtgagattcctagagcagcagaacaaggtgctggagacgaagtggaacctgttacagcagcagggcacatcttctattagtggtacaaacaacttggaaccgctgttcgagaatcacattaactatttaagatcatacctggataacatactgggtgaaagaggtcgactggactctgaactcaaaaacatggaagacctggtcgaggattttaaaaaaaagtacgaggatgaaataaacaagagaacagctgccgagaacgaattcgtgaccctgaagaaagatgtggactccgcttacatgaacaaagtggagcttcaagccaaggtcgacgcattgattgatgaaattgatttcctacggaccctatacgacgcagagctttctcagatgcaatcccatatcagtgatacttcagttgtcttgagcatggacaataacaggtcactcgacttggacagcatcatcgccgaagtgagagctcagtacgaggacattgctcagaggagcaaggccgaagcggaggccctttaccagaccaagttaggcgagctgcaaacgaccgctggtagacacggggatgatctccgaaacaccaaatcagagatcatagagctgaatagaatgattcagcgtctcagggcagagatagaaggcgtgaagaaacagaacgcaaatttgcagacagcgatagcagaagcagaacagcacggggagatggcactcaaagacgctaatgctaagttgcaagagttacaagctgcgctccagcaggcgaaggacgacttggctaggttactgcgggactatcaggagctgatgaatgtcaagcttgctctcgatgtggagatagccacgtataggaaattgctggaaggcgaggagtatagaatgtcaggcgaatgccccagcgcggtgagcatctctgttgtttcctccagcacaacttccgcaagcgcgggggggtatggcgggggatacggcggcggaatgggagggggattgggtggcgggttctcagccggaggcgggtccggaagtgggtttgggcgagggggtggaggagggattggcggcgggttcggcggtgggtcttctggcttcagtggagggagtggattcgggagtatttcaggcgcgaggtacggagtttccggcggaggtttttcatcggcaagcaaccggggggggtccatcaaattctctcagtccagtcagagttcccaaaggtattcccgctag

SEQ ID NO: 230566 - DNA, 2312 bp, Artificial Sequence
  derived and/or modified sequence
ccctcttcctctgactctcagtgtccctgcttaacttacactcttctcttcgccaagctccttaccatgagcagacaagccagcaagacatctggtggcgggagccagggtttctccggccgctctgctgtggtctccggcagcagcaggatgagctgtgtggcccactctgggggagctggcggaggggcctatggcttccggagcggagcaggtggctttggcagtcgcagcctctacaacctgggcggcaacaagagcatctccatcagcgtggcagctggcggctcccgggctggaggctttgggggagggcggagcagctgtgcctttgcaggtggctatggaggtggctttgggagcggctatggaggtggctttggtggtggctttggtggtggcagaggaatgggaggtggctttggtggagctggtggctttggaggggctggtggctttggaggggctggtggctttggtggtcctggtggctttggtgggtctggtggctttggtgggcctggcagcttgggcagtcctggtggctttggccctgggggctttcctgggggaattcaggaagtgactatcaaccagagtctcctgcagcccctcaatgtggagatcgacccccagattgggcaagtaaaggcccaggagcgggaacagatcaagaccctcaacaacaagtttgcctccttcattgacaaggtgcggttcctggagcaacagaacaaagtcctggagaccaagtggaacctgctccagcagcagggcacaagttccatctcaggcacaaacaaccttgagcctctttttgagaatcacatcaactacctgcggagctacctggacaacatcctcggggagagagggcgcctggactctgagctgaagaacatggaggacctggtggaagacttcaagaagaaatatgaggatgaaatcaataaacgtacagctgctgagaatgaatttgtgactctgaagaaggatgtggacagtgcctatatgaacaaggtggagcttcaggccaaagtggatgccttgatagatgagatcgacttcttaaggaccctctacgacgctgagctatctcagatgcagagccacatcagtgacacatctgtggtgctgtccatggacaataatcgctccctggacctggacagcatcattgctgaagttcgtgcacagtatgaggatatcgctcagagaagcaaggccgaagctgaggccctgtaccagaccaagttgggggagctgcagaccacggctggcaggcatggggatgacctaagaaataccaagagcgagatcatagagctcaacagaatgatccagaggctgcgggcagagatcgagggtgtcaagaagcagaatgccaacctgcagacggccattgccgaggccgagcagcatggagagatggccctcaaggatgccaatgccaagctccaagagctgcaggctgctctacagcaggcgaaggatgacctggcgcggctgctacgtgactaccaggagctgatgaatgtcaagctggccctggacgtggagatcgccacctaccgcaagctgctggagggcgaggagtacagcaggatgtctggagagtgtccgagtgctgtcagcatctccgtggtcagcagcagcacgacttccgcctccgcaggtggctatggaggaggttacggcggaggcatgggcggtggtttaggaggtggcttcagtgcgggcggcggctcaggcagtggctttggccggggaggcggcggtggaatcggcggtggatttggcggcggcagcagcggtttcagcggtggcagcggctttggctccatctctggcgcccgctatggagtcagtggcgggggcttcagctcggccagcaaccggggcggcagcatcaagttctcccagtcctcccagtcctcccagcgctactccagataaagagcacgcatcagcatcgcagccactccagcgcctcccctccgctccccacgcccccatattggcaacacccccagcgccaccccatgctccccaagaacgcggctctgcgctggaaggcttgtggcctcttgctcctccttccagatccccggccaagcccagtcacgagaatttcaggctcttctctccggctccagcctgtgcctgtgattgtccaggtgtggcctaggccgccaccttctgctgccccggagtcccctccctgggtgggatgctcactacagctctgatgtatatagcacacagccccctccgcccctccggtctgtcgccaataaagtgcactgtgtttc

SEQ ID NO: 230567 - DNA, 2319 bp, Artificial Sequence
  derived and/or modified sequence
atttcccatccctcttcctctgactctcagtgtccctgcttaacttacactcttctcttcgccaagctccttaccatgagcagacaagccagcaagacatctggtggcgggagccagggtttctccggccgctctgctgtggtctccggcagcagcaggatgagctgtgtggcccactctgggggagctggcggaggggcctatggcttccggagcggagcaggtggctttggcagtcgcagcctctacaacctgggcggcaacaagagcatctccatcagcgtggcagctggcggctcccgggctggaggctttgggggagggcggagcagctgtgcctttgcaggtggctatggaggtggctttgggagcggctatggaggtggctttggtggtggctttggtggtggcagaggaatgggaggtggctttggtggagctggtggctttggaggggctggtggctttggaggggctggtggctttggtggtcctggtggctttggtgggtctggtggctttggtgggcctggcagcttgggcagtcctggtggctttggccctgggggctttcctgggggaattcaggaagtgactatcaaccagagtctcctgcagcccctcaatgtggagatcgacccccagattgggcaagtaaaggcccaggagcgggaacagatcaagaccctcaacaacaagtttgcctccttcattgacaaggtgcggttcctggagcaacagaacaaagtcctggagaccaagtggaacctgctccagcagcagggcacaagttccatctcaggcacaaacaaccttgagcctctttttgagaatcacatcaactacctgcggagctacctggacaacatcctcggggagagagggcgcctggactctgagctgaagaacatggaggacctggtggaagacttcaagaagaaatatgaggatgaaatcaataaacgtacagctgctgagaatgaatttgtgactctgaagaaggatgtggacagtgcctatatgaacaaggtggagcttcaggccaaagtggatgccttgatagatgagatcgacttcttaaggaccctctacgacgctgagctatctcagatgcagagccacatcagtgacacatctgtggtgctgtccatggacaataatcgctccctggacctggacagcatcattgctgaagttcgtgcacagtatgaggatatcgctcagagaagcaaggccgaagctgaggccctgtaccagaccaagttgggggagctgcagaccacggctggcaggcatggggatgacctaagaaataccaagagcgagatcatagagctcaacagaatgatccagaggctgcgggcagagatcgagggtgtcaagaagcagaatgccaacctgcagacggccattgccgaggccgagcagcatggagagatggccctcaaggatgccaatgccaagctccaagagctgcaggctgctctacagcaggcgaaggatgacctggcgcggctgctacgtgactaccaggagctgatgaatgtcaagctggccctggacgtggagatcgccacctaccgcaagctgctggagggcgaggagtacaggatgtctggagagtgtccgagtgctgtcagcatctccgtggtcagcagcagcacgacttccgcctccgcaggtggctatggaggaggttacggcggaggcatgggcggtggtttaggaggtggcttcagtgcgggcggcggctcaggcagtggctttggccggggaggcggcggtggaatcggcggtggatttggcggcggcagcagcggtttcagcggtggcagcggctttggctccatctctggcgcccgctatggagtcagtggcgggggcttcagctcggccagcaaccggggcggcagcatcaagttctcccagtcctcccagtcctcccagcgctactccagataaagagcacgcatcagcatcgcagccactccagcgcctcccctccgctccccacgcccccatattggcaacacccccagcgccaccccatgctccccaagaacgcggctctgcgctggaaggcttgtggcctcttgctcctccttccagatccccggccaagcccagtcacgagaatttcaggctcttctctccggctccagcctgtgcctgtgattgtccaggtgtggcctaggccgccaccttctgctgccccggagtcccctccctgggtgggatgctcactacagctctgatgtatatagcacacagccccctccgcccctccggtctgtcgccaataaagtgcactgtgtttca

SEQ ID NO: 230568 - DNA, 1890 bp, Artificial Sequence
  derived and/or modified sequence
atgagccggcaggccagcaagaccagcggcggcggcagccagggcttcagcggccgctctgctgtggtgtctggcagcagcaggatgagctgtgtggcccacagcggcggggccggcggcggggcctacggcttccgctctggagctgggggcttcggcagccgcagcctgtacaacctgggcggcaacaagagcatcagcatctctgtggccgccggcggcagcagagctgggggctttggaggcggccgcagcagctgtgcctttgctgggggctatggaggcggctttggaagtggctatggaggcggctttggaggcggctttggaggcggccggggcatgggcggcggctttggaggagctgggggctttggaggagctgggggctttggaggagctgggggctttggaggccctgggggctttggaggcagcggcggctttggaggccctggcagcctgggcagccctgggggctttggacctgggggcttccctgggggcatccaggaggtgaccatcaaccagagcctgctgcagcccctgaatgtggagattgacccccagatcggccaggtgaaggcccaggagcgggagcagatcaagaccctgaacaacaagtttgccagcttcatcgacaaggtgcgcttcctggagcagcagaacaaggtgctggagaccaagtggaacctgctgcagcagcagggcaccagcagcatcagcggcaccaacaacctggagcccctgtttgagaaccacatcaactacctgcggagctacctggacaacatcctgggggagcggggccgcctggacagcgagctgaagaacatggaggacctggtggaggacttcaagaagaagtatgaagatgagatcaacaagaggacagctgctgaaaatgaatttgtgaccctgaagaaggatgtggacagcgcctacatgaacaaggtggagctgcaggccaaggtggatgccctgattgatgaaattgacttcctgcggaccctgtatgatgctgagctgagccagatgcagagccacatcagtgacacctctgtggtgctgtccatggacaacaacagaagcctggacctggacagcatcatcgccgaggtgcgggcccagtatgaagatattgcccagaggagcaaggccgaggccgaggccctgtaccagaccaagctgggggagctgcagaccacagctggaagacatggagatgacctgaggaacaccaagtctgagatcatcgagctgaacaggatgatccagaggctgcgggcagaaattgagggcgtgaagaagcagaatgccaacctgcagacagccatcgccgaggccgagcagcacggggagatggccctgaaggatgccaatgccaagctgcaggagctgcaggccgccctgcagcaggccaaggatgacctggcccggctgctgcgggactaccaggagctgatgaatgtgaagctggccctggatgtggagatcgccacctacaggaagctgctggagggggaggagtacagcaggatgtctggagaatgtcccagcgctgtgtccatctctgtggtgagcagcagcaccaccagcgccagcgctgggggctatggaggcggctatggaggcggcatgggcggcggcctgggcggcggcttctctgctgggggcggcagcggcagcggcttcggccggggcggcggcggcggcattggaggcggctttggaggcggcagcagcggcttcagcggcggcagcggcttcggcagcatcagcggggcccgctatggagtgtctgggggcggcttcagcagcgccagcaacagaggaggcagcatcaagttcagccagagcagccagagcagccagcgctacagcaggtag

SEQ ID NO: 230569 - DNA, 1887 bp, Artificial Sequence
  derived and/or modified sequence
atgagccggcaggccagcaagaccagcggcggcggcagccagggcttcagcggccgctctgctgtggtgtctggcagcagcaggatgagctgtgtggcccacagcggcggggccggcggcggggcctacggcttccgctctggagctgggggcttcggcagccgcagcctgtacaacctgggcggcaacaagagcatcagcatctctgtggccgccggcggcagcagagctgggggctttggaggcggccgcagcagctgtgcctttgctgggggctatggaggcggctttggaagtggctatggaggcggctttggaggcggctttggaggcggccggggcatgggcggcggctttggaggagctgggggctttggaggagctgggggctttggaggagctgggggctttggaggccctgggggctttggaggcagcggcggctttggaggccctggcagcctgggcagccctgggggctttggacctgggggcttccctgggggcatccaggaggtgaccatcaaccagagcctgctgcagcccctgaatgtggagattgacccccagatcggccaggtgaaggcccaggagcgggagcagatcaagaccctgaacaacaagtttgccagcttcatcgacaaggtgcgcttcctggagcagcagaacaaggtgctggagaccaagtggaacctgctgcagcagcagggcaccagcagcatcagcggcaccaacaacctggagcccctgtttgagaaccacatcaactacctgcggagctacctggacaacatcctgggggagcggggccgcctggacagcgagctgaagaacatggaggacctggtggaggacttcaagaagaagtatgaagatgagatcaacaagaggacagctgctgaaaatgaatttgtgaccctgaagaaggatgtggacagcgcctacatgaacaaggtggagctgcaggccaaggtggatgccctgattgatgaaattgacttcctgcggaccctgtatgatgctgagctgagccagatgcagagccacatcagtgacacctctgtggtgctgtccatggacaacaacagaagcctggacctggacagcatcatcgccgaggtgcgggcccagtatgaagatattgcccagaggagcaaggccgaggccgaggccctgtaccagaccaagctgggggagctgcagaccacagctggaagacatggagatgacctgaggaacaccaagtctgagatcatcgagctgaacaggatgatccagaggctgcgggcagaaattgagggcgtgaagaagcagaatgccaacctgcagacagccatcgccgaggccgagcagcacggggagatggccctgaaggatgccaatgccaagctgcaggagctgcaggccgccctgcagcaggccaaggatgacctggcccggctgctgcgggactaccaggagctgatgaatgtgaagctggccctggatgtggagatcgccacctacaggaagctgctggagggggaggagtacaggatgtctggagagtgccccagcgctgtgtccatctctgtggtgagcagcagcaccaccagcgccagcgctgggggctacggcggcggctacggcggcggcatgggcggcggcctgggcggcggcttctctgctgggggcggcagcggcagcggcttcggccggggcggcggcggcggcatcggcggcggctttggaggcggcagcagcggcttcagcggcggcagcggcttcggcagcatcagcggggcccgctatggagtgtctgggggcggcttcagcagcgccagcaacagaggaggcagcatcaagttcagccagagcagccagagcagccagcgctacagcaggtag

SEQ ID NO: 230570 - DNA, 1890 bp, Artificial Sequence
  derived and/or modified sequence
atgagccggcaggccagcaagaccagcggcggcggcagccagggcttttcagggcgatctgccgtggtgtccggcagctctcgcatgagctgtgtcgcccactctggtggggcaggcggaggtgcctacggcttcagatctggggcaggcgggtttggcagtcggagcctatataatctaggaggcaacaagagcatctcaataagcgtcgctgcaggcggctctcgagccggaggatttgggggagggcgatctagttgcgcttttgctggcggatatgggggcggctttggttccgggtacgggggaggctttggtggggggttcggaggcggcagaggaatggggggcggctttggaggagccggcggatttggcggagcaggtgggtttggcggtgcaggcgggtttggcggacccggtgggtttgggggatctggggggttcggaggaccaggtagcctgggctcaccgggagggttcggccccggaggatttcctggggggattcaggaagtgacaattaatcaatccttgctgcaaccactcaacgtggaaattgacccccaaattgggcaggtgaaagcccaggaacgggaacagattaaaacacttaacaataagttcgcatccttcatcgacaaggttcggtttctagaacagcagaataaggtgctggaaactaaatggaatctgctccaacagcagggaacctccagcatatcgggcactaataacttagaaccactcttcgagaatcacatcaattacctgagaagttatctggacaacattctgggggagagaggaagactggattcagaactcaagaacatggaggacctggtagaggacttcaagaaaaagtatgaggatgagatcaataaacgcactgctgctgagaatgaattcgtcacattaaagaaagatgtcgatagcgcttacatgaacaaggtcgagttgcaagccaaggtcgacgctctgatcgatgaaatcgactttttgcggaccctgtatgacgctgaactgtctcagatgcagagccacatcagcgacacatctgtagtattgagcatggacaacaacagatcattggatctcgatagcatcatagcagaggtgcgcgcacagtacgaagacattgcccaacgcagcaaggccgaggctgaagccctgtaccagacaaagctcggggaactccagaccacagccggtaggcatggtgatgatttacgcaacaccaaatctgagataattgaattgaaccgcatgatccaacggctccgggcagagatagaaggcgtgaagaaacaaaatgcaaacctgcaaacagctatagccgaagcggaacagcatggagaaatggccttgaaggacgctaacgctaagctccaggagctacaggcagccctgcagcaggccaaagacgacttggcccgccttctcagggattaccaagagttaatgaacgttaagcttgcactggacgttgagatcgccacttataggaaactgctggaaggcgaggagtatagtcggatgtcgggcgagtgcccctcagcggtttcaatctctgtcgtgtcttcaagcacgacttcagcctctgcagggggctatggcgggggctacggagggggcatggggggagggctaggtggggggttcagtgccggaggggggtccggtagcggtttcgggcgaggaggcgggggaggcattgggggaggttttggcggaggttcatcaggtttttccggcgggtcggggttcgggtccatctcaggagcacggtatggcgtatccggtggcgggtttagttcagccagtaaccgggggggcagcataaaattcagccagtctagccagtcaagtcagagatattcacgatag

SEQ ID NO: 230571 - DNA, 1887 bp, Artificial Sequence
  derived and/or modified sequence
atgagccggcaggccagcaagaccagcggcggcggcagccagggcttctctggcagatccgctgtggtctccggatcaagtcggatgagttgcgtggcccacagcggaggcgcagggggaggggcctatggatttcgctccggtgcgggtggcttcgggtctaggtcactgtataatctgggcgggaacaagagtatttctatctctgtggcagccggcggctctcgcgccgggggatttggcggcggccggagcagttgtgccttcgctgggggatacggcggaggcttcggtagcggctacggcggtgggttcggcgggggcttcggtgggggaaggggcatggggggtggatttggaggcgccgggggctttggaggcgctggcgggtttggcggagccgggggcttcggtggcccaggcggctttggggggtccggaggtttcggcggacccggcagcttgggctcgcccggcgggttcggcccgggtgggttccctgggggaattcaggaggtgacaattaaccaaagtctcctgcagcctctgaatgtggaaatcgatcctcagatcggacaagtgaaagcccaagagagagagcaaattaagactttgaataataagttcgcctccttcatcgacaaggtgcgcttcctggaacagcagaacaaggttctggagactaagtggaacctcctgcaacagcaaggaactagcagcatctcaggcaccaacaacctcgagcccctgtttgaaaatcacattaactacctgcggagctacctcgataacattctgggggagcgcggcaggctcgacagtgagttgaagaatatggaggacttggtcgaggacttcaagaaaaagtacgaagatgaaattaacaagcggacagctgctgaaaatgaatttgtcactttgaaaaaggacgttgattcagcctacatgaataaggttgagcttcaggccaaggtcgatgctttgatcgacgagattgacttcctgaggacactgtatgatgccgagctgagccagatgcagagccacatctccgacacctctgtcgtactctcaatggacaataaccgttcacttgacctggatagtatcatcgcagaggtgagagcacagtatgaggatatcgcccagcgttctaaagcggaggcggaggctctgtaccaaacaaagcttggagagctgcagacaactgccggccgtcatggtgatgacctcaggaacactaaaagtgagattatagagctgaatagaatgatccagcggctgcgagcggagattgaaggggtgaaaaaacagaacgccaatcttcaaaccgcgatcgccgaggccgagcaacatggcgaaatggcccttaaagatgccaacgctaagctccaagagctgcaggctgccttacagcaggctaaggacgacttagccagacttctacgggactatcaagagctgatgaacgtgaagttggccttggatgtggaaatcgcgacataccggaaacttctagagggtgaagaatacagaatgagcggagagtgcccttctgccgtgagcatttcggtcgtgtcctcaagcactacttcagccagcgcgggtggctacggcgggggatacggtggtggcatgggaggtggtctcggaggcggattcagcgccggagggggttctggctccggtttcggtagaggcggaggcggcggcattgggggcggcttcggtggaggctccagcggtttctccggaggcagcgggttcggtagcatttctggagccagatacggcgtttctggcggcggtttttcatcagcaagcaatcgggggggtagtattaagttctcacagtcaagccagtctagtcagcggtattctagatag

SEQ ID NO: 230572 - DNA, 1890 bp, Artificial Sequence
  derived and/or modified sequence
atgtcaagacaggcgtctaagaccagcggaggaggatctcagggcttctccgggcgtagcgcagttgtgtccggttccagtaggatgagttgcgtggcccacagcggcggagccggtggcggagcgtacggattccgctcaggcgctggcggttttgggtcccgctctctgtacaatctgggcggtaacaaatcaatttccatcagcgtggccgctgggggatcacgcgctggcggatttggcggaggccgatcctcatgcgcattcgctggcggatatggcggaggatttggctcgggctacggcggtgggtttggagggggattcggcggaggccgtggaatgggtgggggattcggaggggcaggtggctttggcggagctggtggattcgggggagccggagggttcggaggtcctgggggattcggcggaagtggagggtttggcggaccgggtagcctcggcagtcctgggggatttggccctggaggctttccagggggaattcaagaagtgacgatcaatcaatctcttctacagcccctgaacgttgaaatcgacccccaaatcgggcaggttaaggcgcaggaaagagagcagataaaaacactcaacaacaaattcgcctctttcatcgataaagtgagatttctggagcagcagaacaaagtgctggagaccaaatggaatctgctgcaacaacaagggaccagttccatctctggtaccaacaacctggagcccctctttgaaaaccacataaattatctgcgcagttatctggacaacattctgggcgaacgcggtcgcctcgattctgaactgaagaatatggaggacctcgtggaggactttaagaaaaagtatgaggacgaaattaataagagaacagccgcagagaatgagtttgtcactttgaagaaggacgtggacagtgcctatatgaataaggtagaattgcaggcaaaagtggacgccctcatcgatgaaattgattttctaaggaccctttacgacgccgagttgtctcagatgcagtcgcacatcagcgataccagcgtcgtactgtcgatggataataaccggtctcttgatttggactctatcattgcggaggtgcgggcacagtacgaagatatcgcccagaggtctaaagccgaagctgaggctctgtaccagactaagcttggagaactgcagacaaccgccggacgacatggcgacgacctgagaaatactaagtcggagatcatcgaactgaacaggatgatccagcgcctcagggccgagatcgagggggtcaagaagcagaatgccaacttgcaaactgccatcgctgaagctgaacagcacggggagatggccctgaaagatgctaacgcaaaactgcaggaactgcaagcggctttgcaacaggccaaggatgatctcgcaaggctgctaagagattaccaggaattaatgaacgtgaaactcgcccttgacgtggaaatcgctacctatcgcaagcttctggaaggagaagagtacagtaggatgagcggggagtgccctagcgctgttagcataagtgtggtaagctcttctacaacctccgccagtgcaggaggctatggaggagggtacggcggtggtatgggcggagggctgggtgggggtttcagcgcaggtggtgggtctggctccggctttgggagagggggaggagggggtatcggtggcggattcggaggagggtcttccggtttcagtggagggtccgggttcggttcaatcagcggcgcacgctatggagtgagcgggggtggcttctcaagcgcaagcaatcggggaggctcaatcaagttctcccaatcgtcccagtcctcacagagatattcccggtag

SEQ ID NO: 230573 - DNA, 1887 bp, Artificial Sequence
  derived and/or modified sequence
atgagccgccaggcgtccaaaacatctgggggaggttctcagggtttcagtggacgaagcgccgtggtcagcgggagctccagaatgtcctgtgttgcccatagcgggggagcaggcggaggtgcatatggcttcagatccggtgccggagggttcggatctcggtccctgtacaaccttggaggaaacaagtcgatctctatcagcgtagccgcaggtggatctcgagcaggcggttttggcggaggtcgatcttcatgcgcgttcgccggtggctatggcggaggtttcggctccggttacgggggaggctttggtggaggttttggtggaggacggggtatggggggtggtttcggcggagcgggtgggttcgggggagctggtggattcggaggggcagggggatttggcggtcccggaggattcggtggctcaggaggctttggtggacccggatctctgggttcccctggtgggttcggacccggagggttccccggagggattcaggaggtgactatcaatcaatcactgctccagccactgaacgtggaaatcgacccacagatcggccaagtgaaggcacaggaacgcgagcagatcaaaacgcttaacaacaaatttgcaagcttcatcgataaagttaggtttttggagcagcaaaataaggttctggagacaaagtggaatttattgcagcagcaaggaacaagttcgatttcaggaactaacaatctggagccgctgttcgaaaatcacattaactacctgaggtcgtaccttgataacatcctcggagagagaggtcggctggatagtgagctcaaaaacatggaggatctggtggaagactttaagaagaaatacgaggatgagatcaacaaaaggacggcagcggagaatgagtttgtgacactcaagaaggatgttgatagcgcttatatgaataaggtggagctccaagctaaggttgatgccctgattgatgaaatcgacttcttaagaaccctgtacgatgctgaactgtcccagatgcagagccacatctcagacacatccgtggtgctgagcatggacaacaatcgatccctcgacctggattcgatcatcgctgaggtgcgtgctcagtacgaggacatagcccaacggagcaaggcagaggctgaagccctttaccagaccaaacttggcgaacttcagacaactgcgggtcgccacggcgacgaccttaggaatacaaagtctgagatcatagagctcaaccgtatgatccagcggcttagagccgagattgagggggtgaaaaagcaaaacgcgaacctgcaaacagctattgcagaggctgagcagcacggagaaatggctctgaaggatgctaatgccaagctgcaggagctgcaggctgcgctgcagcaggccaaagatgatctggctcggctgctcagagattatcaagagcttatgaacgtcaaattagccctcgacgtagagatagcgacgtaccgcaagctgctagagggcgaagaatacaggatgtccggcgagtgcccgtctgctgtcagcatctctgttgtgtccagtagcactacaagcgcctccgccggaggctacggtgggggatacgggggtggcatgggcggaggcctcggcggaggcttctccgcgggaggagggtccggaagcggctttggacgcggaggcggtggtggaatcggtggcggatttggcggaggctcttccggcttcagcgggggatctgggttcggatctatatctggcgcacggtatggcgtctccgggggagggttcagcagcgcttcgaatcgcggaggaagcattaagttttctcagagtagtcagtccagccagagatacagtcggtag

SEQ ID NO: 230574 - DNA, 1890 bp, Artificial Sequence
  derived and/or modified sequence
atgagcagacaggccagcaagaccagcggcggcggcagccagggcttcagcggcagaagcgccgtggtgagcggcagcagcagaatgagctgcgtggcccacagcggcggcgccggcggcggcgcctacggcttcagaagcggcgccggcggcttcggcagcagaagcctgtacaacctgggcggcaacaagagcatcagcatcagcgtggccgccggcggcagcagagccggcggcttcggcggcggcagaagcagctgcgccttcgccggcggctacggcggcggcttcggcagcggctacggcggcggcttcggcggcggcttcggcggcggcagaggcatgggcggcggcttcggcggcgccggcggcttcggcggcgccggcggcttcggcggcgccggcggcttcggcggccccggcggcttcggcggcagcggcggcttcggcggccccggcagcctgggcagccccggcggcttcggccccggcggcttccccggcggcatccaggaggtgaccatcaaccagagcctgctgcagcccctgaacgtggagatcgacccccagatcggccaggtgaaggcccaggagagagagcagatcaagaccctgaacaacaagttcgccagcttcatcgacaaggtgagattcctggagcagcagaacaaggtgctggagaccaagtggaacctgctgcagcagcagggcaccagcagcatcagcggcaccaacaacctggagcccctgttcgagaaccacatcaactacctgagaagctacctggacaacatcctgggcgagagaggcagactggacagcgagctgaagaacatggaggacctggtggaggacttcaagaagaagtacgaggacgagatcaacaagagaaccgccgccgagaacgagttcgtgaccctgaagaaggacgtggacagcgcctacatgaacaaggtggagctgcaggccaaggtggacgccctgatcgacgagatcgacttcctgagaaccctgtacgacgccgagctgagccagatgcagagccacatcagcgacaccagcgtggtgctgagcatggacaacaacagaagcctggacctggacagcatcatcgccgaggtgagagcccagtacgaggacatcgcccagagaagcaaggccgaggccgaggccctgtaccagaccaagctgggcgagctgcagaccaccgccggcagacacggcgacgacctgagaaacaccaagagcgagatcatcgagctgaacagaatgatccagagactgagagccgagatcgagggcgtgaagaagcagaacgccaacctgcagaccgccatcgccgaggccgagcagcacggcgagatggccctgaaggacgccaacgccaagctgcaggagctgcaggccgccctgcagcaggccaaggacgacctggccagactgctgagagactaccaggagctgatgaacgtgaagctggccctggacgtggagatcgccacctacagaaagctgctggagggcgaggagtacagcagaatgagcggcgagtgccccagcgccgtgagcatcagcgtggtgagcagcagcaccaccagcgccagcgccggcggctacggcggcggctacggcggcggcatgggcggcggcctgggcggcggcttcagcgccggcggcggcagcggcagcggcttcggcagaggcggcggcggcggcatcggcggcggcttcggcggcggcagcagcggcttcagcggcggcagcggcttcggcagcatcagcggcgccagatacggcgtgagcggcggcggcttcagcagcgccagcaacagaggcggcagcatcaagttcagccagagcagccagagcagccagagatacagcagatag

SEQ ID NO: 230575 - DNA, 1887 bp, Artificial Sequence
  derived and/or modified sequence
atgagcagacaggccagcaagaccagcggcggcggcagccagggcttcagcggcagaagcgccgtggtgagcggcagcagcagaatgagctgcgtggcccacagcggcggcgccggcggcggcgcctacggcttcagaagcggcgccggcggcttcggcagcagaagcctgtacaacctgggcggcaacaagagcatcagcatcagcgtggccgccggcggcagcagagccggcggcttcggcggcggcagaagcagctgcgccttcgccggcggctacggcggcggcttcggcagcggctacggcggcggcttcggcggcggcttcggcggcggcagaggcatgggcggcggcttcggcggcgccggcggcttcggcggcgccggcggcttcggcggcgccggcggcttcggcggccccggcggcttcggcggcagcggcggcttcggcggccccggcagcctgggcagccccggcggcttcggccccggcggcttccccggcggcatccaggaggtgaccatcaaccagagcctgctgcagcccctgaacgtggagatcgacccccagatcggccaggtgaaggcccaggagagagagcagatcaagaccctgaacaacaagttcgccagcttcatcgacaaggtgagattcctggagcagcagaacaaggtgctggagaccaagtggaacctgctgcagcagcagggcaccagcagcatcagcggcaccaacaacctggagcccctgttcgagaaccacatcaactacctgagaagctacctggacaacatcctgggcgagagaggcagactggacagcgagctgaagaacatggaggacctggtggaggacttcaagaagaagtacgaggacgagatcaacaagagaaccgccgccgagaacgagttcgtgaccctgaagaaggacgtggacagcgcctacatgaacaaggtggagctgcaggccaaggtggacgccctgatcgacgagatcgacttcctgagaaccctgtacgacgccgagctgagccagatgcagagccacatcagcgacaccagcgtggtgctgagcatggacaacaacagaagcctggacctggacagcatcatcgccgaggtgagagcccagtacgaggacatcgcccagagaagcaaggccgaggccgaggccctgtaccagaccaagctgggcgagctgcagaccaccgccggcagacacggcgacgacctgagaaacaccaagagcgagatcatcgagctgaacagaatgatccagagactgagagccgagatcgagggcgtgaagaagcagaacgccaacctgcagaccgccatcgccgaggccgagcagcacggcgagatggccctgaaggacgccaacgccaagctgcaggagctgcaggccgccctgcagcaggccaaggacgacctggccagactgctgagagactaccaggagctgatgaacgtgaagctggccctggacgtggagatcgccacctacagaaagctgctggagggcgaggagtacagaatgagcggcgagtgccccagcgccgtgagcatcagcgtggtgagcagcagcaccaccagcgccagcgccggcggctacggcggcggctacggcggcggcatgggcggcggcctgggcggcggcttcagcgccggcggcggcagcggcagcggcttcggcagaggcggcggcggcggcatcggcggcggcttcggcggcggcagcagcggcttcagcggcggcagcggcttcggcagcatcagcggcgccagatacggcgtgagcggcggcggcttcagcagcgccagcaacagaggcggcagcatcaagttcagccagagcagccagagcagccagagatacagcagatag

SEQ ID NO: 230576 - protein, 197 aa, Artificial Sequence
  derived and/or modified sequence
MSSAPAPGPAPASLTLWDEEDFQGRRCRLLSDCANVCERGGLPRVRSVKVENGVWVAFEYPDFQGQQFILEKGDYPRWSAWSGSSSHNSNQLLSFRPVLCANHNDSRVTLFEGDNFQGCKFDLVDDYPSLPSMGWASKDVGSLKVSSGAWVAYQYPGYRGYQYVLERDRHSGEFCTYGELGTQAHTGQLQSIRRVQH

SEQ ID NO: 230577 - protein, 129 aa, Artificial Sequence
  derived and/or modified sequence
MSSAPAPGPAPASLTLWDEEDFQGRRCRLLSDCANVCERGGLPRVRSVKVENGVWVAFEYPDFQGQQFILEKGDYPRWSAWSGSSSHNSNQLLSFRPVLCANHNDSRVTLFEGDNFQGCKFDLVDDYPS

SEQ ID NO: 230578 - DNA, 594 bp, Artificial Sequence
  derived and/or modified sequence
atgtcttcagctccagccccaggacccgcacccgcctctcttactctgtgggacgaggaagattttcagggtaggcgctgccgtctgctctctgactgcgcgaatgtctgtgagagaggaggattaccacgtgttcgcagtgtcaaggtggaaaatggcgtgtgggtggctttcgaatatcctgatttccaaggacagcagtttatactggaaaagggagactacccacgctggtccgcctggagcggaagctcatcgcataattccaatcagcttttgtctttcaggcccgtcctgtgcgcgaaccacaacgatagtcgggtaaccctgttcgaaggggataattttcagggctgtaagtttgacctggtcgatgattacccatctcttccttcaatgggctgggcttcaaaggacgtcggctcgctcaaggtcagttctggggcctgggtcgcctatcagtaccctggctaccggggataccagtatgttctggagcgcgatcgccacagcggggagttctgcacctatggagagctcgggacccaagcacacaccggacagttacaaagcatacgtagggttcagcattag

SEQ ID NO: 230579 - DNA, 594 bp, Artificial Sequence
  derived and/or modified sequence
atgtcatccgctccagcccccggacccgccccggcgtcgctaaccctgtgggacgaggaggacttccaggggcgcagatgtaggctgctgtcagattgtgcaaatgtttgcgagcggggtggcctccccagagtccgctccgtgaaagtggagaatggagtgtgggtcgcctttgaataccctgactttcaggggcagcagttcattctcgaaaaaggtgactacccgagatggtcggcttggtcggggagttcctcccacaatagcaatcagttactgagttttaggccagtgctgtgtgccaaccataacgacagtcgagtcaccctgttcgagggagataacttccaaggatgcaagtttgacctggtagacgattacccctccctaccttctatggggtgggcgtcaaaagatgtgggttcattgaaggtcagttctggcgcatgggtggcataccagtaccccggctatagaggttaccagtatgtgctggaacgcgacagacactcaggagagttttgtacttacggcgaactgggcacccaggcacacacagggcaactgcaaagcattaggagagttcaacactag

SEQ ID NO: 230580 - DNA, 390 bp, Artificial Sequence
  derived and/or modified sequence
atgtcctcagcaccagctcccggccccgccccggcaagtcttaccctgtgggacgaagaagattttcagggacgccgatgcaggcttctgagcgactgcgctaatgtctgtgagagaggcggtctccctcgggtgcgcagtgtcaaagtggagaatggcgtgtgggtggccttcgaataccccgacttccagggccagcagtttatcctcgagaaaggagattatccgcgatggagcgcctggagcggctctagcagtcataattcgaatcagcttcttagctttcggccggtgctgtgtgcgaatcacaacgatagcagggtgacactatttgagggagacaactttcagggatgtaagtttgatctggtggatgattacccttcctag

SEQ ID NO: 230581 - DNA, 594 bp, Artificial Sequence
  derived and/or modified sequence
atgagcagcgccccagcccctggccctgccccagccagcctgaccctgtgggatgaggaggacttccagggccgccgctgccgcctgctgagtgactgtgccaacgtgtgtgagcggggcggcctgccccgggtgcgctctgtgaaggtggagaatggagtgtgggtggcctttgagtacccagacttccagggccagcagttcatcctggagaagggggactacccccgctggagcgcctggagcggcagcagcagccacaacagcaaccagctgctgtccttccggcctgtgctgtgtgccaaccacaatgacagccgggtgaccctgtttgaaggagacaacttccagggctgcaagtttgacctggtggatgactaccccagcctgcccagcatgggctgggccagcaaggatgtgggcagcctgaaggtgtcctctggggcctgggtggcctaccagtacccaggctaccggggctaccagtatgtgctggagcgggacagacattctggagagttctgcacctatggagagctgggcacccaggcccacacaggccagctgcagagcatcagaagagtgcagcactag

SEQ ID NO: 230582 - DNA, 390 bp, Artificial Sequence
  derived and/or modified sequence
atgagcagcgccccagcccctggccctgccccagccagcctgaccctgtgggatgaggaggacttccagggccgccgctgccgcctgctgagtgactgtgccaacgtgtgtgagcggggcggcctgccccgggtgcgctctgtgaaggtggagaatggagtgtgggtggcctttgagtacccagacttccagggccagcagttcatcctggagaagggggactacccccgctggagcgcctggagcggcagcagcagccacaacagcaaccagctgctgtccttccggcctgtgctgtgtgccaaccacaatgacagccgggtgaccctgtttgaaggagacaacttccagggctgcaagtttgacctggtggatgactaccccagctag

SEQ ID NO: 230583 - DNA, 594 bp, Artificial Sequence
  derived and/or modified sequence
atgagcagcgcccccgcccccggccccgcccccgccagcctgaccctttgggatgaagaggacttccagggaagaaggtgtagattgcttagcgactgcgctaatgtgtgcgaacgaggcggtctgcctcgcgtgaggagtgtgaaggttgagaacggggtttgggtggccttcgaatatcccgatttccagggtcagcagtttatccttgaaaagggcgactatcccaggtggtccgcatggagcgggtcctccagccataattccaatcagctgctgagcttcaggcccgttctgtgtgcaaaccataatgactcccgagttactctgtttgagggagacaacttccaaggttgtaaattcgatctcgtcgacgattatccgagcctgccatctatgggttgggcgtctaaagacgtgggatcgctcaaagtgagttccggtgcctgggtggcataccaatatccaggttatcgaggctaccagtacgtgctggagagggataggcactccggggagttctgcacttacggtgaactggggacccaggcccacacaggccaattgcaatcaattagacgggtgcagcactag

SEQ ID NO: 230584 - DNA, 594 bp, Artificial Sequence
  derived and/or modified sequence
atgagcagcgcccccgcccccggccccgcccccgccagcctgaccctctgggacgaagaggactttcaagggcgtcgttgccgattgctcagcgattgcgcaaacgtgtgtgaacgcggcggtctgcctagagttaggagcgtgaaggtggagaacggagtttgggtggcgttcgaatatcccgattttcagggccaacagtttattctggaaaagggcgactaccctcggtggtccgcgtggtctggtagctcttcacataacagtaaccagctcttgtccttcaggcccgttctatgcgccaaccacaatgactctagagtcactttattcgaaggcgacaattttcagggttgtaagtttgacctcgtggatgattatccgtccctaccaagcatgggatgggcctccaaagatgtagggagtcttaaagtatcatccggagcctgggtcgcctaccaatacccggggtacagaggctaccagtatgtcttggagcgcgaccggcacagcggtgaattttgcacatatggcgagttgggtacacaggcccacactggtcagctgcagtctattcgccgcgtgcagcattag

SEQ ID NO: 230585 - DNA, 390 bp, Artificial Sequence
  derived and/or modified sequence
atgagcagcgcccccgcccccggccccgcccccgccagcctgaccctttgggacgaggaggattttcaaggacggagatgccgcctcctcagtgactgcgccaatgtttgtgagcgagggggcctgcccagggtgcgctccgtaaaggtcgagaacggggtttgggttgcttttgaatacccagactttcaaggtcaacagttcatattggagaaaggcgactatccacggtggtctgcatggagtggcagctctagccacaattctaatcagctactgtctttccgccctgtcttgtgtgccaatcacaatgattctcgggttacactgttcgagggggataattttcagggctgcaaattcgacctcgttgacgattatccaagctag

SEQ ID NO: 230586 - DNA, 594 bp, Artificial Sequence
  derived and/or modified sequence
atgtccagtgctcctgccccagggcctgccccagcctcgttaacgctgtgggacgaggaagactttcaggggaggcgatgcaggctgctctctgattgcgccaatgtatgcgagagagggggactgcctagagtgaggtctgtgaaggtggaaaatggggtgtgggtggcttttgaataccctgatttccagggacaacagtttattttagagaaaggcgattaccccagatggagtgcatggagcggcagctcatcccataattccaatcagctgttgtcctttcgccctgtgttgtgtgcgaaccacaatgacagcagagttaccctgtttgagggcgataatttccaggggtgtaagtttgacctggtggacgactatccatccctgcctagtatggggtgggctagtaaagacgtcgggtcactcaaagtgtcttccggtgcctgggtagcgtatcaatatccaggctatcggggataccaatacgtcctcgaacgcgatagacacagcggtgagttctgcacgtacggcgagctcggcacccaagcccacacaggccagttgcaaagcatcagaagagttcaacactag

SEQ ID NO: 230587 - DNA, 594 bp, Artificial Sequence
  derived and/or modified sequence
atgagttccgcacctgccccagggccagcccctgcatcactcactctgtgggatgaggaggatttccaagggagacgctgtagattattatccgattgcgctaacgtgtgcgagcggggtggactccctcgagtgcggtccgtcaaggtagaaaacggtgtgtgggtggcattcgaataccccgattttcagggacagcaattcatcctggagaaaggcgactatccgagatggagcgcctggtccggctcttcatcgcacaacagtaaccagctacttagttttcgccctgttctttgcgcaaaccacaatgacagcagggtgaccctgttcgaaggagacaactttcagggctgcaaattcgatctggtggatgactaccctagtctgcctagcatgggatgggcgtccaaagatgtgggaagcctgaaggtttcttccggcgcatgggtcgcataccaatatcctgggtaccgaggatatcagtatgtcctggaaagagaccgccattctggagaattttgcacctatggcgaactcggaactcaggcccatacaggccagttgcagtcaattcgacgggttcagcattag

SEQ ID NO: 230588 - DNA, 390 bp, Artificial Sequence
  derived and/or modified sequence
atgtcctccgcgccagccccaggtccagctcccgcatcactgaccttgtgggacgaggaagacttccagggacgaagatgccggctcctgagcgactgcgcaaacgtctgtgaaagaggaggactcccacgcgtcaggagtgttaaagtcgagaacggggtgtgggtggcctttgaataccccgactttcaaggtcaacagttcatactggaaaagggcgattatcctcgctggagcgcctggagtggaagcagttcccacaatagcaatcaactcttaagctttagaccagtcctgtgtgccaatcacaatgacagtcgggtgacgctgtttgagggtgataatttccagggttgtaagtttgaccttgtggacgattatccaagctag

SEQ ID NO: 230589 - DNA, 893 bp, Artificial Sequence
  derived and/or modified sequence
gccggtccatttccctcgcgtgccgcgctcacccacccggtgaatgccctctgctggggtggggaagggaggggagcgcgggaagactgcgagcccctggcagccgggtccagagctaggccgggtccagcccccgggttcttcatccgctacccaggttgggcaggctgtgtgtggctcgaaacggggctcttgagacgctgagcgcgtggtgccacccttcctgtccgcagcggcatgagcagcgcccccgcgccgggcccggcgcccgccagcctcacgctctgggacgaggaggacttccagggccgtcgctgtcggctgctaagcgactgtgcgaacgtctgcgagcgcggaggcctgcccagggtgcgctcggtcaaggtggaaaacggcgtttgggtggcctttgagtaccccgacttccagggacagcagttcattctggagaagggagactatcctcgctggagcgcctggagtggcagcagcagccacaacagcaaccagctgctgtccttccggccagtgctctgcgcgaaccacaatgacagccgtgtgacactgtttgagggggacaacttccaaggctgcaagtttgacctcgttgatgactacccatccctgccctccatgggctgggccagcaaggatgtgggttccctcaaagtcagctccggagcgtgggtggcctaccagtacccaggctaccgaggctaccagtatgtgttggagcgggaccggcacagcggagagttctgtacttacggtgagctcggcacacaggcccacactgggcagctgcagtccatccggagagtccagcactaggctccacggccccagacaccttccctgaggacactcaataaaggttcctgaatcttcctgcc

SEQ ID NO: 230590 - DNA, 708 bp, Artificial Sequence
  derived and/or modified sequence
gcctcgcagccggtccatttccctcgcgtgccgcgctcacccacccgcggcatgagcagcgcccccgcgccgggcccggcgcccgccagcctcacgctctgggacgaggaggacttccagggccgtcgctgtcggctgctaagcgactgtgcgaacgtctgcgagcgcggaggcctgcccagggtgcgctcggtcaaggtggaaaacggcgtttgggtggcctttgagtaccccgacttccagggacagcagttcattctggagaagggagactatcctcgctggagcgcctggagtggcagcagcagccacaacagcaaccagctgctgtccttccggccagtgctctgcgcgaaccacaatgacagccgtgtgacactgtttgagggggacaacttccaaggctgcaagtttgacctcgttgatgactacccatccctgccctccatgggctgggccagcaaggatgtgggttccctcaaagtcagctccggagcgtgggtggcctaccagtacccaggctaccgaggctaccagtatgtgttggagcgggaccggcacagcggagagttctgtacttacggtgagctcggcacacaggcccacactgggcagctgcagtccatccggagagtccagcactaggctccacggccccagacaccttccctgaggacactcaataaaggttcctgaatcttcctgccc

SEQ ID NO: 230591 - DNA, 493 bp, Artificial Sequence
  derived and/or modified sequence
ccctcgcgtgccgcgctcacccacccggttgggcaggctgtgtgtggctcgaaacggggctcttgagacgctgagcgcgtggtgccacccttcctgtccgcagcggcatgagcagcgcccccgcgccgggcccggcgcccgccagcctcacgctctgggacgaggaggacttccagggccgtcgctgtcggctgctaagcgactgtgcgaacgtctgcgagcgcggaggcctgcccagggtgcgctcggtcaaggtggaaaacggcgtttgggtggcctttgagtaccccgacttccagggacagcagttcattctggagaagggagactatcctcgctggagcgcctggagtggcagcagcagccacaacagcaaccagctgctgtccttccggccagtgctctgcgcgaaccacaatgacagccgtgtgacactgtttgagggggacaacttccaaggctgcaagtttgacctcgttgatgactacccatc

SEQ ID NO: 230592 - DNA, 594 bp, Artificial Sequence
  derived and/or modified sequence
atgagcagcgcccccgcccccggccccgcccccgccagcctgaccctgtgggacgaggaggacttccagggcagaagatgcagactgctgagcgactgcgccaacgtgtgcgagagaggcggcctgcccagagtgagaagcgtgaaggtggagaacggcgtgtgggtggccttcgagtaccccgacttccagggccagcagttcatcctggagaagggcgactaccccagatggagcgcctggagcggcagcagcagccacaacagcaaccagctgctgagcttcagacccgtgctgtgcgccaaccacaacgacagcagagtgaccctgttcgagggcgacaacttccagggctgcaagttcgacctggtggacgactaccccagcctgcccagcatgggctgggccagcaaggacgtgggcagcctgaaggtgagcagcggcgcctgggtggcctaccagtaccccggctacagaggctaccagtacgtgctggagagagacagacacagcggcgagttctgcacctacggcgagctgggcacccaggcccacaccggccagctgcagagcatcagaagagtgcagcactag

SEQ ID NO: 230593 - DNA, 390 bp, Artificial Sequence
  derived and/or modified sequence
atgagcagcgcccccgcccccggccccgcccccgccagcctgaccctgtgggacgaggaggacttccagggcagaagatgcagactgctgagcgactgcgccaacgtgtgcgagagaggcggcctgcccagagtgagaagcgtgaaggtggagaacggcgtgtgggtggccttcgagtaccccgacttccagggccagcagttcatcctggagaagggcgactaccccagatggagcgcctggagcggcagcagcagccacaacagcaaccagctgctgagcttcagacccgtgctgtgcgccaaccacaacgacagcagagtgaccctgttcgagggcgacaacttccagggctgcaagttcgacctggtggacgactaccccagctag

SEQ ID NO: 230594 - protein, 503 aa, Artificial Sequence
  derived and/or modified sequence
MDLIPNFAMETWVLVATSLVLLYIYGTHSHKLFKKLGIPGPTPLPFLGTILFYLRGLWNFDRECNEKYGEMWGLYEGQQPMLVIMDPDMIKTVLVKECYSVFTNQMPLGPMGFLKSALSFAEDEEWKRIRTLLSPAFTSVKFKEMVPIISQCGDMLVRSLRQEAENSKSINLKDFFGAYTMDVITGTLFGVNLDSLNNPQDPFLKNMKKLLKLDFLDPFLLLISLFPFLTPVFEALNIGLFPKDVTHFLKNSIERMKESRLKDKQKHRVDFFQQMIDSQNSKETKSHKALSDLELVAQSIIIIFAAYDTTSTTLPFIMYELATHPDVQQKLQEEIDAVLPNKAPVTYDALVQMEYLDMVVNETLRLFPVVSRVTRVCKKDIEINGVFIPKGLAVMVPIYALHHDPKYWTEPEKFCPERFSKKNKDSIDLYRYIPFGAGPRNCIGMRFALTNIKLAVIRALQNFSFKPCKETQIPLKLDNLPILQPEKPIVLKVHLRDGITSGP

SEQ ID NO: 230595 - protein, 126 aa, Artificial Sequence
  derived and/or modified sequence
MDLIPNFAMETWVLVATSLVLLYIYGTHSHKLFKKLGIPGPTPLPFLGTILFYLRGLWNFDRECNEKFLWGLHHGCNHWHIIWSELGFSQQSTRSLSEKYEEAFKIGFFGSLFTLNITLSISYPSF

SEQ ID NO: 230596 - DNA, 1512 bp, Artificial Sequence
  derived and/or modified sequence
atggacctcattcccaactttgctatggaaacctgggtcttagtagccacctcgctggtgttgctctatatctacggcacacactctcacaaactgttcaagaagctcggaattccaggtcctacccccttgccttttctaggcacaattctgttttacttgagggggttatggaactttgaccgggaatgtaacgaaaaatatggagagatgtgggggctgtacgagggacaacagcctatgctagtgataatggaccccgatatgatcaagacggtcctcgtcaaggaatgttactcagtctttaccaatcagatgccactgggtcctatgggttttctcaagtcagctctctcatttgccgaggacgaagagtggaaaaggattaggacactactctctccagcctttacgtctgttaagtttaaagaaatggtgccaattatctcccaatgtggagatatgctagtgcgctctttgagacaggaagccgagaacagcaaatctatcaacctcaaggactttttcggggcatacactatggacgtcatcacagggaccttgtttggggtgaacctcgactccctgaacaaccctcaggacccatttctgaagaacatgaaaaaactgctgaagctggatttcctggatcctttcctcctactgatttccctgttcccttttttaactccagtgtttgaggccctgaacataggcttattcccaaaggacgtaactcactttcttaagaacagtatcgaaaggatgaaggagtcacgactgaaggacaaacagaagcatcgcgtcgattttttccagcagatgatcgactctcaaaacagtaaggaaacaaaatcccataaggctctgagcgacttagagctcgtggctcagagcataatcatcattttcgctgcctacgacaccacatcaaccaccctcccgtttatcatgtacgagctcgccacccaccccgatgtacaacagaaactccaagaagagatcgatgctgtgctgccgaataaggcccccgtaacttacgacgcgttggttcagatggaatacttggatatggttgtaaacgagacattgagactctttcctgttgtttctcgggtgacgagggtctgtaaaaaagacatcgaaattaacggcgtcttcattcctaagggcctagcagtcatggtacctatttacgctctccaccacgatcccaaatactggaccgaacctgaaaaattctgtcccgagcgcttcagtaaaaaaaataaagactcgattgacctctatagatacatcccatttggtgctggccccagaaactgtattggtatgaggtttgcgctcaccaacattaagctggctgttattagggcactgcagaactttagcttcaagccttgcaaagaaacacagatccccttgaagctggataacctccctatccttcagcctgagaaacctatcgtcctgaaggtacacctgagagatggtattacgagtggcccatag

SEQ ID NO: 230597 - DNA, 1512 bp, Artificial Sequence
  derived and/or modified sequence
atggacctgatccccaactttgccatggagacctgggtgctggtggccaccagcctggtgctgctgtacatctacggcacccacagccacaagctgttcaagaagctgggcatccctggccccacccccctgcccttcctgggcaccatcctcttctacctgcggggcctgtggaactttgacagagaatgtaatgagaagtacggggagatgtggggcctgtatgagggccagcagcccatgctggtgatcatggaccctgacatgatcaagacagtgctggtgaaggagtgctacagcgtcttcaccaaccagatgcccctgggccccatgggcttcctgaagagcgccctgagctttgctgaagatgaggagtggaagaggatccgcaccctgctgagccctgccttcacctctgtgaagttcaaggagatggtgcccatcatcagccagtgtggggacatgctggtgcgcagcctgcggcaggaggccgagaacagcaagagcatcaacctgaaggacttcttcggggcctacaccatggatgtgatcaccggcaccctgtttggagtgaacctggacagcctgaacaacccccaggaccccttcctgaagaacatgaagaagctgctgaagctggacttcctggaccccttcctgctgctgatcagcctcttccccttcctgacccctgtgtttgaggccctgaacatcggcctcttccccaaggatgtgacccacttcctgaagaacagcattgaaagaatgaaggagagccggctgaaggacaagcagaagcaccgggtggacttcttccagcagatgattgacagccagaacagcaaggagaccaagagccacaaggccctgagtgacctggagctggtggcccagagcatcatcatcatctttgctgcctatgacaccaccagcaccaccctgcccttcatcatgtatgagctggccacccacccagatgtgcagcagaagctgcaggaggagattgatgctgtgctgcccaacaaggcccctgtgacctatgatgccctggtgcagatggagtacctggacatggtggtgaatgagaccctgcggctcttccctgtggtgtcccgggtgaccagggtgtgcaagaaggacatcgagatcaacggggtcttcatccccaagggcctggccgtgatggtgcccatctatgccctgcaccacgaccccaagtactggacagagcctgagaagttctgcccagagcgcttcagcaagaagaacaaggacagcattgacctgtaccgctacatcccctttggagctggccccaggaactgcatcggcatgagatttgccctgaccaacatcaagctggccgtcatccgggccctgcagaacttctccttcaagccctgcaaggagacccagatccccctgaagctggacaacctgcccatcctgcagcctgagaagcccatcgtgctgaaggtgcacctgagagatggcatcaccagcggcccctag

SEQ ID NO: 230598 - DNA, 1512 bp, Artificial Sequence
  derived and/or modified sequence
atggacctgatccccaacttcgccatggagacctgggtgctggtggctacctcgctggttctgctgtatatttacggaacccattcacacaagctgttcaaaaaactcgggatcccaggcccaacccctctgccattcttaggaaccattcttttttatctgaggggattgtggaactttgaccgcgagtgtaatgagaaatacggagaaatgtggggcctgtacgagggacagcagccaatgttagttatcatggaccccgatatgatcaaaaccgtcttggtaaaagagtgttattctgtattcacgaaccagatgccgctcgggccaatggggtttctgaagtccgcccttagctttgccgaggacgaggaatggaagcgtatcagaaccctcctgtcaccagcgttcaccagtgtcaagttcaaagaaatggttcctattatatcacagtgtggggacatgctcgtacgctctctgcggcaggaggccgagaattctaagtcgataaatctgaaagactttttcggcgcctacaccatggacgtaatcacaggaacgctgtttggtgtcaacttggattctttaaacaatccacaggaccccttcctaaagaatatgaagaaattgctgaagttagattttttggacccgtttctcctgctcatctctttgttcccttttctaacaccagtattcgaggcccttaacatcggtcttttcccaaaagatgtgacccacttcctgaaaaatagtattgaacgtatgaaggagtccaggctgaaggataaacagaagcatagagtggatttctttcagcaaatgattgacagccagaattcgaaggaaaccaaatctcataaagcactttccgacctcgaacttgtggcccagagcattatcatcatctttgcagcatacgataccacatcaacaactctaccttttatcatgtacgagctggcaacgcatcctgacgtacagcaaaagctccaggaagaaatagatgccgtgctacctaataaggccccggtgacgtacgatgcccttgtgcagatggaatatttagatatggtagtgaacgagacccttaggctgtttccagtcgtgagcagggtgacccgcgtgtgcaaaaaggacatcgaaatcaatggcgtgtttatccctaaagggttggctgttatggtgcctatatatgcattgcatcatgaccctaagtattggaccgagccagaaaaattttgtccagagcgcttctccaagaagaacaaggatagtatcgatctgtataggtacatcccgtttggcgctggcccccggaattgtataggaatgagatttgcgctcacaaatatcaaacttgccgtcattcgtgcacttcaaaatttttcgttcaaaccgtgtaaagagacccagatcccattaaaattggacaacctccccatactccagccggagaagccaattgtgctgaaggttcatttgcgggacgggattacatctggaccttag

SEQ ID NO: 230599 - DNA, 1512 bp, Artificial Sequence
  derived and/or modified sequence
atggatcttatcccaaactttgcgatggaaacttgggtcttggtcgctactagcctggttctgctttatatatacggcacccactcacataagctatttaagaagttgggtatccccggaccaacaccactacctttcctcggcacaattctgttctatcttcgcggtttgtggaattttgaccgtgagtgcaatgaaaaatacggagaaatgtgggggctctacgaggggcagcagcccatgctggtgatcatggaccctgacatgataaagacggtcctggttaaggaatgctattccgtatttactaaccagatgccactggggcctatgggcttcctgaagtcagcattgagcttcgcggaggatgaagagtggaagcgaatccgaactctcttgtcacctgcatttaccagcgtaaaattcaaagagatggtgccaattatctcacagtgcggtgatatgctggtccgatccctgcggcaggaagctgaaaacagcaagtctatcaatctcaaggatttttttggcgcttataccatggacgtgattacaggcaccttgtttggcgtgaatctggacagcttgaacaatccacaggacccatttctgaaaaacatgaaaaaacttctaaagctggacttcttagacccgttcctgctgcttatatccttgttcccttttctgactcccgtattcgaagccctcaatatcggcctcttccctaaagatgtcactcatttcttaaagaatagcatcgagcgaatgaaagagtctagactgaaggacaaacaaaaacatcgcgtggactttttccagcagatgatagatagccagaacagcaaggagacaaaatcccataaggctctgagtgatttagagttagtggcccagtcaattatcataatcttcgctgcatatgacactacgtccactactttgcccttcatcatgtatgagcttgccactcacccagacgtccagcaaaaactgcaggaggagatcgacgctgttctccccaacaaagcacctgttacatacgatgcacttgttcagatggagtatctcgacatggtggtcaacgagactctgaggctcttccccgtggtgagtcgggtgaccagagtttgtaagaaggatattgaaattaacggggtgttcatcccaaagggccttgctgtcatggttcctatctacgctcttcatcatgacccgaagtattggactgagccagagaaattctgccctgagcgtttctccaagaagaacaaggacagcatcgatctatatcgctacatacccttcggggcaggccctcggaactgcattggtatgaggtttgcactgaccaatatcaagttggcagtcatccgggcactccaaaatttcagctttaaaccgtgtaaggagacccaaattcccctgaaacttgataatctccctattctgcaacctgagaaacccatcgtgctgaaggtgcacctgcgagacgggattacatccggcccttag

SEQ ID NO: 230600 - DNA, 1709 bp, Artificial Sequence
  derived and/or modified sequence
acctctgggcagagaaacaaagctctatatgcacagcccagcaaagagcagcacacagctgaaagaaaaactcagaagacagagctgaaaaagaaaactggtgatggatctcattccaaactttgccatggaaacatgggttcttgtggctaccagcctggtactcctctatatttatgggacccattcacataaactttttaagaagctgggaattcctgggccaacccctctgccttttctgggaactattttgttctaccttaggggtctttggaattttgacagagaatgtaatgaaaaatacggagaaatgtgggggctgtatgaggggcaacagcccatgctggtcatcatggatcccgacatgatcaaaacagtgttagtgaaagaatgttactctgtcttcacaaaccagatgcctttaggtccaatgggatttctgaaaagtgccttaagttttgctgaagatgaagaatggaagagaatacgaacattgctatctccagctttcaccagtgtaaaattcaaggaaatggtccccatcatttcccaatgtggagatatgttggtgagaagcctgaggcaggaagcagagaacagcaagtccatcaacttgaaagatttctttggggcctacaccatggatgtaatcactggcacattatttggagtgaacttggattctctcaacaatccacaagatccctttctgaaaaatatgaagaagcttttaaaattggattttttggatccctttttactcttaatatcactctttccatttcttaccccagtttttgaagccctaaatatcggtttgtttccaaaagatgttacccattttttaaaaaattccattgaaaggatgaaagaaagtcgcctcaaagataaacaaaagcatcgagtagatttctttcaacagatgatcgactcccagaattccaaagaaacaaagtcccataaagctctgtctgatctggagcttgtggcccagtcaattatcatcatttttgctgcctatgacacaactagcaccactctccccttcattatgtatgaactggccactcaccctgatgtccagcagaaactgcaggaggagattgacgcagttttacccaataaggcacctgtcacctacgatgccctggtacagatggagtaccttgacatggtggtgaatgaaacgctcagattattcccagttgttagtagagttacgagagtctgcaagaaagatattgaaatcaatggagtgttcattcccaaagggttagcagtgatggttccaatctatgctcttcaccatgacccaaagtactggacagagcctgagaagttctgccctgaaaggttcagtaagaagaacaaggacagcatagatctttacagatacataccttttggagctggaccccgaaactgcattggcatgaggtttgctctcacaaacataaaacttgctgtcattagagcactgcagaacttctccttcaaaccttgtaaagagactcagatcccactgaaattagacaatctaccaattcttcaaccagaaaaacctattgttctaaaagtgcacttaagagatgggattacaagtggaccctgactttccctaaggacttccactttgttcaagaaagctgtatcccagaacactagacacttcaaattgttttgtgaataaaactcagaaatgaaga

SEQ ID NO: 230601 - DNA, 1192 bp, Artificial Sequence
  derived and/or modified sequence
atggatctcattccaaactttgccatggaaacatgggttcttgtggctaccagcctggtactcctctatatttatgggacccattcacataaactttttaagaagctgggaattcctgggccaacccctctgccttttctgggaactattttgttctaccttaggggtctttggaattttgacagagaatgtaatgaaaaatttctttggggcctacaccatggatgtaatcactggcacattatttggagtgaacttggattctctcaacaatccacaagatccctttctgaaaaatatgaagaagcttttaaaattggattttttggatccctttttactcttaatatcactctttccatttcttaccccagtttttgaagccctaaatatcggtttgtttccaaaagatgttacccattttttaaaaaattccattgaaaggatgaaagaaagtcgcctcaaagataaacaaaagcatcgagtagatttctttcaacagatgatcgactcccagaattccaaagaaacaaagtcccataaagctctgtctgatctggagcttgtggcccagtcaattatcatcatttttgctgcctatgacacaactagcaccactctccccttcattatgtatgaactggccactcaccctgatgtccagcagaaactgcaggaggagattgacgcagttttacccaataaggcacctgtcacctacgatgccctggtacagatggagtaccttgacatggtggtgaatgaaacgctcagattattcccagttgttagtagagttacgagagtctgcaagaaagatattgaaatcaatggagtgttcattcccaaagggttagcagtgatggttccaatctatgctcttcaccatgacccaaagtactggacagagcctgagaagttctgccctgaaaggttcagtaagaagaacaaggacagcatagatctttacagatacataccttttggagctggaccccgaaactgcattggcatgaggtttgctctcacaaacataaaacttgctgtcattagagcactgcagaacttctccttcaaaccttgtaaagagactcagatcccactgaaattagacaatctaccaattcttcaaccagaaaaacctattgttctaaaagtgcacttaagagatgggattacaagtggaccctga

SEQ ID NO: 230602 - DNA, 1512 bp, Artificial Sequence
  derived and/or modified sequence
atggacctgatccccaacttcgccatggagacctgggtgctggtggccaccagcctggtgctgctgtacatctacggcacccacagccacaagctgttcaagaagctgggcatccccggccccacccccctgcccttcctgggcaccatcctgttctacctgagaggcctgtggaacttcgacagagagtgcaacgagaagtacggcgagatgtggggcctgtacgagggccagcagcccatgctggtgatcatggaccccgacatgatcaagaccgtgctggtgaaggagtgctacagcgtgttcaccaaccagatgcccctgggccccatgggcttcctgaagagcgccctgagcttcgccgaggacgaggagtggaagagaatcagaaccctgctgagccccgccttcaccagcgtgaagttcaaggagatggtgcccatcatcagccagtgcggcgacatgctggtgagaagcctgagacaggaggccgagaacagcaagagcatcaacctgaaggacttcttcggcgcctacaccatggacgtgatcaccggcaccctgttcggcgtgaacctggacagcctgaacaacccccaggaccccttcctgaagaacatgaagaagctgctgaagctggacttcctggaccccttcctgctgctgatcagcctgttccccttcctgacccccgtgttcgaggccctgaacatcggcctgttccccaaggacgtgacccacttcctgaagaacagcatcgagagaatgaaggagagcagactgaaggacaagcagaagcacagagtggacttcttccagcagatgatcgacagccagaacagcaaggagaccaagagccacaaggccctgagcgacctggagctggtggcccagagcatcatcatcatcttcgccgcctacgacaccaccagcaccaccctgcccttcatcatgtacgagctggccacccaccccgacgtgcagcagaagctgcaggaggagatcgacgccgtgctgcccaacaaggcccccgtgacctacgacgccctggtgcagatggagtacctggacatggtggtgaacgagaccctgagactgttccccgtggtgagcagagtgaccagagtgtgcaagaaggacatcgagatcaacggcgtgttcatccccaagggcctggccgtgatggtgcccatctacgccctgcaccacgaccccaagtactggaccgagcccgagaagttctgccccgagagattcagcaagaagaacaaggacagcatcgacctgtacagatacatccccttcggcgccggccccagaaactgcatcggcatgagattcgccctgaccaacatcaagctggccgtgatcagagccctgcagaacttcagcttcaagccctgcaaggagacccagatccccctgaagctggacaacctgcccatcctgcagcccgagaagcccatcgtgctgaaggtgcacctgagagacggcatcaccagcggcccctag

SEQ ID NO: 230603 - protein, 420 aa, Artificial Sequence
  derived and/or modified sequence
MDLIPNFAMETWVLVATSLVLLYIYGTHSHKLFKKLGIPGPTPLPFLGTILFYLRGLWNFDRECNEKYGEMWGLYEGQQPMLVIMDPDMIKTVLVKECYSVFTNQMPLGPMGFLKSALSFAEDEEWKRIRTLLSPAFTSVKFKEMVPIISQCGDMLVRSLRQEAENSKSINLKDFFGAYTMDVITGTLFGVNLDSLNNPQDPFLKNMKKLLKLDFLDPFLLLISLFPFLTPVFEALNIGLFPKDVTHFLKNSIERMKESRLKDKQKHRVDFFQQMIDSQNSKETKSHKALSDLELVAQSIIIIFAAYDTTSTTLPFIMYELATHPDVQQKLQEEIDAVLPNKAPVTYDALVQMEYLDMVVNETLRLFPVVSRVTRVCKKDIEINGVFIPKGLAVMVPIYALHHDPKYWTEPEKFCPERSH

SEQ ID NO: 230604 - protein, 74 aa, Artificial Sequence
  derived and/or modified sequence
MDLIPNFAMETWVLVATSLVLLYIYGTHSHKLFKKLGIPGPTPLPFLGTILFYLRGLWNFDRECNEKYGEMWGP

SEQ ID NO: 230605 - DNA, 1263 bp, Artificial Sequence
  derived and/or modified sequence
atggacctgattccaaacttcgcaatggagacatgggtgctcgtcgccacgtctctcgtcctgctctatatctatgggacgcactcccataagctatttaagaagcttggcatcccgggaccaacccccctgccgtttttaggtactatcttgttctatctgcgggggctgtggaatttcgacagagagtgcaatgaaaaatacggcgaaatgtggggcctgtacgaaggccagcagccaatgctcgtcattatggaccctgacatgataaagacagtcctggtgaaggaatgctactccgtctttaccaaccagatgcctcttggccccatgggcttccttaagagcgcactctctttcgccgaagacgaggagtggaaaaggattcgcacactcctgtcacccgcatttacctctgtgaagtttaaagagatggttccaatcatctctcaatgtggtgatatgctcgtgaggtctctgagacaggaggcggagaatagtaagtccatcaatctgaaagacttttttggcgcatataccatggatgttattacgggaactctgtttggtgtcaacctggatagccttaacaatccgcaggacccatttctaaaaaatatgaaaaaattgctcaaactcgattttctagaccctttcctgctgctgatctcactgttccctttcctcactcctgtgttcgaggccctcaatattggtctgtttcctaaagatgtaactcattttctgaagaattccattgaacgaatgaaagaatccagactgaaggacaaacagaaacacagagtggatttctttcagcagatgattgacagccagaactccaaagaaaccaaatctcataaggccctgtctgacctggaattggttgcacagagcatcattatcatttttgctgcttacgatactacttccacaacattgcctttcatcatgtatgagctggccacccacccggatgtgcagcaaaagctgcaagaggagattgatgcagtgctccccaataaggcccccgttacttatgatgcattggtgcagatggaatatttagatatggtggtgaatgaaaccttaagattgtttccagtagtgagtcgagtaactcgagtttgtaaaaaggatatagagattaatggcgtgtttataccgaaaggcctcgccgttatggtaccaatttacgctctccatcacgaccctaagtattggacagaaccagaaaagttctgtccggagcgctcgcactag

SEQ ID NO: 230606 - DNA, 381 bp, Artificial Sequence
  derived and/or modified sequence
atggacctgatccctaatttcgctatggagacatgggtcctggttgctacctcactagtgctcctgtatatatacggaacacattcgcataaattgtttaaaaaactcggaatccccggccctacgcccctgccttttcttggtacgattttgttctatttgaggggcctgtggaactttgatagagaatgtaatgagaagtttttgtggggacttcaccatggctgtaaccactggcatatcatatggagtgaacttggcttcagccagcaaagcacccgtagcctgagcgaaaagtatgaagaagcgttcaagattggctttttcggctcgctctttacactgaatattaccctgtccattagctatccatctttttag

SEQ ID NO: 230607 - DNA, 225 bp, Artificial Sequence
  derived and/or modified sequence
atggatcttatccccaattttgcgatggaaacctgggttctcgtggccacttctctggtgctcctgtatatctatggtacacattcacacaagctcttcaagaagctgggtatccctggacccacgcccctgcccttcctgggaactatcctgttttatcttagaggactgtggaatttcgatcgcgaatgcaatgagaaatatggagagatgtggggtccctag

SEQ ID NO: 230608 - DNA, 1263 bp, Artificial Sequence
  derived and/or modified sequence
atggacctgatccccaactttgccatggagacctgggtgctggtggccaccagcctggtgctgctgtacatctacggcacccacagccacaagctgttcaagaagctgggcatccctggccccacccccctgcccttcctgggcaccatcctcttctacctgcggggcctgtggaactttgacagagaatgtaatgagaagtacggggagatgtggggcctgtatgagggccagcagcccatgctggtgatcatggaccctgacatgatcaagacagtgctggtgaaggagtgctacagcgtcttcaccaaccagatgcccctgggccccatgggcttcctgaagagcgccctgagctttgctgaagatgaggagtggaagaggatccgcaccctgctgagccctgccttcacctctgtgaagttcaaggagatggtgcccatcatcagccagtgtggggacatgctggtgcgcagcctgcggcaggaggccgagaacagcaagagcatcaacctgaaggacttcttcggggcctacaccatggatgtgatcaccggcaccctgtttggagtgaacctggacagcctgaacaacccccaggaccccttcctgaagaacatgaagaagctgctgaagctggacttcctggaccccttcctgctgctgatcagcctcttccccttcctgacccctgtgtttgaggccctgaacatcggcctcttccccaaggatgtgacccacttcctgaagaacagcattgaaagaatgaaggagagccggctgaaggacaagcagaagcaccgggtggacttcttccagcagatgattgacagccagaacagcaaggagaccaagagccacaaggccctgagtgacctggagctggtggcccagagcatcatcatcatctttgctgcctatgacaccaccagcaccaccctgcccttcatcatgtatgagctggccacccacccagatgtgcagcagaagctgcaggaggagattgatgctgtgctgcccaacaaggcccctgtgacctatgatgccctggtgcagatggagtacctggacatggtggtgaatgagaccctgcggctcttccctgtggtgtcccgggtgaccagggtgtgcaagaaggacatcgagatcaacggggtcttcatccccaagggcctggccgtgatggtgcccatctatgccctgcaccacgaccccaagtactggacagagcctgagaagttctgcccagagaggagccactag

SEQ ID NO: 230609 - DNA, 381 bp, Artificial Sequence
  derived and/or modified sequence
atggacctgatccccaactttgccatggagacctgggtgctggtggccaccagcctggtgctgctgtacatctacggcacccacagccacaagctgttcaagaagctgggcatccctggccccacccccctgcccttcctgggcaccatcctcttctacctgcggggcctgtggaactttgacagagaatgtaatgagaagttcctgtggggcctgcaccacggctgcaaccactggcacatcatctggagcgagctgggcttcagccagcagagcaccaggagcctgtctgagaagtatgaggaggccttcaagattggcttcttcggcagcctcttcaccctgaacatcaccctgagcatctcctaccccagcttctag

SEQ ID NO: 230610 - DNA, 225 bp, Artificial Sequence
  derived and/or modified sequence
atggacctgatccccaactttgccatggagacctgggtgctggtggccaccagcctggtgctgctgtacatctacggcacccacagccacaagctgttcaagaagctgggcatccctggccccacccccctgcccttcctgggcaccatcctcttctacctgcggggcctgtggaactttgacagagaatgtaatgagaagtacggggagatgtggggcccctag

SEQ ID NO: 230611 - DNA, 1263 bp, Artificial Sequence
  derived and/or modified sequence
atggacctgatccccaacttcgccatggagacctgggtgctggtggctaccagcctcgtgctactgtatatttacgggactcatagccacaaattgtttaagaagctgggcatcccaggcccaactccactgcccttccttggcacgattctgttttatctccgggggttgtggaatttcgaccgtgagtgtaacgaaaagtatggggaaatgtggggcctgtacgagggacagcagcctatgctggtgattatggaccccgacatgatcaagaccgtcctggtgaaagagtgttactctgtgtttactaatcaaatgcccttaggaccaatgggcttcttaaagtcagctctctcctttgctgaggacgaggaatggaagagaattcgtactctgttgtcgccagccttcacttcagtgaagttcaaagagatggtacctattatttctcagtgcggcgacatgttggtccggagtctgagacaggaggcagaaaattccaagtctatcaacctgaaagatttcttcggggcatatactatggacgtcatcacagggacactgttcggggtgaatctggactcattgaacaacccgcaggatccgttcctgaagaacatgaaaaaactgctgaagcttgatttcctggacccctttctgctgctcattagcctgttcccatttttaacacccgtgtttgaggccctgaatatcggcttgtttcccaaagatgtaacccatttcctgaagaactccattgaacggatgaaagagtctcgtctgaaagataagcagaagcacagagtggactttttccagcagatgattgattcacagaatagtaaggagaccaagtcacataaggctttatccgacctggagctcgttgcccagagcattataatcattttcgccgcttacgataccacaagtacgacattgcccttcatcatgtacgagctagcaacccatccggacgtgcagcagaaactgcaagaggaaatagatgccgttctgcctaataaggctccggtcacctatgacgccctggtgcaaatggaatatctggatatggtggtgaacgagaccttgaggttgtttccagtggtaagtagagtgacccgcgtatgtaaaaaagacatcgaaataaacggggtgttcatcccaaaaggcctagccgtcatggtgcccatctacgccttacaccatgacccaaaatattggaccgagcccgaaaagttctgtcccgagagaagccactag

SEQ ID NO: 230612 - DNA, 381 bp, Artificial Sequence
  derived and/or modified sequence
atggacctgatccccaacttcgccatggagacctgggtgctggtggcaacttccctggtgttgctctacatctacgggacccattcacataaacttttcaagaagctgggaatccctgggccaacccctctgcccttcctcgggacaatcctgttttatctgcgcggtctctggaattttgatcgagaatgcaatgagaaatttctgtgggggctgcatcatggatgtaaccactggcacatcatctggtccgaattgggctttagtcagcaaagtactcgctcattatcagagaagtacgaggaggccttcaagatcggattctttggaagccttttcacattgaacatcacattgtcaatctcttacccttctttctag

SEQ ID NO: 230613 - DNA, 225 bp, Artificial Sequence
  derived and/or modified sequence
atggacctgatccccaacttcgccatggagacctgggtgctggtggccacaagcctggtgctgttatacatatacggaacacattcccacaaactcttcaagaagctggggataccaggtcccacgcccctgcctttcttgggaacgatactgttttatcttcgaggtctatggaatttcgaccgcgagtgtaatgaaaagtacggggaaatgtggggaccttag

SEQ ID NO: 230614 - DNA, 1263 bp, Artificial Sequence
  derived and/or modified sequence
atggaccttattcctaattttgcaatggaaacttgggtgctggtggccaccagcctagtgctcctctacatttacggcacgcactcccacaaattgttcaagaagttaggcatacctggaccaacccctctgccattcctgggcaccatcctcttctatttgcggggactgtggaactttgatagagagtgcaatgagaaatacggagaaatgtggggcctctatgagggccagcagcctatgctagtcattatggatcctgatatgatcaaaacagtcctggtaaaggagtgctatagcgtgtttacaaaccagatgcccttggggccaatgggttttctaaaatctgcactgagctttgccgaggacgaggagtggaagcggatccgcacattactcagccccgcatttacctccgtgaaattcaaagagatggtgccaattatctctcagtgcggcgatatgcttgttcgtagcctcaggcaggaggccgaaaacagcaagagcataaacttgaaagactttttcggcgcttacacaatggatgtgattacagggacattattcggtgttaatctggacagcctgaacaatccccaagaccccttcctgaagaatatgaaaaagttgttgaaattggacttcctcgatccgttcctgcttctgatctccttatttccgttcctgacgcccgtctttgaggcactcaacattggattgtttcctaaagatgtgacacactttctgaagaattctattgaacgaatgaaggagtctaggctgaaggataagcagaagcacagggtcgactttttccaacaaatgatagattcccagaatagcaaggagacaaagagccataaggcgttgtccgaccttgaactcgtagcacagagcattatcatcatattcgcagcctatgacaccacttctactaccttgccctttattatgtacgagctggcaacccatcctgacgtccaacagaaactccaagaggagattgacgcagttctcccgaacaaggcacccgtgacctacgacgctctggtgcagatggagtatctagatatggttgttaatgagactcttcgcctgtttccagtcgtcagcagggtgaccagagtttgtaagaaagacatagaaatcaatggcgttttcattcctaaaggcctcgcagtgatggttcccatctacgctttgcaccacgatcctaagtattggacggagccagagaagttctgccccgaaagaagtcattag

SEQ ID NO: 230615 - DNA, 381 bp, Artificial Sequence
  derived and/or modified sequence
atggatctcatccccaactttgcgatggagacctgggtcttggtggctacctccctcgtattgctgtatatctatggtacacactcacacaagctttttaagaaactgggaattcccggacctaccccactccccttcctagggactattctgttctatttaagaggcctctggaattttgaccgggaatgtaacgagaagttcttatggggactacaccacggctgtaatcactggcacatcatctggtcagaactgggatttagtcagcaatcaactcgttctctgagtgaaaagtacgaggaggccttcaagattggatttttcggctccctgtttaccctcaacatcaccttgtcaatcagctaccccagtttttag

SEQ ID NO: 230616 - DNA, 225 bp, Artificial Sequence
  derived and/or modified sequence
atggacctgatccctaattttgctatggagacctgggtcctcgtggccacgtctcttgtgcttctctacatctatgggacacatagtcacaagctgttcaaaaagttggggatccccggaccaactccacttcctttcctgggtacaatcctgttctatctgcgaggtttatggaactttgatagggagtgcaacgagaaatacggagaaatgtgggggccttag

SEQ ID NO: 230617 - DNA, 1349 bp, Artificial Sequence
  derived and/or modified sequence
atggatctcattccaaactttgccatggaaacatgggttcttgtggctaccagcctggtactcctctatatttatgggacccattcacataaactttttaagaagctgggaattcctgggccaacccctctgccttttctgggaactattttgttctaccttaggggtctttggaattttgacagagaatgtaatgaaaaatacggagaaatgtgggggctgtatgaggggcaacagcccatgctggtcatcatggatcccgacatgatcaaaacagtgttagtgaaagaatgttactctgtcttcacaaaccagatgcctttaggtccaatgggatttctgaaaagtgccttaagttttgctgaagatgaagaatggaagagaatacgaacattgctatctccagctttcaccagtgtaaaattcaaggaaatggtccccatcatttcccaatgtggagatatgttggtgagaagcctgaggcaggaagcagagaacagcaagtccatcaacttgaaagatttctttggggcctacaccatggatgtaatcactggcacattatttggagtgaacttggattctctcaacaatccacaagatccctttctgaaaaatatgaagaagcttttaaaattggattttttggatccctttttactcttaatatcactctttccatttcttaccccagtttttgaagccctaaatatcggtttgtttccaaaagatgttacccattttttaaaaaattccattgaaaggatgaaagaaagtcgcctcaaagataaacaaaagcatcgagtagatttctttcaacagatgatcgactcccagaattccaaagaaacaaagtcccataaagctctgtctgatctggagcttgtggcccagtcaattatcatcatttttgctgcctatgacacaactagcaccactctccccttcattatgtatgaactggccactcaccctgatgtccagcagaaactgcaggaggagattgacgcagttttacccaataaggcacctgtcacctacgatgccctggtacagatggagtaccttgacatggtggtgaatgaaacgctcagattattcccagttgttagtagagttacgagagtctgcaagaaagatattgaaatcaatggagtgttcattcccaaagggttagcagtgatggttccaatctatgctcttcaccatgacccaaagtactggacagagcctgagaagttctgccctgaaagatcccactgaaattagacaatctaccaattcttcaaccagaaaaacctattgttctaaaagtgcacttaagagatgggattacaagtggaccctga

SEQ ID NO: 230618 - DNA, 328 bp, Artificial Sequence
  derived and/or modified sequence
acctctgggcagagaaacaaagctctatatgcacagcccagcaaagagcagcacacagctgaaagaaaaactcagaagacagagctgaaaaagaaaactggtgatggatctcattccaaactttgccatggaaacatgggttcttgtggctaccagcctggtactcctctatatttatgggacccattcacataaactttttaagaagctgggaattcctgggccaacccctctgccttttctgggaactattttgttctaccttaggggtctttggaattttgacagagaatgtaatgaaaaatacggagaaatgtggggaccctaa

SEQ ID NO: 230619 - DNA, 1263 bp, Artificial Sequence
  derived and/or modified sequence
atggacctgatccccaacttcgccatggagacctgggtgctggtggccaccagcctggtgctgctgtacatctacggcacccacagccacaagctgttcaagaagctgggcatccccggccccacccccctgcccttcctgggcaccatcctgttctacctgagaggcctgtggaacttcgacagagagtgcaacgagaagtacggcgagatgtggggcctgtacgagggccagcagcccatgctggtgatcatggaccccgacatgatcaagaccgtgctggtgaaggagtgctacagcgtgttcaccaaccagatgcccctgggccccatgggcttcctgaagagcgccctgagcttcgccgaggacgaggagtggaagagaatcagaaccctgctgagccccgccttcaccagcgtgaagttcaaggagatggtgcccatcatcagccagtgcggcgacatgctggtgagaagcctgagacaggaggccgagaacagcaagagcatcaacctgaaggacttcttcggcgcctacaccatggacgtgatcaccggcaccctgttcggcgtgaacctggacagcctgaacaacccccaggaccccttcctgaagaacatgaagaagctgctgaagctggacttcctggaccccttcctgctgctgatcagcctgttccccttcctgacccccgtgttcgaggccctgaacatcggcctgttccccaaggacgtgacccacttcctgaagaacagcatcgagagaatgaaggagagcagactgaaggacaagcagaagcacagagtggacttcttccagcagatgatcgacagccagaacagcaaggagaccaagagccacaaggccctgagcgacctggagctggtggcccagagcatcatcatcatcttcgccgcctacgacaccaccagcaccaccctgcccttcatcatgtacgagctggccacccaccccgacgtgcagcagaagctgcaggaggagatcgacgccgtgctgcccaacaaggcccccgtgacctacgacgccctggtgcagatggagtacctggacatggtggtgaacgagaccctgagactgttccccgtggtgagcagagtgaccagagtgtgcaagaaggacatcgagatcaacggcgtgttcatccccaagggcctggccgtgatggtgcccatctacgccctgcaccacgaccccaagtactggaccgagcccgagaagttctgccccgagagaagccactag

SEQ ID NO: 230620 - DNA, 381 bp, Artificial Sequence
  derived and/or modified sequence
atggacctgatccccaacttcgccatggagacctgggtgctggtggccaccagcctggtgctgctgtacatctacggcacccacagccacaagctgttcaagaagctgggcatccccggccccacccccctgcccttcctgggcaccatcctgttctacctgagaggcctgtggaacttcgacagagagtgcaacgagaagttcctgtggggcctgcaccacggctgcaaccactggcacatcatctggagcgagctgggcttcagccagcagagcaccagaagcctgagcgagaagtacgaggaggccttcaagatcggcttcttcggcagcctgttcaccctgaacatcaccctgagcatcagctaccccagcttctag

SEQ ID NO: 230621 - DNA, 225 bp, Artificial Sequence
  derived and/or modified sequence
atggacctgatccccaacttcgccatggagacctgggtgctggtggccaccagcctggtgctgctgtacatctacggcacccacagccacaagctgttcaagaagctgggcatccccggccccacccccctgcccttcctgggcaccatcctgttctacctgagaggcctgtggaacttcgacagagagtgcaacgagaagtacggcgagatgtggggcccctag

SEQ ID NO: 230622 - protein, 428 aa, Artificial Sequence
  derived and/or modified sequence
MKRRKYGFIYKTHLFGRPTVRVMGADNVRRILLGEHRLVSVHWPASVRTILGSGCLSNLHDSSHKQRKKVIMRAFSREALECYVPVITEEVGSSLEQWLSCGERGLLVYPEVKRLMFRIAMRILLGCEPQLAGDGDSEQQLVEAFEEMTRNLFSLPIDVPFSGLYRGMKARNLIHARIEQNIRAKICGLRASEAGQGCKDALQLLIEHSWERGERLDMQALKQSSTELLFGGHETTASAATSLITYLGLYPHVLQKVREELKSKGLLCKSNQDNKLDMEILEQLKYIGCVIKETLRLNPPVPGGFRVALKTFELNGYQIPKGWNVIYSICDTHDVAEIFTNKEEFNPDRFMLPHPEDASRFSFIPFGGGLRSCVGKEFAKILLKIFTVELARHCDWQLLNGPPTMKTSPTVYPVDNLPARFTHFHGEI

SEQ ID NO: 230623 - protein, 1036 aa, Artificial Sequence
  derived and/or modified sequence
MRKHRHLPLVAVFCLFLSGFPTTHAQQQQAVIEVNKRDIVFLVDGSSALGLANFNAIRDFIAKVIQRLEIGQDLIQVAVAQYADTVRPEFYFNTHPTKREVITAVRKMKPLDGSALYTGSALDFVRNNLFTSSAGYRAAEGIPKLLVLITGGKSLDEISQPAQELKRSSIMAFAIGNKGADQAELEEIAFDSSLVFIPAEFRAAPLQGMLPGLLAPLRTLSGTPEVHSNKRDIIFLLDGSANVGKTNFPYVRDFVMNLVNSLDIGNDNIRVGLVQFSDTPVTEFSLNTYQTKSDILGHLRQLQLQGGSGLNTGSALSYVYANHFTEAGGSRIREHVPQLLLLLTAGQSEDSYLQAANALTRAGILTFCVGASQANKAELEQIAFNPSLVYLMDDFSSLPALPQQLIQPLTTYVSGGVEEVPLAQPESKRDILFLFDGSANLVGQFPVVRDFLYKIIDELNVKPEGTRIAVAQYSDDVKVESRFDEHQSKPEILNLVKRMKIKTGKALNLGYALDYAQRYIFVKSAGSRIEDGVLQFLVLLVAGRSSDRVDGPASNLKQSGVVPFIFQAKNADPAELEQIVLSPAFILAAESLPKIGDLHPQIVNLLKSVHNGAPAPVSGEKDVVFLLDGSEGVRSGFPLLKEFVQRVVESLDVGQDRVRVAVVQYSDRTRPEFYLNSYMNKQDVVNAVRQLTLLGGPTPNTGAALEFVLRNILVSSAGSRITEGVPQLLIVLTADRSGDDVRNPSVVVKRGGAVPIGIGIGNADITEMQTISFIPDFAVAIPTFRQLGTVQQVISERVTQLTREELSRLQPVLQPLPSPGVGGKRDVVFLIDGSQSAGPEFQYVRTLIERLVDYLDVGFDTTRVAVIQFSDDPKVEFLLNAHSSKDEVQNAVQRLRPKGGRQINVGNALEYVSRNIFKRPLGSRIEEGVPQFLVLISSGKSDDEVDDPAVELKQFGVAPFTIARNADQEELVKISLSPEYVFSVSTFRELPSLEQKLLTPITTLTSEQIQKLLASTRYPPPGEMGASEVLLGAFSI

SEQ ID NO: 230624 - DNA, 3111 bp, Artificial Sequence
  derived and/or modified sequence
atgagaaagcacagacacctgcccctggtggccgtgttctgcctgttcctgagcggcttccccaccacccacgcccagcagcagcaggccgtgatcgaggtgaacaagagagacatcgtgttcctggtggacggcagcagcgccctgggcctggccaacttcaacgccatcagagacttcatcgccaaggtgatccagagactggagatcggccaggacctgatccaggtggccgtggcccagtacgccgacaccgtgagacccgagttctacttcaacacccaccccaccaagagagaggtgatcaccgccgtgagaaagatgaagcccctggacggcagcgccctgtacaccggcagcgccctggacttcgtgagaaacaacctgttcaccagcagcgccggctacagagccgccgagggcatccccaagctgctggtgctgatcaccggcggcaagagcctggacgagatcagccagcccgcccaggagctgaagagaagcagcatcatggccttcgccatcggcaacaagggcgccgaccaggccgagctggaggagatcgccttcgacagcagcctggtgttcatccccgccgagttcagagccgcccccctgcagggcatgctgcccggcctgctggcccccctgagaaccctgagcggcacccccgaggtgcacagcaacaagagagacatcatcttcctgctggacggcagcgccaacgtgggcaagaccaacttcccctacgtgagagacttcgtgatgaacctggtgaacagcctggacatcggcaacgacaacatcagagtgggcctggtgcagttcagcgacacccccgtgaccgagttcagcctgaacacctaccagaccaagagcgacatcctgggccacctgagacagctgcagctgcagggcggcagcggcctgaacaccggcagcgccctgagctacgtgtacgccaaccacttcaccgaggccggcggcagcagaatcagagagcacgtgccccagctgctgctgctgctgaccgccggccagagcgaggacagctacctgcaggccgccaacgccctgaccagagccggcatcctgaccttctgcgtgggcgccagccaggccaacaaggccgagctggagcagatcgccttcaaccccagcctggtgtacctgatggacgacttcagcagcctgcccgccctgccccagcagctgatccagcccctgaccacctacgtgagcggcggcgtggaggaggtgcccctggcccagcccgagagcaagagagacatcctgttcctgttcgacggcagcgccaacctggtgggccagttccccgtggtgagagacttcctgtacaagatcatcgacgagctgaacgtgaagcccgagggcaccagaatcgccgtggcccagtacagcgacgacgtgaaggtggagagcagattcgacgagcaccagagcaagcccgagatcctgaacctggtgaagagaatgaagatcaagaccggcaaggccctgaacctgggctacgccctggactacgcccagagatacatcttcgtgaagagcgccggcagcagaatcgaggacggcgtgctgcagttcctggtgctgctggtggccggcagaagcagcgacagagtggacggccccgccagcaacctgaagcagagcggcgtggtgcccttcatcttccaggccaagaacgccgaccccgccgagctggagcagatcgtgctgagccccgccttcatcctggccgccgagagcctgcccaagatcggcgacctgcacccccagatcgtgaacctgctgaagagcgtgcacaacggcgcccccgcccccgtgagcggcgagaaggacgtggtgttcctgctggacggcagcgagggcgtgagaagcggcttccccctgctgaaggagttcgtgcagagagtggtggagagcctggacgtgggccaggacagagtgagagtggccgtggtgcagtacagcgacagaaccagacccgagttctacctgaacagctacatgaacaagcaggacgtggtgaacgccgtgagacagctgaccctgctgggcggccccacccccaacaccggcgccgccctggagttcgtgctgagaaacatcctggtgagcagcgccggcagcagaatcaccgagggcgtgccccagctgctgatcgtgctgaccgccgacagaagcggcgacgacgtgagaaaccccagcgtggtggtgaagagaggcggcgccgtgcccatcggcatcggcatcggcaacgccgacatcaccgagatgcagaccatcagcttcatccccgacttcgccgtggccatccccaccttcagacagctgggcaccgtgcagcaggtgatcagcgagagagtgacccagctgaccagagaggagctgagcagactgcagcccgtgctgcagcccctgcccagccccggcgtgggcggcaagagagacgtggtgttcctgatcgacggcagccagagcgccggccccgagttccagtacgtgagaaccctgatcgagagactggtggactacctggacgtgggcttcgacaccaccagagtggccgtgatccagttcagcgacgaccccaaggtggagttcctgctgaacgcccacagcagcaaggacgaggtgcagaacgccgtgcagagactgagacccaagggcggcagacagatcaacgtgggcaacgccctggagtacgtgagcagaaacatcttcaagagacccctgggcagcagaatcgaggagggcgtgccccagttcctggtgctgatcagcagcggcaagagcgacgacgaggtggacgaccccgccgtggagctgaagcagttcggcgtggcccccttcaccatcgccagaaacgccgaccaggaggagctggtgaagatcagcctgagccccgagtacgtgttcagcgtgagcaccttcagagagctgcccagcctggagcagaagctgctgacccccatcaccaccctgaccagcgagcagatccagaagctgctggccagcaccagataccccccccccggcgagatgggcgccagcgaggtgctgctgggcgccttcagcatctag

SEQ ID NO: 230625 - DNA, 3111 bp, Artificial Sequence
  derived and/or modified sequence
atgcgaaagcaccggcacctgcccctggtggctgttttttgcctttttctctcaggattccctaccacccacgcacaacagcaacaggcagtgatagaagttaacaaacgtgacatagttttcctggttgatggatcctcagcactgggcttggcaaacttcaacgcaattcgggattttatcgctaaagtgatccagcggttagagatcggccaggatctcatccaggttgccgttgcccagtacgcagatactgttcgccctgaattctattttaacacccatccaacaaaacgggaagtcattaccgccgtgagaaaaatgaagcccctggatggatctgcactgtataccggctcagcactcgactttgttagaaacaatctgtttacctcttccgccggctaccgagcagcggaaggaatacctaagttgcttgtgctgatcacgggtggtaaaagtttagacgagatttcacagccagctcaggaactgaagaggtcctccataatggcattcgctataggtaataaaggcgccgatcaggctgagctggaagagatagcatttgatagttctttagttttcatcccagcagagttccgagcagccccactacagggaatgcttcccggcctgctggcaccacttaggaccctctcggggacaccagaagtccattctaacaaacgggatattattttcttgctggacggatcagccaacgtggggaaaacaaattttccttacgtcagggatttcgtgatgaacttagttaactccctggatatcgggaacgacaacattagagtgggccttgttcagttcagcgacactcctgtgacagaattcagtctgaatacttaccagacaaagtccgacatcctggggcacttgcggcagctccaattacaggggggttcaggcctgaatactggaagtgccttgagctacgtgtatgcaaatcatttcactgaggctggagggtcccgaattagggaacatgtgccccagctgctcctcttgctgacagccggccagtcagaggactcataccttcaagcggcgaacgccctaacacgggctggaatcttaactttctgcgtgggagcctcgcaggccaataaagccgaactggagcagattgcttttaacccctctctggtctacctgatggatgacttcagttccttacctgcccttccccaacagttgatccagccactcactacctatgttagtggcggcgtggaagaggtgccgctggcgcagcctgagtcaaagcgcgatatacttttcctttttgacggtagcgcaaatctggtggggcaatttcctgttgtgcgtgacttcttgtataagattatcgacgagctgaatgttaagcccgagggcacaagaattgccgttgcccagtattctgacgacgtgaaggtggagagcaggttcgacgaacaccaaagcaagcctgagattctgaatctggttaagcgaatgaagatcaagaccggtaaagcattaaatctggggtatgcactcgactatgcccagcgatatatatttgtcaagtccgccggcagccgaattgaggatggcgttctgcagttcctggtgctcttagtggccggcagatcctcagaccgggtggatggccccgcgagcaaccttaagcagagtggagtggtgccgttcattttccaggcaaagaatgcggatcccgctgaactggagcaaattgtgttatccccagctttcatcttagctgccgagtccctgccaaagataggggatctccatcctcagattgtaaatctgctcaagtccgtacataatggggctcctgcccctgtgagcggggagaaggatgtggtgttcctactcgatggttcggaaggtgtacggagcggttttccgctcctgaaggaatttgtacagcgcgtcgtagagagccttgatgtcggccaggaccgtgttcgagtcgccgtggtgcagtactccgatagaacccgccctgagttctacctgaattcatatatgaataaacaagacgttgtgaatgcagtgagacaattgacacttctgggaggtccgacccccaacacgggagctgcactcgaatttgtgctgcgcaatatcctcgtgtcaagcgctgggagccgaattacggagggggtaccccagctgctgatagtgttgaccgcagataggagtggtgatgacgttcggaatccttccgtcgttgtaaagcgtggtggggccgtgcctatcggaatcggcattggcaacgccgacatcaccgaaatgcagacaattagctttatacccgactttgctgtagccatccctacatttcggcagctcggcacagtgcagcaagtgataagtgaacgcgttacccagctgactcgagaagagctgagtcgcctgcagcccgtcctacagccattgcctagtcctggagtcgggggaaaacgggacgtagtattcctgatagacggcagccagagcgccggcccggagttccagtacgtgaggactctcatcgaacgtctggtggactacctagacgtcggttttgatacaaccagagtggccgtgatccaattttctgatgatccaaaggtggaatttttactcaatgcccactcctcaaaggacgaagtccagaatgcagtgcagagactcaggccaaaaggcggacgccagatcaatgtcggtaatgctttagaatacgtgagtaggaatatcttcaagcgccccctgggctctcgcattgaggagggcgtcccacagtttctggtgctgatctctagcgggaaaagtgacgatgaggttgatgatccggccgtcgagctgaaacaattcggggtcgccccctttaccatagccagaaacgccgaccaggaggagctggtgaagatatctctcagtccggagtatgtgtttagcgtctctacatttcgagagctgccttcccttgagcaaaaactcctcacgcctattactacactgacatcggagcagatccagaagttattagctagtacccgataccctccacctggagagatgggcgccagtgaagtgctcctcggagctttctcgatctag

SEQ ID NO: 230626 - DNA, 3111 bp, Artificial Sequence
  derived and/or modified sequence
atgaggaagcaccgccacctgcccctggtggccgtgttctgcctcttcctgagcggcttccccaccacccacgcccagcagcagcaggccgtcatcgaggtgaacaagagggacatcgtgttcctggtggatggcagcagcgccctgggcctggccaacttcaatgccatccgggacttcatcgccaaggtgatccagaggctggagatcggccaggacctgatccaggtggccgtggcccagtatgctgacacagtgcggcctgagttctacttcaacacccaccccaccaagcgggaggtgatcacagctgtgaggaagatgaagcccctggatggcagcgccctgtacacaggcagcgccctggactttgtgaggaacaacctcttcaccagcagcgctggctacagagctgctgagggcatccccaagctgctggtgctgatcaccggcggcaagagcctggatgagatcagccagcctgcccaggagctgaagaggagcagcatcatggcctttgccatcggcaacaagggagctgaccaggccgagctggaggagatcgcctttgacagcagcctggtgttcatcccagctgagttccgggccgcccccctgcagggcatgctgcccggcctgctggcccccctgcggaccctgagcggcaccccagaggtgcacagcaacaagagggacatcatcttcctgctggatggcagcgccaacgtgggcaagaccaacttcccctacgtgcgggactttgtgatgaacctggtgaacagcctggacattggaaatgacaacatccgggtgggcctggtgcagttcagtgacacccctgtgacagagttcagcctgaacacctaccagaccaagagtgacatcctgggccacctgcggcagctgcagctgcagggcggcagcggcctgaacacaggcagcgccctgtcctatgtgtatgccaaccacttcacagaagctgggggcagccgcatccgggagcacgtgccccagctgctgctgctgctgacagctggccagagtgaagattcctacctgcaggccgccaatgccctgacccgggccggcatcctgaccttctgtgtgggcgccagccaggccaacaaggccgagctggagcagatcgccttcaaccccagcctggtgtacctgatggatgacttcagcagcctgcctgccctgccccagcagctgatccagcccctgaccacctacgtgtctgggggcgtggaggaggtgcccctggcccagcctgagagcaagagggacatcctcttcctgtttgatggcagcgccaacctggtgggccagtttcctgtggtgcgggacttcctgtacaagatcattgatgagctgaatgtgaagccagagggcaccagaattgctgtggcccagtacagtgatgatgtgaaggtggagagcagatttgatgagcaccagagcaagccagagatcctgaacctggtgaagaggatgaagatcaagacaggcaaggccctgaacctgggctacgccctggactatgcccagcgctacatctttgtgaagtctgctggcagcagaattgaagatggagtgctgcagttcctggtgctgctggtggccggccgcagcagtgacagagtggatggccctgccagcaacctgaagcagagcggcgtggtgcccttcatcttccaggccaagaatgctgaccctgctgagctggagcagatcgtgctgagccctgccttcatcctggccgctgagagcctgcccaagattggagacctgcacccccagatcgtgaacctgctgaagtctgtgcacaatggagccccagcccctgtgtctggagagaaggatgtggtgttcctgctggatggcagcgagggcgtgcgcagcggcttccccctgctgaaggagtttgtgcagagggtggtggagagcctggatgtgggccaggacagagtgcgggtggccgtggtgcagtacagcgacaggaccaggcctgagttctacctgaacagctacatgaacaagcaggatgtggtgaatgctgtgcggcagctgaccctgctgggcggccccacccccaacacaggagctgccctggagtttgtgctgaggaacatcctggtgagcagcgctggcagccgcatcacagagggcgtgccccagctgctgattgtgctgacagctgacagaagtggagatgatgtgaggaaccccagcgtggtggtgaagagaggaggagctgtgcccatcggcatcggcattggaaatgctgacatcacagagatgcagaccatctccttcatcccagactttgctgtggccatccccaccttccggcagctgggcaccgtgcagcaggtgatcagcgagcgggtgacccagctgacccgggaggagctgagccggctgcagcctgtgctgcagcccctgcccagccctggggtgggcggcaagagagatgtggtgttcctgattgatggcagccagagcgctggccctgagttccagtatgtgaggaccctcatcgagcggctggtggactacctggatgtgggctttgacaccaccagggtggccgtcatccagttcagtgatgaccccaaggtggagttcctgctgaatgcccacagcagcaaggatgaggtgcagaatgctgtgcagaggctgcggcccaagggcggccggcagatcaacgtgggcaatgccctggagtatgtgtccaggaacatcttcaagaggcccctgggcagcagaattgaggagggcgtgccccagttcctggtgctgatcagcagcggcaagagtgatgatgaggtggatgatcctgctgtggagctgaagcagtttggagtggcccccttcaccatcgccagaaatgctgaccaggaggagctggtgaagatcagcctgagcccagaatatgtgttttctgtgtccaccttccgggagctgcccagcctggagcagaagctgctgacccccatcaccaccctgaccagcgagcagatccagaagctgctggccagcacccgctacccacctcctggagagatgggcgccagcgaggtgctgctgggcgccttcagcatctag

SEQ ID NO: 230627 - DNA, 3464 bp, Artificial Sequence
  derived and/or modified sequence
aagccctgactggtatccctggccccagtccagtttggagctcagtcttccaccaaaggccgttcagttctcctgggctccagcctcctgcaaggactgcaagagttttcctccgcagctctgagtctccacttttttggtggagaaaggctgcaaaaagaaaaagagacgcagtgagtgggaaaagtatgcatcctattcaaacctaattgaatcgaggagcccagggacacacgccttcaggtttgctcaggggttcatatttggtgcttagacaaattcaaaatgaggaaacatcggcacttgcccttagtggccgtcttttgcctctttctctcaggctttcctacaactcatgcccagcagcagcaagcagtcattgaagtcaacaagagagacatagtcttcctggtggatggctcatctgcactgggactggccaacttcaatgccatccgagacttcattgctaaagtcatccagaggctggaaatcggacaggatcttatccaggtggcagtggcccagtatgcagacactgtgaggcctgaattttatttcaatacccatccaacaaaaagggaagtcataaccgctgtgcggaaaatgaagcccctggacggctcggccctgtacacgggctctgctctagactttgttcgtaacaacctattcacgagttcagccggctaccgggctgccgaggggattcctaagcttttggtgctgatcacaggtggtaagtccctagatgaaatcagccagcctgcccaggagctgaagagaagcagcataatggcctttgccattgggaacaagggtgccgatcaggctgagctggaagagatcgctttcgactcctccctggtgttcatcccagctgagttccgagccgccccattgcaaggcatgctgcctggcttgctggcacctctcaggaccctctctggaacccctgaagttcactcaaacaaaagggatatcatctttcttttggatggatcagccaacgttggaaaaaccaatttcccttatgtgcgcgactttgtaatgaacctagttaacagccttgatattggaaatgacaatattcgtgttggtttagtgcaatttagtgacactcctgtaacggagttctctttaaacacataccagaccaagtcagatatccttggtcatctgaggcagctgcagctccagggaggttcgggcctgaacacaggctcagccctaagctatgtctatgccaaccacttcacggaagctggcggcagcaggatccgtgaacacgtgccgcagctcctgcttctgctcacagctgggcagtctgaggactcctatttgcaagctgccaacgccttgacacgcgcgggcatcctgactttttgtgtgggagctagccaggcgaataaggcagagcttgagcagattgcttttaacccaagcctggtgtatctcatggatgatttcagctccctgccagctttgcctcagcagctgattcagcccctaaccacatatgttagtggaggtgtggaggaagtaccactcgctcagccagagagcaagcgagacattctgttcctctttgacggctcagccaatcttgtgggccagttccctgttgtccgtgactttctctacaagattatcgatgagctcaatgtgaagccagaggggacccgaattgcggtggctcagtacagcgatgatgtcaaggtggagtcccgttttgatgagcaccagagtaagcctgagatcctgaatcttgtgaagagaatgaagatcaagacgggcaaagccctcaacctgggctacgcgctggactatgcacagaggtacatttttgtgaagtctgctggcagccggatcgaggatggagtgcttcagttcctggtgctgctggtcgcaggaaggtcatctgaccgtgtggatgggccagcaagtaacctgaagcagagtggggttgtgcctttcatcttccaagccaagaacgcagaccctgctgagttagagcagatcgtgctgtctccagcgtttatcctggctgcagagtcgcttcccaagattggagatcttcatccacagatagtgaatctcttaaaatcagtgcacaacggagcaccagcaccagtttcaggtgaaaaggacgtggtgtttctgcttgatggctctgagggcgtcaggagcggcttccctctgttgaaagagtttgtccagagagtggtggaaagcctggatgtgggccaggaccgggtccgcgtggccgtggtgcagtacagcgaccggaccaggcccgagttctacctgaattcatacatgaacaagcaggacgtcgtcaacgctgtccgccagctgaccctgctgggagggccgacccccaacaccggggccgccctggagtttgtcctgaggaacatcctggtcagctctgcgggaagcaggataacagaaggtgtgccccagctgctgatcgtcctcacggccgacaggtctggggatgatgtgcggaacccctccgtggtcgtgaagaggggtggggctgtgcccattggcattggcatcgggaacgctgacatcacagagatgcagaccatctccttcatcccggactttgccgtggccattcccacctttcgccagctggggaccgtccaacaggtcatctctgagagggtgacccagctcacccgcgaggagctgagcaggctgcagccggtgttgcagcctctaccgagcccaggtgttggtggcaagagggacgtggtctttctcatcgatgggtcccaaagtgccgggcctgagttccagtacgttcgcaccctcatagagaggctggttgactacctggacgtgggctttgacaccacccgggtggctgtcatccagttcagcgatgaccccaaggtggagttcctgctgaacgcccattccagcaaggatgaagtgcagaacgcggtgcagcggctgaggcccaagggagggcggcagatcaacgtgggcaatgccctggagtacgtgtccaggaacatcttcaagaggcccctggggagccgcattgaagagggcgtcccgcagttcctggtcctcatctcgtctggaaagtctgacgatgaggtggacgacccggcggtggagctcaagcagtttggcgtggcccctttcacgatcgccaggaacgcagaccaggaggagctggtgaagatctcgctgagccccgaatatgtgttctcggtgagcaccttccgggagctgcccagcctggagcagaaactgctgacgcccatcacgaccctgacctcagagcagatccagaagctcttagccagcactcgctatccacctccaggtgagatgggggcgtcggaggttctccttggagcattttccatatgaaaaataacaggctcaaaggccatggtactcataataaattaaattaaaataaaggttgtatgccctta

SEQ ID NO: 230628 - DNA, 3111 bp, Artificial Sequence
  derived and/or modified sequence
atgcggaagcaccggcacctgcccctggtggccgtgttctgcctgttcctctcgggattccctacgacacacgcccagcagcaacaggccgtgattgaggtgaacaaacgggacatcgtcttcctggtggacggctctagcgctcttggccttgcaaacttcaacgctatccgagactttattgctaaggtgatccagcgcttagagattggacaagatctgatccaagtggctgtcgcacaatacgcagacacagtccgacccgagttctacttcaacactcacccaacaaagcgcgaagtgataacggctgtcagaaaaatgaagccattggacggctccgccctttacacgggttctgccctggattttgtgagaaacaatttatttacgagctccgctggttaccgggctgccgaaggaataccaaaactgcttgtactgatcacaggcggtaaaagtctggacgaaatctctcagcccgcacaggagcttaaacgatcatccattatggccttcgctataggcaataagggcgccgaccaagcagagctggaggagatcgcatttgattcaagcctagtttttattcccgctgagttcagagccgccccgctgcagggtatgctgcctggccttcttgccccactccgcactctttctggaactccagaagtgcattcaaataagcgcgatataatctttcttctggacgggagcgcgaacgtcggcaaaacaaactttccttacgtgcgcgactttgtgatgaacttagtgaactccctcgatataggtaatgataacattagggtaggccttgtgcagttcagcgacacacctgtaaccgagttcagccttaacacgtatcagaccaagagcgatatcctcgggcatctacgccaactgcagcttcagggaggaagcggtctaaataccggaagcgcactgtcctacgtctacgcgaatcatttcactgaagccggtggatcgcggatccgagagcatgtcccgcagctcctccttctgttgacggcaggccagagcgaagattcgtatttgcaggccgccaatgcccttacacgcgcaggtatcctgaccttttgcgtgggagccagccaagcgaataaggccgaactagagcagatagcctttaacccctctctcgtttacttgatggacgacttctccagtctgcccgcgctccctcagcaactgatccagccactgaccacttacgtgtctggcggggtggaagaggttcccctggcccagccagagtctaagcgcgacattctcttcctcttcgacggatctgccaacctcgtgggacagtttcctgtggttcgggatttcctctataagatcattgacgaactgaacgttaaacctgaggggacgagaatagctgtagcacagtattcagacgacgtcaaggtcgagagtagatttgacgaacatcagtccaagcctgagatactcaacctcgttaagagaatgaagattaagactggaaaagctcttaacttggggtacgctttggactacgcacaaagatacattttcgtaaaaagcgcggggagccgaatcgaagatggcgtgctccagttcttggtccttcttgtggccggcagatcatccgatcgagtagatggcccggctagcaatcttaaacaatccggtgtggtcccattcatcttccaggcaaaaaatgctgaccctgctgaactcgagcaaattgtgctgtccccggcttttatcctggctgcagagtccttgccgaaaattggagacctgcaccctcagatcgttaatttgctgaagagtgttcacaacggcgcccccgcccccgtgagcggagaaaaagatgtggtgttcctgctggacgggagtgaaggggttcggtctggttttcccctattaaaagagtttgttcaacgggtggtggagagcctggacgtgggacaggaccgcgtgagggtcgcagtcgtgcagtacagcgacaggactcggccggaattttacttgaattcttacatgaacaagcaagacgtcgtcaacgccgtgcgacagctgaccttacttggaggaccaacgccgaacacgggagcagcactagagttcgtgctccgcaatattttggttagttctgcggggtcaaggattacagaaggtgtgcctcaactgctgatcgtgcttacggcggaccgcagtggggatgacgtgcgaaaccccagcgtggtcgtgaaacggggcggcgcagtccccattggcatcggaattggtaatgctgacattaccgaaatgcaaaccatctcattcatacccgatttcgcggtggcaattcctacattccgccagctggggactgtccagcaggtgatcagcgaaagagttacacagctgacacgggaggagctgtcacgtctgcaacccgtgttgcaaccattaccaagccctggagtcggcggcaagcgcgatgtcgtgttcctgatagacgggtcgcagtctgcaggacccgagttccagtacgtgagaacccttattgagagactcgtggactatttggacgtgggctttgatacaactcgagtggccgttatccagttttctgacgatccaaaggtagagtttctgctgaacgcccactcgagcaaagacgaggtccagaacgctgtacagcggttgcggcccaaaggtgggcggcaaatcaacgttggaaacgccttggagtacgtgtctcggaatatatttaagaggccactgggcagtcgaatcgaggagggtgttccacagttcctggttctgatcagctctggcaaaagcgacgatgaagtcgacgaccccgctgtggagcttaagcagttcggcgtggcaccatttactattgccaggaatgccgatcaagaggagttagtaaagatctctttgtcacccgagtacgtcttttccgtgagtaccttccgtgaactccccagcctggaacagaagctgctcacccccataaccacgttaacttcagaacagatacagaaattacttgcatcaacacggtatccacctcccggcgagatgggagcaagcgaggtactgcttggagcgttttccatttag

SEQ ID NO: 230629 - DNA, 3111 bp, Artificial Sequence
  derived and/or modified sequence
atgagaaagcataggcaccttccactggtagcggtattttgccttttccttagcgggtttcctacgacacacgctcagcagcagcaggccgttatcgaggtcaataaaagagatattgtgttcctcgtcgatggaagtagtgctcttggtttagcgaatttcaatgccattcgggacttcatcgcaaaggtcatccagagactcgagatagggcaagatctaattcaggtggcagtcgctcagtacgcagacacggttcgtcccgaattttactttaacacccaccccactaagcgtgaggtcatcacagccgtccgtaagatgaagccgttggatgggtcagccttgtacaccggctcagcactcgacttcgtgcgcaacaatctgttcactagctcagctggctaccgagccgctgagggtatacctaaactcttagtccttatcacaggagggaaaagcttggatgagatctctcaaccggctcaggaacttaagcgttcaagcattatggccttcgccatcggaaataaaggtgcagaccaagctgagctcgaggagatcgcattcgattctagcttggtcttcatcccggctgagttccgagccgctccccttcaagggatgttacctgggttgcttgcacctctgagaacactgagtggcacacctgaagtccacagcaacaaaagagacattatatttctgcttgacggatctgcaaacgtcgggaagaccaactttccatacgttcgagatttcgtcatgaatctcgtcaacagcctggatatcgggaacgataatatccgggttggactcgtgcagttttcagacacccctgtgactgaattttcccttaacacttatcagacaaagtctgacattctggggcatctgcggcagcttcagctccagggcggatcaggactgaatactggatccgctctgagctatgtttatgcaaatcatttcacagaggccggaggctcccggattagggaacatgtgccacagttactgttgctgctgactgctggccagtccgaggacagctatctccaggccgcaaatgctctcacccgtgcgggtatacttactttctgcgttggcgctagccaggccaataaggccgagttggaacagatcgcctttaatccatctctcgtatatctgatggacgacttttcctctcttccagccctgccacagcaactgattcaacccttgacaacatacgtttcgggcggtgtcgaggaggtgcccttagcacagcctgaatcaaaaagggatattctgttcctctttgacgggagcgctaacctggtaggacagttccctgtggtccgggactttctttataaaatcatagacgaactcaatgtcaagccagagggaacccggattgccgtcgctcagtactccgatgacgtaaaggtggaatcccggttcgatgagcaccaaagcaaaccagagatcctaaacttagtaaagcggatgaagatcaaaacgggtaaggctctgaacctgggctacgccctggactacgctcagaggtatatctttgtgaagagtgctgggtctcgcatcgaagacggtgtgcttcaattcctggtcctgctggtggctggacgaagctccgatcgggtggatggtcctgcttctaatttgaaacagtctggtgttgttccctttatcttccaagccaagaacgcagacccagccgaactggaacaaatcgtgctgtctcctgccttcatcttggctgccgagtctctgcccaaaatcggggacctgcatccacagattgttaatctgcttaagagtgtgcataatggagccccagcacctgttagtggcgagaaggacgtcgtgttcttactggacggcagcgaaggagtacgcagtgggttcccactcctgaaggagttcgtacagcgggttgtcgagtcactggatgtgggccaggatagagttcgggtggccgtggtacaatatagtgacaggactcggccagaattttatctaaacagctatatgaacaagcaggatgtggttaatgccgtgcgacagctgacactactcggcggtccgaccccgaatacaggtgctgctttggagttcgtcttgcgaaacatcctggttagctctgccggtagccgcattaccgaaggtgtccctcaactgttgatcgtcttgaccgcagaccggtctggtgacgatgtacgcaatcccagcgtcgtcgtgaagaggggaggcgcagtgccaattggaatcgggattggaaatgcagacattacggagatgcagaccattagcttcatccccgattttgctgtagccattcctacattcagacagctcgggactgtgcaacaggtgatctcagagagggtgacacagcttacacgcgaggaactgtctagactgcaacctgtgctgcagcccctaccgagcccaggcgtaggcggtaagcgtgatgtcgtattcctgatcgacggttcacaatctgcgggtcctgaatttcaatacgttaggactctcatagaacgccttgttgactacctggacgtgggattcgacaccacgagagtcgcggtaatacagttctccgatgatcctaaggtggaatttctcttaaacgctcattcctccaaagatgaggtccaaaacgccgtccaacggctgcgccctaaagggggtcggcagatcaacgtgggaaacgccctcgaatatgtatcgaggaatatatttaaacgaccgctaggaagtaggattgaggaaggagtcccccaatttctcgtgttaatcagctcaggcaagagtgacgacgaggtggatgatcccgctgtcgagctgaagcagtttggagtggctccctttacaattgccagaaacgccgaccaagaggagctggtcaaaattagcctgtctcctgagtatgtatttagtgtctctacattccgggagctcccatctctggagcagaagctccttacccccataacaacgctcacctccgagcagatacagaagctgctggcctctacgagatacccccctccaggcgagatgggtgcgagtgaagtgctgctgggcgcatttagtatatag

SEQ ID NO: 230630 - DNA, 3111 bp, Artificial Sequence
  derived and/or modified sequence
atgcgaaaacacagacacctcccactggtggctgtgttctgcctgttcttgagcggcttccccacaacccacgcacagcaacagcaggctgttatagaagtgaacaaaagggacattgtcttcctggtggatggtagcagtgccttaggactggcaaacttcaatgcaatccgggactttatagccaaagtaattcagcgactcgaaatcgggcaggacctcattcaggtggccgtagcgcagtacgcagatacggttcggcccgagttttatttcaacacacatcccaccaagcgagaggtgataacagcggtgcggaagatgaagcccctggatggaagcgctctttacaccggctctgccctcgacttcgtgaggaataacctgtttaccagctcggcaggctatcgggctgctgagggaattcccaaactactcgtcctgattaccggaggtaaatccttagacgagatctcacaacccgctcaggagttaaaaagaagctcaattatggcattcgcaatcggcaacaagggtgcggatcaagccgaactggaagaaatagcctttgattcgagcctagtctttattcccgctgaattccgggctgcaccgctccaggggatgctgccggggctgctggcacctcttcggacactctctggaaccccagaggtccactctaataaaagggatatcattttcctcctggacggatcagcaaacgttggaaagaccaattttccgtacgtgcgagacttcgttatgaacctggtcaacagccttgacatcggtaatgataacattcgggtaggtctcgtccagttctcggatacacccgtgaccgagttcagtctgaacacgtaccagaccaaatcagacatcttgggccatcttcgacaactccaactgcagggtggtagtggtctgaataccggctcagccctctcctacgtgtacgctaatcattttacagaagcagggggttcacgaatacgggagcatgtgccccagctgctcctgctgctgacagctggacagtccgaggacagctacttgcaggcagccaatgctcttacacgcgccggaattctgactttttgcgtcggagcttcccaggctaataaagccgagctggagcagatcgcgttcaatccttctctggtgtatctgatggacgacttttccagtctacccgctttgccacagcagctcatacagccattgaccacctacgtaagcggtggtgtggaggaggttccacttgctcaaccggagtctaaacgcgacattctgttcttgttcgacggatcagcaaacttggtgggccagtttcctgtggtaagagacttcctgtacaagattatcgatgagctcaacgtgaaaccagaaggcactagaatcgcagttgctcagtattcagacgacgttaaagtggagagtcgatttgacgagcatcagtcaaaaccggaaattctgaatctggtcaagcgcatgaaaatcaagaccggaaaagccctcaatctgggttacgctctggattacgcccaacgctacatatttgtcaagtccgcagggtcacggatcgaagatggtgtgctgcagtttctcgtccttctggtagctggtcggagtagcgaccgggtggatggacctgctagtaatctgaaacagagtggtgtggtgccatttattttccaggcaaagaatgccgatcctgctgagttggagcaaatcgtgctcagtcccgccttcatcctcgcagcagagtctctcccaaaaatcggtgacttgcatccccagatcgtcaacctcctgaaatcagtccacaacggcgcgcccgcgcctgtttctggcgaaaaagatgtggtttttcttttagatggtagcgagggcgtgcgcagcggattccctctgcttaaagaatttgtacagagagtggtggaatctcttgacgtaggacaagaccgcgtccgcgtggcggttgtgcagtactctgataggacaaggcccgaattttacctgaattcatatatgaataagcaggacgtcgtgaacgccgtgcgtcaattgaccctcctgggcggacccacacctaacactggcgccgcacttgaattcgtcctcaggaatatcctggtctcatctgccgggtctagaatcacggagggtgtgccgcagttacttattgtcttgacggccgatcgaagcggagacgacgtgaggaatcctagtgtggtggtcaaaaggggcggagccgtgcccatcggcatcggcatcggaaatgcagacattaccgaaatgcagaccatctctttcattcccgacttcgctgtggccattcctacattcaggcagttaggcacagttcagcaggtcatcagcgagcgcgttactcagcttaccagggaggagctatcaagactgcagcctgttctgcagcctctccctagccccggtgtgggggggaagagagacgtggtgttcttaatcgatgggagtcagagcgcagggcccgagtttcagtacgtacgaacactgattgagcgcttggtagattacctggatgttggattcgacaccacgcgagttgccgtgattcaattcagtgacgatcccaaagtcgagtttctattgaacgcccattcaagtaaggacgaagtgcagaatgccgtacagagactgagacccaaggggggtcgccagatcaatgttggtaacgctttagagtacgtgagccgcaatatctttaagagacctctgggcagcagaattgaagagggagtgccgcagtttcttgtgctaatttcatctggtaagtctgacgacgaagtcgacgacccggcggtcgagctcaaacagtttggggtcgctccatttaccattgcccgcaacgctgaccaagaggaactggttaagatttcactgagccctgaatacgtcttttccgtgtccacattccgtgagctgccaagtcttgaacagaaattattgacacctataaccaccctgacgtcggaacaaatccaaaaattgttagcctccacacgataccccccgcctggtgaaatgggggcatccgaagtgcttctgggcgctttttccatctag

SEQ ID NO: 230631 - DNA, 3111 bp, Artificial Sequence
  derived and/or modified sequence
atgagaaagcaccgccacttacctttagtcgcagtcttctgtctcttcctcagcggttttcctacaacccacgctcaacagcagcaagccgttatagaggtgaacaaacgtgatatcgtcttcctcgtggacggctcgtctgctcttggccttgccaattttaacgcgattagggatttcatcgccaaggtcatccagcggctcgagattggacaggacctcatccaggtggccgttgcccagtatgccgataccgtccgtcccgaattctactttaacacccaccccaccaaaagagaggtcattaccgctgtaaggaaaatgaagcctctggacggatccgctttgtatacgggctccgctttagactttgttcgcaataacttatttaccagtagcgccggataccgggccgccgaaggaatccccaagttactagtactgattaccgggggcaagagcctcgatgagatctcacaaccagctcaggaactaaagaggtcctccattatggctttcgcgattggaaacaagggagcagatcaggctgaattagaggaaattgcgttcgattctagtttagtgttcattcctgctgagttcagagccgcccccctgcaaggcatgctgcccggtctgctagctcccctgagaaccttaagtggtacacctgaagtgcatagtaacaagagagacatcatctttctcttagacggcagcgcaaacgttggaaagacaaattttccctacgtgagagatttcgtgatgaatctggtcaactctctcgatattggcaatgataacatccgggtcggcctcgtccagtttagcgacactcctgtcacagagttcagtttaaacacataccaaacaaaatcagacatcctcggccacctacgacagttgcagttacagggaggctccggactaaatactgggtcagcgctgagctatgtctatgcaaatcattttacagaagccggaggcagccggatccgagaacacgtgcctcagttgttactcctcctaactgcaggtcagtccgaagatagctatttacaggctgccaacgcccttactagagccgggattcttacattttgcgttggtgcttcacaggctaacaaagcagaattggagcagattgccttcaaccctagccttgtgtatctgatggacgacttcagcagcctgcccgccttgccccagcaacttatccaacccctcaccacatacgtctctggaggcgtggaagaggtcccccttgcacagcctgagtctaagagagacatcctgttcttattcgatggaagcgccaacttggtgggacagttccctgtagtgagagactttctctataaaatcattgatgagctgaacgttaaacctgaaggcacacgcatcgccgtagctcagtactccgacgacgtgaaggtggaatcaagattcgatgaacaccagagcaaacccgaaatcctgaatctggtaaagagaatgaagattaagaccggtaaagcactgaacttagggtatgcgttggattacgctcaacgctatatctttgtgaagtcagctgggtctagaatcgaagatggcgttttacagttcctcgtacttctagtggcaggacggagcagcgatcgtgtagatggacccgcctctaatttaaaacagtcaggtgtggtgcctttcatttttcaagcgaaaaacgcagaccccgccgaattagagcaaattgtgttgtcgcctgccttcatcctggctgctgaaagtctacctaagatcggagatttgcacccacagatagtgaacctgctgaaaagcgtccacaatggagcaccggcccctgtgtctggcgagaaggacgttgtgtttctgttagatggcagtgagggtgtcagatccgggtttcccctgctgaaagaatttgtgcagagagtcgtggagtctcttgatgtggggcaggatcgcgtaagagtcgcagtagtccagtactctgataggacacgaccagaattttatctgaattcatatatgaataaacaagatgtggtgaatgcagtccggcaacttactctgctgggcgggccaaccccgaacacgggggccgctctcgagttcgtgctacgtaatattctcgtcagttctgctgggagccggatcaccgaaggtgtgcctcaactattaatcgtcctgaccgctgatcgctccggagatgatgtcagaaacccatcagtcgttgtaaaaagaggaggcgcagtgccaatcgggatcggaattgggaacgctgatattacggaaatgcagaccatatcttttattccggactttgccgtcgcaatccccacctttcgacagctggggaccgttcaacaggtgatcagcgaacgcgtcactcagctgacacgggaggagcttagccgcttgcagccagtcctgcagccacttccaagccccggcgtggggggtaaacgtgatgtggtttttttgatcgacgggagtcagagcgccgggccggagtttcaatacgttcgtaccctcattgagcggctggtggactacctcgacgtagggtttgatacaacgagagtggccgtgattcagttctccgacgatcccaaggttgaattcctgttaaacgcccacagcagcaaggatgaagtccaaaatgcagtacaacggcttcgccccaaaggaggtcgccagatcaatgttggtaacgctttagagtacgtgagccgcaatatctttaagagacctctgggcagcagaattgaagagggagtgccgcagtttcttgtgctaatttcatctggtaagtctgacgacgaagtcgacgacccggcggtcgagctcaaacagtttggggtcgctccatttaccattgcccgcaacgctgaccaagaggaactggttaagatttcactgagccctgaatacgtcttttccgtgtccacattccgtgagctgccaagtcttgaacagaaattattgacacctatcactacgctgacctcagagcaaattcagaaacttctggccagtacacggtaccctccccccggcgaaatgggagcgagtgaagtcctgctaggtgcattctccatatag

SEQ ID NO: 230632 - RNA, 3111 nt, Artificial Sequence
  derived and/or modified sequence
augcgaaaacacagacaccucccacugguggcuguguucugccuguucuugagcggcuuccccacaacccacgcacagcaacagcaggcuguuauagaagugaacaaaagggacauugucuuccugguggaugguagcagugccuuaggacuggcaaacuucaaugcaauccgggacuuuauagccaaaguaauucagcgacucgaaaucgggcaggaccucauucagguggccguagcgcaguacgcagauacgguucggcccgaguuuuauuucaacacacaucccaccaagcgagaggugauaacagcggugcggaagaugaagccccuggauggaagcgcucuuuacaccggcucugcccucgacuucgugaggaauaaccuguuuaccagcucggcaggcuaucgggcugcugagggaauucccaaacuacucguccugauuaccggagguaaauccuuagacgagaucucacaacccgcucaggaguuaaaaagaagcucaauuauggcauucgcaaucggcaacaagggugcggaucaagccgaacuggaagaaauagccuuugauucgagccuagucuuuauucccgcugaauuccgggcugcaccgcuccaggggaugcugccggggcugcuggcaccucuucggacacucucuggaaccccagagguccacucuaauaaaagggauaucauuuuccuccuggacggaucagcaaacguuggaaagaccaauuuuccguacgugcgagacuucguuaugaaccuggucaacagccuugacaucgguaaugauaacauucggguaggucucguccaguucucggauacacccgugaccgaguucagucugaacacguaccagaccaaaucagacaucuugggccaucuucgacaacuccaacugcagggugguaguggucugaauaccggcucagcccucuccuacguguacgcuaaucauuuuacagaagcaggggguucacgaauacgggagcaugugccccagcugcuccugcugcugacagcuggacaguccgaggacagcuacuugcaggcagccaaugcucuuacacgcgccggaauucugacuuuuugcgucggagcuucccaggcuaauaaagccgagcuggagcagaucgcguucaauccuucucugguguaucugauggacgacuuuuccagucuacccgcuuugccacagcagcucauacagccauugaccaccuacguaagcggugguguggaggagguuccacuugcucaaccggagucuaaacgcgacauucuguucuuguucgacggaucagcaaacuuggugggccaguuuccugugguaagagacuuccuguacaagauuaucgaugagcucaacgugaaaccagaaggcacuagaaucgcaguugcucaguauucagacgacguuaaaguggagagucgauuugacgagcaucagucaaaaccggaaauucugaaucuggucaagcgcaugaaaaucaagaccggaaaagcccucaaucuggguuacgcucuggauuacgcccaacgcuacauauuugucaaguccgcagggucacggaucgaagauggugugcugcaguuucucguccuucugguagcuggucggaguagcgaccggguggauggaccugcuaguaaucugaaacagagugguguggugccauuuauuuuccaggcaaagaaugccgauccugcugaguuggagcaaaucgugcucagucccgccuucauccucgcagcagagucucucccaaaaaucggugacuugcauccccagaucgucaaccuccugaaaucaguccacaacggcgcgcccgcgccuguuucuggcgaaaaagaugugguuuuucuuuuagaugguagcgagggcgugcgcagcggauucccucugcuuaaagaauuuguacagagagugguggaaucucuugacguaggacaagaccgcguccgcguggcgguugugcaguacucugauaggacaaggcccgaauuuuaccugaauucauauaugaauaagcaggacgucgugaacgccgugcgucaauugacccuccugggcggacccacaccuaacacuggcgccgcacuugaauucguccucaggaauauccuggucucaucugccgggucuagaaucacggagggugugccgcaguuacuuauugucuugacggccgaucgaagcggagacgacgugaggaauccuagugugguggucaaaaggggcggagccgugcccaucggcaucggcaucggaaaugcagacauuaccgaaaugcagaccaucucuuucauucccgacuucgcuguggccauuccuacauucaggcaguuaggcacaguucagcaggucaucagcgagcgcguuacucagcuuaccagggaggagcuaucaagacugcagccuguucugcagccucucccuagccccggugugggggggaagagagacgugguguucuuaaucgaugggagucagagcgcagggcccgaguuucaguacguacgaacacugauugagcgcuugguagauuaccuggauguuggauucgacaccacgcgaguugccgugauucaauucagugacgaucccaaagucgaguuucuauugaacgcccauucaaguaaggacgaagugcagaaugccguacagagacugagacccaaggggggucgccagaucaauguugguaacgcuuuagaguacgugagccgcaauaucuuuaagagaccucugggcagcagaauugaagagggagugccgcaguuucuugugcuaauuucaucugguaagucugacgacgaagucgacgacccggcggucgagcucaaacaguuuggggucgcuccauuuaccauugcccgcaacgcugaccaagaggaacugguuaagauuucacugagcccugaauacgucuuuuccguguccacauuccgugagcugccaagucuugaacagaaauuauugacaccuauaaccacccugacgucggaacaaauccaaaaauuguuagccuccacacgauaccccccgccuggugaaaugggggcauccgaagugcuucugggcgcuuuuuccaucuag

SEQ ID NO: 230633 - RNA, 3111 nt, Artificial Sequence
  derived and/or modified sequence
augagaaagcaccgccacuuaccuuuagucgcagucuucugucucuuccucagcgguuuuccuacaacccacgcucaacagcagcaagccguuauagaggugaacaaacgugauaucgucuuccucguggacggcucgucugcucuuggccuugccaauuuuaacgcgauuagggauuucaucgccaaggucauccagcggcucgagauuggacaggaccucauccagguggccguugcccaguaugccgauaccguccgucccgaauucuacuuuaacacccaccccaccaaaagagaggucauuaccgcuguaaggaaaaugaagccucuggacggauccgcuuuguauacgggcuccgcuuuagacuuuguucgcaauaacuuauuuaccaguagcgccggauaccgggccgccgaaggaauccccaaguuacuaguacugauuaccgggggcaagagccucgaugagaucucacaaccagcucaggaacuaaagagguccuccauuauggcuuucgcgauuggaaacaagggagcagaucaggcugaauuagaggaaauugcguucgauucuaguuuaguguucauuccugcugaguucagagccgccccccugcaaggcaugcugcccggucugcuagcuccccugagaaccuuaagugguacaccugaagugcauaguaacaagagagacaucaucuuucucuuagacggcagcgcaaacguuggaaagacaaauuuucccuacgugagagauuucgugaugaaucuggucaacucucucgauauuggcaaugauaacauccgggucggccucguccaguuuagcgacacuccugucacagaguucaguuuaaacacauaccaaacaaaaucagacauccucggccaccuacgacaguugcaguuacagggaggcuccggacuaaauacugggucagcgcugagcuaugucuaugcaaaucauuuuacagaagccggaggcagccggauccgagaacacgugccucaguuguuacuccuccuaacugcaggucaguccgaagauagcuauuuacaggcugccaacgcccuuacuagagccgggauucuuacauuuugcguuggugcuucacaggcuaacaaagcagaauuggagcagauugccuucaacccuagccuuguguaucugauggacgacuucagcagccugcccgccuugccccagcaacuuauccaaccccucaccacauacgucucuggaggcguggaagaggucccccuugcacagccugagucuaagagagacauccuguucuuauucgauggaagcgccaacuuggugggacaguucccuguagugagagacuuucucuauaaaaucauugaugagcugaacguuaaaccugaaggcacacgcaucgccguagcucaguacuccgacgacgugaagguggaaucaagauucgaugaacaccagagcaaacccgaaauccugaaucugguaaagagaaugaagauuaagaccgguaaagcacugaacuuaggguaugcguuggauuacgcucaacgcuauaucuuugugaagucagcugggucuagaaucgaagauggcguuuuacaguuccucguacuucuaguggcaggacggagcagcgaucguguagauggacccgccucuaauuuaaaacagucagguguggugccuuucauuuuucaagcgaaaaacgcagaccccgccgaauuagagcaaauuguguugucgccugccuucauccuggcugcugaaagucuaccuaagaucggagauuugcacccacagauagugaaccugcugaaaagcguccacaauggagcaccggccccugugucuggcgagaaggacguuguguuucuguuagauggcagugagggugucagauccggguuuccccugcugaaagaauuugugcagagagucguggagucucuugauguggggcaggaucgcguaagagucgcaguaguccaguacucugauaggacacgaccagaauuuuaucugaauucauauaugaauaaacaagauguggugaaugcaguccggcaacuuacucugcugggcgggccaaccccgaacacgggggccgcucucgaguucgugcuacguaauauucucgucaguucugcugggagccggaucaccgaaggugugccucaacuauuaaucguccugaccgcugaucgcuccggagaugaugucagaaacccaucagucguuguaaaaagaggaggcgcagugccaaucgggaucggaauugggaacgcugauauuacggaaaugcagaccauaucuuuuauuccggacuuugccgucgcaauccccaccuuucgacagcuggggaccguucaacaggugaucagcgaacgcgucacucagcugacacgggaggagcuuagccgcuugcagccaguccugcagccacuuccaagccccggcgugggggguaaacgugaugugguuuuuuugaucgacgggagucagagcgccgggccggaguuucaauacguucguacccucauugagcggcugguggacuaccucgacguaggguuugauacaacgagaguggccgugauucaguucuccgacgaucccaagguugaauuccuguuaaacgcccacagcagcaaggaugaaguccaaaaugcaguacaacggcuucgccccaaaggaggucgccagaucaauguugguaacgcuuuagaguacgugagccgcaauaucuuuaagagaccucugggcagcagaauugaagagggagugccgcaguuucuugugcuaauuucaucugguaagucugacgacgaagucgacgacccggcggucgagcucaaacaguuuggggucgcuccauuuaccauugcccgcaacgcugaccaagaggaacugguuaagauuucacugagcccugaauacgucuuuuccguguccacauuccgugagcugccaagucuugaacagaaauuauugacaccuaucacuacgcugaccucagagcaaauucagaaacuucuggccaguacacgguacccuccccccggcgaaaugggagcgagugaaguccugcuaggugcauucuccauauag

SEQ ID NO: 230634 - protein, 1237 aa, Artificial Sequence
  derived and/or modified sequence
MRKHRHLPLVAVFCLFLSGFPTTHAQQQQAAQDSADIIFLIDGSNNTGSVNFAVILDFLVNLLEKLPIGTQQIRVGVVQFSDEPRTMFSLDTYSTKAQVLGAVKALGFAGGELANIGLALDFVVENHFTRAGGSRVEEGVPQVLVLISAGPSSDEIRYGVVALKQASVFSFGLGAQAASRAELQHIATDDNLVFTVPEFRSFGDLQEKLLPYIVGVAQRHIVLKPPTIVTQVIEVNKRDIVFLVDGSSALGLANFNAIRDFIAKVIQRLEIGQDLIQVAVAQYADTVRPEFYFNTHPTKREVITAVRKMKPLDGSALYTGSALDFVRNNLFTSSAGYRAAEGIPKLLVLITGGKSLDEISQPAQELKRSSIMAFAIGNKGADQAELEEIAFDSSLVFIPAEFRAAPLQGMLPGLLAPLRTLSGTPEVHSNKRDIIFLLDGSANVGKTNFPYVRDFVMNLVNSLDIGNDNIRVGLVQFSDTPVTEFSLNTYQTKSDILGHLRQLQLQGGSGLNTGSALSYVYANHFTEAGGSRIREHVPQLLLLLTAGQSEDSYLQAANALTRAGILTFCVGASQANKAELEQIAFNPSLVYLMDDFSSLPALPQQLIQPLTTYVSGGVEEVPLAQPESKRDILFLFDGSANLVGQFPVVRDFLYKIIDELNVKPEGTRIAVAQYSDDVKVESRFDEHQSKPEILNLVKRMKIKTGKALNLGYALDYAQRYIFVKSAGSRIEDGVLQFLVLLVAGRSSDRVDGPASNLKQSGVVPFIFQAKNADPAELEQIVLSPAFILAAESLPKIGDLHPQIVNLLKSVHNGAPAPVSGEKDVVFLLDGSEGVRSGFPLLKEFVQRVVESLDVGQDRVRVAVVQYSDRTRPEFYLNSYMNKQDVVNAVRQLTLLGGPTPNTGAALEFVLRNILVSSAGSRITEGVPQLLIVLTADRSGDDVRNPSVVVKRGGAVPIGIGIGNADITEMQTISFIPDFAVAIPTFRQLGTVQQVISERVTQLTREELSRLQPVLQPLPSPGVGGKRDVVFLIDGSQSAGPEFQYVRTLIERLVDYLDVGFDTTRVAVIQFSDDPKVEFLLNAHSSKDEVQNAVQRLRPKGGRQINVGNALEYVSRNIFKRPLGSRIEEGVPQFLVLISSGKSDDEVDDPAVELKQFGVAPFTIARNADQEELVKISLSPEYVFSVSTFRELPSLEQKLLTPITTLTSEQIQKLLASTRYPPPGEMGASEVLLGAFSI

SEQ ID NO: 230635 - DNA, 3714 bp, Artificial Sequence
  derived and/or modified sequence
atgagaaagcacagacacctgcccctggtggccgtgttctgcctgttcctgagcggcttccccaccacccacgcccagcagcagcaggccgcccaggacagcgccgacatcatcttcctgatcgacggcagcaacaacaccggcagcgtgaacttcgccgtgatcctggacttcctggtgaacctgctggagaagctgcccatcggcacccagcagatcagagtgggcgtggtgcagttcagcgacgagcccagaaccatgttcagcctggacacctacagcaccaaggcccaggtgctgggcgccgtgaaggccctgggcttcgccggcggcgagctggccaacatcggcctggccctggacttcgtggtggagaaccacttcaccagagccggcggcagcagagtggaggagggcgtgccccaggtgctggtgctgatcagcgccggccccagcagcgacgagatcagatacggcgtggtggccctgaagcaggccagcgtgttcagcttcggcctgggcgcccaggccgccagcagagccgagctgcagcacatcgccaccgacgacaacctggtgttcaccgtgcccgagttcagaagcttcggcgacctgcaggagaagctgctgccctacatcgtgggcgtggcccagagacacatcgtgctgaagccccccaccatcgtgacccaggtgatcgaggtgaacaagagagacatcgtgttcctggtggacggcagcagcgccctgggcctggccaacttcaacgccatcagagacttcatcgccaaggtgatccagagactggagatcggccaggacctgatccaggtggccgtggcccagtacgccgacaccgtgagacccgagttctacttcaacacccaccccaccaagagagaggtgatcaccgccgtgagaaagatgaagcccctggacggcagcgccctgtacaccggcagcgccctggacttcgtgagaaacaacctgttcaccagcagcgccggctacagagccgccgagggcatccccaagctgctggtgctgatcaccggcggcaagagcctggacgagatcagccagcccgcccaggagctgaagagaagcagcatcatggccttcgccatcggcaacaagggcgccgaccaggccgagctggaggagatcgccttcgacagcagcctggtgttcatccccgccgagttcagagccgcccccctgcagggcatgctgcccggcctgctggcccccctgagaaccctgagcggcacccccgaggtgcacagcaacaagagagacatcatcttcctgctggacggcagcgccaacgtgggcaagaccaacttcccctacgtgagagacttcgtgatgaacctggtgaacagcctggacatcggcaacgacaacatcagagtgggcctggtgcagttcagcgacacccccgtgaccgagttcagcctgaacacctaccagaccaagagcgacatcctgggccacctgagacagctgcagctgcagggcggcagcggcctgaacaccggcagcgccctgagctacgtgtacgccaaccacttcaccgaggccggcggcagcagaatcagagagcacgtgccccagctgctgctgctgctgaccgccggccagagcgaggacagctacctgcaggccgccaacgccctgaccagagccggcatcctgaccttctgcgtgggcgccagccaggccaacaaggccgagctggagcagatcgccttcaaccccagcctggtgtacctgatggacgacttcagcagcctgcccgccctgccccagcagctgatccagcccctgaccacctacgtgagcggcggcgtggaggaggtgcccctggcccagcccgagagcaagagagacatcctgttcctgttcgacggcagcgccaacctggtgggccagttccccgtggtgagagacttcctgtacaagatcatcgacgagctgaacgtgaagcccgagggcaccagaatcgccgtggcccagtacagcgacgacgtgaaggtggagagcagattcgacgagcaccagagcaagcccgagatcctgaacctggtgaagagaatgaagatcaagaccggcaaggccctgaacctgggctacgccctggactacgcccagagatacatcttcgtgaagagcgccggcagcagaatcgaggacggcgtgctgcagttcctggtgctgctggtggccggcagaagcagcgacagagtggacggccccgccagcaacctgaagcagagcggcgtggtgcccttcatcttccaggccaagaacgccgaccccgccgagctggagcagatcgtgctgagccccgccttcatcctggccgccgagagcctgcccaagatcggcgacctgcacccccagatcgtgaacctgctgaagagcgtgcacaacggcgcccccgcccccgtgagcggcgagaaggacgtggtgttcctgctggacggcagcgagggcgtgagaagcggcttccccctgctgaaggagttcgtgcagagagtggtggagagcctggacgtgggccaggacagagtgagagtggccgtggtgcagtacagcgacagaaccagacccgagttctacctgaacagctacatgaacaagcaggacgtggtgaacgccgtgagacagctgaccctgctgggcggccccacccccaacaccggcgccgccctggagttcgtgctgagaaacatcctggtgagcagcgccggcagcagaatcaccgagggcgtgccccagctgctgatcgtgctgaccgccgacagaagcggcgacgacgtgagaaaccccagcgtggtggtgaagagaggcggcgccgtgcccatcggcatcggcatcggcaacgccgacatcaccgagatgcagaccatcagcttcatccccgacttcgccgtggccatccccaccttcagacagctgggcaccgtgcagcaggtgatcagcgagagagtgacccagctgaccagagaggagctgagcagactgcagcccgtgctgcagcccctgcccagccccggcgtgggcggcaagagagacgtggtgttcctgatcgacggcagccagagcgccggccccgagttccagtacgtgagaaccctgatcgagagactggtggactacctggacgtgggcttcgacaccaccagagtggccgtgatccagttcagcgacgaccccaaggtggagttcctgctgaacgcccacagcagcaaggacgaggtgcagaacgccgtgcagagactgagacccaagggcggcagacagatcaacgtgggcaacgccctggagtacgtgagcagaaacatcttcaagagacccctgggcagcagaatcgaggagggcgtgccccagttcctggtgctgatcagcagcggcaagagcgacgacgaggtggacgaccccgccgtggagctgaagcagttcggcgtggcccccttcaccatcgccagaaacgccgaccaggaggagctggtgaagatcagcctgagccccgagtacgtgttcagcgtgagcaccttcagagagctgcccagcctggagcagaagctgctgacccccatcaccaccctgaccagcgagcagatccagaagctgctggccagcaccagataccccccccccggcgagatgggcgccagcgaggtgctgctgggcgccttcagcatctag

SEQ ID NO: 230636 - DNA, 3714 bp, Artificial Sequence
  derived and/or modified sequence
atgagaaagcacaggcacctccctctcgtcgccgtgttttgtctctttctttctggttttcccaccacgcatgctcagcagcagcaggcggcccaggatagtgccgacatcattttcctaatcgatggctcaaacaatactggatcagttaacttcgccgtcatcctggattttctggtgaacctacttgagaaactccctattggcacacagcagattcgcgtgggagtggtccagttctctgatgaaccacgcacaatgtttagtctggacacctactctacgaaagcacaggtcctgggcgcagttaaagcgctgggtttcgcgggaggagagctggccaatattgggttggcgctggactttgtggtagaaaatcacttcacacgcgccggtggctccagagtggaagagggagttccccaagtactggttcttatcagcgccggcccttcctctgacgagattagatacggggtcgtagccctcaagcaagcctccgtcttctcctttggactgggcgcccaggccgccagtcgagctgagcttcagcacatcgccacagacgacaacctggtattcactgtgcctgagtttcgctccttcggcgacctccaggaaaaacttctcccctacatcgtgggagtggcacagaggcacattgtcttgaagccacccactatcgtgacccaggtgatcgaggtgaataagagggatattgttttcttggtcgatggatccagcgcactcggcctggccaactttaacgccatcagagacttcatcgcaaaagtaattcagagattggaaatcgggcaggacctcatccaagtggctgtggctcaatacgcagacactgtcaggccagagttctatttcaacactcacccaaccaagcgcgaggtcatcactgcagtgcgcaaaatgaaacccctggatggcagtgccctctacaccggaagcgccctggattttgtgcgcaataacttgttcacctccagcgctggttatagggccgcagaggggattcctaaactgttggtgctcattactggagggaaaagcctggacgagatcagccagcccgcacaggagctgaagcggagttcaatcatggcctttgccatcgggaacaagggagctgaccaggctgaactagaagagatcgcctttgactcctccctagtgttcattcctgctgaatttagagccgctcccctccaaggaatgcttccaggccttttggcccccctgcgcacactgagcgggacgcctgaagtccactccaataaaagggatattatctttctgctggatggaagcgctaatgtaggaaaaactaactttccctacgtccgtgatttcgtgatgaatctagttaactcattagacatcggtaatgataatattagggttggactcgtgcagttctcggatacgccagtcaccgagttctctcttaacacgtatcagacaaaatcagacatccttgggcatctccggcagttacagctccaggggggctctggcctcaataccggcagcgctctctcatatgtttatgccaaccacttcacggaggccgggggcagtaggattcgggagcacgtgccacaacttctcctgctgctgaccgcgggacaaagcgaggatagctatctccaggccgcaaatgcgctgacaagagccggaattttgaccttctgcgtcggggcaagccaggccaataaggccgagcttgaacagattgcatttaacccttccttggtatatctgatggatgatttttctagtctgcccgcccttccacagcaactcatccaacccctgacaacttatgtgtcagggggggtggaagaggtccccctcgcgcaacctgaaagtaaaagggatatattgtttctcttcgacggcagtgccaacctggtcgggcagttcccggtggtccgagacttcctttacaagataatcgatgagctgaatgtaaagccagaagggacacgcatagccgtggcacaatatagtgatgatgtgaaggttgagtcccgttttgatgaacaccagtccaaaccagaaatactcaatctcgttaagcgcatgaaaatcaagacgggcaaggccctgaacctcggatatgccctagactatgctcagcgatacatcttcgtgaagtccgccggctccaggattgaagatggggtgttacaattcttagtgctcttggtggccggaaggagttcagatagagttgatgggcccgcgtccaatctgaagcagtcaggcgtcgtgccgtttattttccaggcaaaaaatgcagatcctgctgaactggagcaaattgttctgagccccgcctttatcctggccgctgagagccttcctaaaattggagatctccatccccagatcgtgaatctcttaaagagcgtgcataatggtgcccctgcacctgtgtctggtgaaaaagatgttgtctttctgctggacggatcggagggagtgcggagtgggttcccactgctgaaagaatttgtccagcgagtcgtcgagtcgcttgatgtcgggcaagatcgcgttagggtggcagttgttcagtattcagacagaacaagaccagaattctacctcaactcatatatgaacaagcaggatgttgtgaatgcagtacgccagctcactctacttgggggccctactcctaataccggagcggctcttgaatttgtgctccgcaacatcctcgtgtcttccgccggaagcagaatcactgagggcgttccccaactgcttatcgtgctgacggcggaccgctcaggggatgacgttcggaaccccagcgttgtggtgaagagggggggcgctgtgccaatcggaatcggcattggcaacgccgatattacagagatgcaaaccattagctttatcccagacttcgctgtggcaatcccaacctttagacaactagggactgtgcagcaggtaatttccgaacgagtgacgcaattgactagagaggagttgagccgcctgcagccagtcctgcagccactcccgtcccccggcgtgggcggcaagcgggacgtggtttttcttatcgacggatcccagagcgccgggccagagttccagtacgtgcgcactctgatagagcggctggtggattacctggatgtcggtttcgacaccacacgtgtggcagttattcagttttcggatgatcctaaggtcgagtttctattaaatgcgcacagttcaaaagacgaggtgcagaacgctgtgcagagattgcggcccaaagggggccgtcaaatcaacgtgggcaatgccttggagtacgtgtcacggaatatatttaaaaggccccttggtagccgtattgaggagggggtaccgcaatttctcgtgctcatatcctcagggaaatctgacgatgaggtcgatgatcccgctgtggagctcaaacaatttggtgtggccccctttaccatagccagaaatgccgaccaagaggagctcgtcaaaatctcgcttagtcccgagtatgtatttagtgtctctaccttcagagagttaccatcgctggaacaaaagcttctgactccgatcacgaccttgacaagtgagcagatacagaagctgttggctagcactcggtatcctcctcctggcgaaatgggagccagcgaggtcttactcggggccttctctatctag

SEQ ID NO: 230637 - DNA, 4037 bp, Artificial Sequence
  derived and/or modified sequence
cagtttggagctcagtcttccaccaaaggccgttcagttctcctgggctccagcctcctgcaaggactgcaagagttttcctccgcagctctgagtctccacttttttggtggagaaaggctgcaaaaagaaaaagagacgcagtgagtgggaaaagtatgcatcctattcaaacctaattgaatcgaggagcccagggacacacgccttcaggtttgctcaggggttcatatttggtgcttagacaaattcaaaatgaggaaacatcggcacttgcccttagtggccgtcttttgcctctttctctcaggctttcctacaactcatgcccagcagcagcaagcagcacaagactctgctgacattattttccttattgatggatcaaacaacaccggaagtgtcaatttcgcagtcattctcgacttccttgtaaatctccttgagaaactcccaattggaactcagcagatccgagtgggggtggtccagtttagcgatgagcccagaaccatgttctccttggacacctactccaccaaggcccaggttctgggtgcagtgaaagccctcgggtttgctggtggggagttggccaatatcggcctcgcccttgatttcgtggtggagaaccacttcacccgggcagggggcagccgcgtggaggaaggggttccccaggtgctggtcctcataagtgccgggccttctagtgacgagattcgctacggggtggtagcactgaagcaggctagcgtgttctcattcggccttggagcccaggccgcctccagggcagagcttcagcacatagctaccgatgacaacttggtgtttactgtcccggaattccgtagctttggggacctccaggagaaattactgccgtacattgttggcgtggcccaaaggcacattgtcttgaaaccgccaaccattgtcacacaagtcattgaagtcaacaagagagacatagtcttcctggtggatggctcatctgcactgggactggccaacttcaatgccatccgagacttcattgctaaagtcatccagaggctggaaatcggacaggatcttatccaggtggcagtggcccagtatgcagacactgtgaggcctgaattttatttcaatacccatccaacaaaaagggaagtcataaccgctgtgcggaaaatgaagcccctggacggctcggccctgtacacgggctctgctctagactttgttcgtaacaacctattcacgagttcagccggctaccgggctgccgaggggattcctaagcttttggtgctgatcacaggtggtaagtccctagatgaaatcagccagcctgcccaggagctgaagagaagcagcataatggcctttgccattgggaacaagggtgccgatcaggctgagctggaagagatcgctttcgactcctccctggtgttcatcccagctgagttccgagccgccccattgcaaggcatgctgcctggcttgctggcacctctcaggaccctctctggaacccctgaagttcactcaaacaaaagggatatcatctttcttttggatggatcagccaacgttggaaaaaccaatttcccttatgtgcgcgactttgtaatgaacctagttaacagccttgatattggaaatgacaatattcgtgttggtttagtgcaatttagtgacactcctgtaacggagttctctttaaacacataccagaccaagtcagatatccttggtcatctgaggcagctgcagctccagggaggttcgggcctgaacacaggctcagccctaagctatgtctatgccaaccacttcacggaagctggcggcagcaggatccgtgaacacgtgccgcagctcctgcttctgctcacagctgggcagtctgaggactcctatttgcaagctgccaacgccttgacacgcgcgggcatcctgactttttgtgtgggagctagccaggcgaataaggcagagcttgagcagattgcttttaacccaagcctggtgtatctcatggatgatttcagctccctgccagctttgcctcagcagctgattcagcccctaaccacatatgttagtggaggtgtggaggaagtaccactcgctcagccagagagcaagcgagacattctgttcctctttgacggctcagccaatcttgtgggccagttccctgttgtccgtgactttctctacaagattatcgatgagctcaatgtgaagccagaggggacccgaattgcggtggctcagtacagcgatgatgtcaaggtggagtcccgttttgatgagcaccagagtaagcctgagatcctgaatcttgtgaagagaatgaagatcaagacgggcaaagccctcaacctgggctacgcgctggactatgcacagaggtacatttttgtgaagtctgctggcagccggatcgaggatggagtgcttcagttcctggtgctgctggtcgcaggaaggtcatctgaccgtgtggatgggccagcaagtaacctgaagcagagtggggttgtgcctttcatcttccaagccaagaacgcagaccctgctgagttagagcagatcgtgctgtctccagcgtttatcctggctgcagagtcgcttcccaagattggagatcttcatccacagatagtgaatctcttaaaatcagtgcacaacggagcaccagcaccagtttcaggtgaaaaggacgtggtgtttctgcttgatggctctgagggcgtcaggagcggcttccctctgttgaaagagtttgtccagagagtggtggaaagcctggatgtgggccaggaccgggtccgcgtggccgtggtgcagtacagcgaccggaccaggcccgagttctacctgaattcatacatgaacaagcaggacgtcgtcaacgctgtccgccagctgaccctgctgggagggccgacccccaacaccggggccgccctggagtttgtcctgaggaacatcctggtcagctctgcgggaagcaggataacagaaggtgtgccccagctgctgatcgtcctcacggccgacaggtctggggatgatgtgcggaacccctccgtggtcgtgaagaggggtggggctgtgcccattggcattggcatcgggaacgctgacatcacagagatgcagaccatctccttcatcccggactttgccgtggccattcccacctttcgccagctggggaccgtccaacaggtcatctctgagagggtgacccagctcacccgcgaggagctgagcaggctgcagccggtgttgcagcctctaccgagcccaggtgttggtggcaagagggacgtggtctttctcatcgatgggtcccaaagtgccgggcctgagttccagtacgttcgcaccctcatagagaggctggttgactacctggacgtgggctttgacaccacccgggtggctgtcatccagttcagcgatgaccccaaggtggagttcctgctgaacgcccattccagcaaggatgaagtgcagaacgcggtgcagcggctgaggcccaagggagggcggcagatcaacgtgggcaatgccctggagtacgtgtccaggaacatcttcaagaggcccctggggagccgcattgaagagggcgtcccgcagttcctggtcctcatctcgtctggaaagtctgacgatgaggtggacgacccggcggtggagctcaagcagtttggcgtggcccctttcacgatcgccaggaacgcagaccaggaggagctggtgaagatctcgctgagccccgaatatgtgttctcggtgagcaccttccgggagctgcccagcctggagcagaaactgctgacgcccatcacgaccctgacctcagagcagatccagaagctcttagccagcactcgctatccacctccaggtgagatgggggcgtcggaggttctccttggagcattttccatatgaaaaataacaggctcaaaggccatggtactcataataaattaaattaaaataaaggttgtatgccctta

SEQ ID NO: 230638 - DNA, 3714 bp, Artificial Sequence
  derived and/or modified sequence
atgaggaagcaccgccacctgcccctggtggccgtgttctgcctcttcctgagcggcttccccaccacccacgcccagcagcagcaggccgcccaggacagcgctgacatcatcttcctgattgatggcagcaacaacacaggctctgtgaactttgctgtgatcctggacttcctggtgaacctgctggagaagctgcccatcggcacccagcagatccgggtgggcgtggtgcagttcagtgatgagcccaggaccatgttcagcctggacacctacagcaccaaggcccaggtgctgggcgctgtgaaggccctgggctttgctggaggagagctggccaacatcggcctggccctggactttgtggtggagaaccacttcaccagggctgggggcagccgggtggaggagggcgtgccccaggtgctggtgctgatctctgctggccccagcagtgatgagatccgctatggagtggtggccctgaagcaggcctctgtgttctcctttggcctgggcgcccaggccgccagcagagctgagctgcagcacatcgccacagatgacaacctggtgttcaccgtgcctgagttccgcagctttggagacctgcaggagaagctgctgccctacatcgtgggcgtggcccagaggcacatcgtgctgaagccacccaccatcgtgacccaggtgattgaggtgaacaagagggacatcgtgttcctggtggatggcagcagcgccctgggcctggccaacttcaatgccatccgggacttcatcgccaaggtgatccagaggctggagatcggccaggacctgatccaggtggccgtggcccagtatgctgacacagtgcggcctgagttctacttcaacacccaccccaccaagcgggaggtgatcacagctgtgaggaagatgaagcccctggatggcagcgccctgtacacaggcagcgccctggactttgtgaggaacaacctcttcaccagcagcgctggctacagagctgctgagggcatccccaagctgctggtgctgatcactggaggcaagagcctggatgagatcagccagcctgcccaggagctgaagaggagcagcatcatggcctttgccatcggcaacaagggagctgaccaggccgagctggaggagatcgcctttgacagcagcctggtgttcatcccagctgagttccgggccgcccccctgcagggcatgctgcccggcctgctggcccccctgcggaccctgagcggcaccccagaggtgcacagcaacaagagggacatcatcttcctgctggatggcagcgccaacgtgggcaagaccaacttcccctacgtgcgggactttgtgatgaacctggtgaacagcctggacattggaaatgacaacatccgggtgggcctggtgcagttcagtgacacccctgtgacagagttcagcctgaacacctaccagaccaagagtgacatcctgggccacctgcggcagctgcagctgcagggcggcagcggcctgaacacaggcagcgccctgtcctatgtgtatgccaaccacttcacagaggccggcggcagccgcatccgggagcacgtgccccagctgctgctgctgctgacagctggccagagcgaggacagctacctgcaggccgccaatgccctgaccagggctggcatcctgaccttctgtgtgggcgccagccaggccaacaaggccgagctggagcagatcgccttcaaccccagcctggtgtacctgatggatgacttcagcagcctgcctgccctgccccagcagctgatccagcccctgaccacctacgtgtctggaggagtggaggaggtgcccctggcccagcctgagagcaagagggacatcctcttcctgtttgatggcagcgccaacctggtgggccagtttcctgtggtgcgggacttcctgtacaagatcattgatgagctgaatgtgaagccagagggcaccagaattgctgtggcccagtacagtgatgatgtgaaggtggagagcagatttgatgagcaccagagcaagccagagatcctgaacctggtgaagaggatgaagatcaagacaggcaaggccctgaacctgggctacgccctggactatgcccagcgctacatctttgtgaagtctgctggcagcagaattgaagatggagtgctgcagttcctggtgctgctggtggccggccgcagcagtgacagagtggatggccctgccagcaacctgaagcagagcggcgtggtgcccttcatcttccaggccaagaatgctgaccctgctgagctggagcagatcgtgctgagccctgccttcatcctggccgctgagagcctgcccaagatcggggacctgcacccccagatcgtgaacctgctgaagtctgtgcacaacggggccccagcccctgtgtctggagagaaggatgtggtgttcctgctggatggcagcgagggcgtgcgcagcggcttccccctgctgaaggagtttgtgcagagggtggtggagagcctggatgtgggccaggacagagtgcgggtggccgtggtgcagtacagcgacaggaccaggcctgagttctacctgaacagctacatgaacaagcaggatgtggtgaatgctgtgcggcagctgaccctgctgggcggccccacccccaacacaggagctgccctggagtttgtgctgaggaacatcctggtgtcctctgctggcagccgcatcacagaaggagtgccccagctgctgattgtgctgacagctgacagaagtggagatgatgtgaggaaccccagcgtggtggtgaagaggggcggcgctgtgcccatcggcattggaattggaaatgctgacatcacagagatgcagaccatctccttcatcccagactttgctgtggccatccccaccttccggcagctgggcaccgtgcagcaggtgatcagcgagcgggtgacccagctgacccgggaggagctgagccggctgcagcctgtgctgcagcccctgcccagccctggggtgggcggcaagagagatgtggtgttcctgattgatggcagccagagcgctggccctgagttccagtatgtgaggaccctgattgagcggctggtggactacctggatgtgggctttgacaccaccagggtggccgtcatccagttcagtgatgaccccaaggtggagttcctgctgaatgcccacagcagcaaggatgaggtgcagaatgctgtgcagaggctgcggcccaagggcggccggcagatcaacgtgggcaatgccctggagtatgtgtccaggaacatcttcaagaggcccctgggcagccgcatcgaggagggcgtgccccagttcctggtgctgatcagcagcggcaagagtgatgatgaggtggatgatcctgctgtggagctgaagcagtttggagtggcccccttcaccatcgccagaaatgctgaccaggaggagctggtgaagatcagcctgagcccagaatatgtgttttctgtgtccaccttccgggagctgcccagcctggagcagaagctgctgacccccatcaccaccctgaccagcgagcagatccagaagctgctggccagcacccgctacccacctcctggagagatgggcgccagcgaggtgctgctgggcgccttcagcatctag

SEQ ID NO: 230639 - DNA, 3714 bp, Artificial Sequence
  derived and/or modified sequence
atgcggaagcaccggcacctgcccctggtggccgtgttctgcctgttcctttccggcttccccaccacacacgctcagcagcagcaggcagcgcaagacagcgccgatattatctttctcatcgacgggtctaacaacactggttctgtgaattttgccgtgattttagattttttggtgaacctgctcgaaaaattgccaataggcacccaacagatcagagtgggcgtcgtgcaattctccgatgaaccccgcaccatgttctccctggacacatattcgaccaaagcccaggttctcggtgctgtcaaggctctcggattcgccgggggagagctcgcaaatatcggtctcgctctggattttgtggtggagaatcatttcacaagggctggtggcagccgggtggaagaaggcgtgccccaagtgctggtactgatcagtgctggccctagctccgacgaaatcaggtatggagtcgttgccctgaagcaggcttctgtgtttagtttcggcctgggagctcaagccgcctcacgggctgaactacaacacattgcgacggacgataaccttgtttttacggtccctgagtttcggagcttcggcgatctgcaggaaaagcttctgccatacatcgtgggtgtcgctcaaaggcacatcgtgttaaagccacccaccatcgttacccaggtgatcgaggtgaataagcgcgatatcgttttcttggttgatggctcaagcgccctgggcctcgccaacttcaacgccataagggatttcatagccaaggtcattcaaagactagaaattggccaagacctcattcaggtcgctgtggctcagtacgccgataccgtaagaccagaattttattttaacactcacccgacgaaacgagaggtcataactgctgttcgaaaaatgaagcctctggacgggtcagctctgtataccgggtccgccctggacttcgtccggaacaacctgttcacaagcagcgcggggtaccgtgcggctgagggcatcccgaaactattggtgcttataactggagggaagagtctagacgagatctcccagcctgcacaggagctgaagcgcagtagcatcatggcctttgcgattggcaacaagggggccgaccaggctgaactggaagagatcgctttcgatagtagcctggtgtttatccctgcagagtttagggcagcacccctgcagggaatgttgcccggattattagcgccattgaggacacttagtggaaccccagaagtacactccaataagcgggatatcatctttctcctcgacggctcggccaatgttggcaagaccaacttcccctacgtgcgagactttgtgatgaacctggtgaactcactcgacataggcaacgacaatattcgggtaggcctggttcagttttccgacactccagtgaccgaattttcgttgaacacatatcagaccaaatcggacattttaggacacttacgccagttacagctccaggggggaagcggactgaacaccggcagcgcgctttcttacgtttatgctaatcacttcactgaagctggggggagcagaattcgggagcatgtgccacagctcctgcttctcctgacggctggccagagcgaagacagttatctccaagccgcaaatgccctaactcgagccggaattctgaccttctgcgtgggagctagccaggctaacaaggccgaactggagcagatcgcctttaacccttcactggtgtatctgatggatgatttcagcagcctgcccgcactgccgcagcagctcatccagcctctaaccacttacgtcagcggtggtgtcgaggaggtccccttagctcaaccggagtctaaaagggacattctatttctcttcgatggctccgcaaatctggtgggtcagttccctgtggtgagggatttcttatacaagattattgatgagctaaatgtaaagccagaggggactagaatagccgttgcacagtacagtgacgacgtcaaggttgaaagtcggtttgatgagcaccagtccaagccagaaatcctcaacctcgtgaaacgaatgaaaattaagacaggcaaagccctgaatctgggctatgccctcgactatgctcagagatacatttttgttaaatcagcaggatcacgcattgaagatggagtgctgcaatttcttgtcctactggtggcaggaaggagctccgatagggtcgatggtcctgcgagcaatctaaagcaatccggagtggtgcctttcatcttccaggccaaaaatgctgatccggccgaactggaacagattgttctgtcaccagcctttatattggctgccgagtcactgcccaagattggagacctacatccacaaattgtgaatctgctgaagtcagtccataatggggcacccgctcccgtcagtggtgagaaggatgtggtttttctcctcgacggttccgaaggggtgcgatctggctttccactgttgaaagaatttgtccagcgagtggttgagtctctagatgtcgggcaggatcgtgtgcgcgtggcagtggtccaatactcagaccggaccaggccggaattttatctgaatagctacatgaacaaacaggatgtggttaacgctgtgagacaactcaccttacttgggggccctactccgaacaccggagctgcactcgaatttgtgctccggaacattctagtgtcctccgccggttcacgtataaccgaaggggtgccacagttgctgattgtgctgaccgcagaccgttccggggacgacgttcgaaaccctagcgtggttgtgaagagaggcggggccgtgccaattggtatcggaatcggcaacgcggatattactgagatgcagacaattagcttcatccctgatttcgcagtggcaattcctacattcaggcagctgggaactgtccaacaagtgatatccgagagagtcacacaacttactagagaggagttaagcaggctgcagcccgtgctgcagccactgccgagcccaggagttggcggaaaacgcgatgtcgtgtttctgatcgatggatcgcagagcgcagggccggagtttcagtatgtgcggaccctgattgagaggctcgtcgactacctcgatgtcggatttgatacaactcgggttgctgtcatccagttttctgatgaccctaaagtagaatttctgcttaatgcacactccagtaaggacgaggtccagaatgcagtgcagcgtttgaggcccaaagggggccggcagattaacgtgggcaacgccctggagtatgtctccaggaatatcttcaaacggcctctcgggagcagaatagaagaaggcgtacctcagtttctggtcttaattagctcaggcaagagcgatgatgaagtcgacgatcctgctgtcgaactgaagcagttcggggtcgcgccattcacaatagcccggaatgcagatcaggaagaactcgttaagatttctctgtcacctgaatacgtgttctctgtgtctacattcagggagttaccttcgctggagcagaagctacttacacccattaccacactgacaagcgaacagatccaaaagcttcttgcatccacaagataccctcccccaggtgagatgggggcatccgaggtgcttctcggcgccttctctatctag

SEQ ID NO: 230640 - DNA, 3714 bp, Artificial Sequence
  derived and/or modified sequence
atgcggaaacaccgtcacttacctcttgtcgcggtcttttgtctcttcctgtccggttttccaactactcacgcccagcagcagcaggccgctcaggactctgctgacatcatcttcctgatagatggatctaacaacaccggaagtgttaattttgccgtcatcctcgattttctggtgaacctgctggagaagctaccaataggaacgcagcagattcgtgtaggagtggtgcagttttccgatgagcctagaaccatgttctccctggacacttactcaactaaagcacaagtgctgggagcagttaaggcattgggatttgccggaggtgagctggcaaatattgggcttgcgctggacttcgtcgtcgagaatcacttcaccagagcaggaggctctagggtcgaagagggggtgccccaggttcttgtcctgataagcgccggtccatcgagcgatgagattcgttacggtgtggtcgcactgaaacaggcgtctgtcttttccttcggactcggcgcacaggctgcctcgagagccgaactccagcacatagctaccgacgataacctagtgtttactgtcccagaattccgaagctttggggatctgcaggaaaagcttttgccatacatcgttggggtagctcagcgccatatcgtgctaaaaccaccaaccatcgttacgcaagtaatcgaggtaaataagcgagacattgtgtttctggtcgacggatcttccgccttggggttggccaattttaatgccatccgcgatttcatcgcgaaggttattcagcgactggaaattgggcaggacttgatccaggtggcagttgcacagtacgcagatactgtcaggcccgaattctatttcaatacacaccccacaaaaagggaggtcataaccgcggtccgcaagatgaaacccctggatgggagcgccctgtatacaggatcagccctggacttcgtgcgcaacaatctctttacaagtagtgcgggttaccgtgcagcagagggtattcccaaactgctggtgttgattactggcggaaaatccctcgacgaaatctctcagccagcccaggaactgaagaggtccagcattatggcattcgcgatcggcaacaagggtgctgaccaggcagaactcgaggaaattgcgttcgactcatccctggtgttcatccccgcagagtttagagcagctccgctccagggaatgcttcctggacttctcgccccattgcggactctgagcggaaccccagaggtccactctaacaaacgggatattatctttctgttggatggcagcgccaatgtggggaagaccaatttcccgtacgtgagagatttcgtcatgaatctggtcaatagcttggatatagggaacgacaatattagagtgggactcgtccagtttagcgacacacctgttacagaatttagcctcaacacatatcaaactaaatcagacatactggggcacctaaggcagctgcagctgcagggaggctccgggcttaacacaggaagcgcgctgtcttacgtgtatgcgaaccacttcacagaggctggagggtcccggatccgcgagcacgttccgcagctgctgttgttactaaccgcgggtcagagtgaggacagttacctgcaggccgctaatgctttaaccagagccggaatactaacgttctgcgtgggggcatcgcaggccaacaaggctgaactggagcaaatcgcttttaacccttccctggtgtacctgatggatgacttttccagtctcccagctctgccccaacagctgattcagccactgactacctatgtatcaggtggggtggaggaagtgccactggctcagccagaatctaagagagatatcctgtttcttttcgacggatccgctaacctcgtgggacagtttcccgttgtgcgggacttcctctataagattatcgacgagctgaacgtaaagcccgagggcactcgaattgccgtcgcacagtatagcgacgatgtcaaggtggagtcccggtttgatgagcaccagagcaaaccagaaatcctgaatttagtgaagagaatgaaaatcaagacaggaaaagccctaaacctcggctatgcccttgattacgctcagcggtacatctttgtcaaatcagccggatccagaatagaagatggcgtgctgcagtttctggtgctgctcgtcgctgggagaagctctgacagagtagacggcccagcaagcaacctgaaacagtccggggtcgtgccattcattttccaggccaagaacgcagatcctgctgagctcgagcagatcgtgctgtcccctgccttcatcctagcggctgagtccttgcctaaaatcggggaccttcacccccagatcgtgaatctgctgaaaagcgtgcacaatggagcccctgccccagtcagtggcgagaaagatgtagtattccttctggacggatcagagggagtgaggtccggcttcccgctcctgaaggaatttgtgcaaagggtcgttgaaagcctggacgtgggtcaggatcgtgtgcgggtggccgtggtgcagtattcagatcgcactcgtccagagttttacctgaattcctacatgaacaagcaggatgtggtcaacgcagtacgacagctgacgcttctcggtgggccaacccccaacacaggagctgccctggagtttgtgctaagaaacatcctggtgtcaagtgccggatctcgcataaccgagggagtaccacaactgctgatcgtgctcacagcggacagaagtggcgatgatgtgagaaacccaagcgttgtcgttaagcggggtggcgcagtccctatcggcatcgggattgggaatgcagatattactgagatgcaaaccattagctttattcctgattttgctgtggccattcctacattccggcagctgggaacagtgcaacaagttatctctgaacgtgttactcaactcactcgcgaggagctgtcacgtcttcaacccgtcctccagcccctgccttcgcccggagtagggggaaagcgagatgtggtctttcttatagatggatcccaaagcgccggtcccgaattccagtacgtgcggactttgatagagagactcgtggattatttggacgtgggctttgatacaactagggtggctgtgatacagttctccgatgaccctaaagtggagttcctactcaatgcacactcttccaaagatgaagttcagaacgctgtccagcgtctgaggccaaagggcggacgtcagataaatgtgggaaacgcactcgagtatgttagtagaaacattttcaagcgcccactagggtctagaatagaagagggcgttccacagttcttggtgctgatcagctcgggtaagagtgacgatgaagttgacgaccctgctgtggaattaaagcagttcggggtggcgccatttacaatagccagaaacgctgaccaagaggaactggtaaaaatatctctgtctcctgagtatgttttctctgtgagcaccttccgggagttacctagcctcgaacagaagctcctcacccccatcacgaccctgactagcgaacagatccagaagttgctggcttcgacccgctatcctcccccaggcgagatgggtgccagtgaagtgttgctgggggcatttagcatatag

SEQ ID NO: 230641 - protein, 2570 aa, Artificial Sequence
  derived and/or modified sequence
MRKHRHLPLVAVFCLFLSGFPTTHAQQQQAVIEVNKRDIVFLVDGSSALGLANFNAIRDFIAKVIQRLEIGQDLIQVAVAQYADTVRPEFYFNTHPTKREVITAVRKMKPLDGSALYTGSALDFVRNNLFTSSAGYRAAEGIPKLLVLITGGKSLDEISQPAQELKRSSIMAFAIGNKGADQAELEEIAFDSSLVFIPAEFRAAPLQGMLPGLLAPLRTLSGTPEESKRDILFLFDGSANLVGQFPVVRDFLYKIIDELNVKPEGTRIAVAQYSDDVKVESRFDEHQSKPEILNLVKRMKIKTGKALNLGYALDYAQRYIFVKSAGSRIEDGVLQFLVLLVAGRSSDRVDGPASNLKQSGVVPFIFQAKNADPAELEQIVLSPAFILAAESLPKIGDLHPQIVNLLKSVHNGAPAPVSGEKDVVFLLDGSEGVRSGFPLLKEFVQRVVESLDVGQDRVRVAVVQYSDRTRPEFYLNSYMNKQDVVNAVRQLTLLGGPTPNTGAALEFVLRNILVSSAGSRITEGVPQLLIVLTADRSGDDVRNPSVVVKRGGAVPIGIGIGNADITEMQTISFIPDFAVAIPTFRQLGTVQQVISERVTQLTREELSRLQPVLQPLPSPGVGGKRDVVFLIDGSQSAGPEFQYVRTLIERLVDYLDVGFDTTRVAVIQFSDDPKVEFLLNAHSSKDEVQNAVQRLRPKGGRQINVGNALEYVSRNIFKRPLGSRIEEGVPQFLVLISSGKSDDEVDDPAVELKQFGVAPFTIARNADQEELVKISLSPEYVFSVSTFRELPSLEQKLLTPITTLTSEQIQKLLASTRYPPPAVESDAADIVFLIDSSEGVRPDGFAHIRDFVSRIVRRLNIGPSKVRVGVVQFSNDVFPEFYLKTYRSQAPVLDAIRRLRLRGGSPLNTGKALEFVARNLFVKSAGSRIEDGVPQHLVLVLGGKSQDDVSRFAQVIRSSGIVSLGVGDRNIDRTELQTITNDPRLVFTVREFRELPNIEERIMNSFGPSAATPAPPGVDTPPPSRPEKKKADIVFLLDGSINFRRDSFQEVLRFVSEIVDTVYEDGDSIQVGLVQYNSDPTDEFFLKDFSTKRQIIDAINKVVYKGGRHANTKVGLEHLRVNHFVPEAGSRLDQRVPQIAFVITGGKSVEDAQDVSLALTQRGVKVFAVGVRNIDSEEVGKIASNSATAFRVGNVQELSELSEQVLETLHDAMHETLCPGVTDAAKACNLDVILGFDGSRDQNVFVAQKGFESKVDAILNRISQMHRVSCSGGRSPTVRVSVVANTPSGPVEAFDFDEYQPEMLEKFRNMRSQHPYVLTEDTLKVYLNKFRQSSPDSVKVVIHFTDGADGDLADLHRASENLRQEGVRALILVGLERVVNLERLMHLEFGRGFMYDRPLRLNLLDLDYELAEQLDNIAEKACCGVPCKCSGQRGDRGPIGSIGPKGIPGEDGYRGYPGDEGGPGERGPPGVNGTQGFQGCPGQRGVKGSRGFPGEKGEVGEIGLDGLDGEDGDKGLPGSSGEKGNPGRRGDKGPRGEKGERGDVGIRGDPGNPGQDSQERGPKGETGDLGPMGVPGRDGVPGGPGETGKNGGFGRRGPPGAKGNKGGPGQPGFEGEQGTRGAQGPAGPAGPPGLIGEQGISGPRGSGGAAGAPGERGRTGPLGRKGEPGEPGPKGGIGNRGPRGETGDDGRDGVGSEGRRGKKGERGFPGYPGPKGNPGEPGLNGTTGPKGIRGRRGNSGPPGIVGQKGDPGYPGPAGPKGNRGDSIDQCALIQSIKDKCPCCYGPLECPVFPTELAFALDTSEGVNQDTFGRMRDVVLSIVNDLTIAESNCPRGARVAVVTYNNEVTTEIRFADSKRKSVLLDKIKNLQVALTSKQQSLETAMSFVARNTFKRVRNGFLMRKVAVFFSNTPTRASPQLREAVLKLSDAGITPLFLTRQEDRQLINALQINNTAVGHALVLPAGRDLTDFLENVLTCHVCLDICNIDPSCGFGSWRPSFRDRRAAGSDVDIDMAFILDSAETTTLFQFNEMKKYIAYLVRQLDMSPDPKASQHFARVAVVQHAPSESVDNASMPPVKVEFSLTDYGSKEKLVDFLSRGMTQLQGTRALGSAIEYTIENVFESAPNPRDLKIVVLMLTGEVPEQQLEEAQRVILQAKCKGYFFVVLGIGRKVNIKEVYTFASEPNDVFFKLVDKSTELNEEPLMRFGRLLPSFVSSENAFYLSPDIRKQCDWFQGDQPTKNLVKFGHKQVNVPNNVTSSPTSNPVTTTKPVTTTKPVTTTTKPVTTTTKPVTIINQPSVKPAAAKPAPAKPVAAKPVATKMATVRPPVAVKPATAAKPVAAKPAAVRPPAAAAAKPVATKPEVPRPQAAKPAATKPATTKPMVKMSREVQVFEITENSAKLHWERAEPPGPYFYDLTVTSAHDQSLVLKQNLTVTDRVIGGLLAGQTYHVAVVCYLRSQVRATYHGSFSTKKSQPPPPQPARSASSSTINLMVSTEPLALTETDICKLPKDEGTCRDFILKWYYDPNTKSCARFWYGGCGGNENKFGSQKECEKVCAPVLAKPGVISVMGT

SEQ ID NO: 230642 - DNA, 7713 bp, Artificial Sequence
  derived and/or modified sequence
atgagaaagcacagacacctgcccctggtggccgtgttctgcctgttcctgagcggcttccccaccacccacgcccagcagcagcaggccgtgatcgaggtgaacaagagagacatcgtgttcctggtggacggcagcagcgccctgggcctggccaacttcaacgccatcagagacttcatcgccaaggtgatccagagactggagatcggccaggacctgatccaggtggccgtggcccagtacgccgacaccgtgagacccgagttctacttcaacacccaccccaccaagagagaggtgatcaccgccgtgagaaagatgaagcccctggacggcagcgccctgtacaccggcagcgccctggacttcgtgagaaacaacctgttcaccagcagcgccggctacagagccgccgagggcatccccaagctgctggtgctgatcaccggcggcaagagcctggacgagatcagccagcccgcccaggagctgaagagaagcagcatcatggccttcgccatcggcaacaagggcgccgaccaggccgagctggaggagatcgccttcgacagcagcctggtgttcatccccgccgagttcagagccgcccccctgcagggcatgctgcccggcctgctggcccccctgagaaccctgagcggcacccccgaggagagcaagagagacatcctgttcctgttcgacggcagcgccaacctggtgggccagttccccgtggtgagagacttcctgtacaagatcatcgacgagctgaacgtgaagcccgagggcaccagaatcgccgtggcccagtacagcgacgacgtgaaggtggagagcagattcgacgagcaccagagcaagcccgagatcctgaacctggtgaagagaatgaagatcaagaccggcaaggccctgaacctgggctacgccctggactacgcccagagatacatcttcgtgaagagcgccggcagcagaatcgaggacggcgtgctgcagttcctggtgctgctggtggccggcagaagcagcgacagagtggacggccccgccagcaacctgaagcagagcggcgtggtgcccttcatcttccaggccaagaacgccgaccccgccgagctggagcagatcgtgctgagccccgccttcatcctggccgccgagagcctgcccaagatcggcgacctgcacccccagatcgtgaacctgctgaagagcgtgcacaacggcgcccccgcccccgtgagcggcgagaaggacgtggtgttcctgctggacggcagcgagggcgtgagaagcggcttccccctgctgaaggagttcgtgcagagagtggtggagagcctggacgtgggccaggacagagtgagagtggccgtggtgcagtacagcgacagaaccagacccgagttctacctgaacagctacatgaacaagcaggacgtggtgaacgccgtgagacagctgaccctgctgggcggccccacccccaacaccggcgccgccctggagttcgtgctgagaaacatcctggtgagcagcgccggcagcagaatcaccgagggcgtgccccagctgctgatcgtgctgaccgccgacagaagcggcgacgacgtgagaaaccccagcgtggtggtgaagagaggcggcgccgtgcccatcggcatcggcatcggcaacgccgacatcaccgagatgcagaccatcagcttcatccccgacttcgccgtggccatccccaccttcagacagctgggcaccgtgcagcaggtgatcagcgagagagtgacccagctgaccagagaggagctgagcagactgcagcccgtgctgcagcccctgcccagccccggcgtgggcggcaagagagacgtggtgttcctgatcgacggcagccagagcgccggccccgagttccagtacgtgagaaccctgatcgagagactggtggactacctggacgtgggcttcgacaccaccagagtggccgtgatccagttcagcgacgaccccaaggtggagttcctgctgaacgcccacagcagcaaggacgaggtgcagaacgccgtgcagagactgagacccaagggcggcagacagatcaacgtgggcaacgccctggagtacgtgagcagaaacatcttcaagagacccctgggcagcagaatcgaggagggcgtgccccagttcctggtgctgatcagcagcggcaagagcgacgacgaggtggacgaccccgccgtggagctgaagcagttcggcgtggcccccttcaccatcgccagaaacgccgaccaggaggagctggtgaagatcagcctgagccccgagtacgtgttcagcgtgagcaccttcagagagctgcccagcctggagcagaagctgctgacccccatcaccaccctgaccagcgagcagatccagaagctgctggccagcaccagataccccccccccgccgtggagagcgacgccgccgacatcgtgttcctgatcgacagcagcgagggcgtgagacccgacggcttcgcccacatcagagacttcgtgagcagaatcgtgagaagactgaacatcggccccagcaaggtgagagtgggcgtggtgcagttcagcaacgacgtgttccccgagttctacctgaagacctacagaagccaggcccccgtgctggacgccatcagaagactgagactgagaggcggcagccccctgaacaccggcaaggccctggagttcgtggccagaaacctgttcgtgaagagcgccggcagcagaatcgaggacggcgtgccccagcacctggtgctggtgctgggcggcaagagccaggacgacgtgagcagattcgcccaggtgatcagaagcagcggcatcgtgagcctgggcgtgggcgacagaaacatcgacagaaccgagctgcagaccatcaccaacgaccccagactggtgttcaccgtgagagagttcagagagctgcccaacatcgaggagagaatcatgaacagcttcggccccagcgccgccacccccgccccccccggcgtggacacccccccccccagcagacccgagaagaagaaggccgacatcgtgttcctgctggacggcagcatcaacttcagaagagacagcttccaggaggtgctgagattcgtgagcgagatcgtggacaccgtgtacgaggacggcgacagcatccaggtgggcctggtgcagtacaacagcgaccccaccgacgagttcttcctgaaggacttcagcaccaagagacagatcatcgacgccatcaacaaggtggtgtacaagggcggcagacacgccaacaccaaggtgggcctggagcacctgagagtgaaccacttcgtgcccgaggccggcagcagactggaccagagagtgccccagatcgccttcgtgatcaccggcggcaagagcgtggaggacgcccaggacgtgagcctggccctgacccagagaggcgtgaaggtgttcgccgtgggcgtgagaaacatcgacagcgaggaggtgggcaagatcgccagcaacagcgccaccgccttcagagtgggcaacgtgcaggagctgagcgagctgagcgagcaggtgctggagaccctgcacgacgccatgcacgagaccctgtgccccggcgtgaccgacgccgccaaggcctgcaacctggacgtgatcctgggcttcgacggcagcagagaccagaacgtgttcgtggcccagaagggcttcgagagcaaggtggacgccatcctgaacagaatcagccagatgcacagagtgagctgcagcggcggcagaagccccaccgtgagagtgagcgtggtggccaacacccccagcggccccgtggaggccttcgacttcgacgagtaccagcccgagatgctggagaagttcagaaacatgagaagccagcacccctacgtgctgaccgaggacaccctgaaggtgtacctgaacaagttcagacagagcagccccgacagcgtgaaggtggtgatccacttcaccgacggcgccgacggcgacctggccgacctgcacagagccagcgagaacctgagacaggagggcgtgagagccctgatcctggtgggcctggagagagtggtgaacctggagagactgatgcacctggagttcggcagaggcttcatgtacgacagacccctgagactgaacctgctggacctggactacgagctggccgagcagctggacaacatcgccgagaaggcctgctgcggcgtgccctgcaagtgcagcggccagagaggcgacagaggccccatcggcagcatcggccccaagggcatccccggcgaggacggctacagaggctaccccggcgacgagggcggccccggcgagagaggcccccccggcgtgaacggcacccagggcttccagggctgccccggccagagaggcgtgaagggcagcagaggcttccccggcgagaagggcgaggtgggcgagatcggcctggacggcctggacggcgaggacggcgacaagggcctgcccggcagcagcggcgagaagggcaaccccggcagaagaggcgacaagggccccagaggcgagaagggcgagagaggcgacgtgggcatcagaggcgaccccggcaaccccggccaggacagccaggagagaggccccaagggcgagaccggcgacctgggccccatgggcgtgcccggcagagacggcgtgcccggcggccccggcgagaccggcaagaacggcggcttcggcagaagaggcccccccggcgccaagggcaacaagggcggccccggccagcccggcttcgagggcgagcagggcaccagaggcgcccagggccccgccggccccgccggcccccccggcctgatcggcgagcagggcatcagcggccccagaggcagcggcggcgccgccggcgcccccggcgagagaggcagaaccggccccctgggcagaaagggcgagcccggcgagcccggccccaagggcggcatcggcaacagaggccccagaggcgagaccggcgacgacggcagagacggcgtgggcagcgagggcagaagaggcaagaagggcgagagaggcttccccggctaccccggccccaagggcaaccccggcgagcccggcctgaacggcaccaccggccccaagggcatcagaggcagaagaggcaacagcggcccccccggcatcgtgggccagaagggcgaccccggctaccccggccccgccggccccaagggcaacagaggcgacagcatcgaccagtgcgccctgatccagagcatcaaggacaagtgcccctgctgctacggccccctggagtgccccgtgttccccaccgagctggccttcgccctggacaccagcgagggcgtgaaccaggacaccttcggcagaatgagagacgtggtgctgagcatcgtgaacgacctgaccatcgccgagagcaactgccccagaggcgccagagtggccgtggtgacctacaacaacgaggtgaccaccgagatcagattcgccgacagcaagagaaagagcgtgctgctggacaagatcaagaacctgcaggtggccctgaccagcaagcagcagagcctggagaccgccatgagcttcgtggccagaaacaccttcaagagagtgagaaacggcttcctgatgagaaaggtggccgtgttcttcagcaacacccccaccagagccagcccccagctgagagaggccgtgctgaagctgagcgacgccggcatcacccccctgttcctgaccagacaggaggacagacagctgatcaacgccctgcagatcaacaacaccgccgtgggccacgccctggtgctgcccgccggcagagacctgaccgacttcctggagaacgtgctgacctgccacgtgtgcctggacatctgcaacatcgaccccagctgcggcttcggcagctggagacccagcttcagagacagaagagccgccggcagcgacgtggacatcgacatggccttcatcctggacagcgccgagaccaccaccctgttccagttcaacgagatgaagaagtacatcgcctacctggtgagacagctggacatgagccccgaccccaaggccagccagcacttcgccagagtggccgtggtgcagcacgcccccagcgagagcgtggacaacgccagcatgccccccgtgaaggtggagttcagcctgaccgactacggcagcaaggagaagctggtggacttcctgagcagaggcatgacccagctgcagggcaccagagccctgggcagcgccatcgagtacaccatcgagaacgtgttcgagagcgcccccaaccccagagacctgaagatcgtggtgctgatgctgaccggcgaggtgcccgagcagcagctggaggaggcccagagagtgatcctgcaggccaagtgcaagggctacttcttcgtggtgctgggcatcggcagaaaggtgaacatcaaggaggtgtacaccttcgccagcgagcccaacgacgtgttcttcaagctggtggacaagagcaccgagctgaacgaggagcccctgatgagattcggcagactgctgcccagcttcgtgagcagcgagaacgccttctacctgagccccgacatcagaaagcagtgcgactggttccagggcgaccagcccaccaagaacctggtgaagttcggccacaagcaggtgaacgtgcccaacaacgtgaccagcagccccaccagcaaccccgtgaccaccaccaagcccgtgaccaccaccaagcccgtgaccaccaccaccaagcccgtgaccaccaccaccaagcccgtgaccatcatcaaccagcccagcgtgaagcccgccgccgccaagcccgcccccgccaagcccgtggccgccaagcccgtggccaccaagatggccaccgtgagaccccccgtggccgtgaagcccgccaccgccgccaagcccgtggccgccaagcccgccgccgtgagaccccccgccgccgccgccgccaagcccgtggccaccaagcccgaggtgcccagaccccaggccgccaagcccgccgccaccaagcccgccaccaccaagcccatggtgaagatgagcagagaggtgcaggtgttcgagatcaccgagaacagcgccaagctgcactgggagagagccgagccccccggcccctacttctacgacctgaccgtgaccagcgcccacgaccagagcctggtgctgaagcagaacctgaccgtgaccgacagagtgatcggcggcctgctggccggccagacctaccacgtggccgtggtgtgctacctgagaagccaggtgagagccacctaccacggcagcttcagcaccaagaagagccagcccccccccccccagcccgccagaagcgccagcagcagcaccatcaacctgatggtgagcaccgagcccctggccctgaccgagaccgacatctgcaagctgcccaaggacgagggcacctgcagagacttcatcctgaagtggtactacgaccccaacaccaagagctgcgccagattctggtacggcggctgcggcggcaacgagaacaagttcggcagccagaaggagtgcgagaaggtgtgcgcccccgtgctggccaagcccggcgtgatcagcgtgatgggcacctag

SEQ ID NO: 230643 - DNA, 7713 bp, Artificial Sequence
  derived and/or modified sequence
atgcggaaacacaggcatctccctcttgtggccgttttctgtctgtttttgtctggctttcctactacccacgcacagcaacagcaggccgttattgaagtgaataagcgtgatatcgtgttcttagtggacggcagctccgcactcggcctagctaactttaacgccatccgggactttattgcgaaggtgatccaacgtctggaaattggccaggacctgattcaagtagcggtagcacagtacgccgacacagtgcggcccgaattctatttcaatacccatcccacgaagcgcgaggtgattactgctgtgcgaaagatgaagccactggatggatctgccctgtatactggatcagctctcgacttcgtcagaaacaacctgttcacatcttcagcaggctaccgagcagccgaaggcatcccgaaactgctagtcctgatcacaggtggcaaaagcctggatgagatttcccagccggcacaagaattaaaaaggtcttccattatggccttcgccattgggaataagggcgcggatcaggctgagctagaggagattgcctttgactccagcctggtcttcatcccagcagaatttcgggccgcacccttacaggggatgctgcccggacttctcgcgcctttaagaactttgtccggaaccccagaggaaagcaagcgtgatatcctatttctctttgacggcagcgccaatctggtcggccagttccccgtagttcgcgactttctgtacaaaatcatagacgaactgaacgtcaagcctgaaggaaccaggattgccgtggcacaatacagcgacgacgttaaagtggagtcacgttttgacgagcatcaaagtaagccggaaattctcaatctcgtgaagcgcatgaagattaaaaccggcaaggctctgaatctgggatatgccctcgactacgcgcagaggtacatcttcgtgaagtctgccggatctcgaattgaagacggagtgctgcagtttttggtccttctcgtggccggaagatcttctgaccgcgtggatggacctgccagtaatctcaagcagagcggtgtggtgcccttcatttttcaggccaagaatgctgaccccgctgagttggagcagatcgttctgtccccagcttttatactcgcagccgagtcactccccaagatcggggacctgcatccccaaatagttaacctgctcaagtccgtccacaatggcgcccctgcccccgtgagtggtgaaaaggacgtggtattcctgctggatggtagtgaaggagtgagatccgggttcccactgctaaaagagtttgtgcaaagggtggtagaatcactggacgtcgggcaggaccgcgtgagggtggcagtggtacagtatagtgatcgtacccggcctgagttttatctaaattcctatatgaacaagcaggacgtcgtgaacgcggtgcggcagctcacgttgctgggcggacccaccccgaataccggcgccgcacttgagtttgtgctccgcaacattctcgtgagcagtgccggatcccgtatcacggaaggagtgccccagctattgatagtgctcacagctgaccgaagcggcgatgatgtgaggaacccgtcagtcgtggtgaaacggggcggtgccgtaccgatcgggattggtataggcaatgcagacataacagagatgcagaccatctcattcataccagatttcgcagttgcgatacccaccttccgacagctcggtacagtgcagcaagtgataagtgagcgggtaacgcagctcacacgtgaggagctctcaagactccagcccgtcctgcagcctcttcccagccccggcgtaggaggaaagagggatgtagtgtttctgattgacggcagccaatctgccggccccgaattccagtacgtgaggacgctcatagagagactggtggactatctggacgtgggcttcgacaccaccagggtggcagtgattcagttcagcgatgaccctaaggtggaatttctgctgaatgcacacagtagcaaggacgaagtacagaatgcagtgcaaagactacgccccaaaggcgggcgacagataaatgtgggcaatgccttggaatatgtgtcccgaaacattttcaaacgtccccttggctcgcgcatcgaagagggggttccacagtttctggtcctgatttccagcggtaagtccgacgatgaagtggatgacccagccgtagagctgaaacagtttggtgtggccccttttacgatcgcgaggaatgcagatcaagaggagttggttaagataagtttatctccagagtacgtgttcagcgtgtcaacttttcgcgaactgccgtccctggagcagaagctccttacgcctattaccaccctgacctccgaacaaatccaaaaactcctcgctagcacacggtaccctccccctgccgtcgaatcagatgcagcagacatcgtgttcctgattgacagctccgagggcgtcaggccggacggctttgctcacatcagggattttgtatctaggatagtgagacgactcaacataggtcctagtaaggtgcgggtgggagtcgtgcaattttctaacgatgtttttcctgaattctatctgaaaacttaccggtcacaagcacccgtccttgatgcaataagaaggttaaggttgagagggggaagccccttaaataccgggaaggccctggagttcgtggctcggaacctgtttgtgaagtccgcgggctcacgaattgaggacggtgtgccccagcatctggttcttgtgctcggcggtaaatcccaggacgacgtctcccggtttgcccaagttatccgctcctccggcatcgtgagcttgggcgtgggagaccggaatatcgaccgcacagaactccagactatcactaacgatcccagactggtttttacagttagagagttcagggaattgcccaatattgaagagaggatcatgaatagcttcggcccaagtgccgccactcctgcccctcctggagtggacacccccccaccgtcccgtcccgagaaaaaaaaggccgacattgtgttcctgctggacgggtccatcaatttccggagagactccttccaagaggttctgaggttcgtctccgagatcgtcgatacagtctatgaagatggcgatagtatccaagtgggactggtgcagtacaacagcgatcctaccgatgagttcttcctgaaagacttcagtacgaaaagacaaattattgatgctatcaacaaggtagtgtacaaaggaggacgccatgccaacaccaaggttggattggagcaccttagggttaatcactttgtgcccgaggccggttctaggctggaccagcgtgtgccccagattgcctttgttattacaggtggaaaatctgtggaagacgctcaggacgtgagcctcgccttgactcagcgcggagtcaaggtgtttgctgtcggtgtccgcaacattgatagcgaagaagtcggcaaaatcgctagtaacagtgccaccgcattcagagtcggaaacgttcaagagctgagtgagttgagcgagcaagtcctggaaacattgcacgatgctatgcacgaaacattatgccctggtgtgaccgacgcagcaaaggcttgtaaccttgacgtaattctgggatttgatgggtcaagggaccagaacgtgttcgtcgcccagaaaggctttgaatctaaagttgatgccatactcaaccggatcagccagatgcatcgcgtgtcatgttctggaggcagatcccctactgtgcgcgtgagtgttgtagcgaataccccgtctggcccagtggaggcttttgatttcgacgaataccaacctgagatgctggagaaattccgtaatatgaggtcccagcacccttatgtgttgaccgaggatactctcaaggtgtacttaaacaaattcagacagagcagtcccgattcagtgaaagtggtcattcacttcaccgacggagcagacggtgatctcgcagacttgcacagggccagtgagaatctccgccaggaaggggtgcgcgcactgatactcgtgggcctggagcgtgtagtgaacctcgaacgccttatgcacctggaatttgggaggggatttatgtatgatcgacccctgaggcttaatctcctcgatctggattacgaactggcggaacaactggacaacattgccgagaaagcttgttgtggcgtcccctgcaagtgtagtggccaacgaggagaccgtggacccatcgggtctataggcccaaaaggcattcccggagaggacgggtaccgtggttacccgggggatgagggtgggcctggcgagcgtggacccccaggtgtcaacggcacacagggctttcaggggtgtcccgggcaacgtggggtaaaggggtcgcgtgggttccctggcgagaaaggcgaggtgggggaaataggattggacggcctggacggggaggacggtgataaaggcttaccagggagtagtggtgagaaaggtaatcctgggcggagaggcgacaaagggcctcgtggcgagaaaggcgaaagaggtgacgttggaatccgcggcgatcccggaaatcctggccaggactcgcaggaacggggtcccaagggtgagactggtgatctcggaccaatgggtgttcccggtcgcgacggcgtgccaggagggccaggggaaaccggcaaaaatggaggcttcggccgaaggggcccgcccggcgccaaggggaacaaaggaggccccgggcaacccggcttcgaaggagaacaaggtacaagaggggctcagggacccgcgggtccagccgggcctcccggactcattggagagcaaggcatctctgggccacgagggagtggcggggctgccggcgcccccggagagcgtggacgcaccgggcctttaggtaggaaaggagaacccggtgagccaggcccaaagggggggattggaaatcgggggccccggggtgaaacaggggacgacgggagagacggcgtcggcagtgagggtagacgcggcaaaaaaggtgagaggggattccccggatatcccggacccaagggcaaccccggcgaacccggtttgaacggcaccacaggcccaaagggaatcagaggacggcggggaaattctggaccgcctggtattgtcggacagaagggagatcccggctaccctgggcctgctggcccaaagggcaatcgcggggacagcattgatcagtgtgctctgatacaaagcattaaggacaaatgtccttgctgttatgggcctctggaatgtcctgtcttcccaacagaacttgctttcgccctggatacgtctgaaggggtcaaccaggacaccttcggccgcatgcgggacgtagtattaagtatcgtgaacgaccttacaattgccgaatctaactgccctaggggagcgcgggtcgcggtcgtgacttataataatgaagtgactaccgaaatcaggttcgccgatagtaagcggaagtccgttctcttggataagatcaaaaatctgcaggtggctctgacatcaaaacagcaatctctcgagacagcaatgagcttcgtggcccgcaataccttcaagcgggtgaggaacggattcttgatgagaaaggttgccgtttttttcagcaacactcctacaagagcttctccccagcttagggaggccgtcttaaaattgtctgacgctggaatcacacccttgtttctaaccagacaggaggatcgtcaactgattaatgcactgcagattaataataccgccgtcggacacgcacttgttctgccagccggccgagacctgaccgacttcctagaaaacgtgctgacctgtcacgtctgcctggacatttgtaacatcgacccttcatgtggttttggcagctggcgaccatcatttagagaccggcgtgccgccggctcagacgtcgatatcgatatggctttcatcctagactctgccgagaccaccactctgtttcagtttaacgagatgaaaaagtatatagcctacttagtgcgacagttagacatgtcccccgatcctaaagcttcacagcacttcgctagagtggccgtcgtgcaacacgccccgtctgaatccgtcgacaacgcaagcatgcccccggtcaaggtggagttctctttgacagattatgggagcaaggaaaagctcgtcgactttctctcgcgagggatgacccagctgcaagggactagggcactgggcagtgctattgagtacacaatcgagaatgtctttgagagtgctcctaatccacgcgatctgaagatagtggtgctcatgcttactggggaggtgcctgaacagcaactcgaggaggcacaacgggtcattctgcaggcaaaatgtaagggctacttctttgtggtgctcggcatcgggagaaaagtgaacatcaaggaagtatacactttcgccagcgagcccaatgacgtcttctttaagttagttgataagtcaaccgaactgaatgaggagcctttgatgcgatttggacggctgctgccctctttcgtgagttcggagaacgctttctacttgagccctgacatcagaaagcagtgtgattggttccagggggaccagcccaccaagaacctcgtgaaattcggccacaaacaggtaaacgtaccaaacaatgtcaccagcagcccaactagtaaccctgtaaccactactaaacccgtgaccactactaaaccagtgacgacaaccacaaagccagtaaccaccaccacgaaacccgtgacaattatcaaccagcccagcgtgaagcccgccgctgcaaagcctgcccccgctaagcccgtggctgccaagccagtggcaactaagatggccacagttcgcccgcccgttgcggtcaaacctgccacggccgctaagcccgtggcagccaaacctgctgccgtcaggccacctgccgcagcagccgccaagcccgtagcgaccaagcccgaggtgccacggccccaggccgctaagccagcagccactaagcccgcaaccacaaagccaatggtgaagatgagccgcgaggtacaggtgtttgaaattaccgagaattccgccaaactgcactgggaacgagcggaaccgccaggtccctacttctatgatctgaccgttaccagcgcccatgaccagtcactggtgttgaaacagaacctcacagtgaccgacagagtgatcggcgggctccttgcggggcagacttaccacgttgcagtggtgtgttacctcaggtcacaagtccgagcaacgtaccatggctcgttctctacaaagaaatcccaacccccgccacctcagccagcaaggtcagctagctcgtccacgattaacctcatggtctccaccgagccgttggcacttacggaaacagacatctgcaagttgcctaaagacgagggtacatgcagagatttcattctgaaatggtattacgatccgaatacaaagtcctgtgccaggttctggtacggcgggtgtgggggtaacgagaataagtttggaagccagaaagaatgcgagaaggtctgtgctcctgttctggctaagcctggtgtgatcagcgtgatggggacttag

SEQ ID NO: 230644 - DNA, 8628 bp, Artificial Sequence
  derived and/or modified sequence
ccgttcagttctcctgggctccagcctcctgcaaggactgcaagagttttcctccgcagctctgagtctccacttttttggtggagaaaggctgcaaaaagaaaaagagacgcagtgagtgggaaaagtatgcatcctattcaaacctaattgaatcgaggagcccagggacacacgccttcaggtttgctcaggggttcatatttggtgcttagacaaattcaaaatgaggaaacatcggcacttgcccttagtggccgtcttttgcctctttctctcaggctttcctacaactcatgcccagcagcagcaagcagtcattgaagtcaacaagagagacatagtcttcctggtggatggctcatctgcactgggactggccaacttcaatgccatccgagacttcattgctaaagtcatccagaggctggaaatcggacaggatcttatccaggtggcagtggcccagtatgcagacactgtgaggcctgaattttatttcaatacccatccaacaaaaagggaagtcataaccgctgtgcggaaaatgaagcccctggacggctcggccctgtacacgggctctgctctagactttgttcgtaacaacctattcacgagttcagccggctaccgggctgccgaggggattcctaagcttttggtgctgatcacaggtggtaagtccctagatgaaatcagccagcctgcccaggagctgaagagaagcagcataatggcctttgccattgggaacaagggtgccgatcaggctgagctggaagagatcgctttcgactcctccctggtgttcatcccagctgagttccgagccgccccattgcaaggcatgctgcctggcttgctggcacctctcaggaccctctctggaacccctgaagagagcaagcgagacattctgttcctctttgacggctcagccaatcttgtgggccagttccctgttgtccgtgactttctctacaagattatcgatgagctcaatgtgaagccagaggggacccgaattgcggtggctcagtacagcgatgatgtcaaggtggagtcccgttttgatgagcaccagagtaagcctgagatcctgaatcttgtgaagagaatgaagatcaagacgggcaaagccctcaacctgggctacgcgctggactatgcacagaggtacatttttgtgaagtctgctggcagccggatcgaggatggagtgcttcagttcctggtgctgctggtcgcaggaaggtcatctgaccgtgtggatgggccagcaagtaacctgaagcagagtggggttgtgcctttcatcttccaagccaagaacgcagaccctgctgagttagagcagatcgtgctgtctccagcgtttatcctggctgcagagtcgcttcccaagattggagatcttcatccacagatagtgaatctcttaaaatcagtgcacaacggagcaccagcaccagtttcaggtgaaaaggacgtggtgtttctgcttgatggctctgagggcgtcaggagcggcttccctctgttgaaagagtttgtccagagagtggtggaaagcctggatgtgggccaggaccgggtccgcgtggccgtggtgcagtacagcgaccggaccaggcccgagttctacctgaattcatacatgaacaagcaggacgtcgtcaacgctgtccgccagctgaccctgctgggagggccgacccccaacaccggggccgccctggagtttgtcctgaggaacatcctggtcagctctgcgggaagcaggataacagaaggtgtgccccagctgctgatcgtcctcacggccgacaggtctggggatgatgtgcggaacccctccgtggtcgtgaagaggggtggggctgtgcccattggcattggcatcgggaacgctgacatcacagagatgcagaccatctccttcatcccggactttgccgtggccattcccacctttcgccagctggggaccgtccaacaggtcatctctgagagggtgacccagctcacccgcgaggagctgagcaggctgcagccggtgttgcagcctctaccgagcccaggtgttggtggcaagagggacgtggtctttctcatcgatgggtcccaaagtgccgggcctgagttccagtacgttcgcaccctcatagagaggctggttgactacctggacgtgggctttgacaccacccgggtggctgtcatccagttcagcgatgaccccaaggtggagttcctgctgaacgcccattccagcaaggatgaagtgcagaacgcggtgcagcggctgaggcccaagggagggcggcagatcaacgtgggcaatgccctggagtacgtgtccaggaacatcttcaagaggcccctggggagccgcattgaagagggcgtcccgcagttcctggtcctcatctcgtctggaaagtctgacgatgaggtggacgacccggcggtggagctcaagcagtttggcgtggcccctttcacgatcgccaggaacgcagaccaggaggagctggtgaagatctcgctgagccccgaatatgtgttctcggtgagcaccttccgggagctgcccagcctggagcagaaactgctgacgcccatcacgaccctgacctcagagcagatccagaagctcttagccagcactcgctatccacctccagcagttgagagtgatgctgcagacattgtctttctgatcgacagctctgagggagttaggccagatggctttgcacatattcgagattttgttagcaggattgttcgaagactcaacatcggccccagtaaagtgagagttggggtcgtgcagttcagcaatgatgtcttcccagaattctatctgaaaacctacagatcccaggccccggtgctggacgccatacggcgcctgaggctcagaggggggtccccactgaacactggcaaggctctcgaatttgtggcaagaaacctctttgttaagtctgcggggagtcgcatagaagacggggtgccccaacacctggtcctggtcctgggtggaaaatcccaggacgatgtgtccaggttcgcccaggtgatccgttcctcgggcattgtgagtttaggggtaggagaccggaacatcgacagaacagagctgcagaccatcaccaatgaccccagactggtcttcacagtgcgagagttcagagagcttcccaacatagaagaaagaatcatgaactcgtttggaccctccgcagccactcctgcacctccaggggtggacacccctcctccttcacggccagagaagaagaaagcagacattgtgttcctgttggatggttccatcaacttcaggagggacagtttccaggaagtgcttcgttttgtgtctgaaatagtggacacagtttatgaagatggcgactccatccaagtggggcttgtccagtacaactctgaccccactgacgaattcttcctgaaggacttctctaccaagaggcagattattgacgccatcaacaaagtggtctacaaagggggaagacacgccaacactaaggtgggccttgagcacctgcgggtaaaccactttgtgcctgaggcaggcagccgcctggaccagcgggtccctcagattgcctttgtgatcacgggaggaaagtcggtggaagatgcacaggatgtgagcctggccctcacccagaggggggtcaaagtgtttgctgttggagtgaggaatatcgactcggaggaggttggaaagatagcgtccaacagcgccacagcgttccgcgtgggcaacgtccaggagctgtccgaactgagcgagcaagttttggaaactttgcatgatgcgatgcatgaaaccctttgccctggtgtaactgatgctgccaaagcttgtaatctggatgtgattctggggtttgatggttctagagaccagaatgtttttgtggcccagaagggcttcgagtccaaggtggacgccatcttgaacagaatcagccagatgcacagggtcagctgcagcggtggccgctcgcccaccgtgcgtgtgtcagtggtggccaacacgccctcgggcccggtggaggcctttgactttgacgagtaccagccagagatgctcgagaagttccggaacatgcgcagccagcacccctacgtcctcacggaggacaccctgaaggtctacctgaacaagttcagacagtcctcgccggacagcgtgaaggtggtcattcattttactgatggagcagacggagatctggctgatttacacagagcatctgagaacctccgccaagaaggagtccgtgccttgatcctggtgggccttgaacgagtggtcaacttggagcggctaatgcatctggagtttgggcgagggtttatgtatgacaggcccctgaggcttaacttgctggacttggattatgaactagcggagcagcttgacaacattgccgagaaagcttgctgtggggttccctgcaagtgctctgggcagaggggagaccgcgggcccatcggcagcatcgggccaaagggtattcctggagaagacggctaccgaggctatcctggtgatgagggtggacccggtgagcgtggtccgcctggtgtgaacggcactcaaggtttccagggctgcccgggccagagaggagtaaagggctctcggggattcccaggagagaagggcgaagtaggagaaattggactggatggtctggatggtgaagatggagacaaaggattgcctggttcttctggagagaaagggaatcctggaagaaggggtgataaaggacctcgaggagagaaaggagaaagaggagatgttgggattcgaggggacccgggtaacccaggacaagacagccaggagagaggacccaaaggagaaaccggtgacctcggccccatgggtgtcccagggagagatggagtacctggaggacctggagaaactgggaagaatggtggctttggccgaaggggaccccccggagctaagggcaacaagggcggtcctggccagccgggctttgagggagagcaggggaccagaggtgcacagggcccagctggtcctgctggtcctccagggctgataggagaacaaggcatttctggacctcggggaagcggaggtgccgctggtgctcctggagaacgaggcagaaccggtccactgggaagaaagggtgagcccggagagccaggaccaaaaggaggaatcgggaaccggggccctcgtggggagacgggagatgacgggagagacggagttggcagtgaaggacgcagaggcaaaaaaggagaaagaggattccctggatacccaggaccaaagggtaacccaggtgaacctgggctaaatggaacaacaggacccaaaggcatcagaggccgaaggggaaattcgggacctccagggatagttggacagaagggagaccctggctacccaggaccagctggtcccaagggcaacaggggcgactccatcgatcaatgtgccctcatccaaagcatcaaagataaatgcccttgctgttacgggcccctggagtgccccgtcttcccaacagaactagcctttgctttagacacctctgagggagtcaaccaagacactttcggccggatgcgagatgtggtcttgagtattgtgaatgacctgaccattgctgagagcaactgcccacggggggcccgggtggctgtggtcacctacaacaacgaggtgaccacggagatccggtttgctgactccaagaggaagtcggtcctcctggacaagattaagaaccttcaggtggctctgacatccaaacagcagagtctggagactgccatgtcgtttgtggccaggaacacatttaagcgtgtgaggaacggattcctaatgaggaaagtggctgttttcttcagcaacacacccacaagagcatccccacagctcagagaggctgtgctcaagctctcagatgcggggatcacccccttgttccttacaaggcaggaagaccggcagctcatcaacgctttgcagatcaataacacagcagtggggcatgcgcttgtcctgcctgcagggagagacctcacagacttcctggagaatgtcctcacgtgtcatgtttgcttggacatctgcaacatcgacccatcctgtggatttggcagttggaggccttccttcagggacaggagagcggcagggagcgatgtggacatcgacatggctttcatcttagacagcgctgagaccaccaccctgttccagttcaatgagatgaagaagtacatagcgtacctggtcagacaactggacatgagcccagatcccaaggcctcccagcacttcgccagagtggcagttgtgcagcacgcgccctctgagtccgtggacaatgccagcatgccacctgtgaaggtggaattctccctgactgactatggctccaaggagaagctggtggacttcctcagcaggggaatgacacagttgcagggaaccagggccttaggcagtgccattgaatacaccatagagaatgtctttgaaagtgccccaaacccacgggacctgaaaattgtggtcctgatgctgacgggcgaggtgccggagcagcagctggaggaggcccagagagtcatcctgcaggccaaatgcaagggctacttcttcgtggtcctgggcattggcaggaaggtgaacatcaaggaggtatacaccttcgccagtgagccaaacgacgtcttcttcaaattagtggacaagtccaccgagctcaacgaggagcctttgatgcgcttcgggaggctgttgccatccttcgtcagcagtgaaaatgctttttacttgtccccagatatcaggaaacagtgtgattggttccaaggggaccaacccacaaagaaccttgtgaagtttggtcacaaacaagtaaatgttccgaataacgttacttcaagtcctacatccaacccagtgacgacaacgaagccggtgactacgacgaagccggtgaccaccacaacaaagcctgtaaccaccacaacaaagcctgtgactattataaatcagccatctgtgaagccagccgctgcaaagccggcccctgcgaaacctgtggctgccaagcctgtggccacaaagatggccactgttagacccccagtggcggtgaagccagcaacggcagcgaagcctgtagcagcaaagccagcagctgtaagaccccccgctgctgctgctgcaaaaccagtggcgaccaagcctgaggtccctaggccacaggcagccaaaccagctgccaccaagccagccaccactaagcccatggttaagatgtcccgtgaagtccaggtgtttgagataacagagaacagcgccaaactccactgggagagggctgagccccccggtccttatttttatgacctcaccgtcacctcagcccatgatcagtccctggttctgaagcagaacctcacggtcacggaccgcgtcattggaggcctgctcgctgggcagacataccatgtggctgtggtctgctacctgaggtctcaggtcagagccacctaccacggaagtttcagtacaaagaaatctcagcccccacctccacagccagcaaggtcagcttctagttcaaccatcaatctaatggtgagcacagaaccattggctctcactgaaacagatatatgcaagttgccgaaagacgaaggaacttgcagggatttcatattaaaatggtactatgatccaaacaccaaaagctgtgcaagattctggtatggaggttgtggtggaaacgaaaacaaatttggatcacagaaagaatgtgaaaaggtttgcgctcctgtgctcgccaaacccggagtcatcagtgtgatgggaacctaagcgtgggtggccaacatcatatacctcttgaagaagaaggagtcagccatcgccaacttgtctctgtagaagctccgggtgtagattcccttgcactgtatcatttcatgctttgatttacactcgaactcgggagggaacatcctgctgcatgacctatcagtatggtgctaatgtgtctgtggaccctcgctctctgtctccaggcagttctctcgaatactttgaatgttgtgtaacagttagccactgctggtgtttatgtgaacattcctatcaatccaaattccctctggagtttcatgttatgcctgttgcaggcaaatgtaaagtctagaaaataatgcaaatgtcacggctactctatatacttttgcttggttcattttttttcccttttagttaagcatgactttagatgggaagcctgtgtatcgtggagaaacaagagaccaactttttcattccctgcccccaatttcccagactagatttcaagctaattttctttttctgaagcctctaacaaatgatctagttcagaaggaagcaaaatcccttaatctatgtgcaccgttgggaccaatgccttaattaaagaatttaaaaaagttgtaatagagaatatttttggcattcctctaatgttgtgtgttttttttttgtgtgtgctggagggaggggattta

SEQ ID NO: 230645 - DNA, 7713 bp, Artificial Sequence
  derived and/or modified sequence
atgaggaagcaccgccacctgcccctggtggccgtgttctgcctcttcctgagcggcttccccaccacccacgcccagcagcagcaggccgtcatcgaggtgaacaagagggacatcgtgttcctggtggatggcagcagcgccctgggcctggccaacttcaatgccatccgggacttcatcgccaaggtgatccagaggctggagatcggccaggacctgatccaggtggccgtggcccagtatgctgacacagtgcggcctgagttctacttcaacacccaccccaccaagcgggaggtgatcacagctgtgaggaagatgaagcccctggatggcagcgccctgtacacaggcagcgccctggactttgtgaggaacaacctcttcaccagcagcgctggctacagagctgctgagggcatccccaagctgctggtgctgatcaccggcggcaagagcctggatgagatcagccagcctgcccaggagctgaagaggagcagcatcatggcctttgccatcggcaacaagggagctgaccaggccgagctggaggagatcgcctttgacagcagcctggtgttcatcccagctgagttccgggccgcccccctgcagggcatgctgcccggcctgctggcccccctgcggaccctgagcggcaccccagaggagagcaagagggacatcctcttcctgtttgatggcagcgccaacctggtgggccagtttcctgtggtgcgggacttcctgtacaagatcattgatgagctgaatgtgaagccagagggcaccagaattgctgtggcccagtacagtgatgatgtgaaggtggagagcagatttgatgagcaccagagcaagccagagatcctgaacctggtgaagaggatgaagatcaagacaggcaaggccctgaacctgggctacgccctggactatgcccagcgctacatctttgtgaagtctgctggcagcagaattgaagatggagtgctgcagttcctggtgctgctggtggccggccgcagcagtgacagagtggatggccctgccagcaacctgaagcagagcggcgtggtgcccttcatcttccaggccaagaatgctgaccctgctgagctggagcagatcgtgctgagccctgccttcatcctggccgctgagagcctgcccaagattggagacctgcacccccagatcgtgaacctgctgaagtctgtgcacaatggagccccagcccctgtgtctggagagaaggatgtggtgttcctgctggatggcagcgagggcgtgcgcagcggcttccccctgctgaaggagtttgtgcagagggtggtggagagcctggatgtgggccaggacagagtgcgggtggccgtggtgcagtacagcgacaggaccaggcctgagttctacctgaacagctacatgaacaagcaggatgtggtgaatgctgtgcggcagctgaccctgctgggcggccccacccccaacacaggagctgccctggagtttgtgctgaggaacatcctggtgagcagcgctggcagccgcatcacagagggcgtgccccagctgctgattgtgctgacagctgacagaagtggagatgatgtgaggaaccccagcgtggtggtgaagagaggaggagctgtgcccatcggcatcggcattggaaatgctgacatcacagagatgcagaccatctccttcatcccagactttgctgtggccatccccaccttccggcagctgggcaccgtgcagcaggtgatcagcgagcgggtgacccagctgacccgggaggagctgagccggctgcagcctgtgctgcagcccctgcccagccctggggtgggcggcaagagagatgtggtgttcctgattgatggcagccagagcgctggccctgagttccagtatgtgaggaccctcatcgagcggctggtggactacctggatgtgggctttgacaccaccagggtggccgtcatccagttcagtgatgaccccaaggtggagttcctgctgaatgcccacagcagcaaggatgaggtgcagaatgctgtgcagaggctgcggcccaagggcggccggcagatcaacgtgggcaatgccctggagtatgtgtccaggaacatcttcaagaggcccctgggcagcagaattgaggagggcgtgccccagttcctggtgctgatcagcagcggcaagagtgatgatgaggtggatgatcctgctgtggagctgaagcagtttggagtggcccccttcaccatcgccagaaatgctgaccaggaggagctggtgaagatcagcctgagcccagaatatgtgttttctgtgtccaccttccgggagctgcccagcctggagcagaagctgctgacccccatcaccaccctgaccagcgagcagatccagaagctgctggccagcacccgctacccacctcctgctgtggagagtgatgctgctgacatcgtgttcctgattgacagcagcgagggcgtgcggccagatggctttgcccacatccgggactttgtgtccagaattgtgcggcggctgaacatcggccccagcaaggtgcgggtgggcgtggtgcagttcagcaatgatgtgtttcctgagttctacctgaagacctaccgcagccaggcccctgtgctggatgccatccggcggctgcggctgcggggcggcagccccctgaacacaggcaaggccctggagtttgtggccaggaacctgtttgtgaagtctgctggcagcagaattgaagatggagtgccccagcacctggtgctggtgctgggcggcaagagccaggatgatgtgtccagatttgcccaggtgatccgcagcagcggcatcgtgtccctgggcgtgggggacagaaatattgacagaacagagctgcagaccatcaccaatgacccccggctggtgttcaccgtgcgggagttccgggagctgcccaacatcgaggagcgcatcatgaacagctttggccccagcgctgccaccccagcccctcctggggtggacaccccaccacccagcaggcctgagaagaagaaggctgacatcgtgttcctgctggatggcagcatcaacttccggcgggacagcttccaggaggtgctgcgctttgtgtctgagatcgtggacacagtgtatgaagatggagacagcatccaggtgggcctggtgcagtacaacagcgaccccacagatgagttcttcctgaaggacttcagcaccaagaggcagatcattgatgccatcaacaaggtggtgtacaagggcggcagacatgccaacaccaaggtgggcctggagcacctgcgggtgaaccactttgtgcctgaggccggcagccggctggaccagagggtgccccagatcgcctttgtgatcaccggcggcaagtctgtggaggatgcccaggatgtgtccctggccctgacccagaggggcgtgaaggtgtttgctgtgggcgtgaggaacatcgacagcgaggaggtgggcaagatcgccagcaacagcgccacagccttccgggtgggcaatgtgcaggagctgtctgagctgtctgagcaggtgctggagaccctgcatgatgccatgcatgagaccctgtgccctggggtgacagatgctgccaaggcctgcaacctggatgtgatcctgggctttgatggcagccgggaccagaatgtgtttgtggcccagaagggctttgagagcaaggtggatgccatcctgaaccgcatcagccagatgcaccgggtgtcctgcagcggcggccgcagccccaccgtgcgggtgtctgtggtggccaacacccccagcggccctgtggaggcctttgattttgatgagtaccagcctgagatgctggagaagttcaggaacatgaggagccagcacccctacgtgctgacagaggacaccctgaaggtgtacctgaacaagttccggcagagcagcccagattctgtgaaggtggtgatccacttcacagatggagcagatggagacctggccgacctgcaccgggccagcgagaacctgcggcaggagggcgtgcgggccctgatcctggtgggcctggagcgggtggtgaacctggagcggctgatgcacctggagtttggccggggcttcatgtatgaccggcccctgcggctgaacctgctggacctggactatgagctggccgagcagctggacaacattgctgagaaggcctgctgcggcgtgccctgcaagtgcagcggccagagaggagaccggggccccatcggcagcatcggccccaagggcatccctggagaagatggctaccggggctacccaggagatgaaggaggccctggagagcggggccccccaggagtgaatggcacccagggcttccagggctgccccggccagaggggcgtgaagggcagccggggcttccctggagagaagggggaggtgggggagatcggcctggatggcctggatggagaagatggagacaagggcctgcccggcagcagcggggagaagggcaaccctggccggcggggggacaagggccccagaggagagaagggggagagaggagatgtgggcatccggggggaccccggcaaccctggccaggacagccaggagcggggccccaagggggagaccggggacctgggccccatgggcgtgcccggcagagatggagtgcctgggggccctggagaaacaggcaagaatggaggctttggaagaagaggccccccaggggccaagggcaacaagggcggccctggccagcccggctttgaaggagagcagggcaccaggggggcccagggccctgctggccctgctggccccccaggcctgattggagagcagggcatcagcggcccccggggcagcggcggggccgccggggcccctggagagcggggccgcacaggccccctgggcaggaaaggagagcccggggagcccggccccaagggcggcatcggcaacagaggccccagaggagaaacaggagatgatggaagagatggagtgggcagcgagggcagaagaggcaagaagggggagcggggcttccctggctacccaggccccaagggcaaccctggagagcccggcctgaatggcaccaccggccccaagggcatccggggcagaagaggcaacagcggccccccaggcatcgtgggccagaagggggaccccggctacccaggccctgctggccccaagggcaacagaggagacagcattgaccagtgtgccctgatccagagcatcaaggacaagtgcccctgctgctacggccccctggagtgccctgtgttccccacagagctggcctttgccctggacaccagcgagggcgtgaaccaggacacctttggaaggatgagagatgtggtgctgagcatcgtgaatgacctgaccatcgccgagagcaactgccccaggggggcccgggtggccgtggtgacctacaacaatgaggtgaccacagagatccgctttgctgacagcaagaggaagtctgtgctgctggacaagatcaagaacctgcaggtggccctgaccagcaagcagcagagcctggagacagccatgagctttgtggccaggaacaccttcaagagggtgagaaatggcttcctgatgaggaaggtggccgtgttcttcagcaacacccccacccgggccagcccccagctgcgggaggccgtgctgaagctgagtgatgctggcatcacccccctcttcctgacccggcaggaggaccggcagctgatcaatgccctgcagatcaacaacacagctgtgggccacgccctggtgctgcctgctggccgggacctgacagacttcctggagaatgtgctgacctgccacgtgtgcctggacatctgcaacatcgaccccagctgtggcttcggctcctggaggcccagcttccgggaccggcgggctgctggcagtgatgtggacatcgacatggccttcatcctggacagcgctgagaccaccaccctcttccagttcaatgagatgaagaagtacatcgcctacctggtgcggcagctggacatgagcccagaccccaaggccagccagcactttgcccgggtggccgtggtgcagcacgcccccagcgagagcgtggacaatgcctccatgcctcctgtgaaggtggagttcagcctgacagattatggcagcaaggagaagctggtggacttcctgagccggggcatgacccagctgcagggcacccgggccctgggcagcgccatcgagtacaccattgaaaatgtgtttgagagcgcccccaacccccgggacctgaagatcgtggtgctgatgctgactggagaggtgcctgagcagcagctggaggaggcccagagggtcatcctgcaggccaagtgcaagggctacttctttgtggtgctgggcattggaaggaaggtgaacatcaaggaggtgtacacctttgccagcgagcccaatgatgtgttcttcaagctggtggacaagagcacagagctgaatgaggagcccctgatgagatttggccgcctgctgcccagctttgtgtccagtgaaaatgccttctacctgagcccagacatcaggaagcagtgtgactggttccagggcgaccagcccaccaagaacctggtgaagtttggccacaagcaggtgaatgtgcccaacaacgtgaccagcagccccaccagcaaccctgtgaccaccaccaagcctgtgaccaccaccaagcctgtgaccaccaccaccaagcctgtgaccaccaccaccaagcctgtgaccatcatcaaccagcccagcgtgaagccagctgctgccaagccagccccagccaagcctgtggccgccaagcctgtggccaccaagatggccaccgtgcggccccctgtggccgtgaagccagccacagctgccaagcctgtggccgccaagccagctgctgtgcggcccccagctgctgctgctgccaagcctgtggccaccaagccagaggtgccccggccccaggccgccaagccagctgccaccaagccagccaccaccaagcccatggtgaagatgagccgggaggtgcaggtgtttgagatcacagaaaattctgccaagctgcactgggagagagctgagcccccaggcccctacttctatgacctgactgtgaccagcgcccatgaccagagcctggtgctgaagcagaacctgactgtgacagacagagtcatcggcggcctgctggccggccagacctaccacgtggccgtggtgtgctacctgcggagccaggtgcgggccacctaccacggcagcttcagcaccaagaagagccagcccccaccaccccagcctgcccggagcgccagcagcagcaccatcaacctgatggtgtccacagagcccctggccctgacagaaacagacatctgcaagctgcccaaggatgagggcacctgccgggacttcatcctgaagtggtactatgaccccaacaccaagagctgtgcccgcttctggtatggaggctgcggcggcaatgaaaacaagtttggcagccagaaggaatgtgagaaggtgtgtgcccctgtgctggccaagccaggagtcatctctgtgatgggcacctag

SEQ ID NO: 230646 - DNA, 7713 bp, Artificial Sequence
  derived and/or modified sequence
atgcggaagcaccggcacctgcccctggtggccgtgttctgcctgttcctgagcgggttccccacaacccatgcacagcagcagcaggccgttattgaagtgaataagcgggatattgtgttccttgtggacggttccagcgcactgggcttagcaaatttcaatgccatcagggacttcattgcaaaagttatccagcggcttgagatcgggcaggacttgatccaagtggctgttgctcagtatgctgataccgtgcgacccgagttttactttaacactcacccaaccaagagggaggtgatcaccgctgtgcggaagatgaaacctctcgacgggtccgccctctacacaggatccgccctcgacttcgtgagaaacaatctgtttacgtctagcgccgggtaccgggccgccgaaggcatccccaaactgcttgtactgattaccggggggaagtcactggatgaaatttctcagcctgcacaggaactgaagcgcagcagtatcatggcgttcgcaattggcaacaagggggcggatcaggcggagcttgaggagatcgccttcgactcctcacttgtgtttatcccagccgaattccgtgccgctccattgcagggcatgctccctggcctgttggcacccctgaggacactctccggaacaccagaggaaagcaaacgagatatcttattcctcttcgacgggtccgccaacctggtgggtcagtttccagtcgtccgagatttcctctacaagatcatcgacgagttgaatgtcaagccagaaggcactcgcatagccgtggcacagtattccgatgacgtgaaggtggagagcagattcgatgaacaccagagtaaaccggaaattttgaacctggtgaagaggatgaagattaagacaggaaaggctttaaatctaggatacgctctcgactatgcccagagatacatttttgtgaagtcagccggctcacgtattgaagatggggtgttgcagttccttgtgctgctggttgcggggcgaagcagtgacagggtagatggacctgccagcaatctgaaacaaagcggtgtggtaccgttcatcttccaggcgaagaacgcagacccagctgagttggagcaaatagtgctgtcaccagcttttatcctcgccgctgagagtctgcctaagattggcgatctacatcctcaaatagtcaacctgctcaaatcagtgcataatggggccccagcccccgtgtctggggagaaggacgtggtctttttgttggacggatctgagggggtgaggtccggcttcccactgctgaaggagttcgttcagagagtggtggaatcactggacgtcggtcaagacagggttagggtggccgtcgtgcagtacagcgaccgtacgcgaccggaattctatctgaacagctacatgaataaacaggatgtggtcaacgctgtccgtcagctcactctgctagggggccctactccaaatacaggtgcagccctcgaatttgtgcttaggaatatcctcgtgagtagcgcggggtccaggattaccgaaggcgtgcctcaactcttgatcgtgctgacagccgacaggagtggtgacgatgtcagaaatccgtccgtggtagtcaagcgtggcggcgccgtgcctatcggcattggcatcggcaacgcagacataacggagatgcagacaatatcctttatacctgatttcgccgtagcaatacccaccttccggcaattgggaaccgtgcaacaggttattagcgagcgcgtgactcagctcacccgggaggaactgtctcggttacagcctgtcctccagcctctcccttctccaggggtgggaggaaaaagagacgttgtcttcttaatcgacggatcacagtcagcaggacctgaatttcagtacgtccgcaccctgattgagagactggtggattacctagacgtcggatttgacaccactcgggttgcagtaatccagttcagcgatgaccctaaagtggaatttcttctaaatgcacattcaagtaaggacgaagtacagaacgcagtacaaaggctgcgccctaagggaggaaggcagatcaatgtcgggaacgcgctcgagtacgttagtcgtaatatcttcaagagaccactgggcagtcgaatcgaggagggagtgccacagttcctggtcttgataagctctgggaagtctgacgatgaggtagacgatccagctgtcgagttgaagcaattcggtgtggccccattcaccatcgcaagaaacgctgatcaagaagagctggttaaaatttcacttagtcctgagtatgtcttttctgtgagtacgtttcgcgagcttccatctcttgagcaaaagttgttgacgcctattacaacccttacctctgagcaaatccagaaactgctagcatcaaccagatatccccctcctgcagtcgaatccgatgctgccgatatagttttcctgatagactcttctgaaggtgtacgtccagatggttttgcccatatcagggatttcgtaagcagaatcgttaggagacttaacataggcccctcaaaggtgcgcgttggcgttgttcagttttccaacgacgtcttccctgaattttatctgaaaacgtacagaagccaggcaccggtccttgacgctattagacgcctgcgcctgcgcggtggctctccgctgaatactggcaaagccttggaatttgtcgctcgcaacttgttcgtcaagtcggccggtagtaggattgaggacggggtgccccagcatctcgtgctggtactcgggggcaagagtcaggacgacgtgtcaaggtttgctcaggttatccggtctagcggcattgtttctttaggtgttggcgaccgcaacatcgacagaacggaattacagaccatcacaaacgatccgagactcgttttcacagtcagagagtttcgagagctccccaacatcgaggaaaggatcatgaattcgttcggaccatcagcagccacgccggcgcccccgggagttgacacgcctccgcccagcaggccagaaaagaagaaggctgacatagtgtttctcctggatgggtccatcaactttagacgggatagttttcaggaggtgctgcggttcgtgtctgagatagttgacaccgtgtatgaagatggggattcaatccaagtcggcctagttcagtataatagtgatcctaccgatgaattcttcctgaaagacttcagtacaaagcggcagatcatcgatgccattaacaaagtggtgtacaagggcggtcgtcacgccaacactaaagtgggcctggaacacctgcgggtgaaccatttcgtccctgaggccggcagtagattagaccagcgagtaccccagatcgccttcgtgattacgggcggaaagagcgtggaagacgctcaagacgtttcgctggccctgacgcagcgaggggtcaaggtcttcgcagtgggcgtgcggaatatcgattcagaggaggtgggcaagattgcttcaaactctgctaccgctttccgggttggaaacgtgcaggagttgagtgagctgtcagagcaggtgttggagaccctgcacgatgcgatgcacgagaccctgtgtccgggcgttacggacgccgccaaggcctgtaacttggatgtgattctgggatttgacggcagccgagaccaaaatgtattcgttgctcagaaagggttcgagagcaaggtcgatgcaattctgaacaggatttcccagatgcacagagtcagctgcagcggcgggcggagccctacagtgcgggtgtccgtggtcgccaataccccgagcggtcccgtggaagcattcgactttgacgagtatcagcccgagatgttggagaagttccgcaacatgcgatctcaacacccatatgtgctcacagaggataccctgaaggtctatctgaacaagtttcgccagtctagccccgactccgtcaaagtcgtgatacatttcaccgatggagccgacggcgaccttgcagatctgcatcgcgcctccgaaaaccttcgacaagagggtgtccgtgcacttatccttgtgggactcgaacgggtagtgaacctcgaaagattaatgcatctcgagttcggccgcggtttcatgtatgacagaccactccgcctgaacctgctcgacctagattacgaactcgccgagcagttagacaacatcgcagaaaaagcctgctgcggtgtgccttgtaagtgtagcgggcagcgcggcgatcgggggccaataggttccatcggacccaaagggattccaggggaagacggctacagaggctatcccggcgacgaaggtgggcccggggaacgcggacctccaggcgtgaacggaacccagggattccagggctgccccgggcagcggggcgtgaaggggtccaggggttttcctggggagaagggagaagtgggagaaattggactcgatggcttggatggggaggacggcgataaaggtctgcctgggtcttcaggtgaaaaggggaacccaggtagacgcggggataagggcccccgaggcgagaaaggcgaacgcggcgatgtcgggatacgcggtgaccccggtaatcccggacaagatagccaagagaggggccccaaaggcgagacgggggaccttgggcctatgggagtgcccgggcgtgatggtgtcccaggaggacccggggagactggcaaaaatggcgggttcggtcgcagggggccacctggcgccaaagggaacaagggcgggccaggtcagcccgggtttgagggggagcaaggaacacgtggagcacaaggacccgcgggaccagcgggaccaccagggctgattggcgagcaaggcatttcaggccctagaggtagcgggggggcggcaggagctccaggggaaagaggaagaacaggcccccttggccgaaaaggcgagcctggagaaccggggccgaaagggggaattggcaacaggggtccgagaggcgaaactggtgacgatggccgtgacggggttggaagtgagggtcggagggggaagaagggagaacgcggctttcccggatatccaggccccaagggaaatcccggagagcccggccttaacggcacgacggggccaaagggcattcggggtcgacgcggcaactcgggcccacctggcatcgtgggtcagaaaggcgacccgggataccccggtcctgctggtcccaaggggaatcggggggatagcatcgaccagtgcgccctcatacaaagcatcaaagacaagtgcccttgctgctacgggccactcgagtgtccggtgtttcccactgagttggccttcgcattagatacaagtgaaggggtgaatcaagatacatttggccggatgcgcgatgtcgtcctgagcatcgtgaacgacttaacgattgcggagagcaactgtcctagaggagccagggtggccgtggttacatataataacgaagtgactaccgaaatccggttcgcggacagtaagagaaagagtgtcttgttagacaaaatcaaaaacctgcaagtggctctgacctctaaacagcagtccctggaaaccgcaatgtctttcgtggctcgtaatacgttcaagagggtgagaaatggctttttgatgcggaaagtggctgtattcttttccaacacgccaacccgcgcgagcccacagctgcgggaggccgtgttgaaactgagcgacgccggcattaccccattatttttgacccgccaggaagatcgccagctaatcaacgccctgcagattaataatacggccgtggggcacgcactggtacttcccgcagggagggacttgaccgattttctcgagaatgtccttacatgtcatgtatgtctagacatttgtaacatagacccatcatgtgggtttggaagctggaggccctctttcagggaccggagagctgccgggtccgatgtcgacatcgatatggccttcatcttggatagcgctgaaacaactactttgttccagtttaatgagatgaagaaatacattgcttatcttgttcgtcaactagacatgtccccagaccccaaggctagccaacacttcgctcgcgttgccgttgtgcagcatgccccctctgaatcagttgacaatgcgtcaatgccgcctgtgaaagtggaattcagtttaaccgactatggttccaaggagaaactggtcgacttcctatcacggggcatgactcaattacagggcacgcgcgcactgggaagcgccattgaatatactattgagaacgtttttgagtctgctccaaacccgagagacctcaagatagttgtcctgatgctgacaggagaagttccagagcaacaactggaggaggcccagcgagtgatccttcaagcaaagtgcaagggctacttcttcgtggtgcttggaattggccggaaggtgaatatcaaagaggtctataccttcgcttccgagcctaatgatgtttttttcaagctcgtcgacaaaagcaccgagcttaatgaggagccactgatgcggtttggacgcctattgccgtctttcgtgtctagcgaaaatgctttctacctcagcccggatatcagaaagcagtgcgattggttccagggcgatcagccgacaaagaatctggtcaagttcgggcataagcaggtgaacgtccccaacaatgtgacgagttcccctacgagcaaccctgtgacgactacaaagcccgtcacgacgaccaaacctgttacgaccacgaccaaacccgttactaccacaactaaaccagttacaatcatcaatcaaccgtccgtgaaacccgctgccgccaagccagcccctgccaaacccgttgccgccaagccagtcgctactaagatggctaccgtgaggcctccagtggccgtcaagcccgcgacagcagcaaagccggtggccgccaagccggctgccgtccgccctcctgccgcagctgcagctaagcctgtggcaacaaagcctgaagtccctcgtcctcaggccgctaagcctgccgccaccaaaccagccacaaccaaacctatggtgaagatgagtcgagaggtccaggtatttgaaatcacagagaacagcgctaaactgcattgggaaagagcagaacctccaggcccttacttctatgacctcactgttacaagcgcccacgatcagtcccttgttctcaagcagaacctgactgtgacggatagagtgatcggtggactgcttgcaggacaaacataccatgtggccgtggtctgttatttaagaagccaggtgcgcgccacataccacggatcattctccacgaagaagagccagccccctcccccccagcccgcaaggagcgcgagttccagcaccataaatctaatggtgtcaaccgagcctcttgcattaacagaaaccgatatctgcaagcttcccaaagacgagggaacctgccgcgattttattctcaaatggtattacgacccaaataccaaaagctgcgcacgcttctggtatggaggctgtggtggaaacgagaataaattcggctctcagaaggaatgtgagaaggtgtgtgcccccgtactggcaaaacccggagttatctctgtgatgggcacctag

SEQ ID NO: 230647 - DNA, 7712 bp, Artificial Sequence
  derived and/or modified sequence
atgcggaagcaccggcacctgccactggtggcggtgttttgcttgttcttaagcggttttcctaccactcacgcacagcagcagcaggccgtcattgaggttaataagcgcgacatcgtgtttctcgtggatggctcctccgcacttgggctggccaacttcaacgccattagagactttatcgccaaagtgatccagcgcctcgagatcgggcaggaccttatccaggtggcggtcgctcagtatgccgatacagtgaggcccgagttttattttaatacacaccccacaaaacgagaagtcatcactgccgtgagaaagatgaaacccttagatggaagcgcgctttacacagggtcagcactggactttgtgaggaataacctattcacgtcttcagccggttaccgcgcagccgaaggtattccgaagctgctggttttgataaccggaggtaaatccttggatgagatcagccagccagcgcaggagcttaaaaggagctctataatggcgtttgccatcggcaacaagggtgcagaccaggcggagctggaggagatagcattcgattcctccctggtgttcattccggctgaattccgagctgcccctctgcaaggtatgctgccgggtctgctggcccctctccgcaccctgagcggaacgcccgaggaatccaaacgggatatcctcttcctgtttgatggctctgccaatctggtagggcagttcccggtggtgagggacttcctgtataaaataatcgatgagctgaatgtgaagcccgagggcactcggattgccgtggcccagtattctgacgatgtgaaagttgagtctaggtttgacgagcaccagagcaaacccgagatactgaatcttgtcaagcggatgaagataaagacagggaaggctctgaatctgggttacgcccttgactatgcccagaggtacatattcgtgaagtctgctgggagccgcattgaggacggtgtgctccagtttctcgtcctgttagtcgcaggccgaagctccgatcgggttgacggccctgcctcaaatcttaaacaaagcggagtcgttccctttatattccaagcgaaaaatgccgacccagcagagttggagcagatcgtgctgtcccctgctttcattctggcagcagaaagcctcccaaagatcggagaccttcatccccaaattgttaaccttctaaagagtgtgcacaatggtgcacctgcacccgtcagcggggagaaagatgttgtgttccttctggacgggtctgagggggtcaggtcaggttttcccctgctgaaagagttcgtccagagggtggtcgaatcacttgatgtaggccaggaccgggtccgtgttgcagtcgtccagtacagtgatcggacgcgccctgagttctatctgaactcgtatatgaacaaacaagacgtggtgaatgctgtacgtcagctaaccttgttaggcggaccaaccccgaacacaggggctgctctggaattcgttttgaggaacattcttgtgtcttctgctggaagtaggatcacagagggcgttccacaactgttgatcgtgctgaccgccgaccgctctggtgatgacgtgcgcaatccaagtgtggtggtgaagcggggaggagccgtgccgatagggattggaatcggtaacgctgacattaccgaaatgcagactatcagctttatccccgatttcgctgtggccatacccactttccggcaactcgggaccgtgcagcaagtaatctctgaaagagtgacacagttaaccagagaagagctgtctcgcttgcagccggttcttcagccgttgccatctccaggggtcggtgggaagcgagatgtggtatttctgatcgacggcagccagagtgctgggccagaatttcaatacgtaaggacgctaatcgagaggctcgtggactatctggatgttggatttgacacaacacgagttgctgtaatacaattcagcgatgatccaaaagtagaatttctgctgaacgctcacagtagcaaggatgaagttcaaaacgcggtacagcgcctgaggcccaagggcggacggcagataaacgtcggaaatgcactcgagtacgtgagccgcaacatcttcaagcgtcctctgggcagcagaatagaggaaggcgtaccacagttccttgtgcttatttcgagcggcaaaagtgacgatgaggtggacgatccagccgtggagctcaagcaatttggagttgcacccttcaccatcgccagaaacgctgatcaggaggaactggttaaaatctctttatcccccgaatacgtctttagtgtcagtacttttcgcgagctgccctcgctagagcagaagctgcttactcctattaccactttgacttccgagcagatacaaaaactccttgccagtactaggtacccacctcctgccgtggaaagcgatgccgcagacatcgtgttcctcatcgacagctccgaaggggtacggcctgatgggttcgcccatatccgcgacttcgtgagccggattgttcggagattaaatattggaccctccaaggtgagagtgggcgttgtgcaatttagcaacgatgtgtttcccgagttttatcttaagacatatcggagtcaagctcccgtgctggacgccataagacgactgcgcctgcgcggagggtctccacttaacacaggtaaagctctggagttcgtggcaagaaacctgtttgtcaagtcagccggatctcgaattgaggacggggttcctcagcacctggttctagtgttgggcggaaaaagtcaggacgacgtaagccgattcgcccaggtgattcgaagtagtggcattgtatccctgggagtcggcgaccgcaacatagaccgtacggaacttcagaccataaccaacgacccccgtctggtgttcaccgtacgtgaattccgtgagctccccaatatcgaggagcggatcatgaactccttcggaccatccgccgcaacccctgccccaccaggcgtcgacacccctcctcctagcagacccgaaaaaaaaaaggcagatattgtgttcctgttggacggttccattaacttccggagggattcgttccaggaggttctgagatttgtgtccgaaattgtagacacggtatacgaagatggagactctatccaagtgggcctggttcagtacaacagtgatccaactgacgagtttttcctgaaggactttagcaccaaacgccagatcatcgatgccataaataaggtcgtgtacaaggggggaaggcacgcaaatacgaaggtagggttggaacacctgcgggttaatcactttgtccccgaggccggatccaggttggatcagcgcgtccctcagatcgccttcgtgatcaccgggggaaaatctgtcgaggacgctcaggacgtgtccctcgcgctgacacagcgcggtgtgaaggttttcgccgtgggcgttcggaacatagatagtgaagaagtgggcaagattgcctcaaactccgcaacagcctttcgggtgggtaatgttcaggaactttccgagttaagtgaacaggtgctcgagaccctgcatgatgctatgcatgaaacgctgtgccccggagtgactgacgccgctaaagcttgcaaccttgatgtaatacttgggttcgatggttcacgggaccagaatgtgttcgtggctcagaaaggattcgagtccaaggtggatgcaatccttaataggatctctcagatgcacagggtgtcttgttcgggtggcagatctccaacagtgagggtaagcgttgtagccaatacaccctctggaccagtggaggcttttgattttgatgagtatcaacctgagatgcttgagaagtttcgcaatatgagaagtcaacacccttatgtgcttacagaagacacgttgaaggtgtacttgaataagtttcgccagtcaagcccagacagcgtaaaagtcgtcatccactttacagatggagccgatggtgacttagcggatctgcaccgggcttctgaaaatctgcgccaagaaggagtccgggctctcattctggttggcctggagcgggtggtgaacctggagcggctgatgcaccttgaatttggaagaggcttcatgtatgacaggcctctccgcctgaacctactggacctggattacgaactcgcagaacagctcgataatatcgccgagaaagcttgttgtggggtcccatgcaagtgctccgggcagcgcggtgacagaggacccattggctcaattgggccaaaagggatccccggagaagatggatatcgagggtaccccggagacgaaggtggaccaggagagagaggacctccaggggtgaacggaacacagggattccaggggtgcccaggccaaaggggagttaaggggagtcgcggatttccaggcgagaagggagaggttggtgagatcggactcgacggcctggacggagaagacggcgacaaaggtctgccgggatctagcggggaaaagggcaacccagggcgtcggggtgacaagggccctcgaggcgaaaagggggaacgcggagatgtcgggatcagaggggaccctgggaaccccggacaggacagtcaggagcgaggacctaagggtgagacaggcgaccttggccctatgggagtccccggacgcgatggggtgcctggcggacctggggaaacagggaagaatggtgggttcggtcgcagaggcccacctggtgctaagggaaataaaggtggcccaggtcaacctggctttgagggtgaacagggcactcgcggtgcacagggacccgcaggcccagccggtcctcccggtctgatcggagaacaggggatctccggtcccagaggtagtggcggagccgcaggtgccccaggagagcggggacggacgggccctcttggacgcaagggcgaacctggtgagcctggacctaagggcggtatcggaaacagggggccaagaggggagacaggcgacgacgggagagacggcgtgggctcagaagggagacggggaaaaaaaggggagagaggtttcccaggctatcctgggcctaaagggaaccctggggagcctggcctgaatggaaccactggccctaagggaatcagggggcgtaggggcaattcaggacccccaggaatagtcggacagaaaggcgaccccggatatcccggtcctgccggtcctaagggaaataggggtgatagtatcgatcagtgtgctctcatccagtccattaaagacaaatgtccatgctgttatggccctctcgaatgccccgtctttccgacagagctggccttcgcattagacacgtcagaaggagttaaccaggacaccttcggaagaatgcgagatgtcgtgttgtccatcgtcaatgacctgactatcgccgagtctaattgccccaggggggcaagggtggccgttgttacttataataatgaagttacaacagaaattcggtttgccgacagtaagagaaaaagcgtgctgctggataagataaagaaccttcaggtcgcccttacatctaagcaacaatcgctggaaactgccatgtccttcgtcgccaggaatacattcaagcgggttaggaacggctttctgatgaggaaggtagccgtgttcttcagtaacacacccacccgggcaagcccccagttaagggaggcggttctgaagttaagcgacgctggaattaccccactcttcctgacacgccaggaggatcgccagctgatcaacgcgctccaaattaataacaccgccgtaggacatgctctggtgttaccagctggtcgcgatcttacagatttcctagaaaacgtgttgacatgccatgtctgcctggacatttgcaatattgacccctcatgcggcttcgggagttggcggccatcgttccgcgatcggagagcggcaggatcagacgtggatatcgatatggccttcatcttggatagcgcagagaccaccaccctgtttcagttcaatgaaatgaaaaagtacattgcgtacctggtgcggcaactggacatgtcaccagaccctaaggcgagccagcattttgccagggtagcggtggtgcagcatgcaccatctgagtctgtcgataacgcgagcatgcctccagtgaaagtggagttctctctgactgattacggttctaaggaaaaactcgtggattttctgagccgcggaatgacccaattgcagggcacacgggctctggggtcagcgattgagtacaccatagagaatgtgttcgagtctgcaccaaacccccgagatctaaagatcgtcgtgctgatgctgaccggcgaggtccctgagcagcagctggaagaggcccagcgagtaatcttacaggcaaagtgtaaaggctatttttttgttgttctgggcatcgggcgaaaggtgaatatcaaagaagtatatactttcgcctccgaaccaaatgatgtgtttttcaaactggtagataaaagcacagaactgaacgaggagcccctgatgcgcttcggccgtctgctgccttcgtttgtgagctccgaaaacgcgttctatctgtcacccgatattaggaaacagtgtgattggtttcagggcgaccagcctacaaagaacctggtaaagttcggtcataaacaggtgaatgtgcccaacaatgtgacgtccagtcccaccagtaacccagtgacgaccacgaagccagtcaccacgacgaaaccagtcaccactaccactaaacccgtgacgacaaccaccaaaccagtcacaattataaaccagccgtctgttaaaccagcagcggctaagcccgcacctgcaaaacccgtggccgctaagccggtggcaaccaagatggcaactgtgcgaccaccagttgccgtgaagccagctaccgcggctaagcccgtggctgccaaacctgcagccgtacggccaccagccgctgcagctgcaaaaccagtggccactaagcctgaggtacctagaccacaagcggctaaaccggctgcgaccaagccggcaaccacaaaaccaatggtgaagatgagtcgggaagtccaagtgtttgagattactgagaattcagcaaagctgcattgggagcgggctgaacctccaggtccttacttttatgacctgaccgtcactagtgcccacgaccaatcactggtgctgaagcagaacctgactgtgaccgaccgcgtcatcggcggtctgttagcaggacagacctaccatgttgccgttgtctgttacctgcggagtcaggtcagggcgacttaccatgggagcttttcaacaaaaaaaagtcagcctcctcccccacagccagcaaggtccgcctcctccagtactatcaatctcatggttagtaccgaacctttggctttgaccgagactgatatttgcaaactccccaaagatgaggggacttgccgcgatttcattttgaaatggtactacgatccaaatacaaaaagctgtgccaggttctggtatggaggctgcggaggtaatgagaacaaattcggcagtcaaaaagagtgtgaaaaagtttgtgcgcctgttctggcaaagccaggggtcatctccgttatgggcaccta

SEQ ID NO: 230648 - protein, 2976 aa, Artificial Sequence
  derived and/or modified sequence
MRKHRHLPLVAVFCLFLSGFPTTHAQQQQADVKNGAAADIIFLVDSSWTIGEEHFQLVREFLYDVVKSLAVGENDFHFALVQFNGNPHTEFLLNTYRTKQEVLSHISNMSYIGGTNQTGKGLEYIMQSHLTKAAGSRAGDGVPQVIVVLTDGHSKDGLALPSAELKSADVNVFAIGVEDADEGALKEIASEPLNMHMFNLENFTSLHDIVGNLVSCVHSSVSPERAGDTETLKDITVIEVNKRDIVFLVDGSSALGLANFNAIRDFIAKVIQRLEIGQDLIQVAVAQYADTVRPEFYFNTHPTKREVITAVRKMKPLDGSALYTGSALDFVRNNLFTSSAGYRAAEGIPKLLVLITGGKSLDEISQPAQELKRSSIMAFAIGNKGADQAELEEIAFDSSLVFIPAEFRAAPLQGMLPGLLAPLRTLSGTPEVHSNKRDIIFLLDGSANVGKTNFPYVRDFVMNLVNSLDIGNDNIRVGLVQFSDTPVTEFSLNTYQTKSDILGHLRQLQLQGGSGLNTGSALSYVYANHFTEAGGSRIREHVPQLLLLLTAGQSEDSYLQAANALTRAGILTFCVGASQANKAELEQIAFNPSLVYLMDDFSSLPALPQQLIQPLTTYVSGGVEEVPLAQPESKRDILFLFDGSANLVGQFPVVRDFLYKIIDELNVKPEGTRIAVAQYSDDVKVESRFDEHQSKPEILNLVKRMKIKTGKALNLGYALDYAQRYIFVKSAGSRIEDGVLQFLVLLVAGRSSDRVDGPASNLKQSGVVPFIFQAKNADPAELEQIVLSPAFILAAESLPKIGDLHPQIVNLLKSVHNGAPAPVSGEKDVVFLLDGSEGVRSGFPLLKEFVQRVVESLDVGQDRVRVAVVQYSDRTRPEFYLNSYMNKQDVVNAVRQLTLLGGPTPNTGAALEFVLRNILVSSAGSRITEGVPQLLIVLTADRSGDDVRNPSVVVKRGGAVPIGIGIGNADITEMQTISFIPDFAVAIPTFRQLGTVQQVISERVTQLTREELSRLQPVLQPLPSPGVGGKRDVVFLIDGSQSAGPEFQYVRTLIERLVDYLDVGFDTTRVAVIQFSDDPKVEFLLNAHSSKDEVQNAVQRLRPKGGRQINVGNALEYVSRNIFKRPLGSRIEEGVPQFLVLISSGKSDDEVDDPAVELKQFGVAPFTIARNADQEELVKISLSPEYVFSVSTFRELPSLEQKLLTPITTLTSEQIQKLLASTRYPPPAVESDAADIVFLIDSSEGVRPDGFAHIRDFVSRIVRRLNIGPSKVRVGVVQFSNDVFPEFYLKTYRSQAPVLDAIRRLRLRGGSPLNTGKALEFVARNLFVKSAGSRIEDGVPQHLVLVLGGKSQDDVSRFAQVIRSSGIVSLGVGDRNIDRTELQTITNDPRLVFTVREFRELPNIEERIMNSFGPSAATPAPPGVDTPPPSRPEKKKADIVFLLDGSINFRRDSFQEVLRFVSEIVDTVYEDGDSIQVGLVQYNSDPTDEFFLKDFSTKRQIIDAINKVVYKGGRHANTKVGLEHLRVNHFVPEAGSRLDQRVPQIAFVITGGKSVEDAQDVSLALTQRGVKVFAVGVRNIDSEEVGKIASNSATAFRVGNVQELSELSEQVLETLHDAMHETLCPGVTDAAKACNLDVILGFDGSRDQNVFVAQKGFESKVDAILNRISQMHRVSCSGGRSPTVRVSVVANTPSGPVEAFDFDEYQPEMLEKFRNMRSQHPYVLTEDTLKVYLNKFRQSSPDSVKVVIHFTDGADGDLADLHRASENLRQEGVRALILVGLERVVNLERLMHLEFGRGFMYDRPLRLNLLDLDYELAEQLDNIAEKACCGVPCKCSGQRGDRGPIGSIGPKGIPGEDGYRGYPGDEGGPGERGPPGVNGTQGFQGCPGQRGVKGSRGFPGEKGEVGEIGLDGLDGEDGDKGLPGSSGEKGNPGRRGDKGPRGEKGERGDVGIRGDPGNPGQDSQERGPKGETGDLGPMGVPGRDGVPGGPGETGKNGGFGRRGPPGAKGNKGGPGQPGFEGEQGTRGAQGPAGPAGPPGLIGEQGISGPRGSGGAAGAPGERGRTGPLGRKGEPGEPGPKGGIGNRGPRGETGDDGRDGVGSEGRRGKKGERGFPGYPGPKGNPGEPGLNGTTGPKGIRGRRGNSGPPGIVGQKGDPGYPGPAGPKGNRGDSIDQCALIQSIKDKCPCCYGPLECPVFPTELAFALDTSEGVNQDTFGRMRDVVLSIVNDLTIAESNCPRGARVAVVTYNNEVTTEIRFADSKRKSVLLDKIKNLQVALTSKQQSLETAMSFVARNTFKRVRNGFLMRKVAVFFSNTPTRASPQLREAVLKLSDAGITPLFLTRQEDRQLINALQINNTAVGHALVLPAGRDLTDFLENVLTCHVCLDICNIDPSCGFGSWRPSFRDRRAAGSDVDIDMAFILDSAETTTLFQFNEMKKYIAYLVRQLDMSPDPKASQHFARVAVVQHAPSESVDNASMPPVKVEFSLTDYGSKEKLVDFLSRGMTQLQGTRALGSAIEYTIENVFESAPNPRDLKIVVLMLTGEVPEQQLEEAQRVILQAKCKGYFFVVLGIGRKVNIKEVYTFASEPNDVFFKLVDKSTELNEEPLMRFGRLLPSFVSSENAFYLSPDIRKQCDWFQGDQPTKNLVKFGHKQVNVPNNVTSSPTSNPVTTTKPVTTTKPVTTTTKPVTTTTKPVTIINQPSVKPAAAKPAPAKPVAAKPVATKMATVRPPVAVKPATAAKPVAAKPAAVRPPAAAAAKPVATKPEVPRPQAAKPAATKPATTKPMVKMSREVQVFEITENSAKLHWERAEPPGPYFYDLTVTSAHDQSLVLKQNLTVTDRVIGGLLAGQTYHVAVVCYLRSQVRATYHGSFSTKKSQPPPPQPARSASSSTINLMVSTEPLALTETDICKLPKDEGTCRDFILKWYYDPNTKSCARFWYGGCGGNENKFGSQKECEKVCAPVLAKPGVISVMGT

SEQ ID NO: 230649 - protein, 2971 aa, Artificial Sequence
  derived and/or modified sequence
MRKHRHLPLVAVFCLFLSGFPTTHAQQQQAAQDSADIIFLIDGSNNTGSVNFAVILDFLVNLLEKLPIGTQQIRVGVVQFSDEPRTMFSLDTYSTKAQVLGAVKALGFAGGELANIGLALDFVVENHFTRAGGSRVEEGVPQVLVLISAGPSSDEIRYGVVALKQASVFSFGLGAQAASRAELQHIATDDNLVFTVPEFRSFGDLQEKLLPYIVGVAQRHIVLKPPTIVTQVIEVNKRDIVFLVDGSSALGLANFNAIRDFIAKVIQRLEIGQDLIQVAVAQYADTVRPEFYFNTHPTKREVITAVRKMKPLDGSALYTGSALDFVRNNLFTSSAGYRAAEGIPKLLVLITGGKSLDEISQPAQELKRSSIMAFAIGNKGADQAELEEIAFDSSLVFIPAEFRAAPLQGMLPGLLAPLRTLSGTPEVHSNKRDIIFLLDGSANVGKTNFPYVRDFVMNLVNSLDIGNDNIRVGLVQFSDTPVTEFSLNTYQTKSDILGHLRQLQLQGGSGLNTGSALSYVYANHFTEAGGSRIREHVPQLLLLLTAGQSEDSYLQAANALTRAGILTFCVGASQANKAELEQIAFNPSLVYLMDDFSSLPALPQQLIQPLTTYVSGGVEEVPLAQPESKRDILFLFDGSANLVGQFPVVRDFLYKIIDELNVKPEGTRIAVAQYSDDVKVESRFDEHQSKPEILNLVKRMKIKTGKALNLGYALDYAQRYIFVKSAGSRIEDGVLQFLVLLVAGRSSDRVDGPASNLKQSGVVPFIFQAKNADPAELEQIVLSPAFILAAESLPKIGDLHPQIVNLLKSVHNGAPAPVSGEKDVVFLLDGSEGVRSGFPLLKEFVQRVVESLDVGQDRVRVAVVQYSDRTRPEFYLNSYMNKQDVVNAVRQLTLLGGPTPNTGAALEFVLRNILVSSAGSRITEGVPQLLIVLTADRSGDDVRNPSVVVKRGGAVPIGIGIGNADITEMQTISFIPDFAVAIPTFRQLGTVQQVISERVTQLTREELSRLQPVLQPLPSPGVGGKRDVVFLIDGSQSAGPEFQYVRTLIERLVDYLDVGFDTTRVAVIQFSDDPKVEFLLNAHSSKDEVQNAVQRLRPKGGRQINVGNALEYVSRNIFKRPLGSRIEEGVPQFLVLISSGKSDDEVDDPAVELKQFGVAPFTIARNADQEELVKISLSPEYVFSVSTFRELPSLEQKLLTPITTLTSEQIQKLLASTRYPPPAVESDAADIVFLIDSSEGVRPDGFAHIRDFVSRIVRRLNIGPSKVRVGVVQFSNDVFPEFYLKTYRSQAPVLDAIRRLRLRGGSPLNTGKALEFVARNLFVKSAGSRIEDGVPQHLVLVLGGKSQDDVSRFAQVIRSSGIVSLGVGDRNIDRTELQTITNDPRLVFTVREFRELPNIEERIMNSFGPSAATPAPPGVDTPPPSRPEKKKADIVFLLDGSINFRRDSFQEVLRFVSEIVDTVYEDGDSIQVGLVQYNSDPTDEFFLKDFSTKRQIIDAINKVVYKGGRHANTKVGLEHLRVNHFVPEAGSRLDQRVPQIAFVITGGKSVEDAQDVSLALTQRGVKVFAVGVRNIDSEEVGKIASNSATAFRVGNVQELSELSEQVLETLHDAMHETLCPGVTDAAKACNLDVILGFDGSRDQNVFVAQKGFESKVDAILNRISQMHRVSCSGGRSPTVRVSVVANTPSGPVEAFDFDEYQPEMLEKFRNMRSQHPYVLTEDTLKVYLNKFRQSSPDSVKVVIHFTDGADGDLADLHRASENLRQEGVRALILVGLERVVNLERLMHLEFGRGFMYDRPLRLNLLDLDYELAEQLDNIAEKACCGVPCKCSGQRGDRGPIGSIGPKGIPGEDGYRGYPGDEGGPGERGPPGVNGTQGFQGCPGQRGVKGSRGFPGEKGEVGEIGLDGLDGEDGDKGLPGSSGEKGNPGRRGDKGPRGEKGERGDVGIRGDPGNPGQDSQERGPKGETGDLGPMGVPGRDGVPGGPGETGKNGGFGRRGPPGAKGNKGGPGQPGFEGEQGTRGAQGPAGPAGPPGLIGEQGISGPRGSGGAAGAPGERGRTGPLGRKGEPGEPGPKGGIGNRGPRGETGDDGRDGVGSEGRRGKKGERGFPGYPGPKGNPGEPGLNGTTGPKGIRGRRGNSGPPGIVGQKGDPGYPGPAGPKGNRGDSIDQCALIQSIKDKCPCCYGPLECPVFPTELAFALDTSEGVNQDTFGRMRDVVLSIVNDLTIAESNCPRGARVAVVTYNNEVTTEIRFADSKRKSVLLDKIKNLQVALTSKQQSLETAMSFVARNTFKRVRNGFLMRKVAVFFSNTPTRASPQLREAVLKLSDAGITPLFLTRQEDRQLINALQINNTAVGHALVLPAGRDLTDFLENVLTCHVCLDICNIDPSCGFGSWRPSFRDRRAAGSDVDIDMAFILDSAETTTLFQFNEMKKYIAYLVRQLDMSPDPKASQHFARVAVVQHAPSESVDNASMPPVKVEFSLTDYGSKEKLVDFLSRGMTQLQGTRALGSAIEYTIENVFESAPNPRDLKIVVLMLTGEVPEQQLEEAQRVILQAKCKGYFFVVLGIGRKVNIKEVYTFASEPNDVFFKLVDKSTELNEEPLMRFGRLLPSFVSSENAFYLSPDIRKQCDWFQGDQPTKNLVKFGHKQVNVPNNVTSSPTSNPVTTTKPVTTTKPVTTTTKPVTTTTKPVTIINQPSVKPAAAKPAPAKPVAAKPVATKMATVRPPVAVKPATAAKPVAAKPAAVRPPAAAAAKPVATKPEVPRPQAAKPAATKPATTKPMVKMSREVQVFEITENSAKLHWERAEPPGPYFYDLTVTSAHDQSLVLKQNLTVTDRVIGGLLAGQTYHVAVVCYLRSQVRATYHGSFSTKKSQPPPPQPARSASSSTINLMVSTEPLALTETDICKLPKDEGTCRDFILKWYYDPNTKSCARFWYGGCGGNENKFGSQKECEKVCAPVLAKPGVISVMGT

SEQ ID NO: 230650 - DNA, 8931 bp, Artificial Sequence
  derived and/or modified sequence
atgagaaagcacagacacctgcccctggtggccgtgttctgcctgttcctgagcggcttccccaccacccacgcccagcagcagcaggccgacgtgaagaacggcgccgccgccgacatcatcttcctggtggacagcagctggaccatcggcgaggagcacttccagctggtgagagagttcctgtacgacgtggtgaagagcctggccgtgggcgagaacgacttccacttcgccctggtgcagttcaacggcaacccccacaccgagttcctgctgaacacctacagaaccaagcaggaggtgctgagccacatcagcaacatgagctacatcggcggcaccaaccagaccggcaagggcctggagtacatcatgcagagccacctgaccaaggccgccggcagcagagccggcgacggcgtgccccaggtgatcgtggtgctgaccgacggccacagcaaggacggcctggccctgcccagcgccgagctgaagagcgccgacgtgaacgtgttcgccatcggcgtggaggacgccgacgagggcgccctgaaggagatcgccagcgagcccctgaacatgcacatgttcaacctggagaacttcaccagcctgcacgacatcgtgggcaacctggtgagctgcgtgcacagcagcgtgagccccgagagagccggcgacaccgagaccctgaaggacatcaccgtgatcgaggtgaacaagagagacatcgtgttcctggtggacggcagcagcgccctgggcctggccaacttcaacgccatcagagacttcatcgccaaggtgatccagagactggagatcggccaggacctgatccaggtggccgtggcccagtacgccgacaccgtgagacccgagttctacttcaacacccaccccaccaagagagaggtgatcaccgccgtgagaaagatgaagcccctggacggcagcgccctgtacaccggcagcgccctggacttcgtgagaaacaacctgttcaccagcagcgccggctacagagccgccgagggcatccccaagctgctggtgctgatcaccggcggcaagagcctggacgagatcagccagcccgcccaggagctgaagagaagcagcatcatggccttcgccatcggcaacaagggcgccgaccaggccgagctggaggagatcgccttcgacagcagcctggtgttcatccccgccgagttcagagccgcccccctgcagggcatgctgcccggcctgctggcccccctgagaaccctgagcggcacccccgaggtgcacagcaacaagagagacatcatcttcctgctggacggcagcgccaacgtgggcaagaccaacttcccctacgtgagagacttcgtgatgaacctggtgaacagcctggacatcggcaacgacaacatcagagtgggcctggtgcagttcagcgacacccccgtgaccgagttcagcctgaacacctaccagaccaagagcgacatcctgggccacctgagacagctgcagctgcagggcggcagcggcctgaacaccggcagcgccctgagctacgtgtacgccaaccacttcaccgaggccggcggcagcagaatcagagagcacgtgccccagctgctgctgctgctgaccgccggccagagcgaggacagctacctgcaggccgccaacgccctgaccagagccggcatcctgaccttctgcgtgggcgccagccaggccaacaaggccgagctggagcagatcgccttcaaccccagcctggtgtacctgatggacgacttcagcagcctgcccgccctgccccagcagctgatccagcccctgaccacctacgtgagcggcggcgtggaggaggtgcccctggcccagcccgagagcaagagagacatcctgttcctgttcgacggcagcgccaacctggtgggccagttccccgtggtgagagacttcctgtacaagatcatcgacgagctgaacgtgaagcccgagggcaccagaatcgccgtggcccagtacagcgacgacgtgaaggtggagagcagattcgacgagcaccagagcaagcccgagatcctgaacctggtgaagagaatgaagatcaagaccggcaaggccctgaacctgggctacgccctggactacgcccagagatacatcttcgtgaagagcgccggcagcagaatcgaggacggcgtgctgcagttcctggtgctgctggtggccggcagaagcagcgacagagtggacggccccgccagcaacctgaagcagagcggcgtggtgcccttcatcttccaggccaagaacgccgaccccgccgagctggagcagatcgtgctgagccccgccttcatcctggccgccgagagcctgcccaagatcggcgacctgcacccccagatcgtgaacctgctgaagagcgtgcacaacggcgcccccgcccccgtgagcggcgagaaggacgtggtgttcctgctggacggcagcgagggcgtgagaagcggcttccccctgctgaaggagttcgtgcagagagtggtggagagcctggacgtgggccaggacagagtgagagtggccgtggtgcagtacagcgacagaaccagacccgagttctacctgaacagctacatgaacaagcaggacgtggtgaacgccgtgagacagctgaccctgctgggcggccccacccccaacaccggcgccgccctggagttcgtgctgagaaacatcctggtgagcagcgccggcagcagaatcaccgagggcgtgccccagctgctgatcgtgctgaccgccgacagaagcggcgacgacgtgagaaaccccagcgtggtggtgaagagaggcggcgccgtgcccatcggcatcggcatcggcaacgccgacatcaccgagatgcagaccatcagcttcatccccgacttcgccgtggccatccccaccttcagacagctgggcaccgtgcagcaggtgatcagcgagagagtgacccagctgaccagagaggagctgagcagactgcagcccgtgctgcagcccctgcccagccccggcgtgggcggcaagagagacgtggtgttcctgatcgacggcagccagagcgccggccccgagttccagtacgtgagaaccctgatcgagagactggtggactacctggacgtgggcttcgacaccaccagagtggccgtgatccagttcagcgacgaccccaaggtggagttcctgctgaacgcccacagcagcaaggacgaggtgcagaacgccgtgcagagactgagacccaagggcggcagacagatcaacgtgggcaacgccctggagtacgtgagcagaaacatcttcaagagacccctgggcagcagaatcgaggagggcgtgccccagttcctggtgctgatcagcagcggcaagagcgacgacgaggtggacgaccccgccgtggagctgaagcagttcggcgtggcccccttcaccatcgccagaaacgccgaccaggaggagctggtgaagatcagcctgagccccgagtacgtgttcagcgtgagcaccttcagagagctgcccagcctggagcagaagctgctgacccccatcaccaccctgaccagcgagcagatccagaagctgctggccagcaccagataccccccccccgccgtggagagcgacgccgccgacatcgtgttcctgatcgacagcagcgagggcgtgagacccgacggcttcgcccacatcagagacttcgtgagcagaatcgtgagaagactgaacatcggccccagcaaggtgagagtgggcgtggtgcagttcagcaacgacgtgttccccgagttctacctgaagacctacagaagccaggcccccgtgctggacgccatcagaagactgagactgagaggcggcagccccctgaacaccggcaaggccctggagttcgtggccagaaacctgttcgtgaagagcgccggcagcagaatcgaggacggcgtgccccagcacctggtgctggtgctgggcggcaagagccaggacgacgtgagcagattcgcccaggtgatcagaagcagcggcatcgtgagcctgggcgtgggcgacagaaacatcgacagaaccgagctgcagaccatcaccaacgaccccagactggtgttcaccgtgagagagttcagagagctgcccaacatcgaggagagaatcatgaacagcttcggccccagcgccgccacccccgccccccccggcgtggacacccccccccccagcagacccgagaagaagaaggccgacatcgtgttcctgctggacggcagcatcaacttcagaagagacagcttccaggaggtgctgagattcgtgagcgagatcgtggacaccgtgtacgaggacggcgacagcatccaggtgggcctggtgcagtacaacagcgaccccaccgacgagttcttcctgaaggacttcagcaccaagagacagatcatcgacgccatcaacaaggtggtgtacaagggcggcagacacgccaacaccaaggtgggcctggagcacctgagagtgaaccacttcgtgcccgaggccggcagcagactggaccagagagtgccccagatcgccttcgtgatcaccggcggcaagagcgtggaggacgcccaggacgtgagcctggccctgacccagagaggcgtgaaggtgttcgccgtgggcgtgagaaacatcgacagcgaggaggtgggcaagatcgccagcaacagcgccaccgccttcagagtgggcaacgtgcaggagctgagcgagctgagcgagcaggtgctggagaccctgcacgacgccatgcacgagaccctgtgccccggcgtgaccgacgccgccaaggcctgcaacctggacgtgatcctgggcttcgacggcagcagagaccagaacgtgttcgtggcccagaagggcttcgagagcaaggtggacgccatcctgaacagaatcagccagatgcacagagtgagctgcagcggcggcagaagccccaccgtgagagtgagcgtggtggccaacacccccagcggccccgtggaggccttcgacttcgacgagtaccagcccgagatgctggagaagttcagaaacatgagaagccagcacccctacgtgctgaccgaggacaccctgaaggtgtacctgaacaagttcagacagagcagccccgacagcgtgaaggtggtgatccacttcaccgacggcgccgacggcgacctggccgacctgcacagagccagcgagaacctgagacaggagggcgtgagagccctgatcctggtgggcctggagagagtggtgaacctggagagactgatgcacctggagttcggcagaggcttcatgtacgacagacccctgagactgaacctgctggacctggactacgagctggccgagcagctggacaacatcgccgagaaggcctgctgcggcgtgccctgcaagtgcagcggccagagaggcgacagaggccccatcggcagcatcggccccaagggcatccccggcgaggacggctacagaggctaccccggcgacgagggcggccccggcgagagaggcccccccggcgtgaacggcacccagggcttccagggctgccccggccagagaggcgtgaagggcagcagaggcttccccggcgagaagggcgaggtgggcgagatcggcctggacggcctggacggcgaggacggcgacaagggcctgcccggcagcagcggcgagaagggcaaccccggcagaagaggcgacaagggccccagaggcgagaagggcgagagaggcgacgtgggcatcagaggcgaccccggcaaccccggccaggacagccaggagagaggccccaagggcgagaccggcgacctgggccccatgggcgtgcccggcagagacggcgtgcccggcggccccggcgagaccggcaagaacggcggcttcggcagaagaggcccccccggcgccaagggcaacaagggcggccccggccagcccggcttcgagggcgagcagggcaccagaggcgcccagggccccgccggccccgccggcccccccggcctgatcggcgagcagggcatcagcggccccagaggcagcggcggcgccgccggcgcccccggcgagagaggcagaaccggccccctgggcagaaagggcgagcccggcgagcccggccccaagggcggcatcggcaacagaggccccagaggcgagaccggcgacgacggcagagacggcgtgggcagcgagggcagaagaggcaagaagggcgagagaggcttccccggctaccccggccccaagggcaaccccggcgagcccggcctgaacggcaccaccggccccaagggcatcagaggcagaagaggcaacagcggcccccccggcatcgtgggccagaagggcgaccccggctaccccggccccgccggccccaagggcaacagaggcgacagcatcgaccagtgcgccctgatccagagcatcaaggacaagtgcccctgctgctacggccccctggagtgccccgtgttccccaccgagctggccttcgccctggacaccagcgagggcgtgaaccaggacaccttcggcagaatgagagacgtggtgctgagcatcgtgaacgacctgaccatcgccgagagcaactgccccagaggcgccagagtggccgtggtgacctacaacaacgaggtgaccaccgagatcagattcgccgacagcaagagaaagagcgtgctgctggacaagatcaagaacctgcaggtggccctgaccagcaagcagcagagcctggagaccgccatgagcttcgtggccagaaacaccttcaagagagtgagaaacggcttcctgatgagaaaggtggccgtgttcttcagcaacacccccaccagagccagcccccagctgagagaggccgtgctgaagctgagcgacgccggcatcacccccctgttcctgaccagacaggaggacagacagctgatcaacgccctgcagatcaacaacaccgccgtgggccacgccctggtgctgcccgccggcagagacctgaccgacttcctggagaacgtgctgacctgccacgtgtgcctggacatctgcaacatcgaccccagctgcggcttcggcagctggagacccagcttcagagacagaagagccgccggcagcgacgtggacatcgacatggccttcatcctggacagcgccgagaccaccaccctgttccagttcaacgagatgaagaagtacatcgcctacctggtgagacagctggacatgagccccgaccccaaggccagccagcacttcgccagagtggccgtggtgcagcacgcccccagcgagagcgtggacaacgccagcatgccccccgtgaaggtggagttcagcctgaccgactacggcagcaaggagaagctggtggacttcctgagcagaggcatgacccagctgcagggcaccagagccctgggcagcgccatcgagtacaccatcgagaacgtgttcgagagcgcccccaaccccagagacctgaagatcgtggtgctgatgctgaccggcgaggtgcccgagcagcagctggaggaggcccagagagtgatcctgcaggccaagtgcaagggctacttcttcgtggtgctgggcatcggcagaaaggtgaacatcaaggaggtgtacaccttcgccagcgagcccaacgacgtgttcttcaagctggtggacaagagcaccgagctgaacgaggagcccctgatgagattcggcagactgctgcccagcttcgtgagcagcgagaacgccttctacctgagccccgacatcagaaagcagtgcgactggttccagggcgaccagcccaccaagaacctggtgaagttcggccacaagcaggtgaacgtgcccaacaacgtgaccagcagccccaccagcaaccccgtgaccaccaccaagcccgtgaccaccaccaagcccgtgaccaccaccaccaagcccgtgaccaccaccaccaagcccgtgaccatcatcaaccagcccagcgtgaagcccgccgccgccaagcccgcccccgccaagcccgtggccgccaagcccgtggccaccaagatggccaccgtgagaccccccgtggccgtgaagcccgccaccgccgccaagcccgtggccgccaagcccgccgccgtgagaccccccgccgccgccgccgccaagcccgtggccaccaagcccgaggtgcccagaccccaggccgccaagcccgccgccaccaagcccgccaccaccaagcccatggtgaagatgagcagagaggtgcaggtgttcgagatcaccgagaacagcgccaagctgcactgggagagagccgagccccccggcccctacttctacgacctgaccgtgaccagcgcccacgaccagagcctggtgctgaagcagaacctgaccgtgaccgacagagtgatcggcggcctgctggccggccagacctaccacgtggccgtggtgtgctacctgagaagccaggtgagagccacctaccacggcagcttcagcaccaagaagagccagcccccccccccccagcccgccagaagcgccagcagcagcaccatcaacctgatggtgagcaccgagcccctggccctgaccgagaccgacatctgcaagctgcccaaggacgagggcacctgcagagacttcatcctgaagtggtactacgaccccaacaccaagagctgcgccagattctggtacggcggctgcggcggcaacgagaacaagttcggcagccagaaggagtgcgagaaggtgtgcgcccccgtgctggccaagcccggcgtgatcagcgtgatgggcacctag

SEQ ID NO: 230651 - DNA, 8916 bp, Artificial Sequence
  derived and/or modified sequence
atgagaaagcacagacacctgcccctggtggccgtgttctgcctgttcctgagcggcttccccaccacccacgcccagcagcagcaggccgcccaggacagcgccgacatcatcttcctgatcgacggcagcaacaacaccggcagcgtgaacttcgccgtgatcctggacttcctggtgaacctgctggagaagctgcccatcggcacccagcagatcagagtgggcgtggtgcagttcagcgacgagcccagaaccatgttcagcctggacacctacagcaccaaggcccaggtgctgggcgccgtgaaggccctgggcttcgccggcggcgagctggccaacatcggcctggccctggacttcgtggtggagaaccacttcaccagagccggcggcagcagagtggaggagggcgtgccccaggtgctggtgctgatcagcgccggccccagcagcgacgagatcagatacggcgtggtggccctgaagcaggccagcgtgttcagcttcggcctgggcgcccaggccgccagcagagccgagctgcagcacatcgccaccgacgacaacctggtgttcaccgtgcccgagttcagaagcttcggcgacctgcaggagaagctgctgccctacatcgtgggcgtggcccagagacacatcgtgctgaagccccccaccatcgtgacccaggtgatcgaggtgaacaagagagacatcgtgttcctggtggacggcagcagcgccctgggcctggccaacttcaacgccatcagagacttcatcgccaaggtgatccagagactggagatcggccaggacctgatccaggtggccgtggcccagtacgccgacaccgtgagacccgagttctacttcaacacccaccccaccaagagagaggtgatcaccgccgtgagaaagatgaagcccctggacggcagcgccctgtacaccggcagcgccctggacttcgtgagaaacaacctgttcaccagcagcgccggctacagagccgccgagggcatccccaagctgctggtgctgatcaccggcggcaagagcctggacgagatcagccagcccgcccaggagctgaagagaagcagcatcatggccttcgccatcggcaacaagggcgccgaccaggccgagctggaggagatcgccttcgacagcagcctggtgttcatccccgccgagttcagagccgcccccctgcagggcatgctgcccggcctgctggcccccctgagaaccctgagcggcacccccgaggtgcacagcaacaagagagacatcatcttcctgctggacggcagcgccaacgtgggcaagaccaacttcccctacgtgagagacttcgtgatgaacctggtgaacagcctggacatcggcaacgacaacatcagagtgggcctggtgcagttcagcgacacccccgtgaccgagttcagcctgaacacctaccagaccaagagcgacatcctgggccacctgagacagctgcagctgcagggcggcagcggcctgaacaccggcagcgccctgagctacgtgtacgccaaccacttcaccgaggccggcggcagcagaatcagagagcacgtgccccagctgctgctgctgctgaccgccggccagagcgaggacagctacctgcaggccgccaacgccctgaccagagccggcatcctgaccttctgcgtgggcgccagccaggccaacaaggccgagctggagcagatcgccttcaaccccagcctggtgtacctgatggacgacttcagcagcctgcccgccctgccccagcagctgatccagcccctgaccacctacgtgagcggcggcgtggaggaggtgcccctggcccagcccgagagcaagagagacatcctgttcctgttcgacggcagcgccaacctggtgggccagttccccgtggtgagagacttcctgtacaagatcatcgacgagctgaacgtgaagcccgagggcaccagaatcgccgtggcccagtacagcgacgacgtgaaggtggagagcagattcgacgagcaccagagcaagcccgagatcctgaacctggtgaagagaatgaagatcaagaccggcaaggccctgaacctgggctacgccctggactacgcccagagatacatcttcgtgaagagcgccggcagcagaatcgaggacggcgtgctgcagttcctggtgctgctggtggccggcagaagcagcgacagagtggacggccccgccagcaacctgaagcagagcggcgtggtgcccttcatcttccaggccaagaacgccgaccccgccgagctggagcagatcgtgctgagccccgccttcatcctggccgccgagagcctgcccaagatcggcgacctgcacccccagatcgtgaacctgctgaagagcgtgcacaacggcgcccccgcccccgtgagcggcgagaaggacgtggtgttcctgctggacggcagcgagggcgtgagaagcggcttccccctgctgaaggagttcgtgcagagagtggtggagagcctggacgtgggccaggacagagtgagagtggccgtggtgcagtacagcgacagaaccagacccgagttctacctgaacagctacatgaacaagcaggacgtggtgaacgccgtgagacagctgaccctgctgggcggccccacccccaacaccggcgccgccctggagttcgtgctgagaaacatcctggtgagcagcgccggcagcagaatcaccgagggcgtgccccagctgctgatcgtgctgaccgccgacagaagcggcgacgacgtgagaaaccccagcgtggtggtgaagagaggcggcgccgtgcccatcggcatcggcatcggcaacgccgacatcaccgagatgcagaccatcagcttcatccccgacttcgccgtggccatccccaccttcagacagctgggcaccgtgcagcaggtgatcagcgagagagtgacccagctgaccagagaggagctgagcagactgcagcccgtgctgcagcccctgcccagccccggcgtgggcggcaagagagacgtggtgttcctgatcgacggcagccagagcgccggccccgagttccagtacgtgagaaccctgatcgagagactggtggactacctggacgtgggcttcgacaccaccagagtggccgtgatccagttcagcgacgaccccaaggtggagttcctgctgaacgcccacagcagcaaggacgaggtgcagaacgccgtgcagagactgagacccaagggcggcagacagatcaacgtgggcaacgccctggagtacgtgagcagaaacatcttcaagagacccctgggcagcagaatcgaggagggcgtgccccagttcctggtgctgatcagcagcggcaagagcgacgacgaggtggacgaccccgccgtggagctgaagcagttcggcgtggcccccttcaccatcgccagaaacgccgaccaggaggagctggtgaagatcagcctgagccccgagtacgtgttcagcgtgagcaccttcagagagctgcccagcctggagcagaagctgctgacccccatcaccaccctgaccagcgagcagatccagaagctgctggccagcaccagataccccccccccgccgtggagagcgacgccgccgacatcgtgttcctgatcgacagcagcgagggcgtgagacccgacggcttcgcccacatcagagacttcgtgagcagaatcgtgagaagactgaacatcggccccagcaaggtgagagtgggcgtggtgcagttcagcaacgacgtgttccccgagttctacctgaagacctacagaagccaggcccccgtgctggacgccatcagaagactgagactgagaggcggcagccccctgaacaccggcaaggccctggagttcgtggccagaaacctgttcgtgaagagcgccggcagcagaatcgaggacggcgtgccccagcacctggtgctggtgctgggcggcaagagccaggacgacgtgagcagattcgcccaggtgatcagaagcagcggcatcgtgagcctgggcgtgggcgacagaaacatcgacagaaccgagctgcagaccatcaccaacgaccccagactggtgttcaccgtgagagagttcagagagctgcccaacatcgaggagagaatcatgaacagcttcggccccagcgccgccacccccgccccccccggcgtggacacccccccccccagcagacccgagaagaagaaggccgacatcgtgttcctgctggacggcagcatcaacttcagaagagacagcttccaggaggtgctgagattcgtgagcgagatcgtggacaccgtgtacgaggacggcgacagcatccaggtgggcctggtgcagtacaacagcgaccccaccgacgagttcttcctgaaggacttcagcaccaagagacagatcatcgacgccatcaacaaggtggtgtacaagggcggcagacacgccaacaccaaggtgggcctggagcacctgagagtgaaccacttcgtgcccgaggccggcagcagactggaccagagagtgccccagatcgccttcgtgatcaccggcggcaagagcgtggaggacgcccaggacgtgagcctggccctgacccagagaggcgtgaaggtgttcgccgtgggcgtgagaaacatcgacagcgaggaggtgggcaagatcgccagcaacagcgccaccgccttcagagtgggcaacgtgcaggagctgagcgagctgagcgagcaggtgctggagaccctgcacgacgccatgcacgagaccctgtgccccggcgtgaccgacgccgccaaggcctgcaacctggacgtgatcctgggcttcgacggcagcagagaccagaacgtgttcgtggcccagaagggcttcgagagcaaggtggacgccatcctgaacagaatcagccagatgcacagagtgagctgcagcggcggcagaagccccaccgtgagagtgagcgtggtggccaacacccccagcggccccgtggaggccttcgacttcgacgagtaccagcccgagatgctggagaagttcagaaacatgagaagccagcacccctacgtgctgaccgaggacaccctgaaggtgtacctgaacaagttcagacagagcagccccgacagcgtgaaggtggtgatccacttcaccgacggcgccgacggcgacctggccgacctgcacagagccagcgagaacctgagacaggagggcgtgagagccctgatcctggtgggcctggagagagtggtgaacctggagagactgatgcacctggagttcggcagaggcttcatgtacgacagacccctgagactgaacctgctggacctggactacgagctggccgagcagctggacaacatcgccgagaaggcctgctgcggcgtgccctgcaagtgcagcggccagagaggcgacagaggccccatcggcagcatcggccccaagggcatccccggcgaggacggctacagaggctaccccggcgacgagggcggccccggcgagagaggcccccccggcgtgaacggcacccagggcttccagggctgccccggccagagaggcgtgaagggcagcagaggcttccccggcgagaagggcgaggtgggcgagatcggcctggacggcctggacggcgaggacggcgacaagggcctgcccggcagcagcggcgagaagggcaaccccggcagaagaggcgacaagggccccagaggcgagaagggcgagagaggcgacgtgggcatcagaggcgaccccggcaaccccggccaggacagccaggagagaggccccaagggcgagaccggcgacctgggccccatgggcgtgcccggcagagacggcgtgcccggcggccccggcgagaccggcaagaacggcggcttcggcagaagaggcccccccggcgccaagggcaacaagggcggccccggccagcccggcttcgagggcgagcagggcaccagaggcgcccagggccccgccggccccgccggcccccccggcctgatcggcgagcagggcatcagcggccccagaggcagcggcggcgccgccggcgcccccggcgagagaggcagaaccggccccctgggcagaaagggcgagcccggcgagcccggccccaagggcggcatcggcaacagaggccccagaggcgagaccggcgacgacggcagagacggcgtgggcagcgagggcagaagaggcaagaagggcgagagaggcttccccggctaccccggccccaagggcaaccccggcgagcccggcctgaacggcaccaccggccccaagggcatcagaggcagaagaggcaacagcggcccccccggcatcgtgggccagaagggcgaccccggctaccccggccccgccggccccaagggcaacagaggcgacagcatcgaccagtgcgccctgatccagagcatcaaggacaagtgcccctgctgctacggccccctggagtgccccgtgttccccaccgagctggccttcgccctggacaccagcgagggcgtgaaccaggacaccttcggcagaatgagagacgtggtgctgagcatcgtgaacgacctgaccatcgccgagagcaactgccccagaggcgccagagtggccgtggtgacctacaacaacgaggtgaccaccgagatcagattcgccgacagcaagagaaagagcgtgctgctggacaagatcaagaacctgcaggtggccctgaccagcaagcagcagagcctggagaccgccatgagcttcgtggccagaaacaccttcaagagagtgagaaacggcttcctgatgagaaaggtggccgtgttcttcagcaacacccccaccagagccagcccccagctgagagaggccgtgctgaagctgagcgacgccggcatcacccccctgttcctgaccagacaggaggacagacagctgatcaacgccctgcagatcaacaacaccgccgtgggccacgccctggtgctgcccgccggcagagacctgaccgacttcctggagaacgtgctgacctgccacgtgtgcctggacatctgcaacatcgaccccagctgcggcttcggcagctggagacccagcttcagagacagaagagccgccggcagcgacgtggacatcgacatggccttcatcctggacagcgccgagaccaccaccctgttccagttcaacgagatgaagaagtacatcgcctacctggtgagacagctggacatgagccccgaccccaaggccagccagcacttcgccagagtggccgtggtgcagcacgcccccagcgagagcgtggacaacgccagcatgccccccgtgaaggtggagttcagcctgaccgactacggcagcaaggagaagctggtggacttcctgagcagaggcatgacccagctgcagggcaccagagccctgggcagcgccatcgagtacaccatcgagaacgtgttcgagagcgcccccaaccccagagacctgaagatcgtggtgctgatgctgaccggcgaggtgcccgagcagcagctggaggaggcccagagagtgatcctgcaggccaagtgcaagggctacttcttcgtggtgctgggcatcggcagaaaggtgaacatcaaggaggtgtacaccttcgccagcgagcccaacgacgtgttcttcaagctggtggacaagagcaccgagctgaacgaggagcccctgatgagattcggcagactgctgcccagcttcgtgagcagcgagaacgccttctacctgagccccgacatcagaaagcagtgcgactggttccagggcgaccagcccaccaagaacctggtgaagttcggccacaagcaggtgaacgtgcccaacaacgtgaccagcagccccaccagcaaccccgtgaccaccaccaagcccgtgaccaccaccaagcccgtgaccaccaccaccaagcccgtgaccaccaccaccaagcccgtgaccatcatcaaccagcccagcgtgaagcccgccgccgccaagcccgcccccgccaagcccgtggccgccaagcccgtggccaccaagatggccaccgtgagaccccccgtggccgtgaagcccgccaccgccgccaagcccgtggccgccaagcccgccgccgtgagaccccccgccgccgccgccgccaagcccgtggccaccaagcccgaggtgcccagaccccaggccgccaagcccgccgccaccaagcccgccaccaccaagcccatggtgaagatgagcagagaggtgcaggtgttcgagatcaccgagaacagcgccaagctgcactgggagagagccgagccccccggcccctacttctacgacctgaccgtgaccagcgcccacgaccagagcctggtgctgaagcagaacctgaccgtgaccgacagagtgatcggcggcctgctggccggccagacctaccacgtggccgtggtgtgctacctgagaagccaggtgagagccacctaccacggcagcttcagcaccaagaagagccagcccccccccccccagcccgccagaagcgccagcagcagcaccatcaacctgatggtgagcaccgagcccctggccctgaccgagaccgacatctgcaagctgcccaaggacgagggcacctgcagagacttcatcctgaagtggtactacgaccccaacaccaagagctgcgccagattctggtacggcggctgcggcggcaacgagaacaagttcggcagccagaaggagtgcgagaaggtgtgcgcccccgtgctggccaagcccggcgtgatcagcgtgatgggcacctag

SEQ ID NO: 230652 - DNA, 8931 bp, Artificial Sequence
  derived and/or modified sequence
atgcgcaagcacagacatctgccactggtggccgtgttctgccttttcctgtctgggttccccactacacacgcacaacagcaacaggcagacgtgaaaaacggggcggccgctgatatcatttttctggtagactcttcctggactattggagaggagcattttcagttggtgcgggaattcctgtacgatgttgtgaaatcgttggccgtgggtgaaaacgatttccatttcgccctcgtacagtttaatggaaaccctcataccgagttcctcctgaatacctacagaaccaagcaagaggtgctatcccatatctcaaacatgagttatatcggcggcaccaatcaaaccggcaagggcctggagtatatcatgcagtcacacctgactaaagcagctgggtccagagccggcgatggagttccccaagtaattgtggtcctcacggatggtcactctaaggatggccttgctctcccttcagccgaactcaagagcgcagacgtgaatgtgttcgccatcggggtggaagacgctgatgagggtgcacttaaggaaattgcttccgagccgctgaacatgcacatgttcaatctggagaatttcactagcctgcacgacattgtaggtaacctcgtgtcctgcgtccactcatcagtttcccctgaaagggcaggcgacaccgaaaccttaaaggatattacggtgatcgaagtcaacaaaagggacatcgtctttctggttgatgggtccagtgcactgggtctggccaacttcaacgccatccgggatttcatagcgaaggtcattcagcgactcgagataggccaggacctaatccaagttgccgtcgcccagtacgctgataccgtcagacccgaattctacttcaatactcacccaacaaaaagggaggtaatcacagcagtcaggaagatgaaacctttagacggctcagctctatatactggaagcgcactggacttcgtgaggaacaatctgttcacatcatccgcagggtatcgagccgccgagggcattcctaaactgctcgttctaatcactgggggaaagtccctggatgagatcagtcagcctgcccaggagctgaagagaagttcaataatggccttcgctatcgggaataagggagcagaccaggcagaactggaggaaatcgcatttgactcctcactggtatttatccccgctgaatttagagccgcccccttacagggaatgctgcccgggctgctcgcacccctgcggacactgagtggcaccccagaagtgcattccaacaagagagacattatttttctgctcgatgggtcagctaatgtaggaaagaccaattttccatatgtgcgggattttgtgatgaacctggtaaactctttggatatcggcaacgataacattagagtcgggctggtccagttttccgacacacctgtgacagagttctctttaaatacgtaccaaacaaaatcggatattctgggccatttgcgccagttacagctgcaggggggctctggcttaaacacagggagcgcactgagctacgtgtacgcaaatcacttcacggaggcaggaggttctaggattcgggaacacgtgccccagctgctgctcctgctcaccgccggacagtccgaggattcttatctgcaggcagctaacgcactaacacgggctgggattctcaccttttgcgttggagcctcccaggcaaacaaggctgaactagaacagattgcatttaacccgtccctcgtgtatctgatggacgacttctcttcattaccagctctgccccagcagcttatccagccacttactacttacgtctccggaggcgtagaagaggtgccgcttgctcagcctgaatcaaagagagatatactctttctgtttgacggatcagccaacctagtaggacagtttcctgtggtgagggatttcctgtataaaataatcgacgagctcaacgtgaagccagagggtacccgcattgcagtcgctcagtactcggatgatgtaaaggtcgaatcccgtttcgatgaacatcagtcgaaaccagagatcctgaatctcgtcaagcggatgaaaatcaagacaggcaaggcccttaaccttggatatgctctggactatgcacagaggtacatatttgtaaagtctgccggctctcgcatcgaggacggagtgctgcagttcctggtgcttctagttgccggcagaagtagcgatagagttgacggtcctgcgagcaatctaaagcagtcaggagtggttccctttatcttccaggctaagaatgcagaccctgctgaactggagcagatagtactgtctcctgcattcatcttagcggcagagtcactgcctaaaattggcgaccttcatccacagattgtaaacttacttaagagcgtgcacaacggagcacccgctccggtgtcaggggagaaagacgtggtcttcctgcttgacgggagcgaaggagtgcgctccggttttccacttttgaaagagttcgtccagcgagtggtggagagtctggatgtggggcaagaccgggtgagagtcgcggttgttcagtacagcgatcgcactcgcccagagttctatttgaactcttacatgaacaagcaggacgtcgtgaacgctgtcagacagttaacattgttggggggccctacgcccaacacaggagccgctcttgaatttgtgcttcgcaatattctggtgtcttctgccggtagtagaattactgaaggggtgcctcaactgctgatcgttctgaccgcagatcggagcggcgacgatgtgcgcaacccatcagtcgtggtaaagcggggaggagcagtccctatcgggattggcatcggaaacgcagacattaccgaaatgcagaccatttcttttatacccgattttgcggtggctattccaacttttagacagctgggaactgtgcaacaggtgatcagtgagagggtcacacagctgacacgggaggagttatcgagactacaacctgtgctccagccgctgcccagtccgggagttggggggaaaagggacgtcgtgttcctgattgacggttcccagtcagcagggcccgagttccagtacgtgcggacacttatcgagagattggtagattatttggatgtgggattcgacacgacacgcgtggcggtgattcagttttctgatgacccgaaggtggagtttctgctgaatgcacattcctcaaaagacgaggtgcagaatgcagtgcagcggctaagaccaaaaggcggcaggcagatcaatgtggggaatgcgctcgagtatgtgtccagaaacattttcaagagaccccttggatcgaggatcgaggaaggagtaccgcagtttttggtcttgatttctagtggcaagagtgatgacgaggtggacgatccggccgtggagttgaaacagtttggggtagccccctttactatcgccagaaatgcagaccaagaagagcttgttaaaattagtctgtcaccagagtatgtgttttccgtttccaccttccgggagctgccaagtctggagcagaagctgctgacccctatcaccacactgacgagcgaacagatccagaagttgctagcgagcacacgctaccctcctccagctgtggagtcagatgcagcagatattgtgttcctcatcgattcatccgaaggcgtccgaccagacggctttgcgcacatacgcgatttcgtctcgcgaatcgtgaggagacttaatattggaccgtcaaaggtacgggttggggtggttcaattttccaatgatgtgttcccggaattctatctgaaaacttacaggagtcaggcccctgtgctcgatgccattaggaggctgagattacgaggcggcagtcctctgaacactggaaaagcattggagtttgtagccaggaacctgttcgtgaagagcgcgggcagtaggatcgaggacggcgtgccacagcacttagttctggtactggggggaaagagccaagatgacgtgtcaagattcgcacaggtgataagaagttctggcatcgtgtcacttggggtgggggaccgcaacatcgacagaactgagctgcaaactattactaatgaccctaggttggtctttaccgttcgtgaatttcgagagctgcctaacatcgaagagcgcattatgaacagcttcgggcccagtgctgctaccccagcaccacccggggtggacacaccccccccctctagaccagagaagaagaaagccgacatagtgttcctgctggacggaagcattaattttcggcgggacagtttccaggaagtgctccggttcgtgagtgagattgtggacacagtctatgaggatggtgattcaatacaggtcggcttggtgcaatacaatagtgatcccactgacgagtttttcctcaaggatttctccacaaagcggcagataatcgacgctatcaataaggtggtctacaaaggcgggaggcatgccaacacaaaagtgggcctcgaacatctccgcgtgaatcattttgtgcctgaggcgggctctagactggatcagcgtgtacctcagatcgcttttgttatcactgggggaaaaagcgtggaagacgcacaggatgtcagcttggcgctgacacagaggggcgtgaaggtgttcgcggtgggagttagaaatatcgacagtgaagaagtgggcaagatcgcgtctaatagcgcaaccgccttccgggtcgggaacgtacaagaactttcagagctttccgaacaggtccttgaaacgctccatgatgcaatgcatgagaccctctgtcccggcgtgacagacgcggccaaggcttgcaatctggacgtgatactgggctttgatggaagtagagaccagaacgtgtttgtagctcagaaaggctttgagagtaaggtagacgctatcttgaatagaatctctcagatgcatcgggtttcctgcagtggaggacggagccccacagtacgagttagtgtggtcgctaacacccctagcggcccagtggaggctttcgattttgacgagtaccaacctgaaatgttagagaagttcaggaatatgcgaagtcagcatccgtacgtgttaacggaggacaccttaaaagtgtacctcaacaaatttaggcagtcttcccctgattcagtaaaagtggtaatacacttcaccgatggtgccgacggcgacctggcggatctacatcgcgcctctgaaaacctaagacaagagggcgtcagagctttaatcttggtcggactcgagcgagtggtgaacctggaacggttgatgcaccttgagtttgggagaggttttatgtacgaccgaccactgcgtctcaatctgctcgaccttgactacgaacttgcagagcaattggataacatcgccgagaaagcttgttgtggcgtgccctgcaagtgtagcgggcaacggggagatcgtggccctatcggcagtatcggccccaagggcattccgggagaagatggttatcggggttatccaggcgacgaaggcggtccaggggaacgaggaccacctggggtcaatggcactcagggttttcaaggatgtccgggtcaaaggggagttaagggctcaaggggatttcctggagagaaaggagaggtgggggagatcgggctcgacggcttggatggtgaggatggcgacaagggtctgcctgggagcagcggcgaaaaggggaatcccgggcgtcggggtgacaagggccctaggggtgaaaaaggcgaaaggggggacgtgggtatccgcggcgaccccggtaacccaggacaggattcacaagaaagaggtcccaagggcgagacgggtgacctgggaccaatgggcgtgcctggtagagacggggtgcctggcggccccggtgagaccggaaagaacgggggctttgggcggcgcggcccccccggcgctaaaggtaataagggcggacccggccagcccgggtttgaaggtgagcagggaacacggggtgcgcagggacccgccggtcctgccgggcctccaggccttatcggggagcaagggatatccggccctcgaggttcagggggggccgctggggccccgggcgagcggggccgaacagggccgctcgggcgaaagggtgaacctggtgaacccggcccgaaaggcggaatcggaaaccggggccctcggggcgagacaggagacgacggtagggatggcgtaggttccgagggacggcgggggaaaaaaggtgaaaggggatttccggggtatcctggccccaaagggaatcctggagagcctggtttaaacggcacaacgggtccaaaaggcatcaggggccgccgtggcaatagtggacccccagggattgtggggcagaaaggcgaccctggctaccccggacctgctggaccaaagggcaataggggcgactcaattgatcagtgtgctctgattcagagcatcaaggataagtgcccctgttgttacggacctttggaatgccccgtcttcccaacagaactcgcctttgccctcgataccagcgagggggtcaatcaggacacgtttggcagaatgcgtgacgtagtgctgagtatcgttaacgatctgactatcgctgagagcaattgtccgagaggagcacgtgtcgccgtggtgacgtacaacaatgaggttacaaccgagatcagattcgccgacagcaaaaggaagtccgtcctcctggataagatcaagaatctgcaagttgctctaacaagcaagcagcaaagccttgagaccgccatgtcctttgtcgctagaaatacattcaagagagtaaggaatgggttcctcatgcgtaaggtggcagtgtttttctccaatacgccgacgcgggccagtccacaactgcgcgaagcggtgttgaaactctctgacgcaggcattacgccgcttttcctcacccgccaggaagataggcagttgataaacgcacttcagataaataataccgcggtgggacacgcccttgtgctccctgccgggcgtgacttaacagatttcctggaaaatgtgttgacctgtcacgtctgtctagatatttgcaatatcgatcctagctgcgggtttggctcctggaggcccagcttccgcgatcggagggcagctggctcggatgttgacattgacatggcatttatacttgattcagccgagacaacaaccttgtttcagttcaacgaaatgaaaaagtatatagcctatctcgtgagacaattagatatgagtcctgacccaaaagcatcccagcatttcgctagggtggcagttgttcaacatgcgcccagcgagagcgtggacaacgcatctatgccacctgtgaaagtcgaattctccctgactgattatggcagcaaagaaaaattggtcgatttcttgtctcgggggatgacacaactgcagggaacccgtgctttaggcagcgccattgaatacacaatcgagaacgtctttgaatctgcccccaatccccgcgatcttaagattgtggttctcatgctgaccggggaggtgcccgaacaacagctcgaagaggcacaacgggttatcctgcaggctaagtgcaaaggatacttttttgtggtcttggggatcgggcgcaaggtaaacattaaggaggtctacacgttcgccagcgagcccaatgacgtgttcttcaagctagtggacaaatcaacagagctcaacgaagaacctcttatgcggtttgggagactcctaccaagtttcgtatcttcagagaatgccttctatctgtctccggatattaggaagcaatgtgattggttccagggagaccagcccacaaaaaaccttgttaaattcgggcacaagcaagtcaacgtgcccaacaatgtcacatccagtcccaccagcaatcctgtcactaccacaaagcctgtgaccactacaaaacccgttactacaacgactaaaccagtgacaactactactaaacccgtcacaattatcaatcagccaagtgtgaagcctgcggctgccaaacccgcgcctgcaaaacccgttgctgccaagccagttgcaacaaaaatggcaaccgttcggcctcctgtggcggtcaagccggcgacagcagcaaaacctgtcgccgccaaacccgccgcagtgagaccccctgccgccgcagcggccaagccagtcgccaccaaaccagaggtacctaggccacaggcggcgaaacctgctgccaccaaaccagccacaacaaaacctatggtgaaaatgtcccgagaagtgcaggtgtttgaaatcacagagaattcggccaagctgcattgggagcgagcggaacccccgggcccatacttctacgacttaactgtcacttcagctcacgatcagtctcttgtgctcaagcagaatttaactgtcacagatcgggtgatcggggggctgctggctggccagacctatcatgtcgccgtagtctgctatctgaggtcacaggttagggctacctaccacgggtctttcagtacgaagaaatcccagccccccccacctcagcccgcccgctcagcctcttccagcactataaacctcatggtgtcaactgaacccctggctctaactgagactgacatctgcaaattgccaaaggacgagggtacctgcagagacttcattctcaaatggtattacgacccaaataccaagagttgtgccagattttggtacgggggttgcggaggaaacgaaaataaattcggttcacagaaagagtgtgagaaggtctgcgcacctgtcctcgcaaagcctggcgttatatccgtcatggggacatag

SEQ ID NO: 230653 - DNA, 8916 bp, Artificial Sequence
  derived and/or modified sequence
atgcgaaaacaccgccacctgccgctggtggcagtgttttgtctcttcttaagtggttttcctacaactcatgcccagcagcaacaggctgctcaagacagcgccgatattatttttctgatagacgggtctaataatacggggtcagtaaactttgctgttattctggattttctggtaaaccttctcgaaaagctgcctattgggacccaacaaatcagagtgggagttgttcagttctcagatgagcccaggacgatgttctccctggacacctactccaccaaagcccaggtactcggcgccgtgaaggcactcggattcgccggcggcgaacttgccaacattggtcttgctttggatttcgtggtggagaaccatttcactcgcgctggcggatctcgcgttgaagagggcgtgccacaagtgctggtcctgatatctgccggtccttcctcagacgagattcgatacggtgtggttgcactcaagcaggcgagtgtgttcagtttcgggctgggagcccaggcagcttcgcgggccgagttgcaacacatcgcaaccgacgataacttagtgtttacagtaccagagtttcggtcttttggcgatttgcaagaaaagctgctgccctacatcgttggggtggcacagagacatatcgttctcaaaccacctactatcgtaacgcaagtgatcgaagtgaacaaacgcgatatagtgtttctagtggacggcagcagcgctctcggcctggccaacttcaacgccattagagacttcattgcaaaggtcatccaaagattagaaatcggtcaggatctcatccaagtcgccgtagcccagtatgcagacacagtcaggccggagttttatttcaacacacaccctaccaagcgcgaagtgattaccgccgttcggaaaatgaagcctttagatgggagcgctctctacacagggtcagctctagactttgtccgcaataatctgttcacctcttcagccggctacagggccgctgagggcataccgaaactcctagtgttgattacgggcggaaagtcactggatgagatctcacagccagcccaagaacttaagcggtccagtataatggccttcgccataggtaataagggcgctgaccaagcagagctggaggagatcgcgtttgactcatcactcgtttttattcccgcggaattccgagctgcccctctgcaggggatgctgcccggacttctggcaccgctgcgcaccttaagcggcactccagaagtgcattccaataagcgagacataatctttctgctggacggctctgcaaacgttgggaaaacaaatttcccttacgtgagggatttcgtaatgaacctggtcaacagccttgatatcgggaatgataatatcagggtcggcctggtgcagttttcagacactccagttacagagttcagtttaaacacctaccagacaaagtctgacatcctgggtcacctccgtcagttgcaactgcagggaggaagtggattgaatactgggtccgcccttagctacgtttacgccaatcacttcaccgaggccggtggaagtcggattcgggaacatgtgccacagcttctgctcctgctgaccgcaggacagagcgaggattcatacttacaggcagccaacgccttaacacgagcagggattctaacattttgcgtcggagctagccaggctaacaaggcggagctcgagcagattgcgttcaacccctcgcttgtgtatttgatggacgacttctcatcactgccggcccttccacagcagctgatccaacctcttactacttacgtatccggaggcgtcgaggaggtgcctctagcccagccggagtctaaacgagatatactttttctgtttgacggctctgccaatctggtcggtcagttcccagtagtcagagattttctctacaaaatcattgatgagctgaacgtgaaaccagagggcactaggattgccgttgcccagtattctgatgacgtcaaagtcgagtcccggtttgatgagcatcagagtaagcccgaaatacttaacctggtcaagaggatgaaaataaagacgggtaaagccctcaacctcggctacgctctggactacgcacagaggtatatcttcgtgaagtccgctgggagtcggattgaagatggagtgctccaatttctcgttcttcttgtcgccgggcggagttcggatcgggtggatggtcccgcaagcaacttaaaacagtcaggcgtggtaccattcatctttcaggcgaagaacgccgatccggccgagctggagcaaattgtactttccccagcattcatattagctgccgaatctctgcctaaaatcggtgatcttcaccctcagatcgttaatctactgaaatcagtccataacggtgcaccagcccctgtgagtggagaaaaggatgtggttttcctcctggacgggagtgagggtgtgcgcagcggatttccgcttcttaaagaattcgtgcaacgggttgtggagagtctcgatgtggggcaggatagggtgcgcgtcgccgtcgtgcaatacagtgaccgaaccaggcctgagttttatttgaactcctacatgaacaagcaggacgttgtgaacgcagtgaggcagctgactctgttgggtggcccgactccaaatacaggagctgcgctggagtttgttctgagaaatattctcgtctcaagcgcaggaagtaggattaccgaaggtgtgccgcaactgctaatcgtgttaacagcagatcggtccggggacgacgtgagaaatcctagcgtggtggtgaaaagaggcggcgctgtgcccatcggcatcgggattggcaatgccgatatcacagaaatgcaaacaatctcatttatcccggatttcgcagtcgcaatcccgaccttccgacagctgggaacggttcaacaggtgatcagcgaacgagtaactcagctgacaagagaggaactcagccggctccagcccgtgctgcagccgctgccctctcccggcgtggggggcaaaagagacgtggtgttcctgattgatggctcccaaagcgccgggcccgagttccagtacgtgcggacactaattgaaaggttggtggactacctggacgtgggatttgatacaaccagagttgctgtgatccagttcagtgatgaccccaaggtcgaattcctcctcaacgcacactcttctaaggacgaagtccagaacgccgtccagcggttacgtcctaagggtggaagacagatcaatgtcgggaatgcgctcgaatacgtgagccggaatatctttaaaagaccactcgggagcagaattgaagagggagtccctcagttcctcgtgctgatctctagcggcaagagcgatgacgaggttgatgatccggctgtagaattgaaacaattcggcgtggctccattcaccatcgccagaaacgctgatcaagaggagctggtgaagatctccctctctcccgagtacgtgttttccgtgagtacttttagggagctgcccagcttggaacagaagttactaactcccatcaccactctcacatcggaacagatccaaaagctactcgccagcacccgatacccacctcccgcagtggaaagtgacgccgcggatattgtgttcctaatcgattcaagcgagggggtcagacctgacggttttgctcatatcagagactttgtatccagaatcgttcgaagactgaatattgggccatccaaggtgagggtgggggtcgttcaattctcaaacgatgtgttcccagagttttacttaaagacgtatcgaagtcaggctccagtgctggacgccatcagaaggctcaggctgcgaggcgggtcaccactcaatacgggcaaggctctggagttcgtggccaggaatctgttcgtcaagtccgctggctcaagaatcgaggatggggtccctcagcatcttgtccttgtactaggcggcaaatcccaggacgacgtgtctagatttgcgcaggtaattaggtcatcaggaattgtatctctcggggtgggcgatagaaatatcgaccgcaccgaactgcagaccatcaccaacgacccccgacttgtgttcacagtccgtgaattccgtgaactccccaatattgaagaaagaataatgaacagctttggcccgtctgcggcaacacctgccccccctggggtggacactccacctccaagccgaccagaaaagaagaaagctgacatagtgtttctactggatgggtcgattaattttcgccgcgatagcttccaggaagtgcttcggtttgtgtccgagattgtggacaccgtgtatgaggatggagacagcattcaggtaggactcgtccagtataattccgatcctaccgacgagttctttttgaaagacttttccactaaaaggcaaatcatagatgcgataaacaaggtggtctacaagggagggagacatgcgaatacaaaggtgggcctggaacacttgcgagtgaatcatttcgtcccggaggctgggtctcggctggaccaaagggtcccccagatcgccttcgtgatcaccggaggaaaaagcgtcgaggatgcacaggacgtaagcctggcgctgacccaacgcggtgtcaaggttttcgccgtgggggttcggaatattgatagcgaagaagtggggaaaatagcctccaactcagcaaccgcgtttagggtgggcaatgtgcaggagctgagcgaactcagcgagcaggtcttggaaacgcttcatgacgccatgcacgagacgctatgccctggcgtgaccgacgcggccaaggcatgcaacctggacgtgattctaggcttcgatgggagcagagaccaaaatgtgtttgtagctcagaaagggtttgagtcaaaggtggacgctatccttaacagaatttcccagatgcacagagtttcatgctctggggggagaagcccaaccgtcagagtgtctgtggtcgccaacaccccatccggcccagtggaagctttcgacttcgatgagtaccagcctgagatgctcgagaagtttcgcaatatgaggagccagcacccttatgtgcttactgaagacaccctgaaggtttacctcaacaaattccggcaaagcagtccagattcggttaaagtggtcatccattttactgacggggccgacggcgacctggctgacctgcaccgggcctcggaaaacttacggcaagagggggtacgtgccctgatcttggtggggttagaacgggtcgttaacctcgaacgtctgatgcacctagagtttggtcgagggttcatgtacgacaggccattgagactgaatcttctggacctggattacgagcttgctgaacaacttgacaatatcgcggaaaaggcctgctgcggagtgccatgcaaatgttccgggcagagaggggataggggtcctattggaagcattggtcccaaaggcattccaggcgaggatggatatagaggctaccccggcgacgaaggaggtccgggcgagcgcgggcctccaggcgtgaatggaacccaaggcttccagggctgcccaggtcaacggggcgttaaggggtcacgcggattccccggggaaaaaggggaagtcggtgagatcggtttagacggcttagacggtgaagatggcgataaaggattgccaggtagtagtggagaaaaggggaacccaggcagacggggtgataaaggcccgcgaggggagaagggggagagaggagatgttgggataaggggggatcctgggaatcccggtcaggactcccaggagcgcggccctaagggcgagacaggagacctcggccccatgggggtgccaggccgggacggcgtaccaggcggccctggagaaacaggcaaaaacggcggatttggccggagagggcccccaggagccaaaggcaataaaggaggcccgggacaacccggctttgagggggaacagggcacccggggagctcagggaccagccggccccgccgggccacccgggctgatcggcgagcaaggaatttctggacccagagggtcaggcggggccgccggcgcccctggcgaacggggtcggacaggccccctgggacggaagggggaacccggcgaaccaggcccgaagggcggcattggcaacagggggcctcgaggcgagacaggagacgatggtagggatggggtggggtctgaagggagaaggggtaaaaagggcgagcgaggctttccagggtacccaggacccaagggaaatccaggcgagcccggcctgaatggcactaccgggccaaagggcattagagggcggagaggtaacagcggaccccctgggatcgtaggccaaaaaggcgatccagggtacccagggcccgcagggcccaaaggcaaccgtggcgatagcattgatcagtgtgctctgatacagtccatcaaggacaagtgcccttgctgctacggtccactcgagtgtccggtattcccaactgaactggcatttgccctcgatacctctgaaggcgtcaaccaggacaccttcggacgcatgcgcgatgtcgttttgagtattgtcaatgacctgaccatcgccgagagcaactgtccgcggggagctagagttgcagtcgttacttacaataacgaggttacaacggagatcaggttcgctgattccaaaagaaagtcagtgctgttagacaaaatcaaaaatctgcaggtcgcactgacgagtaagcagcagagcctggaaactgctatgagttttgtagcccggaatacctttaagagagttagaaacggttttctcatgcgtaaggtggcagtcttcttctccaacacacctaccagggctagtccacagctgcgagaagctgtactcaaactgagtgacgctggcattacccctctgtttttgactaggcaggaggatcggcagttgattaatgccctgcaaattaacaataccgctgtggggcatgcccttgtgctgcctgcaggacgggacctgactgacttcctcgagaatgtgctcacctgccacgtctgtctggatatatgcaacattgacccatcatgcggttttgggtcttggagaccaagctttcgcgaccggcgcgccgctggctcagacgtagatatagacatggcttttattttggactcggcagaaaccaccactctttttcagttcaatgaaatgaaaaaatatatagcttatttggtgcgccagctggatatgtctccagacccaaaggccagtcagcacttcgccagagtggccgtcgtacagcacgctccctcggagtcagtagataacgcgtcaatgccccctgtgaaagttgagttcagtctcacggattacggcagcaaagagaagctcgtggactttctctcaagagggatgacccaactacaagggacacgggcgctggggtctgcgattgagtacaccatcgaaaacgtatttgagtctgcccccaatccaagggatctcaagatagtcgtcttaatgctaactggcgaagtccccgagcagcaactggaggaggcacagcgcgtaattttacaagctaagtgtaaagggtactttttcgtggttttgggaattggcagaaaagtgaacatcaaggaagtgtacaccttcgcctccgagcctaacgacgtctttttcaagttggtcgacaagtccacagagttaaacgaagaacccctcatgagatttggccggctgcttccatcctttgtgtcctctgagaatgcgttctacctttcccccgatattcggaaacagtgcgactggttccagggggaccagcctaccaagaaccttgtcaaattcggccacaaacaggttaatgttcctaacaacgtaacctctagcccaactagcaatccggtaactactacaaaaccagtcactaccaccaaaccagtgactaccactaccaagccggtgacaacaacaaccaaacccgtgacaattatcaaccaaccatccgtcaaacctgccgcagcgaagcccgcgccagcaaagcccgtagcagcaaaaccagtcgcgaccaagatggctactgtgcgccctccagtcgcagtcaaaccagccacggcagccaaacccgtggcggcgaagccagctgcagtccgcccaccagccgccgctgccgctaagcctgtcgctaccaagcccgaggtgccccgaccccaagcagccaagcccgcagctacaaagcctgcaaccaccaaacctatggtgaaaatgtcacgggaggtgcaggtcttcgagattacggagaatagcgcaaagttgcactgggagcgagccgagcccccaggcccttacttctatgacctgacggtcacgagcgcacacgaccagtcactcgttttaaagcagaaccttacagtgacagacagagttatcggcggcctgctggccgggcagacataccacgtggccgttgtttgctacctgcgtagccaggtgagggctacttaccacggatcgttcagtaccaaaaagtcccagccccctcctcctcaaccggcacgcagcgctagtagcagcaccatcaatttgatggtcagcacagagcccctggctctgacagaaaccgacatctgtaaactgcctaaagatgagggcacctgtcgcgatttcatactgaaatggtactacgacccgaataccaaaagttgtgcaaggttctggtacggcgggtgtggcggaaatgaaaacaagtttgggagtcagaaagaatgcgaaaaagtatgcgccccagttctggcgaagccgggcgtcattagcgttatggggacatag

SEQ ID NO: 230654 - DNA, 8916 bp, Artificial Sequence
  derived and/or modified sequence
atgcgaaagcatagacacctccccctggtggccgttttttgtctgtttctgagcggatttccgacgactcatgcacagcagcagcaggcggcacaggattccgccgacatcatttttctgattgatggctctaacaatacaggatcagtgaacttcgcagtaatcctggatttcctggtgaacctcctggaaaagttaccaatcgggacacagcaaattagagtcggggttgtccaattttccgatgagcccaggacaatgttcagcctcgacacgtattctactaaggcacaagtgctaggcgccgtcaaggctttaggcttcgccggcggtgaattggctaatataggactggcactggacttcgtagtggaaaaccacttcactagggcaggcggctcgcgcgtggaagagggtgtacctcaggtcctggttcttatcagcgctgggcctagttctgacgaaattcgttacggagtcgtagctcttaagcaggcttctgtcttttctttcggcctcggggcccaggccgcctctcgtgcagaattacaacacattgctaccgatgacaatcttgtgtttaccgttcctgagttccgatcttttggggatctccaggaaaagctgctgccttacattgttggagtcgcacagcggcacatcgtgctcaaacctcccacaattgtcacccaggtgatcgaagtcaataagagggacatagtgttcctggtagatggcagctccgctctggggctggccaattttaatgccattcgggactttatagcaaaggttatccagaggctggagatcggccaggaccttatccaagtggccgtcgctcaatacgcggacaccgtgcgaccggaattctacttcaatacacatccaacaaagcgcgaagtcattacagcagttcgtaagatgaagccgctggacggctccgctctttatacgggtagtgcactggactttgtgaggaataatctgttcacaagctcagcgggataccgagctgccgaaggaatcccaaaactgcttgtgctgattacaggaggtaagtctctggacgaaatatctcagccagcacaggagttgaagcggtctagtataatggcatttgccatcggcaacaagggggccgatcaggctgaactggaagagatagccttcgacagctcactggtgtttatccctgccgagttccgcgccgcacccctccaggggatgcttcctggattgctggcaccactgcggacactgtccggcaccccagaggtgcacagcaataaacgtgacatcatcttcttgcttgatggatctgccaacgtcggaaagactaatttcccttatgtgcgagactttgtgatgaatcttgtcaactctttggatattggcaacgataatatccgggtgggcctcgtgcagtttagcgacacaccagtaacagaattttccctaaatacctatcagacaaagtccgacattcttggacacttgaggcagttgcagctgcagggaggatcaggcttaaacacaggctcagctctttcttacgtttacgccaaccactttactgaggccggaggaagtcgcatccgcgaacacgtaccacagttattgctgctgcttaccgccggacagtcggaggatagctacctccaggccgcgaatgccctgacaagagcaggaatcctgaccttttgtgtgggcgcctcccaagccaacaaggctgagctggagcagatcgctttcaaccctagcctcgtctatttaatggacgatttcagttctctgcccgcactgccgcagcaacttatccagcccctcactacctacgtgagcgggggtgtggaggaggtccccctcgcccagcctgagagcaaaagggacatcctctttctcttcgacgggagcgccaacctcgtgggccagtttcctgtggtgcgcgatttcctttacaaaatcatagacgaacttaacgtgaagcccgaggggaccaggatcgcagtagcccaatactcggatgatgttaaggtagaatccagattcgatgagcatcagagcaagcccgagatattgaacctggtgaagcgtatgaaaatcaaaactgggaaggcactcaacctaggatacgctctcgactatgcccagaggtatatctttgtcaaatcagccggatccagaatcgaagatggcgtcttgcagttccttgtcctactcgtcgcggggagatcttccgaccgagttgacggccctgcctccaatctcaaacagagcggggtggtcccatttatttttcaagcaaaaaacgcagatcctgccgaactggagcagattgtgctctctcccgccttcatccttgcagcagaaagcctgccaaaaatcggagaccttcacccccaaatcgtgaatctgctgaagagtgtgcacaatggggctcccgcaccagtgtccggcgaaaaggatgtcgtatttttgctggacggttccgaaggcgtaagatccggatttcctctgctcaaggaatttgttcagcgtgtggtggagagtttagacgtaggccaagaccgtgtgagggttgcagtcgtgcagtattccgatcgcactagaccagaattctacctgaacagctacatgaataagcaagatgtcgtcaatgcagtgagacagctgaccctcttaggaggccctacccctaacactggagctgccctggaatttgtattacgcaatatccttgtctctagcgctgggagccgcatcactgaaggggtgcctcaactgttgatcgtgttaaccgccgaccgcagcggcgacgacgtgcggaatccctctgtagtggttaagcgaggaggcgcagtgccgatagggattggaattggtaacgccgatatcaccgaaatgcagacaattagctttattcctgactttgccgtggctatccccacattccgtcagcttggaactgttcagcaggtgatatcagagcgggttacgcagctgacacgggaagaactgtccagactgcagccagtcctgcagcccctgccttctcccggagtgggaggtaagagggacgtggtgtttttgatagacggtagccaatcagctgggccagagttccaatatgtccgcactttaatcgagaggcttgtggactatcttgacgtagggtttgacaccactagagtggcagtgattcagtttagcgacgatccaaaagtggagtttttgttaaatgcccatagcagtaaggacgaggtgcagaacgcagtgcagaggctcagaccaaaggggggacgccagataaacgttggcaatgcactcgaatatgtaagccgaaacatttttaaaaggccactgggctcacgaatcgaggagggagtgccccagtttctggtccttatttccagcggcaagagtgacgatgaagtagatgatcccgcagtggaattgaaacaattcggggttgccccctttacaatagcaagaaacgccgatcaggaggagcttgtgaaaatctcgttgtcacccgagtatgtgttcagcgtatcaaccttccgtgaattgccatccttggagcagaaactgttgaccccaatcactaccctgaccagtgaacagattcagaagttgctggcaagcaccaggtacccgcctcctgcagtcgaatccgacgccgccgacatcgtgtttttgatcgactcatctgagggcgttaggccagatggttttgcgcacatcagggatttcgtgtcacgcatcgtcaggaggctaaacattgggccgagcaaagtaagggtgggcgtagtccaattctcgaacgatgtgttcccggagttttatctcaagacctaccggagtcaagctccagttcttgatgccatccgcagactgcgtctaaggggtggctctccattgaacaccgggaaggcacttgaatttgtggctcggaatctgttcgtgaagtctgccgggtcccggatagaggatggcgtcccccagcaccttgttctggttttagggggaaaatcccaggatgatgtcagcagattcgcccaggtgatccgtagctctggtattgtaagtttaggtgtgggggaccgaaatatcgaccgcaccgaactgcagaccattactaacgacccccgcctcgtgttcacagtgagagaattccgcgagctgccaaacatagaagagcgtatcatgaactcttttggcccttccgccgcaacgccggccccgccaggagttgacaccccgccaccttccaggccagagaaaaaaaaggctgatatcgtctttttactagatggctccattaacttccggcgggacagcttccaagaggtgctgcgttttgtgtcagagattgtggacaccgtgtacgaggatggggattcaatacaggtcggcttagtgcagtataacagtgaccctaccgatgaattctttctgaaagattttagcactaagcgtcaaataatcgacgcaattaataaggtggtgtataagggtgggcgccacgccaataccaaggtgggactggagcacctccgggtcaatcacttcgtgcctgaagccgggagcagattggatcagagggttccccagattgcatttgtcattaccggcggaaagtctgtggaggatgcccaggacgtatcactggcgctcactcagcgcggagtaaaggtgttcgcagtaggcgttagaaatatagactctgaagaagtgggcaaaatcgcgagtaactcagctaccgccttcagggttggcaatgtgcaggaacttagcgagctgagcgagcaggttctggagacactgcatgatgccatgcatgagactctttgccccggggtcacagacgcagcaaaagcatgcaacctggacgttatcctgggctttgatgggagcagagaccagaatgtatttgtggcccagaaagggttcgagtcaaaggtggacgctatactgaatagaatctcccagatgcaccgggtgagctgttctggggggcgaagccccaccgtgagagtatctgtcgtagctaataccccctccggtccggtggaggcatttgacttcgatgagtaccagcctgaaatgttggaaaaatttcgaaatatgcgttcacagcacccatatgtgcttaccgaagataccttaaaggtctatctaaacaagttcaggcagtcaagcccagactcagtgaaggtggtcatccacttcacagacggggcagacggggacctggctgacctgcatcgcgcttcagaaaatctgcggcaggaaggggtccgcgctctgatcctggtaggactggagcgggtagtgaacctggaacgtctgatgcaccttgaatttggtcgggggtttatgtatgacagaccattgcgcctgaatctgctggatctcgattatgagcttgccgaacagttggacaacatcgcagaaaaggcctgttgtggcgttccatgcaaatgcagtggacagcggggagaccgagggcctataggtagtattggtcccaaaggaatccccggggaagacggctatcggggctaccccggggacgagggtgggcctggggagcgagggcctccaggtgtcaatggcacacagggctttcagggctgtcctggccagcgaggagtcaaaggatccaggggctttcccggtgagaagggggaagtcggcgagattggcctggatggtctagacggggaagatggcgataaaggactgcctggttcgagcggggagaaaggcaatccaggacgccgcggagacaaaggccctcgaggtgagaaaggagagagaggtgacgtggggattcgcggcgaccctgggaaccccggccaggatagccaggaacgaggaccaaagggcgagaccggcgatttagggccaatgggcgttcccgggcgggacggggtccctggtgggcctggtgaaaccggcaaaaacggcggctttggtagaaggggcccccccggggccaagggaaacaagggtgggcctggtcaaccaggtttcgagggtgaacagggcactaggggggcccaaggaccagctggtcccgccggcccacctgggctgataggagaacagggcatcagcggaccccgtggaagcggcggtgccgctggggctcctggggagcgaggacgcacggggccacttggcagaaagggagagcccggtgagccagggcccaagggtggcattggtaaccgtggtcctcgaggagaaaccggcgacgacggcagagacggagtgggcagcgagggtaggcgcgggaagaagggagaaagggggttccccggataccccggccccaagggcaatcccggggagccaggattaaacgggacaacaggcccgaaaggcatccgggggagacgcgggaactccggcccccctggaatcgtcggccagaaaggcgatcctgggtatccagggcctgccggcccgaaaggcaacagaggggactctattgatcagtgtgctctcatccaatctatcaaggataaatgcccatgctgctatgggcccctggagtgccccgtgtttccgacagaattggcttttgcactggacacatctgagggggttaaccaggatacatttgggaggatgagggatgtggtcttgtctattgtaaacgaccttaccatcgccgagagtaactgtcccagaggagcccgcgtggccgtggtgacgtacaataacgaagtcacaactgagatcaggttcgctgatagcaagcggaagagcgtgctcctggataaaataaaaaacctgcaagttgcactcacctcgaagcagcagtctctggagacagcaatgagctttgtcgcccgaaacaccttcaagagggtacgcaacggtttcctgatgcggaaagtcgctgtgtttttttctaacacccctaccagggcctccccccaacttcgggaagccgtccttaaactgagcgacgcaggaatcactcctctgtttttgacccgtcaggaggataggcagctgatcaacgccctgcagataaacaatacggcagtggggcacgctctggtgcttccagctggccgagatctgacggattttctcgagaacgttctgacttgtcacgtgtgtttagacatctgtaatatagatccctcctgcgggtttgggagttggagaccttctttcagggaccggcgcgccgctggttctgacgtagatatcgatatggcatttatcttagacagcgcagagacaacaacccttttccagttcaatgagatgaagaaatacattgcatatttagtacgtcagctcgacatgtctccagaccctaaggcctcacagcactttgctcgagtcgccgtggtgcaacacgcaccatccgagagcgttgataatgcgtcaatgcctccagtgaaggtggagtttagcctgacggattatggcagcaaagaaaagctcgtagacttcctttctcgtgggatgacgcaactgcagggtacaagagcactaggtagcgcgatcgagtatactatcgaaaacgtgtttgaatccgccccgaatcctagagacctcaaaatcgtggtgctcatgctgacgggggaggttcccgagcagcagttggaggaggcccaacgagtaatacttcaggccaagtgtaaaggatacttttttgtggtcttaggaattggtcggaaagttaatatcaaagaagtgtacactttcgctagcgaaccgaacgatgtattctttaaactggttgataaaagtacggagctcaacgaggagccactgatgcgctttggccgtttgctgccatcgttcgtatcgtctgagaatgctttctatctttcccccgacattagaaagcagtgcgactggtttcagggcgatcagcctacgaagaatcttgtgaaattcggtcacaaacaggtgaacgttccaaacaacgtgacttcctcacctacctccaatccagtcaccaccacaaaaccagtgactacaaccaagcccgtgaccaccaccaccaagcccgttaccacaacaaccaagccggtcacaattataaatcagccgagcgtcaaaccagcagccgccaagcctgcccctgcaaaaccagtcgctgccaaacccgtagccacaaagatggccactgtgagacctccagttgccgtcaagccagcgactgccgcaaagcccgtggccgctaaaccagccgctgtgcggcctccagcagctgccgccgctaaacctgtggctacaaagccagaagtcccacgaccccaagccgcaaaaccagccgctaccaagccggccaccacaaagcccatggtgaaaatgtctagggaggtgcaggtgttcgagatcactgagaattccgcgaaactccattgggagagggcggagccacccggaccttacttttatgacctcactgttacttcagcacacgatcagtccctcgttctgaaacaaaatcttactgtgactgacagagtgattgggggactgttggccggacagacctaccacgttgcggtggtctgctacttgcgatcccaagtgcgggccacctaccacggttccttcagtacaaagaaatcgcagcccccccctcctcagccagccagaagcgcttccagcagcactattaatctaatggtttctaccgaaccactggcgctcaccgagactgacatctgtaaactgccaaaggacgagggtacctgccgcgacttcattctgaaatggtactacgatccaaacactaaatcctgtgccaggttttggtatggtggttgtggggggaacgagaacaaatttggatctcaaaaagagtgcgaaaaggtgtgcgcccctgttctggccaaaccaggagtgatcagcgtgatgggtacttag

SEQ ID NO: 230655 - DNA, 8931 bp, Artificial Sequence
  derived and/or modified sequence
atgaggaagcaccgccacctgcccctggtggccgtgttctgcctcttcctgagcggcttccccaccacccacgcccagcagcagcaggctgatgtgaagaatggagctgctgctgacatcatcttcctggtggacagctcctggaccatcggggaggagcacttccagctggtgcgggagttcctgtatgatgtggtgaagagcctggccgtgggagaaaatgacttccactttgccctggtgcagttcaacggcaacccccacacagagttcctgctgaacacctaccgcaccaagcaggaggtgctgagccacatcagcaacatgagctacatcggcggcaccaaccagacaggcaagggcctggagtacatcatgcagagccacctgaccaaggccgccggcagcagagctggagatggagtgccccaggtgattgtggtgctgacagatggccacagcaaggatggcctggccctgcccagcgctgagctgaagtctgcagatgtgaatgtgtttgccatcggcgtggaggatgctgatgaaggagccctgaaggagatcgccagcgagcccctgaacatgcacatgttcaacctggagaacttcaccagcctgcatgacatcgtgggcaacctggtgtcctgtgtgcacagctctgtgtccccagagcgggccggggacacagagaccctgaaggacatcaccgtcatcgaggtgaacaagagggacatcgtgttcctggtggatggcagcagcgccctgggcctggccaacttcaatgccatccgggacttcatcgccaaggtgatccagaggctggagatcggccaggacctgatccaggtggccgtggcccagtatgctgacacagtgcggcctgagttctacttcaacacccaccccaccaagcgggaggtgatcacagctgtgaggaagatgaagcccctggatggcagcgccctgtacacaggcagcgccctggactttgtgaggaacaacctcttcaccagcagcgctggctacagagctgctgagggcatccccaagctgctggtgctgatcaccggcggcaagagcctggatgagatcagccagcctgcccaggagctgaagaggagcagcatcatggcctttgccatcggcaacaagggagctgaccaggccgagctggaggagatcgcctttgacagcagcctggtgttcatcccagctgagttccgggccgcccccctgcagggcatgctgcccggcctgctggcccccctgcggaccctgagcggcaccccagaggtgcacagcaacaagagggacatcatcttcctgctggatggcagcgccaacgtgggcaagaccaacttcccctacgtgcgggactttgtgatgaacctggtgaacagcctggacattggaaatgacaacatccgggtgggcctggtgcagttcagtgacacccctgtgacagagttcagcctgaacacctaccagaccaagagtgacatcctgggccacctgcggcagctgcagctgcagggcggcagcggcctgaacacaggcagcgccctgtcctatgtgtatgccaaccacttcacagaagctgggggcagccgcatccgggagcacgtgccccagctgctgctgctgctgacagctggccagagtgaagattcctacctgcaggccgccaatgccctgacccgggccggcatcctgaccttctgtgtgggcgccagccaggccaacaaggccgagctggagcagatcgccttcaaccccagcctggtgtacctgatggatgacttcagcagcctgcctgccctgccccagcagctgatccagcccctgaccacctacgtgtctgggggcgtggaggaggtgcccctggcccagcctgagagcaagagggacatcctcttcctgtttgatggcagcgccaacctggtgggccagtttcctgtggtgcgggacttcctgtacaagatcattgatgagctgaatgtgaagccagagggcaccagaattgctgtggcccagtacagtgatgatgtgaaggtggagagcagatttgatgagcaccagagcaagccagagatcctgaacctggtgaagaggatgaagatcaagacaggcaaggccctgaacctgggctacgccctggactatgcccagcgctacatctttgtgaagtctgctggcagcagaattgaagatggagtgctgcagttcctggtgctgctggtggccggccgcagcagtgacagagtggatggccctgccagcaacctgaagcagagcggcgtggtgcccttcatcttccaggccaagaatgctgaccctgctgagctggagcagatcgtgctgagccctgccttcatcctggccgctgagagcctgcccaagattggagacctgcacccccagatcgtgaacctgctgaagtctgtgcacaatggagccccagcccctgtgtctggagagaaggatgtggtgttcctgctggatggcagcgagggcgtgcgcagcggcttccccctgctgaaggagtttgtgcagagggtggtggagagcctggatgtgggccaggacagagtgcgggtggccgtggtgcagtacagcgacaggaccaggcctgagttctacctgaacagctacatgaacaagcaggatgtggtgaatgctgtgcggcagctgaccctgctgggcggccccacccccaacacaggagctgccctggagtttgtgctgaggaacatcctggtgagcagcgctggcagccgcatcacagagggcgtgccccagctgctgattgtgctgacagctgacagaagtggagatgatgtgaggaaccccagcgtggtggtgaagagaggaggagctgtgcccatcggcatcggcattggaaatgctgacatcacagagatgcagaccatctccttcatcccagactttgctgtggccatccccaccttccggcagctgggcaccgtgcagcaggtgatcagcgagcgggtgacccagctgacccgggaggagctgagccggctgcagcctgtgctgcagcccctgcccagccctggggtgggcggcaagagagatgtggtgttcctgattgatggcagccagagcgctggccctgagttccagtatgtgaggaccctcatcgagcggctggtggactacctggatgtgggctttgacaccaccagggtggccgtcatccagttcagtgatgaccccaaggtggagttcctgctgaatgcccacagcagcaaggatgaggtgcagaatgctgtgcagaggctgcggcccaagggcggccggcagatcaacgtgggcaatgccctggagtatgtgtccaggaacatcttcaagaggcccctgggcagcagaattgaggagggcgtgccccagttcctggtgctgatcagcagcggcaagagtgatgatgaggtggatgatcctgctgtggagctgaagcagtttggagtggcccccttcaccatcgccagaaatgctgaccaggaggagctggtgaagatcagcctgagcccagaatatgtgttttctgtgtccaccttccgggagctgcccagcctggagcagaagctgctgacccccatcaccaccctgaccagcgagcagatccagaagctgctggccagcacccgctacccacctcctgctgtggagagtgatgctgctgacatcgtgttcctgattgacagcagcgagggcgtgcggccagatggctttgcccacatccgggactttgtgtccagaattgtgcggcggctgaacatcggccccagcaaggtgcgggtgggcgtggtgcagttcagcaatgatgtgtttcctgagttctacctgaagacctaccgcagccaggcccctgtgctggatgccatccggcggctgcggctgcggggcggcagccccctgaacacaggcaaggccctggagtttgtggccaggaacctgtttgtgaagtctgctggcagcagaattgaagatggagtgccccagcacctggtgctggtgctgggcggcaagagccaggatgatgtgtccagatttgcccaggtgatccgcagcagcggcatcgtgtccctgggcgtgggggacagaaatattgacagaacagagctgcagaccatcaccaatgacccccggctggtgttcaccgtgcgggagttccgggagctgcccaacatcgaggagcgcatcatgaacagctttggccccagcgctgccaccccagcccctcctggggtggacaccccaccacccagcaggcctgagaagaagaaggctgacatcgtgttcctgctggatggcagcatcaacttccggcgggacagcttccaggaggtgctgcgctttgtgtctgagatcgtggacacagtgtatgaagatggagacagcatccaggtgggcctggtgcagtacaacagcgaccccacagatgagttcttcctgaaggacttcagcaccaagaggcagatcattgatgccatcaacaaggtggtgtacaagggcggcagacatgccaacaccaaggtgggcctggagcacctgcgggtgaaccactttgtgcctgaggccggcagccggctggaccagagggtgccccagatcgcctttgtgatcaccggcggcaagtctgtggaggatgcccaggatgtgtccctggccctgacccagaggggcgtgaaggtgtttgctgtgggcgtgaggaacatcgacagcgaggaggtgggcaagatcgccagcaacagcgccacagccttccgggtgggcaatgtgcaggagctgtctgagctgtctgagcaggtgctggagaccctgcatgatgccatgcatgagaccctgtgccctggggtgacagatgctgccaaggcctgcaacctggatgtgatcctgggctttgatggcagccgggaccagaatgtgtttgtggcccagaagggctttgagagcaaggtggatgccatcctgaaccgcatcagccagatgcaccgggtgtcctgcagcggcggccgcagccccaccgtgcgggtgtctgtggtggccaacacccccagcggccctgtggaggcctttgattttgatgagtaccagcctgagatgctggagaagttcaggaacatgaggagccagcacccctacgtgctgacagaggacaccctgaaggtgtacctgaacaagttccggcagagcagcccagattctgtgaaggtggtgatccacttcacagatggagcagatggagacctggccgacctgcaccgggccagcgagaacctgcggcaggagggcgtgcgggccctgatcctggtgggcctggagcgggtggtgaacctggagcggctgatgcacctggagtttggccggggcttcatgtatgaccggcccctgcggctgaacctgctggacctggactatgagctggccgagcagctggacaacattgctgagaaggcctgctgcggcgtgccctgcaagtgcagcggccagagaggagaccggggccccatcggcagcatcggccccaagggcatccctggagaagatggctaccggggctacccaggagatgaaggaggccctggagagcggggccccccaggagtgaatggcacccagggcttccagggctgccccggccagaggggcgtgaagggcagccggggcttccctggagagaagggggaggtgggggagatcggcctggatggcctggatggagaagatggagacaagggcctgcccggcagcagcggggagaagggcaaccctggccggcggggggacaagggccccagaggagagaagggggagagaggagatgtgggcatccggggggaccccggcaaccctggccaggacagccaggagcggggccccaagggggagaccggggacctgggccccatgggcgtgcccggcagagatggagtgcctgggggccctggagaaacaggcaagaatggaggctttggaagaagaggccccccaggggccaagggcaacaagggcggccctggccagcccggctttgaaggagagcagggcaccaggggggcccagggccctgctggccctgctggccccccaggcctgattggagagcagggcatcagcggcccccggggcagcggcggggccgccggggcccctggagagcggggccgcacaggccccctgggcaggaaaggagagcccggggagcccggccccaagggcggcatcggcaacagaggccccagaggagaaacaggagatgatggaagagatggagtgggcagcgagggcagaagaggcaagaagggggagcggggcttccctggctacccaggccccaagggcaaccctggagagcccggcctgaatggcaccaccggccccaagggcatccggggcagaagaggcaacagcggccccccaggcatcgtgggccagaagggggaccccggctacccaggccctgctggccccaagggcaacagaggagacagcattgaccagtgtgccctgatccagagcatcaaggacaagtgcccctgctgctacggccccctggagtgccctgtgttccccacagagctggcctttgccctggacaccagcgagggcgtgaaccaggacacctttggaaggatgagagatgtggtgctgagcatcgtgaatgacctgaccatcgccgagagcaactgccccaggggggcccgggtggccgtggtgacctacaacaatgaggtgaccacagagatccgctttgctgacagcaagaggaagtctgtgctgctggacaagatcaagaacctgcaggtggccctgaccagcaagcagcagagcctggagacagccatgagctttgtggccaggaacaccttcaagagggtgagaaatggcttcctgatgaggaaggtggccgtgttcttcagcaacacccccacccgggccagcccccagctgcgggaggccgtgctgaagctgagtgatgctggcatcacccccctcttcctgacccggcaggaggaccggcagctgatcaatgccctgcagatcaacaacacagctgtgggccacgccctggtgctgcctgctggccgggacctgacagacttcctggagaatgtgctgacctgccacgtgtgcctggacatctgcaacatcgaccccagctgtggcttcggctcctggaggcccagcttccgggaccggcgggctgctggcagtgatgtggacatcgacatggccttcatcctggacagcgctgagaccaccaccctcttccagttcaatgagatgaagaagtacatcgcctacctggtgcggcagctggacatgagcccagaccccaaggccagccagcactttgcccgggtggccgtggtgcagcacgcccccagcgagagcgtggacaatgcctccatgcctcctgtgaaggtggagttcagcctgacagattatggcagcaaggagaagctggtggacttcctgagccggggcatgacccagctgcagggcacccgggccctgggcagcgccatcgagtacaccattgaaaatgtgtttgagagcgcccccaacccccgggacctgaagatcgtggtgctgatgctgactggagaggtgcctgagcagcagctggaggaggcccagagggtcatcctgcaggccaagtgcaagggctacttctttgtggtgctgggcattggaaggaaggtgaacatcaaggaggtgtacacctttgccagcgagcccaatgatgtgttcttcaagctggtggacaagagcacagagctgaatgaggagcccctgatgagatttggccgcctgctgcccagctttgtgtccagtgaaaatgccttctacctgagcccagacatcaggaagcagtgtgactggttccagggcgaccagcccaccaagaacctggtgaagtttggccacaagcaggtgaatgtgcccaacaacgtgaccagcagccccaccagcaaccctgtgaccaccaccaagcctgtgaccaccaccaagcctgtgaccaccaccaccaagcctgtgaccaccaccaccaagcctgtgaccatcatcaaccagcccagcgtgaagccagctgctgccaagccagccccagccaagcctgtggccgccaagcctgtggccaccaagatggccaccgtgcggccccctgtggccgtgaagccagccacagctgccaagcctgtggccgccaagccagctgctgtgcggcccccagctgctgctgctgccaagcctgtggccaccaagccagaggtgccccggccccaggccgccaagccagctgccaccaagccagccaccaccaagcccatggtgaagatgagccgggaggtgcaggtgtttgagatcacagaaaattctgccaagctgcactgggagagagctgagcccccaggcccctacttctatgacctgactgtgaccagcgcccatgaccagagcctggtgctgaagcagaacctgactgtgacagacagagtcatcggcggcctgctggccggccagacctaccacgtggccgtggtgtgctacctgcggagccaggtgcgggccacctaccacggcagcttcagcaccaagaagagccagcccccaccaccccagcctgcccggagcgccagcagcagcaccatcaacctgatggtgtccacagagcccctggccctgacagaaacagacatctgcaagctgcccaaggatgagggcacctgccgggacttcatcctgaagtggtactatgaccccaacaccaagagctgtgcccgcttctggtatggaggctgcggcggcaatgaaaacaagtttggcagccagaaggaatgtgagaaggtgtgtgcccctgtgctggccaagccaggagtcatctctgtgatgggcacctag

SEQ ID NO: 230656 - DNA, 8916 bp, Artificial Sequence
  derived and/or modified sequence
atgaggaagcaccgccacctgcccctggtggccgtgttctgcctcttcctgagcggcttccccaccacccacgcccagcagcagcaggccgcccaggacagcgctgacatcatcttcctgattgatggcagcaacaacacaggctctgtgaactttgctgtgatcctggacttcctggtgaacctgctggagaagctgcccatcggcacccagcagatccgggtgggcgtggtgcagttcagtgatgagcccaggaccatgttcagcctggacacctacagcaccaaggcccaggtgctgggcgctgtgaaggccctgggctttgctggaggagagctggccaacatcggcctggccctggactttgtggtggagaaccacttcaccagggctgggggcagccgggtggaggagggcgtgccccaggtgctggtgctgatctctgctggccccagcagtgatgagatccgctatggagtggtggccctgaagcaggcctctgtgttctcctttggcctgggcgcccaggccgccagcagagctgagctgcagcacatcgccacagatgacaacctggtgttcaccgtgcctgagttccgcagctttggagacctgcaggagaagctgctgccctacatcgtgggcgtggcccagaggcacatcgtgctgaagccacccaccatcgtgacccaggtgattgaggtgaacaagagggacatcgtgttcctggtggatggcagcagcgccctgggcctggccaacttcaatgccatccgggacttcatcgccaaggtgatccagaggctggagatcggccaggacctgatccaggtggccgtggcccagtatgctgacacagtgcggcctgagttctacttcaacacccaccccaccaagcgggaggtgatcacagctgtgaggaagatgaagcccctggatggcagcgccctgtacacaggcagcgccctggactttgtgaggaacaacctcttcaccagcagcgctggctacagagctgctgagggcatccccaagctgctggtgctgatcactggaggcaagagcctggatgagatcagccagcctgcccaggagctgaagaggagcagcatcatggcctttgccatcggcaacaagggagctgaccaggccgagctggaggagatcgcctttgacagcagcctggtgttcatcccagctgagttccgggccgcccccctgcagggcatgctgcccggcctgctggcccccctgcggaccctgagcggcaccccagaggtgcacagcaacaagagggacatcatcttcctgctggatggcagcgccaacgtgggcaagaccaacttcccctacgtgcgggactttgtgatgaacctggtgaacagcctggacattggaaatgacaacatccgggtgggcctggtgcagttcagtgacacccctgtgacagagttcagcctgaacacctaccagaccaagagtgacatcctgggccacctgcggcagctgcagctgcagggcggcagcggcctgaacacaggcagcgccctgtcctatgtgtatgccaaccacttcacagaggccggcggcagccgcatccgggagcacgtgccccagctgctgctgctgctgacagctggccagagcgaggacagctacctgcaggccgccaatgccctgaccagggctggcatcctgaccttctgtgtgggcgccagccaggccaacaaggccgagctggagcagatcgccttcaaccccagcctggtgtacctgatggatgacttcagcagcctgcctgccctgccccagcagctgatccagcccctgaccacctacgtgtctggaggagtggaggaggtgcccctggcccagcctgagagcaagagggacatcctcttcctgtttgatggcagcgccaacctggtgggccagtttcctgtggtgcgggacttcctgtacaagatcattgatgagctgaatgtgaagccagagggcaccagaattgctgtggcccagtacagtgatgatgtgaaggtggagagcagatttgatgagcaccagagcaagccagagatcctgaacctggtgaagaggatgaagatcaagacaggcaaggccctgaacctgggctacgccctggactatgcccagcgctacatctttgtgaagtctgctggcagcagaattgaagatggagtgctgcagttcctggtgctgctggtggccggccgcagcagtgacagagtggatggccctgccagcaacctgaagcagagcggcgtggtgcccttcatcttccaggccaagaatgctgaccctgctgagctggagcagatcgtgctgagccctgccttcatcctggccgctgagagcctgcccaagatcggggacctgcacccccagatcgtgaacctgctgaagtctgtgcacaacggggccccagcccctgtgtctggagagaaggatgtggtgttcctgctggatggcagcgagggcgtgcgcagcggcttccccctgctgaaggagtttgtgcagagggtggtggagagcctggatgtgggccaggacagagtgcgggtggccgtggtgcagtacagcgacaggaccaggcctgagttctacctgaacagctacatgaacaagcaggatgtggtgaatgctgtgcggcagctgaccctgctgggcggccccacccccaacacaggagctgccctggagtttgtgctgaggaacatcctggtgtcctctgctggcagccgcatcacagaaggagtgccccagctgctgattgtgctgacagctgacagaagtggagatgatgtgaggaaccccagcgtggtggtgaagaggggcggcgctgtgcccatcggcattggaattggaaatgctgacatcacagagatgcagaccatctccttcatcccagactttgctgtggccatccccaccttccggcagctgggcaccgtgcagcaggtgatcagcgagcgggtgacccagctgacccgggaggagctgagccggctgcagcctgtgctgcagcccctgcccagccctggggtgggcggcaagagagatgtggtgttcctgattgatggcagccagagcgctggccctgagttccagtatgtgaggaccctgattgagcggctggtggactacctggatgtgggctttgacaccaccagggtggccgtcatccagttcagtgatgaccccaaggtggagttcctgctgaatgcccacagcagcaaggatgaggtgcagaatgctgtgcagaggctgcggcccaagggcggccggcagatcaacgtgggcaatgccctggagtatgtgtccaggaacatcttcaagaggcccctgggcagccgcatcgaggagggcgtgccccagttcctggtgctgatcagcagcggcaagagtgatgatgaggtggatgatcctgctgtggagctgaagcagtttggagtggcccccttcaccatcgccagaaatgctgaccaggaggagctggtgaagatcagcctgagcccagaatatgtgttttctgtgtccaccttccgggagctgcccagcctggagcagaagctgctgacccccatcaccaccctgaccagcgagcagatccagaagctgctggccagcacccgctacccacctcctgctgtggagagtgatgctgctgacatcgtgttcctgattgacagcagcgagggcgtgcggccagatggctttgcccacatccgggactttgtgagccgcatcgtgcggcggctgaacatcggccccagcaaggtgcgggtgggcgtggtgcagttcagcaatgatgtgtttcctgagttctacctgaagacctaccgcagccaggcccctgtgctggatgccatccggcggctgcggctgcggggcggcagccccctgaacacaggcaaggccctggagtttgtggccaggaacctgtttgtgaagtctgctggcagcagaattgaagatggagtgccccagcacctggtgctggtgctgggcggcaagagccaggatgatgtgtccagatttgcccaggtgatccgcagcagcggcatcgtgtccctgggcgtgggggacaggaacatcgacagaacagagctgcagaccatcaccaatgacccccggctggtgttcaccgtgcgggagttccgggagctgcccaacatcgaggagcgcatcatgaacagctttggccccagcgctgccaccccagcccctcctggggtggacaccccaccacccagcaggcctgagaagaagaaggctgacatcgtgttcctgctggatggcagcatcaacttcagaagagacagcttccaggaggtgctgcgctttgtgtctgaaattgtggacacagtgtatgaagatggagacagcatccaggtgggcctggtgcagtacaacagcgaccccacagatgagttcttcctgaaggacttcagcaccaagaggcagatcattgatgccatcaacaaggtggtgtacaagggcggcagacatgccaacaccaaggtgggcctggagcacctgcgggtgaaccactttgtgcctgaggccggcagccggctggaccagagggtgccccagatcgccttcgtcatcactggaggcaagtctgtggaggatgcccaggatgtgtccctggccctgacccagaggggcgtgaaggtgtttgctgtgggcgtgagaaatattgattctgaggaggtgggcaagatcgccagcaacagcgccacagccttccgggtgggcaatgtgcaggagctgtctgagctgtctgagcaggtgctggagaccctgcatgatgccatgcatgagaccctgtgccctggggtgacagatgctgccaaggcctgcaacctggatgtgatcctgggctttgatggcagccgggaccagaatgtgtttgtggcccagaagggctttgagagcaaggtggatgccatcctgaaccgcatcagccagatgcaccgggtgtcctgcagcggcggccgcagccccaccgtgcgggtgtctgtggtggccaacaccccatctggccctgtggaggcctttgattttgatgagtaccagcctgagatgctggagaagttcaggaacatgaggagccagcacccctacgtgctgacagaggacaccctgaaggtgtacctgaacaagttccggcagagcagcccagacagcgtgaaggtggtgatccacttcacagatggagcagatggagacctggccgacctgcaccgggccagcgagaacctgcggcaggagggcgtgcgggccctgatcctggtgggcctggagcgggtggtgaacctggagcggctgatgcacctggagtttggccggggcttcatgtatgaccggcccctgcggctgaacctgctggacctggactatgagctggccgagcagctggacaacattgctgagaaggcctgctgcggcgtgccctgcaagtgcagcggccagagaggagaccggggccccatcggcagcatcggccccaagggcatccctggagaagatggctaccggggctacccaggagatgagggcggccctggagagcggggccccccaggagtgaatggcacccagggcttccagggctgccccggccagaggggcgtgaagggcagccggggcttccctggagagaagggggaggtgggggagatcggcctggatggcctggatggagaagatggagacaagggcctgcccggcagcagtggagagaagggcaaccctggaagaagaggagacaagggccccagaggagagaagggggagagaggagatgtgggcatccggggggaccccggcaaccctggccaggacagccaggagcggggccccaagggggagactggagacctgggccccatgggcgtgcccggcagagatggagtgcctgggggccctggagagaccgggaagaatggaggcttcggccggcggggccccccaggggccaagggcaacaagggcggccctggccagcccggctttgaaggagagcagggcaccaggggggcccagggccctgctggccctgctggccccccaggcctcatcggggagcagggcatcagcggcccccggggcagcggcggcgctgctggggcccctggagagcggggccgcacaggccccctgggcaggaagggggagcctggagagcccggccccaagggcggcatcggcaacagaggccccagaggagaaacaggagatgatggaagagatggagtgggcagcgagggccggcggggcaagaagggggagcggggcttccctggctacccaggccccaagggcaaccctggagagcccggcctgaatggcaccaccggccccaagggcatccggggccggcggggcaacagcggccccccaggcatcgtgggccagaagggggaccccggctacccaggccctgctggccccaagggcaacagaggagacagcattgaccagtgtgccctgatccagagcatcaaggacaagtgcccctgctgctacggccccctggagtgccctgtgttccccacagagctggcctttgccctggacaccagcgagggcgtgaaccaggacaccttcggccgcatgagagatgtggtgctgagcatcgtgaatgacctgaccatcgccgagagcaactgccccaggggggcccgggtggccgtggtgacctacaacaatgaggtgaccacagagatccgctttgctgacagcaagaggaagtctgtgctgctggacaagatcaagaacctgcaggtggccctgaccagcaagcagcagagcctggagacagccatgagctttgtggccaggaacaccttcaagagggtgagaaatggcttcctgatgaggaaggtggccgtgttcttcagcaacacccccacccgggccagcccccagctgcgggaggccgtgctgaagctgagtgatgctggcatcacccccctcttcctgacccggcaggaggaccggcagctgatcaatgccctgcagatcaacaacacagctgtgggccacgccctggtgctgcctgctggccgggacctgacagacttcctggagaatgtgctgacctgccacgtgtgcctggacatctgcaacatcgaccccagctgtggcttcggctcctggaggcccagcttccgggacagaagagctgctggcagtgatgtggacatcgacatggccttcatcctggacagcgctgagaccaccaccctcttccagttcaatgagatgaagaagtacatcgcctacctggtgcggcagctggacatgagcccagaccccaaggccagccagcactttgcccgggtggccgtggtgcagcacgcccccagcgagagcgtggacaatgcctccatgcctcctgtgaaggtggagttcagcctgacagattatggcagcaaggagaagctggtggacttcctgagccggggcatgacccagctgcagggcacccgggccctgggcagcgccatcgagtacaccattgaaaatgtgtttgaaagtgcccccaacccccgggacctgaagatcgtggtgctgatgctgaccggggaggtgcctgagcagcagctggaggaggcccagagggtcatcctgcaggccaagtgcaagggctacttctttgtggtgctgggcatcggcaggaaggtgaacatcaaggaggtgtacacctttgccagcgagcccaatgatgtgttcttcaagctggtggacaagagcacagagctgaatgaggagcccctgatgagatttggccgcctgctgcccagctttgtgtccagtgaaaatgccttctacctgagcccagacatcaggaagcagtgtgactggttccagggcgaccagcccaccaagaacctggtgaagtttggccacaagcaggtgaatgtgcccaacaacgtgaccagcagccccaccagcaaccctgtgaccaccaccaagcctgtgaccaccaccaagcctgtgaccaccaccaccaagcctgtgaccaccaccaccaagcctgtgaccatcatcaaccagcccagcgtgaagccagctgctgccaagccagccccagccaagcctgtggccgccaagcctgtggccaccaagatggccaccgtgcggccccctgtggccgtgaagccagccacagctgccaagcctgtggccgccaagccagctgctgtgcggcccccagctgctgctgctgccaagcctgtggccaccaagccagaggtgccccggccccaggccgccaagccagctgccaccaagccagccaccaccaagcccatggtgaagatgagccgggaggtgcaggtgtttgagatcacagagaacagcgccaagctgcactgggagcgggcagagcccccaggcccctacttctatgacctgactgtgaccagcgcccatgaccagagcctggtgctgaagcagaacctgactgtgacagacagagtgattggaggcctgctggccggccagacctaccacgtggccgtggtgtgctacctgcggagccaggtgcgggccacctaccacggcagcttcagcaccaagaagagccagcccccaccaccccagcctgcccggagcgccagcagcagcaccatcaacctgatggtgtccacagagcccctggccctgacagaaacagacatctgcaagctgcccaaggatgagggcacctgccgggacttcatcctgaagtggtactatgaccccaacaccaagagctgtgcccgcttctggtacggcggctgcggcggcaatgaaaacaagtttggcagccagaaggaatgtgagaaggtgtgtgcccctgtgctggccaagccaggagtcatctctgtgatgggcacctag

SEQ ID NO: 230657 - DNA, 9978 bp, Artificial Sequence
  derived and/or modified sequence
aagccctgactggtatccctggccccagtccagtttggagctcagtcttccaccaaaggccgttcagttctcctgggctccagcctcctgcaaggactgcaagagttttcctccgcagctctgagtctccacttttttggtggagaaaggctgcaaaaagaaaaagagacgcagtgagtgggaaaagtatgcatcctattcaaacctaattgaatcgaggagcccagggacacacgccttcaggtttgctcaggggttcatatttggtgcttagacaaattcaaaatgaggaaacatcggcacttgcccttagtggccgtcttttgcctctttctctcaggctttcctacaactcatgcccagcagcagcaagcagatgtcaaaaatggtgcggctgctgatataatatttctagtggattcctcttggaccattggagaggaacatttccaacttgttcgagagtttctatatgatgttgtaaaatccttagctgtgggagaaaatgatttccattttgctctggtccagttcaacggaaacccacataccgagttcctgttaaatacgtatcgtactaaacaagaagtcctttctcatatttccaacatgtcttatattgggggaaccaatcagactggaaaaggattagaatacataatgcaaagccacctcaccaaggctgctggaagccgggccggtgacggagtccctcaggttatcgtagtgttaactgatggacactcgaaggatggccttgctctgccctcagcggaacttaagtctgctgatgttaacgtgtttgcaattggagttgaggatgcagatgaaggagcgttaaaagaaatagcaagtgaaccgctcaatatgcatatgttcaacctagagaattttacctcacttcatgacatagtaggaaacttagtgtcctgtgtgcattcatccgtgagtccagaaagggctggggacacggaaacccttaaagacatcacagtcattgaagtcaacaagagagacatagtcttcctggtggatggctcatctgcactgggactggccaacttcaatgccatccgagacttcattgctaaagtcatccagaggctggaaatcggacaggatcttatccaggtggcagtggcccagtatgcagacactgtgaggcctgaattttatttcaatacccatccaacaaaaagggaagtcataaccgctgtgcggaaaatgaagcccctggacggctcggccctgtacacgggctctgctctagactttgttcgtaacaacctattcacgagttcagccggctaccgggctgccgaggggattcctaagcttttggtgctgatcacaggtggtaagtccctagatgaaatcagccagcctgcccaggagctgaagagaagcagcataatggcctttgccattgggaacaagggtgccgatcaggctgagctggaagagatcgctttcgactcctccctggtgttcatcccagctgagttccgagccgccccattgcaaggcatgctgcctggcttgctggcacctctcaggaccctctctggaacccctgaagttcactcaaacaaaagggatatcatctttcttttggatggatcagccaacgttggaaaaaccaatttcccttatgtgcgcgactttgtaatgaacctagttaacagccttgatattggaaatgacaatattcgtgttggtttagtgcaatttagtgacactcctgtaacggagttctctttaaacacataccagaccaagtcagatatccttggtcatctgaggcagctgcagctccagggaggttcgggcctgaacacaggctcagccctaagctatgtctatgccaaccacttcacggaagctggcggcagcaggatccgtgaacacgtgccgcagctcctgcttctgctcacagctgggcagtctgaggactcctatttgcaagctgccaacgccttgacacgcgcgggcatcctgactttttgtgtgggagctagccaggcgaataaggcagagcttgagcagattgcttttaacccaagcctggtgtatctcatggatgatttcagctccctgccagctttgcctcagcagctgattcagcccctaaccacatatgttagtggaggtgtggaggaagtaccactcgctcagccagagagcaagcgagacattctgttcctctttgacggctcagccaatcttgtgggccagttccctgttgtccgtgactttctctacaagattatcgatgagctcaatgtgaagccagaggggacccgaattgcggtggctcagtacagcgatgatgtcaaggtggagtcccgttttgatgagcaccagagtaagcctgagatcctgaatcttgtgaagagaatgaagatcaagacgggcaaagccctcaacctgggctacgcgctggactatgcacagaggtacatttttgtgaagtctgctggcagccggatcgaggatggagtgcttcagttcctggtgctgctggtcgcaggaaggtcatctgaccgtgtggatgggccagcaagtaacctgaagcagagtggggttgtgcctttcatcttccaagccaagaacgcagaccctgctgagttagagcagatcgtgctgtctccagcgtttatcctggctgcagagtcgcttcccaagattggagatcttcatccacagatagtgaatctcttaaaatcagtgcacaacggagcaccagcaccagtttcaggtgaaaaggacgtggtgtttctgcttgatggctctgagggcgtcaggagcggcttccctctgttgaaagagtttgtccagagagtggtggaaagcctggatgtgggccaggaccgggtccgcgtggccgtggtgcagtacagcgaccggaccaggcccgagttctacctgaattcatacatgaacaagcaggacgtcgtcaacgctgtccgccagctgaccctgctgggagggccgacccccaacaccggggccgccctggagtttgtcctgaggaacatcctggtcagctctgcgggaagcaggataacagaaggtgtgccccagctgctgatcgtcctcacggccgacaggtctggggatgatgtgcggaacccctccgtggtcgtgaagaggggtggggctgtgcccattggcattggcatcgggaacgctgacatcacagagatgcagaccatctccttcatcccggactttgccgtggccattcccacctttcgccagctggggaccgtccaacaggtcatctctgagagggtgacccagctcacccgcgaggagctgagcaggctgcagccggtgttgcagcctctaccgagcccaggtgttggtggcaagagggacgtggtctttctcatcgatgggtcccaaagtgccgggcctgagttccagtacgttcgcaccctcatagagaggctggttgactacctggacgtgggctttgacaccacccgggtggctgtcatccagttcagcgatgaccccaaggtggagttcctgctgaacgcccattccagcaaggatgaagtgcagaacgcggtgcagcggctgaggcccaagggagggcggcagatcaacgtgggcaatgccctggagtacgtgtccaggaacatcttcaagaggcccctggggagccgcattgaagagggcgtcccgcagttcctggtcctcatctcgtctggaaagtctgacgatgaggtggacgacccggcggtggagctcaagcagtttggcgtggcccctttcacgatcgccaggaacgcagaccaggaggagctggtgaagatctcgctgagccccgaatatgtgttctcggtgagcaccttccgggagctgcccagcctggagcagaaactgctgacgcccatcacgaccctgacctcagagcagatccagaagctcttagccagcactcgctatccacctccagcagttgagagtgatgctgcagacattgtctttctgatcgacagctctgagggagttaggccagatggctttgcacatattcgagattttgttagcaggattgttcgaagactcaacatcggccccagtaaagtgagagttggggtcgtgcagttcagcaatgatgtcttcccagaattctatctgaaaacctacagatcccaggccccggtgctggacgccatacggcgcctgaggctcagaggggggtccccactgaacactggcaaggctctcgaatttgtggcaagaaacctctttgttaagtctgcggggagtcgcatagaagacggggtgccccaacacctggtcctggtcctgggtggaaaatcccaggacgatgtgtccaggttcgcccaggtgatccgttcctcgggcattgtgagtttaggggtaggagaccggaacatcgacagaacagagctgcagaccatcaccaatgaccccagactggtcttcacagtgcgagagttcagagagcttcccaacatagaagaaagaatcatgaactcgtttggaccctccgcagccactcctgcacctccaggggtggacacccctcctccttcacggccagagaagaagaaagcagacattgtgttcctgttggatggttccatcaacttcaggagggacagtttccaggaagtgcttcgttttgtgtctgaaatagtggacacagtttatgaagatggcgactccatccaagtggggcttgtccagtacaactctgaccccactgacgaattcttcctgaaggacttctctaccaagaggcagattattgacgccatcaacaaagtggtctacaaagggggaagacacgccaacactaaggtgggccttgagcacctgcgggtaaaccactttgtgcctgaggcaggcagccgcctggaccagcgggtccctcagattgcctttgtgatcacgggaggaaagtcggtggaagatgcacaggatgtgagcctggccctcacccagaggggggtcaaagtgtttgctgttggagtgaggaatatcgactcggaggaggttggaaagatagcgtccaacagcgccacagcgttccgcgtgggcaacgtccaggagctgtccgaactgagcgagcaagttttggaaactttgcatgatgcgatgcatgaaaccctttgccctggtgtaactgatgctgccaaagcttgtaatctggatgtgattctggggtttgatggttctagagaccagaatgtttttgtggcccagaagggcttcgagtccaaggtggacgccatcttgaacagaatcagccagatgcacagggtcagctgcagcggtggccgctcgcccaccgtgcgtgtgtcagtggtggccaacacgccctcgggcccggtggaggcctttgactttgacgagtaccagccagagatgctcgagaagttccggaacatgcgcagccagcacccctacgtcctcacggaggacaccctgaaggtctacctgaacaagttcagacagtcctcgccggacagcgtgaaggtggtcattcattttactgatggagcagacggagatctggctgatttacacagagcatctgagaacctccgccaagaaggagtccgtgccttgatcctggtgggccttgaacgagtggtcaacttggagcggctaatgcatctggagtttgggcgagggtttatgtatgacaggcccctgaggcttaacttgctggacttggattatgaactagcggagcagcttgacaacattgccgagaaagcttgctgtggggttccctgcaagtgctctgggcagaggggagaccgcgggcccatcggcagcatcgggccaaagggtattcctggagaagacggctaccgaggctatcctggtgatgagggtggacccggtgagcgtggtccgcctggtgtgaacggcactcaaggtttccagggctgcccgggccagagaggagtaaagggctctcggggattcccaggagagaagggcgaagtaggagaaattggactggatggtctggatggtgaagatggagacaaaggattgcctggttcttctggagagaaagggaatcctggaagaaggggtgataaaggacctcgaggagagaaaggagaaagaggagatgttgggattcgaggggacccgggtaacccaggacaagacagccaggagagaggacccaaaggagaaaccggtgacctcggccccatgggtgtcccagggagagatggagtacctggaggacctggagaaactgggaagaatggtggctttggccgaaggggaccccccggagctaagggcaacaagggcggtcctggccagccgggctttgagggagagcaggggaccagaggtgcacagggcccagctggtcctgctggtcctccagggctgataggagaacaaggcatttctggacctcggggaagcggaggtgccgctggtgctcctggagaacgaggcagaaccggtccactgggaagaaagggtgagcccggagagccaggaccaaaaggaggaatcgggaaccggggccctcgtggggagacgggagatgacgggagagacggagttggcagtgaaggacgcagaggcaaaaaaggagaaagaggattccctggatacccaggaccaaagggtaacccaggtgaacctgggctaaatggaacaacaggacccaaaggcatcagaggccgaaggggaaattcgggacctccagggatagttggacagaagggagaccctggctacccaggaccagctggtcccaagggcaacaggggcgactccatcgatcaatgtgccctcatccaaagcatcaaagataaatgcccttgctgttacgggcccctggagtgccccgtcttcccaacagaactagcctttgctttagacacctctgagggagtcaaccaagacactttcggccggatgcgagatgtggtcttgagtattgtgaatgacctgaccattgctgagagcaactgcccacggggggcccgggtggctgtggtcacctacaacaacgaggtgaccacggagatccggtttgctgactccaagaggaagtcggtcctcctggacaagattaagaaccttcaggtggctctgacatccaaacagcagagtctggagactgccatgtcgtttgtggccaggaacacatttaagcgtgtgaggaacggattcctaatgaggaaagtggctgttttcttcagcaacacacccacaagagcatccccacagctcagagaggctgtgctcaagctctcagatgcggggatcacccccttgttccttacaaggcaggaagaccggcagctcatcaacgctttgcagatcaataacacagcagtggggcatgcgcttgtcctgcctgcagggagagacctcacagacttcctggagaatgtcctcacgtgtcatgtttgcttggacatctgcaacatcgacccatcctgtggatttggcagttggaggccttccttcagggacaggagagcggcagggagcgatgtggacatcgacatggctttcatcttagacagcgctgagaccaccaccctgttccagttcaatgagatgaagaagtacatagcgtacctggtcagacaactggacatgagcccagatcccaaggcctcccagcacttcgccagagtggcagttgtgcagcacgcgccctctgagtccgtggacaatgccagcatgccacctgtgaaggtggaattctccctgactgactatggctccaaggagaagctggtggacttcctcagcaggggaatgacacagttgcagggaaccagggccttaggcagtgccattgaatacaccatagagaatgtctttgaaagtgccccaaacccacgggacctgaaaattgtggtcctgatgctgacgggcgaggtgccggagcagcagctggaggaggcccagagagtcatcctgcaggccaaatgcaagggctacttcttcgtggtcctgggcattggcaggaaggtgaacatcaaggaggtatacaccttcgccagtgagccaaacgacgtcttcttcaaattagtggacaagtccaccgagctcaacgaggagcctttgatgcgcttcgggaggctgttgccatccttcgtcagcagtgaaaatgctttttacttgtccccagatatcaggaaacagtgtgattggttccaaggggaccaacccacaaagaaccttgtgaagtttggtcacaaacaagtaaatgttccgaataacgttacttcaagtcctacatccaacccagtgacgacaacgaagccggtgactacgacgaagccggtgaccaccacaacaaagcctgtaaccaccacaacaaagcctgtgactattataaatcagccatctgtgaagccagccgctgcaaagccggcccctgcgaaacctgtggctgccaagcctgtggccacaaagatggccactgttagacccccagtggcggtgaagccagcaacggcagcgaagcctgtagcagcaaagccagcagctgtaagaccccccgctgctgctgctgcaaaaccagtggcgaccaagcctgaggtccctaggccacaggcagccaaaccagctgccaccaagccagccaccactaagcccatggttaagatgtcccgtgaagtccaggtgtttgagataacagagaacagcgccaaactccactgggagagggctgagccccccggtccttatttttatgacctcaccgtcacctcagcccatgatcagtccctggttctgaagcagaacctcacggtcacggaccgcgtcattggaggcctgctcgctgggcagacataccatgtggctgtggtctgctacctgaggtctcaggtcagagccacctaccacggaagtttcagtacaaagaaatctcagcccccacctccacagccagcaaggtcagcttctagttcaaccatcaatctaatggtgagcacagaaccattggctctcactgaaacagatatatgcaagttgccgaaagacgaaggaacttgcagggatttcatattaaaatggtactatgatccaaacaccaaaagctgtgcaagattctggtatggaggttgtggtggaaacgaaaacaaatttggatcacagaaagaatgtgaaaaggtttgcgctcctgtgctcgccaaacccggagtcatcagtgtgatgggaacctaagcgtgggtggccaacatcatatacctcttgaagaagaaggagtcagccatcgccaacttgtctctgtagaagctccgggtgtagattcccttgcactgtatcatttcatgctttgatttacactcgaactcgggagggaacatcctgctgcatgacctatcagtatggtgctaatgtgtctgtggaccctcgctctctgtctccaggcagttctctcgaatactttgaatgttgtgtaacagttagccactgctggtgtttatgtgaacattcctatcaatccaaattccctctggagtttcatgttatgcctgttgcaggcaaatgtaaagtctagaaaataatgcaaatgtcacggctactctatatacttttgcttggttcattttttttcccttttagttaagcatgactttagatgggaagcctgtgtatcgtggagaaacaagagaccaactttttcattccctgcccccaatttcccagactagatttcaagctaattttctttttctgaagcctctaacaaatgatctagttcagaaggaagcaaaatcccttaatctatgtgcaccgttgggaccaatgccttaattaaagaatttaaaaaagttgtaatagagaatatttttggcattcctctaatgttgtgtgttttttttttgtgtgtgctggagggaggggatttaattttaattttaaaatgtttaggaaatttatacaaagaaactttttaataaagtatattgaaagtttcctggg

SEQ ID NO: 230658 - DNA, 9963 bp, Artificial Sequence
  derived and/or modified sequence
aagccctgactggtatccctggccccagtccagtttggagctcagtcttccaccaaaggccgttcagttctcctgggctccagcctcctgcaaggactgcaagagttttcctccgcagctctgagtctccacttttttggtggagaaaggctgcaaaaagaaaaagagacgcagtgagtgggaaaagtatgcatcctattcaaacctaattgaatcgaggagcccagggacacacgccttcaggtttgctcaggggttcatatttggtgcttagacaaattcaaaatgaggaaacatcggcacttgcccttagtggccgtcttttgcctctttctctcaggctttcctacaactcatgcccagcagcagcaagcagcacaagactctgctgacattattttccttattgatggatcaaacaacaccggaagtgtcaatttcgcagtcattctcgacttccttgtaaatctccttgagaaactcccaattggaactcagcagatccgagtgggggtggtccagtttagcgatgagcccagaaccatgttctccttggacacctactccaccaaggcccaggttctgggtgcagtgaaagccctcgggtttgctggtggggagttggccaatatcggcctcgcccttgatttcgtggtggagaaccacttcacccgggcagggggcagccgcgtggaggaaggggttccccaggtgctggtcctcataagtgccgggccttctagtgacgagattcgctacggggtggtagcactgaagcaggctagcgtgttctcattcggccttggagcccaggccgcctccagggcagagcttcagcacatagctaccgatgacaacttggtgtttactgtcccggaattccgtagctttggggacctccaggagaaattactgccgtacattgttggcgtggcccaaaggcacattgtcttgaaaccgccaaccattgtcacacaagtcattgaagtcaacaagagagacatagtcttcctggtggatggctcatctgcactgggactggccaacttcaatgccatccgagacttcattgctaaagtcatccagaggctggaaatcggacaggatcttatccaggtggcagtggcccagtatgcagacactgtgaggcctgaattttatttcaatacccatccaacaaaaagggaagtcataaccgctgtgcggaaaatgaagcccctggacggctcggccctgtacacgggctctgctctagactttgttcgtaacaacctattcacgagttcagccggctaccgggctgccgaggggattcctaagcttttggtgctgatcacaggtggtaagtccctagatgaaatcagccagcctgcccaggagctgaagagaagcagcataatggcctttgccattgggaacaagggtgccgatcaggctgagctggaagagatcgctttcgactcctccctggtgttcatcccagctgagttccgagccgccccattgcaaggcatgctgcctggcttgctggcacctctcaggaccctctctggaacccctgaagttcactcaaacaaaagggatatcatctttcttttggatggatcagccaacgttggaaaaaccaatttcccttatgtgcgcgactttgtaatgaacctagttaacagccttgatattggaaatgacaatattcgtgttggtttagtgcaatttagtgacactcctgtaacggagttctctttaaacacataccagaccaagtcagatatccttggtcatctgaggcagctgcagctccagggaggttcgggcctgaacacaggctcagccctaagctatgtctatgccaaccacttcacggaagctggcggcagcaggatccgtgaacacgtgccgcagctcctgcttctgctcacagctgggcagtctgaggactcctatttgcaagctgccaacgccttgacacgcgcgggcatcctgactttttgtgtgggagctagccaggcgaataaggcagagcttgagcagattgcttttaacccaagcctggtgtatctcatggatgatttcagctccctgccagctttgcctcagcagctgattcagcccctaaccacatatgttagtggaggtgtggaggaagtaccactcgctcagccagagagcaagcgagacattctgttcctctttgacggctcagccaatcttgtgggccagttccctgttgtccgtgactttctctacaagattatcgatgagctcaatgtgaagccagaggggacccgaattgcggtggctcagtacagcgatgatgtcaaggtggagtcccgttttgatgagcaccagagtaagcctgagatcctgaatcttgtgaagagaatgaagatcaagacgggcaaagccctcaacctgggctacgcgctggactatgcacagaggtacatttttgtgaagtctgctggcagccggatcgaggatggagtgcttcagttcctggtgctgctggtcgcaggaaggtcatctgaccgtgtggatgggccagcaagtaacctgaagcagagtggggttgtgcctttcatcttccaagccaagaacgcagaccctgctgagttagagcagatcgtgctgtctccagcgtttatcctggctgcagagtcgcttcccaagattggagatcttcatccacagatagtgaatctcttaaaatcagtgcacaacggagcaccagcaccagtttcaggtgaaaaggacgtggtgtttctgcttgatggctctgagggcgtcaggagcggcttccctctgttgaaagagtttgtccagagagtggtggaaagcctggatgtgggccaggaccgggtccgcgtggccgtggtgcagtacagcgaccggaccaggcccgagttctacctgaattcatacatgaacaagcaggacgtcgtcaacgctgtccgccagctgaccctgctgggagggccgacccccaacaccggggccgccctggagtttgtcctgaggaacatcctggtcagctctgcgggaagcaggataacagaaggtgtgccccagctgctgatcgtcctcacggccgacaggtctggggatgatgtgcggaacccctccgtggtcgtgaagaggggtggggctgtgcccattggcattggcatcgggaacgctgacatcacagagatgcagaccatctccttcatcccggactttgccgtggccattcccacctttcgccagctggggaccgtccaacaggtcatctctgagagggtgacccagctcacccgcgaggagctgagcaggctgcagccggtgttgcagcctctaccgagcccaggtgttggtggcaagagggacgtggtctttctcatcgatgggtcccaaagtgccgggcctgagttccagtacgttcgcaccctcatagagaggctggttgactacctggacgtgggctttgacaccacccgggtggctgtcatccagttcagcgatgaccccaaggtggagttcctgctgaacgcccattccagcaaggatgaagtgcagaacgcggtgcagcggctgaggcccaagggagggcggcagatcaacgtgggcaatgccctggagtacgtgtccaggaacatcttcaagaggcccctggggagccgcattgaagagggcgtcccgcagttcctggtcctcatctcgtctggaaagtctgacgatgaggtggacgacccggcggtggagctcaagcagtttggcgtggcccctttcacgatcgccaggaacgcagaccaggaggagctggtgaagatctcgctgagccccgaatatgtgttctcggtgagcaccttccgggagctgcccagcctggagcagaaactgctgacgcccatcacgaccctgacctcagagcagatccagaagctcttagccagcactcgctatccacctccagcagttgagagtgatgctgcagacattgtctttctgatcgacagctctgagggagttaggccagatggctttgcacatattcgagattttgttagcaggattgttcgaagactcaacatcggccccagtaaagtgagagttggggtcgtgcagttcagcaatgatgtcttcccagaattctatctgaaaacctacagatcccaggccccggtgctggacgccatacggcgcctgaggctcagaggggggtccccactgaacactggcaaggctctcgaatttgtggcaagaaacctctttgttaagtctgcggggagtcgcatagaagacggggtgccccaacacctggtcctggtcctgggtggaaaatcccaggacgatgtgtccaggttcgcccaggtgatccgttcctcgggcattgtgagtttaggggtaggagaccggaacatcgacagaacagagctgcagaccatcaccaatgaccccagactggtcttcacagtgcgagagttcagagagcttcccaacatagaagaaagaatcatgaactcgtttggaccctccgcagccactcctgcacctccaggggtggacacccctcctccttcacggccagagaagaagaaagcagacattgtgttcctgttggatggttccatcaacttcaggagggacagtttccaggaagtgcttcgttttgtgtctgaaatagtggacacagtttatgaagatggcgactccatccaagtggggcttgtccagtacaactctgaccccactgacgaattcttcctgaaggacttctctaccaagaggcagattattgacgccatcaacaaagtggtctacaaagggggaagacacgccaacactaaggtgggccttgagcacctgcgggtaaaccactttgtgcctgaggcaggcagccgcctggaccagcgggtccctcagattgcctttgtgatcacgggaggaaagtcggtggaagatgcacaggatgtgagcctggccctcacccagaggggggtcaaagtgtttgctgttggagtgaggaatatcgactcggaggaggttggaaagatagcgtccaacagcgccacagcgttccgcgtgggcaacgtccaggagctgtccgaactgagcgagcaagttttggaaactttgcatgatgcgatgcatgaaaccctttgccctggtgtaactgatgctgccaaagcttgtaatctggatgtgattctggggtttgatggttctagagaccagaatgtttttgtggcccagaagggcttcgagtccaaggtggacgccatcttgaacagaatcagccagatgcacagggtcagctgcagcggtggccgctcgcccaccgtgcgtgtgtcagtggtggccaacacgccctcgggcccggtggaggcctttgactttgacgagtaccagccagagatgctcgagaagttccggaacatgcgcagccagcacccctacgtcctcacggaggacaccctgaaggtctacctgaacaagttcagacagtcctcgccggacagcgtgaaggtggtcattcattttactgatggagcagacggagatctggctgatttacacagagcatctgagaacctccgccaagaaggagtccgtgccttgatcctggtgggccttgaacgagtggtcaacttggagcggctaatgcatctggagtttgggcgagggtttatgtatgacaggcccctgaggcttaacttgctggacttggattatgaactagcggagcagcttgacaacattgccgagaaagcttgctgtggggttccctgcaagtgctctgggcagaggggagaccgcgggcccatcggcagcatcgggccaaagggtattcctggagaagacggctaccgaggctatcctggtgatgagggtggacccggtgagcgtggtccgcctggtgtgaacggcactcaaggtttccagggctgcccgggccagagaggagtaaagggctctcggggattcccaggagagaagggcgaagtaggagaaattggactggatggtctggatggtgaagatggagacaaaggattgcctggttcttctggagagaaagggaatcctggaagaaggggtgataaaggacctcgaggagagaaaggagaaagaggagatgttgggattcgaggggacccgggtaacccaggacaagacagccaggagagaggacccaaaggagaaaccggtgacctcggccccatgggtgtcccagggagagatggagtacctggaggacctggagaaactgggaagaatggtggctttggccgaaggggaccccccggagctaagggcaacaagggcggtcctggccagccgggctttgagggagagcaggggaccagaggtgcacagggcccagctggtcctgctggtcctccagggctgataggagaacaaggcatttctggacctcggggaagcggaggtgccgctggtgctcctggagaacgaggcagaaccggtccactgggaagaaagggtgagcccggagagccaggaccaaaaggaggaatcgggaaccggggccctcgtggggagacgggagatgacgggagagacggagttggcagtgaaggacgcagaggcaaaaaaggagaaagaggattccctggatacccaggaccaaagggtaacccaggtgaacctgggctaaatggaacaacaggacccaaaggcatcagaggccgaaggggaaattcgggacctccagggatagttggacagaagggagaccctggctacccaggaccagctggtcccaagggcaacaggggcgactccatcgatcaatgtgccctcatccaaagcatcaaagataaatgcccttgctgttacgggcccctggagtgccccgtcttcccaacagaactagcctttgctttagacacctctgagggagtcaaccaagacactttcggccggatgcgagatgtggtcttgagtattgtgaatgacctgaccattgctgagagcaactgcccacggggggcccgggtggctgtggtcacctacaacaacgaggtgaccacggagatccggtttgctgactccaagaggaagtcggtcctcctggacaagattaagaaccttcaggtggctctgacatccaaacagcagagtctggagactgccatgtcgtttgtggccaggaacacatttaagcgtgtgaggaacggattcctaatgaggaaagtggctgttttcttcagcaacacacccacaagagcatccccacagctcagagaggctgtgctcaagctctcagatgcggggatcacccccttgttccttacaaggcaggaagaccggcagctcatcaacgctttgcagatcaataacacagcagtggggcatgcgcttgtcctgcctgcagggagagacctcacagacttcctggagaatgtcctcacgtgtcatgtttgcttggacatctgcaacatcgacccatcctgtggatttggcagttggaggccttccttcagggacaggagagcggcagggagcgatgtggacatcgacatggctttcatcttagacagcgctgagaccaccaccctgttccagttcaatgagatgaagaagtacatagcgtacctggtcagacaactggacatgagcccagatcccaaggcctcccagcacttcgccagagtggcagttgtgcagcacgcgccctctgagtccgtggacaatgccagcatgccacctgtgaaggtggaattctccctgactgactatggctccaaggagaagctggtggacttcctcagcaggggaatgacacagttgcagggaaccagggccttaggcagtgccattgaatacaccatagagaatgtctttgaaagtgccccaaacccacgggacctgaaaattgtggtcctgatgctgacgggcgaggtgccggagcagcagctggaggaggcccagagagtcatcctgcaggccaaatgcaagggctacttcttcgtggtcctgggcattggcaggaaggtgaacatcaaggaggtatacaccttcgccagtgagccaaacgacgtcttcttcaaattagtggacaagtccaccgagctcaacgaggagcctttgatgcgcttcgggaggctgttgccatccttcgtcagcagtgaaaatgctttttacttgtccccagatatcaggaaacagtgtgattggttccaaggggaccaacccacaaagaaccttgtgaagtttggtcacaaacaagtaaatgttccgaataacgttacttcaagtcctacatccaacccagtgacgacaacgaagccggtgactacgacgaagccggtgaccaccacaacaaagcctgtaaccaccacaacaaagcctgtgactattataaatcagccatctgtgaagccagccgctgcaaagccggcccctgcgaaacctgtggctgccaagcctgtggccacaaagatggccactgttagacccccagtggcggtgaagccagcaacggcagcgaagcctgtagcagcaaagccagcagctgtaagaccccccgctgctgctgctgcaaaaccagtggcgaccaagcctgaggtccctaggccacaggcagccaaaccagctgccaccaagccagccaccactaagcccatggttaagatgtcccgtgaagtccaggtgtttgagataacagagaacagcgccaaactccactgggagagggctgagccccccggtccttatttttatgacctcaccgtcacctcagcccatgatcagtccctggttctgaagcagaacctcacggtcacggaccgcgtcattggaggcctgctcgctgggcagacataccatgtggctgtggtctgctacctgaggtctcaggtcagagccacctaccacggaagtttcagtacaaagaaatctcagcccccacctccacagccagcaaggtcagcttctagttcaaccatcaatctaatggtgagcacagaaccattggctctcactgaaacagatatatgcaagttgccgaaagacgaaggaacttgcagggatttcatattaaaatggtactatgatccaaacaccaaaagctgtgcaagattctggtatggaggttgtggtggaaacgaaaacaaatttggatcacagaaagaatgtgaaaaggtttgcgctcctgtgctcgccaaacccggagtcatcagtgtgatgggaacctaagcgtgggtggccaacatcatatacctcttgaagaagaaggagtcagccatcgccaacttgtctctgtagaagctccgggtgtagattcccttgcactgtatcatttcatgctttgatttacactcgaactcgggagggaacatcctgctgcatgacctatcagtatggtgctaatgtgtctgtggaccctcgctctctgtctccaggcagttctctcgaatactttgaatgttgtgtaacagttagccactgctggtgtttatgtgaacattcctatcaatccaaattccctctggagtttcatgttatgcctgttgcaggcaaatgtaaagtctagaaaataatgcaaatgtcacggctactctatatacttttgcttggttcattttttttcccttttagttaagcatgactttagatgggaagcctgtgtatcgtggagaaacaagagaccaactttttcattccctgcccccaatttcccagactagatttcaagctaattttctttttctgaagcctctaacaaatgatctagttcagaaggaagcaaaatcccttaatctatgtgcaccgttgggaccaatgccttaattaaagaatttaaaaaagttgtaatagagaatatttttggcattcctctaatgttgtgtgttttttttttgtgtgtgctggagggaggggatttaattttaattttaaaatgtttaggaaatttatacaaagaaactttttaataaagtatattgaaagtttcctggg

SEQ ID NO: 230659 - DNA, 8916 bp, Artificial Sequence
  derived and/or modified sequence
atgaggaaacatcggcacttgcccttagtggccgtcttttgcctctttctctcaggctttcctacaactcatgcccagcagcagcaagcagcacaagactctgctgacattattttccttattgatggatcaaacaacaccggaagtgtcaatttcgcagtcattctcgacttccttgtaaatctccttgagaaactcccaattggaactcagcagatccgagtgggggtggtccagtttagcgatgagcccagaaccatgttctccttggacacctactccaccaaggcccaggttctgggtgcagtgaaagccctcgggtttgctggtggggagttggccaatatcggcctcgcccttgatttcgtggtggagaaccacttcacccgggcagggggcagccgcgtggaggaaggggttccccaggtgctggtcctcataagtgccgggccttctagtgacgagattcgctacggggtggtagcactgaagcaggctagcgtgttctcattcggccttggagcccaggccgcctccagggcagagcttcagcacatagctaccgatgacaacttggtgtttactgtcccggaattccgtagctttggggacctccaggagaaattactgccgtacattgttggcgtggcccaaaggcacattgtcttgaaaccgccaaccattgtcacacaagtcattgaagtcaacaagagagacatagtcttcctggtggatggctcatctgcactgggactggccaacttcaatgccatccgagacttcattgctaaagtcatccagaggctggaaatcggacaggatcttatccaggtggcagtggcccagtatgcagacactgtgaggcctgaattttatttcaatacccatccaacaaaaagggaagtcataaccgctgtgcggaaaatgaagcccctggacggctcggccctgtacacgggctctgctctagactttgttcgtaacaacctattcacgagttcagccggctaccgggctgccgaggggattcctaagcttttggtgctgatcacaggtggtaagtccctagatgaaatcagccagcctgcccaggagctgaagagaagcagcataatggcctttgccattgggaacaagggtgccgatcaggctgagctggaagagatcgctttcgactcctccctggtgttcatcccagctgagttccgagccgccccattgcaaggcatgctgcctggcttgctggcacctctcaggaccctctctggaacccctgaagttcactcaaacaaaagggatatcatctttcttttggatggatcagccaacgttggaaaaaccaatttcccttatgtgcgcgactttgtaatgaacctagttaacagccttgatattggaaatgacaatattcgtgttggtttagtgcaatttagtgacactcctgtaacggagttctctttaaacacataccagaccaagtcagatatccttggtcatctgaggcagctgcagctccagggaggttcgggcctgaacacaggctcagccctaagctatgtctatgccaaccacttcacggaagctggcggcagcaggatccgtgaacacgtgccgcagctcctgcttctgctcacagctgggcagtctgaggactcctatttgcaagctgccaacgccttgacacgcgcgggcatcctgactttttgtgtgggagctagccaggcgaataaggcagagcttgagcagattgcttttaacccaagcctggtgtatctcatggatgatttcagctccctgccagctttgcctcagcagctgattcagcccctaaccacatatgttagtggaggtgtggaggaagtaccactcgctcagccagagagcaagcgagacattctgttcctctttgacggctcagccaatcttgtgggccagttccctgttgtccgtgactttctctacaagattatcgatgagctcaatgtgaagccagaggggacccgaattgcggtggctcagtacagcgatgatgtcaaggtggagtcccgttttgatgagcaccagagtaagcctgagatcctgaatcttgtgaagagaatgaagatcaagacgggcaaagccctcaacctgggctacgcgctggactatgcacagaggtacatttttgtgaagtctgctggcagccggatcgaggatggagtgcttcagttcctggtgctgctggtcgcaggaaggtcatctgaccgtgtggatgggccagcaagtaacctgaagcagagtggggttgtgcctttcatcttccaagccaagaacgcagaccctgctgagttagagcagatcgtgctgtctccagcgtttatcctggctgcagagtcgcttcccaagattggagatcttcatccacagatagtgaatctcttaaaatcagtgcacaacggagcaccagcaccagtttcaggtgaaaaggacgtggtgtttctgcttgatggctctgagggcgtcaggagcggcttccctctgttgaaagagtttgtccagagagtggtggaaagcctggatgtgggccaggaccgggtccgcgtggccgtggtgcagtacagcgaccggaccaggcccgagttctacctgaattcatacatgaacaagcaggacgtcgtcaacgctgtccgccagctgaccctgctgggagggccgacccccaacaccggggccgccctggagtttgtcctgaggaacatcctggtcagctctgcgggaagcaggataacagaaggtgtgccccagctgctgatcgtcctcacggccgacaggtctggggatgatgtgcggaacccctccgtggtcgtgaagaggggtggggctgtgcccattggcattggcatcgggaacgctgacatcacagagatgcagaccatctccttcatcccggactttgccgtggccattcccacctttcgccagctggggaccgtccaacaggtcatctctgagagggtgacccagctcacccgcgaggagctgagcaggctgcagccggtgttgcagcctctaccgagcccaggtgttggtggcaagagggacgtggtctttctcatcgatgggtcccaaagtgccgggcctgagttccagtacgttcgcaccctcatagagaggctggttgactacctggacgtgggctttgacaccacccgggtggctgtcatccagttcagcgatgaccccaaggtggagttcctgctgaacgcccattccagcaaggatgaagtgcagaacgcggtgcagcggctgaggcccaagggagggcggcagatcaacgtgggcaatgccctggagtacgtgtccaggaacatcttcaagaggcccctggggagccgcattgaagagggcgtcccgcagttcctggtcctcatctcgtctggaaagtctgacgatgaggtggacgacccggcggtggagctcaagcagtttggcgtggcccctttcacgatcgccaggaacgcagaccaggaggagctggtgaagatctcgctgagccccgaatatgtgttctcggtgagcaccttccgggagctgcccagcctggagcagaaactgctgacgcccatcacgaccctgacctcagagcagatccagaagctcttagccagcactcgctatccacctccagcagttgagagtgatgctgcagacattgtctttctgatcgacagctctgagggagttaggccagatggctttgcacatattcgagattttgttagcaggattgttcgaagactcaacatcggccccagtaaagtgagagttggggtcgtgcagttcagcaatgatgtcttcccagaattctatctgaaaacctacagatcccaggccccggtgctggacgccatacggcgcctgaggctcagaggggggtccccactgaacactggcaaggctctcgaatttgtggcaagaaacctctttgttaagtctgcggggagtcgcatagaagacggggtgccccaacacctggtcctggtcctgggtggaaaatcccaggacgatgtgtccaggttcgcccaggtgatccgttcctcgggcattgtgagtttaggggtaggagaccggaacatcgacagaacagagctgcagaccatcaccaatgaccccagactggtcttcacagtgcgagagttcagagagcttcccaacatagaagaaagaatcatgaactcgtttggaccctccgcagccactcctgcacctccaggggtggacacccctcctccttcacggccagagaagaagaaagcagacattgtgttcctgttggatggttccatcaacttcaggagggacagtttccaggaagtgcttcgttttgtgtctgaaatagtggacacagtttatgaagatggcgactccatccaagtggggcttgtccagtacaactctgaccccactgacgaattcttcctgaaggacttctctaccaagaggcagattattgacgccatcaacaaagtggtctacaaagggggaagacacgccaacactaaggtgggccttgagcacctgcgggtaaaccactttgtgcctgaggcaggcagccgcctggaccagcgggtccctcagattgcctttgtgatcacgggaggaaagtcggtggaagatgcacaggatgtgagcctggccctcacccagaggggggtcaaagtgtttgctgttggagtgaggaatatcgactcggaggaggttggaaagatagcgtccaacagcgccacagcgttccgcgtgggcaacgtccaggagctgtccgaactgagcgagcaagttttggaaactttgcatgatgcgatgcatgaaaccctttgccctggtgtaactgatgctgccaaagcttgtaatctggatgtgattctggggtttgatggttctagagaccagaatgtttttgtggcccagaagggcttcgagtccaaggtggacgccatcttgaacagaatcagccagatgcacagggtcagctgcagcggtggccgctcgcccaccgtgcgtgtgtcagtggtggccaacacgccctcgggcccggtggaggcctttgactttgacgagtaccagccagagatgctcgagaagttccggaacatgcgcagccagcacccctacgtcctcacggaggacaccctgaaggtctacctgaacaagttcagacagtcctcgccggacagcgtgaaggtggtcattcattttactgatggagcagacggagatctggctgatttacacagagcatctgagaacctccgccaagaaggagtccgtgccttgatcctggtgggccttgaacgagtggtcaacttggagcggctaatgcatctggagtttgggcgagggtttatgtatgacaggcccctgaggcttaacttgctggacttggattatgaactagcggagcagcttgacaacattgccgagaaagcttgctgtggggttccctgcaagtgctctgggcagaggggagaccgcgggcccatcggcagcatcgggccaaagggtattcctggagaagacggctaccgaggctatcctggtgatgagggtggacccggtgagcgtggtccgcctggtgtgaacggcactcaaggtttccagggctgcccgggccagagaggagtaaagggctctcggggattcccaggagagaagggcgaagtaggagaaattggactggatggtctggatggtgaagatggagacaaaggattgcctggttcttctggagagaaagggaatcctggaagaaggggtgataaaggacctcgaggagagaaaggagaaagaggagatgttgggattcgaggggacccgggtaacccaggacaagacagccaggagagaggacccaaaggagaaaccggtgacctcggccccatgggtgtcccagggagagatggagtacctggaggacctggagaaactgggaagaatggtggctttggccgaaggggaccccccggagctaagggcaacaagggcggtcctggccagccgggctttgagggagagcaggggaccagaggtgcacagggcccagctggtcctgctggtcctccagggctgataggagaacaaggcatttctggacctcggggaagcggaggtgccgctggtgctcctggagaacgaggcagaaccggtccactgggaagaaagggtgagcccggagagccaggaccaaaaggaggaatcgggaaccggggccctcgtggggagacgggagatgacgggagagacggagttggcagtgaaggacgcagaggcaaaaaaggagaaagaggattccctggatacccaggaccaaagggtaacccaggtgaacctgggctaaatggaacaacaggacccaaaggcatcagaggccgaaggggaaattcgggacctccagggatagttggacagaagggagaccctggctacccaggaccagctggtcccaagggcaacaggggcgactccatcgatcaatgtgccctcatccaaagcatcaaagataaatgcccttgctgttacgggcccctggagtgccccgtcttcccaacagaactagcctttgctttagacacctctgagggagtcaaccaagacactttcggccggatgcgagatgtggtcttgagtattgtgaatgacctgaccattgctgagagcaactgcccacggggggcccgggtggctgtggtcacctacaacaacgaggtgaccacggagatccggtttgctgactccaagaggaagtcggtcctcctggacaagattaagaaccttcaggtggctctgacatccaaacagcagagtctggagactgccatgtcgtttgtggccaggaacacatttaagcgtgtgaggaacggattcctaatgaggaaagtggctgttttcttcagcaacacacccacaagagcatccccacagctcagagaggctgtgctcaagctctcagatgcggggatcacccccttgttccttacaaggcaggaagaccggcagctcatcaacgctttgcagatcaataacacagcagtggggcatgcgcttgtcctgcctgcagggagagacctcacagacttcctggagaatgtcctcacgtgtcatgtttgcttggacatctgcaacatcgacccatcctgtggatttggcagttggaggccttccttcagggacaggagagcggcagggagcgatgtggacatcgacatggctttcatcttagacagcgctgagaccaccaccctgttccagttcaatgagatgaagaagtacatagcgtacctggtcagacaactggacatgagcccagatcccaaggcctcccagcacttcgccagagtggcagttgtgcagcacgcgccctctgagtccgtggacaatgccagcatgccacctgtgaaggtggaattctccctgactgactatggctccaaggagaagctggtggacttcctcagcaggggaatgacacagttgcagggaaccagggccttaggcagtgccattgaatacaccatagagaatgtctttgaaagtgccccaaacccacgggacctgaaaattgtggtcctgatgctgacgggcgaggtgccggagcagcagctggaggaggcccagagagtcatcctgcaggccaaatgcaagggctacttcttcgtggtcctgggcattggcaggaaggtgaacatcaaggaggtatacaccttcgccagtgagccaaacgacgtcttcttcaaattagtggacaagtccaccgagctcaacgaggagcctttgatgcgcttcgggaggctgttgccatccttcgtcagcagtgaaaatgctttttacttgtccccagatatcaggaaacagtgtgattggttccaaggggaccaacccacaaagaaccttgtgaagtttggtcacaaacaagtaaatgttccgaataacgttacttcaagtcctacatccaacccagtgacgacaacgaagccggtgactacgacgaagccggtgaccaccacaacaaagcctgtaaccaccacaacaaagcctgtgactattataaatcagccatctgtgaagccagccgctgcaaagccggcccctgcgaaacctgtggctgccaagcctgtggccacaaagatggccactgttagacccccagtggcggtgaagccagcaacggcagcgaagcctgtagcagcaaagccagcagctgtaagaccccccgctgctgctgctgcaaaaccagtggcgaccaagcctgaggtccctaggccacaggcagccaaaccagctgccaccaagccagccaccactaagcccatggttaagatgtcccgtgaagtccaggtgtttgagataacagagaacagcgccaaactccactgggagagggctgagccccccggtccttatttttatgacctcaccgtcacctcagcccatgatcagtccctggttctgaagcagaacctcacggtcacggaccgcgtcattggaggcctgctcgctgggcagacataccatgtggctgtggtctgctacctgaggtctcaggtcagagccacctaccacggaagtttcagtacaaagaaatctcagcccccacctccacagccagcaaggtcagcttctagttcaaccatcaatctaatggtgagcacagaaccattggctctcactgaaacagatatatgcaagttgccgaaagacgaaggaacttgcagggatttcatattaaaatggtactatgatccaaacaccaaaagctgtgcaagattctggtatggaggttgtggtggaaacgaaaacaaatttggatcacagaaagaatgtgaaaaggtttgcgctcctgtgctcgccaaacccggagtcatcagtgtgatgggaacctaa

SEQ ID NO: 230660 - DNA, 8931 bp, Artificial Sequence
  derived and/or modified sequence
atgcggaagcaccggcacctgcccctggtggccgtgttctgcctgtttctgagcggcttccctactactcatgcccagcagcagcaggcagacgtgaaaaacggcgcggcagcggatatcatctttctggtcgattcatcctggaccatcggcgaggaacacttccaattagtgcgggagtttctttatgatgtcgtgaaatctctggcggtgggcgagaacgacttccactttgcattggtgcaattcaatgggaatccccacacagaattcctgttaaatacctatcggacaaagcaggaggtcctttctcacatatccaatatgagctacatcggcggcacaaatcagacaggcaaggggctcgagtatataatgcagagccacttaacaaaggcagcaggatcccgggctggagacggcgtacctcaggtaatcgtcgtccttacagatggccatagtaaggatggtttggctttaccatctgcagaactcaagtctgccgacgtcaacgtcttcgcgattggggtcgaggatgccgatgaaggagcattgaaagaaatcgccagcgaaccactcaatatgcatatgtttaacttggagaactttacttcattgcacgatatcgtgggaaacctcgtgagttgtgtccactcaagcgtttctccagaacgagccggggacacagaaaccctgaaagacattacagttatcgaggtgaataagagggatattgtattccttgtcgatggcagctctgctttaggacttgctaatttcaatgccatccgggacttcatcgcgaaggtcattcagagattggaaataggccaggacttaattcaggtagcagtggcacagtacgccgatactgtcaggcccgagttctatttcaatacacaccccaccaaaagagaggtcatcactgctgtgagaaaaatgaagcccctggacggatccgccctatacacggggtccgcattggacttcgtccggaacaaccttttcacctctagcgcaggatacagagcagccgaagggatacccaagctcttagtcctaataacaggcgggaagagtctcgatgaaatctcccagcctgctcaggaactgaaacgcagttccattatggccttcgcgatcggaaacaagggcgctgatcaagctgaactggaggaaattgctttcgattccagcctggtctttattccagccgaatttcgggccgctccacttcaggggatgctgccaggtctgttggcgcctctgcgcactctgtccgggaccccagaagtgcatagtaataagagagatatcatttttttgttggatggctctgcaaacgtgggcaaaactaattttccctacgtgagggactttgtaatgaatttagtaaattccctggatataggcaatgacaatattcgagtgggtttagttcagtttagcgatactcccgtgactgaatttagtctgaacacctaccagaccaagtctgatatcctaggacacttacggcaattgcaactgcaaggaggaagtggcttgaacaccggctctgcgctgagctatgtttacgctaaccattttaccgaggctggagggagtcgaatcagggagcatgtgccacagctgcttttactgctgactgccggccaatctgaggacagttatctacaggcggctaatgccctcaccagagccgggattctcactttctgtgtgggagcctcccaggccaataaggctgagctcgaacagatcgcctttaatccatctcttgtctatctgatggacgacttctcatcactccctgccttgccacagcagctgattcagcctcttacaacgtacgtgtcgggcggagtggaggaggttcccctggcccaaccggaatccaaacgggatattctcttcctgtttgacggctccgcaaatttagtcggccagtttcctgtggtgagagattttttgtacaagatcattgatgaactcaatgtgaagccagaaggcactcggatcgccgtcgctcaatacagtgatgatgtgaaggtggaatctaggttcgatgaacaccagagtaaacctgaaatcctgaatctcgtaaagcgtatgaagataaagaccggaaaggcacttaatctcggctacgcattggactatgcccagagatacatttttgttaagtccgccggctctagaatcgaggacggagtactgcagttcctggttctgcttgtcgctggaagatccagcgatcgagtggacggaccagcgtccaatcttaagcagtcaggagtcgtgccattcatcttccaggccaagaacgccgacccagccgagctggagcagatcgtcctcagccccgctttcatactcgctgcagaaagtctgccaaagattggagacttacatccccagatcgtgaatttgctgaagtcagtgcataatggcgcacccgctcccgtgagcggggaaaaagacgtggtgttcttactggacggcagtgagggcgtcaggtccggctttccgctgctgaaagaatttgtccagcgcgtggttgaaagcctcgacgtgggccaggaccgtgtacgcgttgctgttgtccagtacagcgaccggacgaggcctgaattttatcttaactcatacatgaacaagcaagatgtcgtgaacgctgtgcgtcagttgactctgctagggggaccaacgccaaataccggcgccgcgctcgaattcgtgctgcgcaacatcctggtgagttctgctggtagcaggatcacggagggcgtccctcagctattgatcgtgttgacagcagatagaagcggagatgatgttagaaatccctcagtggttgtcaaacgcgggggtgcggtccctatcggtatcgggatcggcaacgcagacatcactgagatgcagaccattagtttcatccctgatttcgcagttgcgattccgacttttagacagttgggaaccgtgcagcaggtcatctctgaaagagtgactcagctgacacgggaggaactcagcaggctgcagccagtgttgcaaccgctgccctcacctggcgtgggcggcaagagggacgttgtgtttctgatcgatggctcccagtccgccggacctgagttccagtatgttaggaccttgatcgagaggctggtggattatcttgatgttggtttcgacacaactagagtggccgtcattcagttctccgacgaccctaaggtcgagttcttgctgaatgcccacagctctaaggacgaggtgcaaaacgccgtgcagagactgagacctaagggtgggcgccagatcaacgtgggcaacgcccttgagtacgtgtcacgaaatattttcaagcgtccactggggtcaaggattgaagaaggtgttcctcaattcctggtacttatcagttcgggtaaatccgacgacgaagtggatgaccccgccgtggagttgaaacagttcggggtggccccatttacaatcgcacgaaatgctgaccaagaggaactggtgaagatctcgctgtcccccgagtacgtgttctcagtgagcacattccgagaactgccatccctggaacagaagctgctcacaccgattaccactctcacgtctgagcagatccaaaaactgctggcttccacaagatatcctccgcccgccgtggaaagcgacgccgctgatattgtctttctgattgattcgtcagaaggcgtccgtcccgatggctttgcccacatccgtgatttcgtgtcccgtatcgtgcgcagactgaatatcggtcctagcaaagtgcgggtgggcgtggtccagtttagcaacgacgtcttcccggagttctatttaaagacgtaccggtctcaggcgccagtgctcgacgccatccggagactgaggctgcgtgggggctctcctctgaataccggtaaggctctagagttcgttgccagaaatctcttcgtaaaatcagcaggaagcaggatcgaagacggggttccccagcatctagtcctggtgctgggaggtaagagtcaggacgatgtgagccggtttgcgcaagtgataagatcttccggtattgtatcattgggcgtgggggatagaaacatcgacagaaccgaactccagaccatcaccaacgatccaaggctggtgtttaccgtgcgagaatttagagagttacccaacattgaagaacgtattatgaactcctttggcccttcagctgccaccccggcgcctccaggcgtcgacacccccccgccttctcggcccgagaaaaaaaaagcggatatcgtctttctcctggatgggagcattaattttcgtagggatagtttccaggaggtcctgaggtttgtcagtgaaattgttgacacagtgtatgaagacggcgattctattcaagtgggcctggtgcagtacaacagcgatccaacagatgaattcttcctcaaggactttagcaccaagaggcagattattgatgcaatcaacaaggtggtctataagggagggcgacacgcgaatacaaaggtaggactggagcatttgcgagtcaaccactttgtgcccgaggccgggagccggttagaccagagagttccccaaattgcatttgtcattactggtggcaaatccgtcgaggacgcgcaggacgtgtccctggcgcttacgcagcgaggcgtaaaggtttttgccgtcggggttcgaaatattgatagcgaggaagttgggaagatcgcgagcaactccgctaccgccttccgggtgggaaatgttcaggagctgtctgagctctctgagcaggtcctggagactctgcatgatgccatgcacgagacactttgcccaggcgtgacagatgcggctaaggcctgcaatttggatgtgatcttaggtttcgacggatcaagagaccagaacgtgttcgtggcccagaaaggcttcgagagcaaggtggatgctatcttgaatcggattagccagatgcatcgcgtctcctgctcaggcgggagaagtcctactgtcagagtatccgtcgtggccaacactccgagcggacccgttgaggcctttgatttcgacgaataccaacctgaaatgctagagaagttcagaaacatgagaagccagcacccttacgttctgacagaagatacccttaaagtgtatttgaataaatttaggcagagctctcccgactcagttaaggtggttattcatttcaccgacggagcagatggagatttggcagacttgcacagagccagcgagaacctgcggcaggaaggagtccgcgctctaatccttgtgggactagaacgggtggtcaatctcgagaggttgatgcacttagagttcgggaggggctttatgtacgaccgaccactgaggctgaatctacttgacctggactacgaactcgctgagcagctggacaatatagccgaaaaagcatgttgcggcgtgccctgtaagtgcagcggacagaggggcgacaggggccctatcgggtcaattgggcccaaaggcatccctggagaagatgggtatcgcgggtatcccggtgacgaaggaggaccaggcgagcggggtcctccaggtgtgaatggcacacaaggcttccagggctgtcccggccaaaggggcgtaaagggctctaggggcttccctggtgagaaaggagaagtcggtgagataggacttgatggcctcgatggcgaggatggagataagggactccccggctcctctggggagaaaggcaatcctggccgacgcggggataaggggcccagaggcgagaaaggggagaggggcgacgtggggatcagaggcgatccagggaacccggggcaggatagccaagagcgggggcccaagggcgagaccggagacctcggaccaatgggggttcctggtcgagatggggttccaggcgggcccggcgaaacaggtaagaacggaggctttggaaggaggggaccaccgggagcgaaaggcaacaagggcggcccaggacaacctggcttcgaaggggaacagggcacacgcggcgcacaagggcccgcaggccctgcagggcctcctgggctcattggagagcagggaatatccggccctagaggttcagggggcgccgccggagccccaggggaaaggggccgaactggccccttgggccggaagggcgaacctggggagcccggcccaaaagggggaattggcaatcgcgggccacgtggcgagacaggcgatgacggtcgcgacggtgtagggagtgaaggtcggcgaggcaaaaagggagaacgaggcttccccggctaccccggtcctaagggaaatcccggcgagcccggcctgaacggtacaaccggacctaaggggatcaggggacgccgggggaattcgggaccacctggcatcgtcggacagaaaggcgatcccgggtatcccggacccgcgggtcctaagggcaataggggggactccatcgaccagtgtgcacttattcaaagtatcaaggacaagtgcccttgttgttacggccctcttgagtgtccggtattccctactgagttagcctttgccctggatacaagtgagggcgtcaaccaagatacattcggtcgtatgcgagacgtggtcctgagcatcgtgaacgatctgactatcgccgagtcaaactgccctagaggtgcccgtgtggccgtcgtcacttataacaacgaagttaccactgaaatcagatttgccgacagtaagcggaagtcagtgctgcttgacaaaattaaaaacttacaagtggctctcacatccaaacaacagagtctggaaaccgcgatgtccttcgtggcacggaatacttttaaacgggtccgcaacggcttcctgatgcgaaaggttgctgtatttttttctaacacaccgacacgggccagtcctcaactgagagaagctgttctcaaactaagcgatgctggcatcactcccttgttcctcacccgccaagaagacagacaattgatcaatgcgctgcagataaacaatacagccgtgggccacgctcttgtacttcctgccggaagggacctcaccgacttcctagaaaacgttcttacatgtcacgtttgcttggacatttgtaacatagatccttcatgcggattcggaagctggcggccgtctttccgggacagacgagcagccggctcagatgtagatatcgacatggcgtttattctggatagcgcagagaccaccacactgttccagtttaacgagatgaagaaatacattgcctacctggtgcgtcagctggatatgtcccccgaccccaaagcctcacagcattttgccagggttgctgtagtgcagcatgccccgagtgagtcagtggacaatgcgagcatgccaccagtaaaggtggagttctccttaaccgattatgggagtaaggaaaagttggtggactttttgagtcgtggtatgacccagctgcagggtacgagggctctcggttccgctattgagtataccatcgaaaacgtcttcgaaagtgcacccaaccccagagacctaaaaatcgtggtgctgatgctgacgggcgaagtccctgagcaacagctcgaggaagctcagcgtgtcatcctgcaggccaaatgcaaggggtactttttcgtcgtcttgggcattggccggaaagtgaatattaaggaagtctacactttcgccagcgagcctaatgatgtattcttcaaactggtggacaaaagcacagaactgaatgaagagcctttgatgagatttgggcgccttctgccgagtttcgtgtcgtccgaaaacgcattttatctgtcccctgatatccggaaacaatgcgactggttccagggcgaccaacccactaagaatctggtgaagttcggacataaacaagtgaatgtgcccaataatgtgacctcctcccccacctctaatcctgtaactacaaccaaaccggttaccaccactaagccagtgacaactacaacgaaaccagtgactacgacgaccaagccagtaaccattataaatcaaccctccgtgaagccagctgcagccaaacctgcccctgcgaagcccgtggctgcgaaaccggttgcaactaagatggccacagtcaggcccccggtagcagtcaagccggctacggccgccaagccagtagccgcgaaaccagctgccgttcggccccccgctgccgccgcggccaaaccagtcgcgacgaagcccgaagtcccaagacctcaagcagccaaacccgccgcgactaaacctgccaccactaagcccatggtaaaaatgagtcgagaagtccaggtgtttgaaattaccgaaaattccgcaaaactgcattgggaacgggcagaaccgcctggaccctatttctacgatctgactgtgacaagcgcccacgatcagtccttagtgctgaaacaaaatctgactgtcactgaccgcgtgataggtggactgctggctggccagacatatcacgtagccgtggtatgttatcttagaagccaggttcgggccacctatcacggctcgttctctaccaagaaatctcagccacctcctccacaacccgcccgttccgccagctcatccactatcaacttaatggtctccactgaacccctggctctgacagagacggacatttgtaaactacctaaggacgagggtacctgtcgtgactttatactgaaatggtattacgatcccaacaccaagtcctgcgccaggttttggtacggaggctgtggagggaacgagaacaaatttggatcacagaaagagtgtgaaaaggtttgcgcacccgtgcttgctaaacctggagtgatctccgtgatgggtacctag

SEQ ID NO: 230661 - DNA, 8916 bp, Artificial Sequence
  derived and/or modified sequence
atgcggaagcaccggcacctgcccctggtggccgtgttctgcctgttcttaagtggctttcccaccacccatgctcagcagcagcaggctgcgcaggacagcgctgacatcatctttttaatagacgggtcaaataatactggctctgtcaatttcgcggtcatccttgacttccttgtcaatttgctggagaaactgccaatcggtactcagcagatccgcgtgggggtcgtgcaattctctgatgaaccacggactatgttttcattagacacttatagcaccaaagcgcaggtgctcggagccgtgaaggctttggggttcgccggcggggagctggcaaacattggcttggccttagattttgtggtcgagaatcatttcactcgggcagggggaagccgagtggaggagggagtccctcaagtgctggtgttgatcagcgcgggcccgtcatcggacgagatcagatatggagtggtcgctctaaagcaggcgagtgtgttcagcttcggattgggcgcacaagccgcctcccgggccgagctccagcatatagccaccgacgacaacctcgtcttcaccgttcccgaatttcgttcatttggggatctccaggagaaactgttaccttatatcgtaggggttgcacagaggcacattgttctgaagccaccaacgatagtgacccaagtaatcgaagtcaacaagcgggacattgtgttcctggtcgacgggtccagcgccttaggccttgccaattttaatgccatcagagactttatagccaaggtcattcagcggctggagatcgggcaggaccttattcaggtggctgtagcacagtacgccgacaccgttcgaccggaattttattttaatacacacccaacaaaacgagaggtgattacagccgtgagaaagatgaagcctctagacggcagcgccttgtatacaggtagtgcactggactttgttaggaacaatctatttacctccagtgctggttatagggccgccgagggcatccctaagctgctcgtcctgatcacgggtggtaagagtctggacgagatttctcaacctgcccaggagctaaaaagaagttcaatcatggcgttcgcaatcgggaataagggcgctgaccaggccgaactcgaagagattgctttcgattcttccctggtgtttatacccgccgaattccgggctgcccctcttcagggaatgctgcccggcttgctggctcccctccggacactgagcggtacgcccgaggtgcacagcaacaaaagagatattatctttttactggacggtagcgctaacgtcgggaagacgaatttcccgtacgttagagactttgtgatgaacctagttaatagtctagatattggtaacgacaatattagggttggcctggtgcagttttccgatacccccgtgactgaattctccctcaatacttaccaaacgaagtccgatatcttgggccatctccggcagcttcagctccagggcgggagtggcctaaacaccggttccgcactctcgtacgtctacgctaatcattttacagaagccgggggcagccgaattcgggagcatgtgcctcagcttcttctcttgctcaccgcgggccagtctgaagattcatatttacaggcagcaaatgccctgacgcgtgcagggatcttgactttctgtgtgggcgcttcccaggccaacaaagccgaattggagcagattgcctttaatccatcattggtttacctcatggatgatttttctagcctgcccgcactgcctcagcagctaattcagccactgactacatacgtttctgggggtgtagaagaagttccccttgcccagcccgagtctaagcgtgacatcctgttcctgtttgacggatctgccaacctcgtaggccagttccccgtagtgagagattttctttataagatcatagatgaactgaatgtcaaacctgagggcaccaggatcgcagtagcccagtattcggacgacgtcaaagtagaaagtaggtttgacgagcaccagagcaagcccgaaattttaaacttggttaagcggatgaaaataaagacggggaaggccctgaatttggggtatgccctggattatgctcaacgatatatatttgtgaagtctgcaggaagccggattgaggacggggtcctgcagttcttggtcctcttggtcgcaggccgatcatcagatcgcgttgatggacccgcaagcaatttaaagcagtcaggcgtggtcccttttatctttcaagccaaaaacgcagacccggccgaactcgagcaaatcgtgctctcacctgctttcattctggccgcggagtcattgcctaaaatcggcgatctgcacccgcagatcgtcaacctgctgaaatctgtgcacaatggggcgccagcgcccgtgtctggggaaaaggatgttgtcttcctgctggacggctccgagggggtgcgaagcgggttcccactgttaaaagagttcgtgcagagggtcgttgagtctctggacgtgggtcaggatagagttagagtcgcagtggtgcaatatagcgataggactcgtcctgagttctaccttaactcctacatgaataagcaggatgtcgttaatgcagtgaggcaactgactctcctcggaggccccactccaaatacgggggctgccctcgaattcgtgctaaggaatatcctggtttcatctgccggatcaaggatcaccgaaggggtgccgcaactgctgattgttctgactgccgaccgctcaggcgatgacgtaagaaatcccagcgtagttgtgaagcgtggaggggcagttccaatagggatcggcattgggaacgcagatatcacggaaatgcaaaccatctccttcatcccggatttcgcagtcgccataccgacattccgccaactggggacagttcagcaagtgatttctgaaagggtcactcagcttaccagggaggaactgtctagactacagcctgtgctccagcctcttccgtcacccggagttggtggtaaaagagatgtggtcttcctcatcgacggtagccagagcgctggccctgagttccagtatgtcagaactctgatagagcgactggttgactatttagatgtcggttttgatacaactcgtgttgcagtgatccagttctctgacgatccaaaagttgagttcctgctgaacgcccactcttctaaggacgaagtgcaaaatgccgtgcagagactgcgacccaaaggaggacgacagatcaatgtcggaaacgcactggagtatgtaagcagaaacatatttaagcgaccgcttgggtcacggattgaggaaggcgtgccacagttcctggtgctgatatcaagcgggaagtccgacgacgaagtggacgatcccgccgtcgagctgaaacagtttggagtcgcgccgtttacaattgcaaggaatgcagaccaggaggaacttgtcaaaattagcctatcacccgaatacgtgttttccgtttcaaccttcagggagttgcctagcctagagcaaaagttgcttacccctataaccactctgacaagtgagcagattcagaagctattggcctcaacaagatatccacctcccgccgttgagtcggacgccgctgacattgtgtttttgattgatagcagtgagggagtgcggcccgacggattcgcacatatacgagacttcgtctctcggattgttcgccgcctgaacattggtccaagtaaggtcagggtaggagttgtccagtttagcaatgacgtatttcccgaattctacctcaaaacctaccgctcccaagcgccagtgcttgatgcgatccggaggctgagactcagagggggctcacctttgaataccgggaaagcgctggaattcgtggctcggaacctgtttgtaaagtctgcaggctcacggattgaggatggtgtcccccagcatcttgtgctcgttctaggcgggaagtctcaggatgacgtctcaaggttcgcacaagtgatcaggtcaagtggaatagtgtccctaggggtcggagacagaaacattgatcgcacagagctccaaaccatcacaaatgaccccaggctggtttttacagttcgggagtttcgcgagcttcctaacatagaagaacggatcatgaactcctttgggccctccgctgctacccctgctccacctggggtggatacacctcctccaagtagaccggagaagaagaaagcagatatcgtgttcctgttggatggttcaataaattttagaagagattcctttcaagaggtactaagatttgtgtcggagatagtggacacagtgtacgaagacggagacagtattcaagtcgggttagtgcagtataatagcgatcctaccgacgaatttttcctgaaagatttctcaactaagcgacagattatcgatgctattaacaaggtggtgtataaaggcggaaggcacgctaacacaaaagtcgggctggaacatctgagagtcaatcattttgtacccgaggccgggagtagactcgatcagagagttcctcagattgccttcgtaataaccgggggtaagtctgtggaagatgcccaggacgtgagcctggctttgacacaacgaggagtcaaagtgttcgccgttggcgtccggaacattgattctgaggaggtgggcaagattgcctccaactcagctaccgctttcagggtgggcaacgtgcaggaactctccgagttgagcgaacaggtactcgaaaccttgcacgacgccatgcacgagactctgtgcccaggagtcactgacgctgccaaggcatgcaaccttgatgtgatcctgggtttcgatgggagccgagatcagaatgtttttgtggcccaaaaagggtttgagtcgaaagtcgatgccatcctcaacagaatctctcaaatgcaccgggttagctgctctggcgggaggagcccaactgtgagagtgtcagtagtggccaacactcctagcggacctgtggaggcatttgattttgatgagtatcaacccgaaatgcttgaaaaattccgcaatatgaggagccagcatccctacgtgttaaccgaggacaccctgaaagtgtacttgaataaattccggcaatccagccccgactccgtaaaggtggtcatccacttcacagacggtgcggatggagatctggccgatctacatagagcttcagagaacttacggcaggagggggtaagagctctcatacttgtcggtttagaacgagtggtgaatttggaaagactaatgcatttagagttcggccgtggtttcatgtacgataggcctcttcggttgaaccttctggatctcgactatgagttggctgagcaattggacaacattgccgaaaaggcttgttgcggggtcccgtgtaagtgctcggggcagcggggagatagaggacccattggttcaataggcccaaaaggcatccctggagaagacggctatcgcggctatcccggcgacgagggcggccctggcgagaggggacctccaggagtcaatggtactcagggattccagggctgtccggggcagagaggtgtcaaaggcagccgcgggttcccaggggagaagggcgaggtgggggaaatcggtctggacggcctagatggcgaggatggagataagggcctgccaggcagcagcggcgagaaagggaaccctggcagacggggcgataaaggtccccggggggagaaaggcgaacggggtgatgtcggaattcggggtgaccccggtaatcctggtcaggatagtcaggaacgcgggcccaagggagaaactggcgacttaggacctatgggagtgccaggtagggatggagtgccaggaggccccggggagacaggcaaaaacggcggttttggaagacgcggaccccccggggcaaaaggtaataaaggggggcccgggcagccaggcttcgaaggcgagcaaggcacgcgaggcgcacaaggccccgctggacctgcaggtccccccggactaattggagaacagggaatatccggccctcgcgggtccggcggagcggccggcgcccctggcgagaggggcaggacagggcctcttgggcgtaaaggtgagccgggcgaacctgggccaaaaggggggatcggaaatagaggtcctagaggagagactggcgacgatggtcgcgatggggtgggatccgaaggtcggagagggaaaaagggggaaaggggcttcccaggttaccctggaccgaagggtaatccaggcgaaccagggctgaacgggacaacaggccccaagggaattcgtggacgtagggggaattccggcccgcccggtattgtgggacagaagggtgaccctggatatccagggcctgcaggtcctaaaggaaacaggggcgactctattgatcagtgtgccttgatccagtccatcaaagacaagtgcccgtgctgctacggaccactggaatgtccagtgttccctaccgagctggcttttgccctcgatacatctgagggagttaatcaggatacctttggaagaatgagggatgtggtgctgagtatagttaacgatctgactattgctgaatcaaactgtccccgcggcgcccgtgtggcagtagttacctataacaatgaagtgactacagagattcggtttgctgattccaaacgaaaatcagtgctgctcgataagattaagaatctgcaggtcgctctcactagcaagcagcagtccctcgagactgccatgtccttcgtggcccgcaataccttcaagcgggtccgaaacggctttctgatgcgtaaagtggctgtttttttttccaacactcccacacgagcctcaccccagcttagagaggccgtgctgaagctgagtgatgccggcatcacaccactgttccttacacgccaggaggatcgacagttgatcaacgccctacaaatcaacaacactgcagttggtcacgccctggtgcttccggcgggcagagatctcacagactttctggaaaacgtcttaacgtgccacgtttgtctcgatatttgcaacatcgatccgagttgtggcttcgggtcatggcggccttcattccgggacaggagggcagcgggatccgatgtagacatcgatatggccttcattttagacagcgctgagacaacgactctgtttcagtttaacgaaatgaaaaaatatatcgcttatttagtaagacagctcgacatgtccccagaccctaaagccagtcaacacttcgctcgggtggccgtggtccagcacgcccccagcgagagtgtggacaatgcaagtatgcctccagtcaaagttgagttttcgctgaccgactacggctctaaggaaaagctcgtggacttcttgagccgggggatgacacagctgcaaggaacacgcgctctgggcagtgcaattgagtacacaatcgagaacgttttcgagagtgcgcccaaccctcgcgatctgaaaatagtggtgctgatgctgacaggtgaggtgccagaacagcagttagaagaggctcaaagggtgatcctccaagccaagtgtaaaggatatttctttgttgtgttgggaataggcagaaaggtgaatatcaaggaggtgtatacattcgcttccgagccgaatgatgtattctttaagctggtcgacaagtccacagagttgaatgaggaaccgctgatgagatttgggcggctgcttcccagctttgtgtcatctgagaatgccttctatctgtcccctgacattaggaagcaatgcgattggtttcagggggaccagcccactaagaacctggtcaaatttggacacaagcaagtgaatgtgccaaacaacgtcacatccagccccaccagtaatcctgtgaccactactaagccggtcaccaccactaaacccgtgactaccactacaaagccagttactacaacgaccaagcctgtcacgatcatcaaccagcctagcgtcaaacctgccgccgcaaaacctgcccccgctaagcccgtcgcagcaaagcccgttgctaccaaaatggcgaccgtgcggcctcccgttgcggtgaagccagctactgccgccaaaccggtggcagctaaaccagccgccgtgaggcctcccgccgcggcggcagccaaacccgtggccaccaagcctgaggtgccaagaccacaagctgccaagccagctgccacaaaacccgcaacaaccaagcctatggtcaagatgtctcgagaggttcaggtgtttgagataactgaaaactctgcgaagctgcattgggagagagcagagccgcctgggccctatttctacgacctgactgtcacctccgcccacgatcagagcttggtcctcaaacagaatctcacagtgaccgaccgagtgatcggtggcttattggcggggcagacctaccacgtcgcagtggtgtgttacctgcgctcgcaggtgagagctacttatcatggcagcttctccacgaagaagtcacagcccccaccgcctcaacccgcacggtctgcctcttcatccaccataaaccttatggtcagtaccgaacctctcgctctaaccgaaacagatatttgcaagctgcctaaggatgaaggcacatgcagagatttcatcctgaagtggtattatgatcctaacactaagagctgtgccaggttttggtatgggggctgcggaggtaacgagaacaagtttggctcacagaaggagtgcgagaaggtgtgcgccccggtcctggccaagccaggcgttatcagtgtgatgggcacttag

SEQ ID NO: 230662 - DNA, 8916 bp, Artificial Sequence
  derived and/or modified sequence
atgcggaagcaccggcacctgcccctggtggccgtgttctgcctgtttctgtcagggtttcctacaacccatgcacagcagcagcaggccgcacaggattccgccgatatcatattcctgatagatggctctaataataccggtagcgtgaacttcgctgtaattctggacttcttagtgaatctgttggaaaagctgcccatcgggacacaacaaattagagtgggagtggtgcagtttagcgatgagccccgcactatgttttccttagatacttattccactaaagcccaggtgctgggtgcagttaaagcattgggattcgccggcggagaacttgctaacattggtctggccctggattttgtggtcgagaatcacttcactagggctggcgggtcacgcgtcgaggagggcgtgccccaggtgctggtcctgatctctgcaggcccatcgagcgacgaaatcaggtacggtgtggtggccttaaagcaagcctctgtcttctcattcggactgggagcacaagccgcatccagggccgaattacagcatattgccactgacgataacctggtcttcacagtgccagagttccgcagttttggtgatctgcaggagaagctcctgccatatatcgttggggttgctcagcggcacatagttctgaagccacccacgatcgtgacccaggtcattgaggtaaataaaagggacatcgtgtttctcgtggacggaagctcagccctaggcctggcaaactttaacgctattcgggatttcattgcaaaagtgatacaaagattggagatcgggcaggacctgattcaggttgccgtagcccagtacgcagatacggtgagacctgaattctattttaacacacacccaacaaaaagggaggtcattaccgcggtgcgcaagatgaagcccctggatggatccgctctctatacgggatcggcactcgactttgtaaggaacaatctgttcacatcgagtgccggctaccgggctgccgaggggatccctaagctgttggttctaatcacaggaggaaagagtctggatgaaatctctcagcccgcccaggagctgaagcgctccagcatcatggcttttgctattggcaacaaaggcgccgaccaagcagagctcgaggagatcgcctttgacagcagcctggtattcatccctgctgagttcagagccgcgcctctgcagggcatgctgcccgggctgctggccccactgcggaccctttctgggactcctgaagtccatagcaacaaacgggacatcatcttcctgctcgatgggagcgccaacgtcgggaagaccaatttcccgtatgttagggattttgtgatgaatttagtcaacagcctggacatcggcaatgataatataagagtgggcctcgttcagttcagtgatactcccgtcaccgagttttccctgaacacatatcaaaccaagagcgatatcctgggccatctccgacagcttcaactgcagggaggaagcgggcttaacactggaagcgccctgagctacgtctacgcaaatcacttcactgaggctggcgggagtcgcatccgtgaacacgttcctcagctgctgttattgctcacagccggccaatcagaggactcctacctccaggccgcaaatgctctgactcgcgccggcatactgactttctgtgtgggagcttcacaagcgaataaggccgagctggagcagatcgcttttaacccatccctcgtctacctaatggatgatttcagctcactgcctgcattacctcagcagctaattcagcccttgacgacttatgttagtggaggggtcgaagaagtgccattggcccagcctgaaagcaagcgtgacattctgttccttttcgatggcagtgctaacctggtgggacagtttcccgttgtgcgagattttctgtacaaaatcattgacgagctgaacgtgaaacccgaaggcacacgaatcgcagtggcccagtattcagatgacgttaaggttgagtcacggttcgatgagcaccagagcaaacctgagatccttaaccttgtgaaacgcatgaaaatcaaaacaggcaaggcgctaaacctgggatacgcgctggattatgcccagcggtacatttttgtgaagtccgccggctctaggattgaggatggcgtgctccaatttctggtgctcctggtggccgggcgcagttccgacagagttgatggccccgcttccaatcttaaacaatccggcgttgtgccatttatctttcaggccaaaaacgctgaccctgctgagctagaacagattgtactctctcctgctttcatattggccgcggaatctcttcctaagataggagatctgcacccccagatcgttaatctgctcaagagcgttcacaacggtgcccccgcccccgtttcaggggaaaaagacgttgtctttctgttagatggctcggagggagtgaggtccggatttcccttattgaaggagtttgtgcagagagtggtggaatccctggacgtgggccaggacagggtgagggtcgctgtcgtgcagtactctgacaggacaaggcctgagttctacttgaattcctatatgaacaagcaggatgtggtgaacgcagtgcgccaattgacgctgctaggtggacccacgcctaacaccggggccgccttagagtttgtgttgagaaacattctagtaagcagtgccggctcccggattaccgagggggtaccgcaactcctgatagtactgacagctgacagatccggggacgacgtcagaaatccctcagtggtggtaaaacggggaggggcagtacctattggcatcgggattgggaacgctgatatcacagagatgcaaacgatctcgtttatccccgattttgctgtggccattcctaccttccgccagctagggaccgtgcaacaggtgatatcagaacgcgtgacccagttgactcgggaagaactgagccgactccagcctgtgctgcaacccttgccatcccccggagtgggcgggaagagagacgtcgtctttctgatagacggttcccagtctgccgggcccgaatttcagtatgtaaggacacttatcgaacggctcgtggattatttggatgtcggctttgatactaccagggtggccgtcattcaatttagtgacgatcccaaggtggagttcttgctgaatgctcattcttctaaggatgaagttcagaatgccgtccagaggcttagaccaaagggaggcagacagataaacgtggggaatgcgctggagtacgtgtctagaaacatcttcaagcgacccctcgggagccgaattgaggagggggtgccacagttcctcgtcttaatctcgagcgggaaaagtgatgacgaggtggatgatccggcggtcgagctaaagcagttcggggtcgcaccgttcaccattgcccgcaatgccgaccaggaagaactagtgaaaatctctctgtctcccgagtatgtgttttctgttagcacttttcgagaactgccgtcactggaacagaagctgctaactccaatcactactctgacgtctgagcagattcagaaactcttagcctctaccagatatccaccccccgctgttgagagcgacgcggcggacatcgtcttcctgattgattcctccgagggcgtgcgaccagacggttttgctcacatccgcgactttgtttctcgcattgttcggaggcttaacattgggcctagcaaggtgcgggtcggtgtggtacagttcagcaacgatgtgtttcctgaattttatctgaaaacttaccgctcacaagcacccgttctggacgctattcgaaggcttcgtttgaggggcgggtcccctcttaatacagggaaggccttggagtttgtcgctcgaaacctttttgtgaagagtgctggaagccgcattgaagacggggtgcctcaacacctggtcctggtactaggtggtaagtcccaggatgacgtttctcgtttcgcccaggtgatccgttctagtggaattgtgtctctcggtgtcggtgatcgcaacattgatcgaacagaactccaaacaatcacaaatgacccccggctggtgttcaccgtgcgtgaatttagagagctgccgaatattgaggagcggataatgaattcgttcggcccctccgcagcgacaccagcccccccgggagtagatactcctcccccctcgaggcccgaaaaaaagaaggccgacattgtatttctactagacggatctatcaatttccgcagggattctttccaggaggtgctgcgcttcgtgtctgaaatcgtggatacagtgtatgaggacggcgactccatccaggtgggtcttgtgcagtacaattctgatcccaccgatgaatttttcctgaaggactttagcactaagcgtcaaatcatagatgccatcaataaggtggtctataagggcggccggcatgcaaacacaaaagtcgggctcgaacatctgcgggtcaaccattttgttcctgaagcagggagcagactggaccaaagagtgcctcaaatcgctttcgttatcactggcggtaaatcggtcgaggatgcccaggacgtgagtcttgcccttacacaacgcggggtgaaagtgtttgccgtcggagtgagaaatatcgattctgaggaggtgggcaaaattgcctctaattccgccaccgcttttcgggtgggaaatgtacaggagctgtccgaactgtcagaacaagtgctcgagacccttcatgatgccatgcatgagacactgtgtccaggtgtgaccgatgccgcaaaagcctgtaacctggatgtgatcttagggttcgatggctctcgcgatcagaacgtgtttgtggctcagaagggctttgaatccaaggttgacgcaatactgaaccggattagtcagatgcatagagtcagctgtagtggcgggcgctcaccgactgttcgggtttctgtcgtagcgaatacccccagtggacctgtagaggcatttgattttgacgaataccaacctgaaatgttggaaaaattcaggaatatgcgatctcagcacccttacgttctgacagaagataccttgaaggtgtacctgaataagttccgccagtcttctccagattctgtcaaggtggtgattcatttcacagacggtgccgatggtgatctggcggacctgcatcgcgcctccgaaaatctgcggcaagaaggtgtccgtgctctgatcctcgtcggcctcgagcgcgtcgtgaacctcgaacgcctgatgcacctggaattcgggcgcggttttatgtacgacagaccactgcgtcttaatctgctagacctcgactatgagctcgctgagcaactagataacatcgcagaaaaagcatgctgcggggtgccctgtaagtgttcaggccagagaggtgacagaggacctattggatctatcggacctaaggggatcccaggtgaggatggctatcggggctacccaggcgacgaggggggccctggagagagagggccgccgggcgtgaacggtactcagggttttcaggggtgccctggccagcgcggcgtgaagggttcgcggggtttccccggtgaaaaaggcgaggtcggagaaatcggcctcgacggattggatggtgaggacggggacaaggggctgcctgggagctctggagagaaaggcaacccgggccggcggggggacaaaggtcccagaggggaaaaaggcgagcggggggatgtgggaatcaggggcgatcctgggaaccccggccaggattcacaggaaaggggcccaaagggtgagaccggcgacctcgggcccatgggagtcccaggaagagatggggttccaggcggccccggagagaccggcaaaaacggcggatttggcagaagaggtccgccaggagctaaaggcaacaaaggggggcccgggcagccgggatttgaaggggagcagggaacaaggggcgctcagggacccgccggcccagctgggccaccggggctgatcggtgaacaagggatcagcggaccacgcggcagtggcggcgcggccggtgctccaggagagcgaggcagaaccggaccgttgggaagaaaaggcgaacctggtgagccagggcccaaaggaggcattggaaatagggggccccggggggagacaggcgatgacgggagggatggagttggtagcgagggccgcaggggcaaaaaaggtgagagaggattccccgggtacccgggcccaaagggcaaccctggagaacccggcctgaacggcactacaggccccaaaggcatccgagggaggaggggaaacagtgggccaccaggaatcgtcggccagaagggtgaccccggctatcccgggcccgctggacctaaagggaatcgaggcgactcaatcgatcagtgcgcgctaatccagtcgataaaagataaatgtccctgctgctacggccctctcgagtgtccagtgtttcccaccgagctcgcatttgccttagacacttctgaaggtgtgaaccaggatacattcggaaggatgcgggacgttgtgctgtcgatcgtgaatgatctcacaatcgctgagtccaactgcccaagaggtgcacgcgtggcggtggttacgtacaataacgaagtgacaaccgaaatacggtttgccgacagcaagagaaagtcagtcttactagacaaaataaaaaatttgcaagtggcactgacttccaagcagcagagcttagagaccgccatgtcctttgtggcacgcaatacttttaagagagtacggaatgggtttctgatgcgcaaagtggccgtgttctttagtaatacgcctacaagagcgtcaccacaactacgggaagccgtgctcaaactgagcgacgctggcataaccccacttttcctgacccgtcaggaggaccggcagcttattaatgctttgcaaatcaacaatactgctgtgggacatgccttagtgctgccagccggcagggatttgacagattttctagagaatgtgctgacttgtcacgtgtgcttagatatttgtaatattgacccatcatgtggttttggttcatggcgtccttcctttcgcgacaggcgagccgccgggtctgatgtggacatagatatggccttcatcctggacagtgccgagacaaccactctgttccaattcaatgagatgaaaaagtacatcgcgtaccttgtgcgtcagctggacatgagtcctgacccgaaagcctcccaacattttgcccgggtggcagttgtccagcacgcaccctccgagtcagtggataacgctagcatgccccctgttaaggtggaattttccctaacagattacggatcaaaggaaaagctcgtggactttctcagccgggggatgacccagctgcagggaacaagggcacttggttctgctatcgagtataccatcgagaatgtattcgagtccgcccctaacccacgggacttgaagattgtggtgctcatgctgacaggcgaagtccccgagcaacagctggaagaagcacagcgggtgatcctccaggccaagtgtaaaggctacttctttgtggttcttggcattggcagaaaagttaacataaaagaggtctacacttttgccagcgaacctaacgatgttttcttcaagctggtggacaaaagcaccgaacttaacgaggaacctctgatgcgatttggacggctcctcccttctttcgtaagctctgaaaacgccttttatctgtctcccgatatccgaaaacagtgtgattggttccagggtgaccagccgaccaagaatcttgtgaaatttggccacaagcaagtcaacgttccaaataatgtgaccagctctcccacatccaaccccgtgacaaccaccaaacctgttacgaccacaaagcccgttaccactaccacgaagccggtcaccacaaccacaaaaccggtcaccatcattaatcagcctagcgtcaagcctgccgctgccaagccagcccccgcaaaacccgtagcagccaaaccggtggccaccaagatggctactgtacgcccaccagtggccgttaaacctgctacagcagccaaacccgtggcagcgaagcccgccgctgtacgccccccagcagctgccgctgccaaaccagtggctaccaaaccagaggttccccggcctcaggccgcaaagcccgcagctacgaaaccagcaactacaaaacctatggtaaagatgtccagagaagtgcaagtcttcgagatcactgaaaacagcgccaagctccactgggaacgcgccgagccccctggcccatatttctatgatcttactgttacatctgctcacgaccagtccctggtcctaaaacaaaatctcaccgtcacagatcgggtaataggaggacttttagccggacaaacttaccatgtcgccgtggtttgttacttgcgctcccaggtccgggctacttatcatggatcgttctctacaaagaagagtcaacctcctcccccacagcccgcccgctcagcctccagctctacaatcaacctcatggtgtcaacagagccgctcgcactgacggagacagacatttgtaaactccccaaggacgagggcacatgccgggacttcatccttaagtggtattatgacccaaacacaaaaagctgcgccaggttctggtatggcgggtgcggaggtaacgagaataaattcggctctcagaaagagtgtgagaaggtgtgtgccccggtgctggctaagcccggcgtgatctccgtcatgggcacatag

SEQ ID NO: 230663 - DNA, 8931 bp, Artificial Sequence
  derived and/or modified sequence
atgcgtaaacataggcacctccccctagtggccgtgttctgcctatttctgtcaggtttcccaacaacccatgctcagcaacagcaggctgacgtgaagaacggagctgccgctgacattatcttcttggttgactcatcatggaccatcggagaggagcacttccaactggtcagggaatttctgtacgatgtggtgaaaagtctggccgtgggtgagaacgattttcatttcgccctggtccagtttaacggcaacccccacaccgagtttttgctaaacacttacagaaccaaacaggaagtcttatcccatataagcaacatgagctacataggaggaactaaccagactggaaaggggctggagtacatcatgcagtctcacctcaccaaagccgctggcagccgcgctggagacggagtgcctcaggttattgttgtactcactgatggacacagcaaggacggcctggccttgccaagcgccgaactgaagagcgctgatgtgaacgtgttcgctatcggggttgaggacgcagacgagggggctctgaaggaaatcgcctccgagcctctgaatatgcacatgttcaatttggagaattttacgagccttcacgacatcgtaggtaatctggtcagctgtgtccactcttcggttagccccgagcgagccggagacaccgagacactgaaggacatcactgtcatcgaggtgaacaagcgggatatcgtattcttagtcgatggctcttccgctttagggctcgcaaactttaacgctattcgtgacttcatcgctaaggtgatccagcgtctggaaattggccaggacctcatccaggtcgctgtggcacagtacgccgacaccgtgcggccagagttctacttcaatactcatcccaccaaacgcgaggtgattacagccgttcggaagatgaaacctttagacggatccgcactctataccggctctgctctcgacttcgttcgaaataacctgttcacctcatcagctggctatagggccgctgaggggattccaaaacttttggttcttatcacggggggaaaatctctggatgagatttcgcagcccgcacaggaacttaagagaagctcgatcatggcattcgcaatcgggaacaagggcgctgaccaagctgaattggaggaaattgccttcgactccagccttgtgttcattcctgccgaatttcgcgctgccccacttcaggggatgctgccagggcttcttgctcctctgcggaccctaagcggcacccctgaggtgcactccaacaagcgagacattatattcttgttggatggttcggcaaatgtgggcaagaccaatttcccttacgtgagggactttgttatgaacctggtgaacagcctggatataggcaatgacaacatacgagtgggactcgtgcaattcagtgatactcccgttacagaattctcgctgaacacgtatcagacaaagagtgatattttgggtcaccttcgccaacttcagctgcagggcggaagcggccttaatacaggctcggcacttagttacgtgtatgcgaatcatttcacagaagctggcggttcaagaattcgggagcacgtgccgcagcttcttctcttgctgactgctgggcaatccgaagatagctatctgcaggccgcaaatgccttgacccgagctggtatactgacgttctgcgtcggggcaagtcaggccaacaaggcggagctcgaacagatagccttcaacccttccttggtttatctgatggatgacttcagcagcctgccggcactcccgcagcaactgattcagcctctgactacctatgtgagcgggggagtcgaagaagtgcctttagctcaaccagagagcaaaagagacattttgttcctgttcgacggcagcgccaatctggttggccagtttccggtcgtgcgagatttcctctacaagatcatagacgaacttaacgtgaagcctgaagggaccagaatcgccgtagcgcagtattccgatgatgtcaaagtggagtcacgtttcgatgagcatcagagtaagcctgagattctgaacttagtgaaacgaatgaagattaaaacaggaaaggctctcaatcttgggtacgcactcgattacgcccagcgttacatattcgttaagtccgctggcagccggattgaggacggcgtactccaatttctggtgctgctggttgccggtaggtcctccgaccgagtcgacgggcctgcaagcaacctaaagcagtcaggagttgtacctttcatctttcaggctaaaaatgccgaccccgctgagctggaacagatagtgttgtcccccgctttcattcttgcagcagagagcctgcccaaaatcggtgatctgcatccccagatcgtcaatttgcttaaatccgtccataacggcgctcctgctcctgtttctggtgagaaagatgtggtattcctgttggacggttccgaaggagtgcggtctggattcccgctgttgaaggagttcgtgcagcgagttgttgagagtttggacgttggtcaggatcgcgtgagagttgcggttgtacagtattccgataggacccgtccggaattttatctgaattcgtacatgaataagcaggatgtggtcaacgcagttaggcagctgacactactgggaggcccaactcctaacacaggagctgcactagagtttgttctgcgcaacatcttagtgtcctccgctggttcccggatcacagaaggtgtcccacagcttttaattgtattgaccgccgacaggtctggcgatgacgtgaggaacccgagcgtggtggttaagcggggaggggcagttcctataggcatagggatcgggaacgccgatatcacggagatgcagaccatttcgtttatacctgacttcgcagttgccatcccaacgtttcggcagttgggcactgtccagcaagtgatctccgagcgagttacccaattaaccagagaagagctttccaggctacagcccgtgctgcagcccctgccatcacccggagtcggcggtaagcgggacgtggtgttcctgatcgatggctcacagagcgctggacctgagttccaatacgtgagaacgttgatagaaagattagtcgattatctggatgtgggattcgacacgacccgcgtcgccgtcattcagttttccgatgatccaaaggtggagttcctccttaatgcacattcttcaaaagatgaggtacagaacgccgtgcagcgcctcaggcctaagggtgggaggcagattaacgtcggcaatgccttagagtatgtgagtagaaatatttttaagcggcctctgggcagccgtatcgaggagggtgtgccacaattccttgtgcttatatcctccggtaagagcgacgatgaagtggacgaccccgctgtggaactgaagcagttcggcgtggcgcctttcaccatcgccaggaacgcagatcaggaggaactcgtgaagatcagtttgtcgccagagtacgtttttagtgttagtacatttagggagttgccttccctggagcagaagctcctgactcctataacaacgctcacgagcgagcaaatccagaaattactggcctctacccgttaccccccaccagctgtggaatctgacgccgctgatattgtcttcttgatcgatagtagcgagggtgtcaggcccgacgggttcgcccacatacgcgattttgtgagccgtatcgtgagacggctgaatatcggtccatctaaagtgcgcgtaggcgtagtgcagttctcgaacgacgtgttccccgaattttacctgaagacatataggagtcaggcccctgtgctggacgccatcaggagactccggttgcgaggcggaagtcccctgaataccggcaaggcactggagttcgtggcccgtaacttattcgtgaagagcgcaggctcacggattgaagatggagtgccacaacatctggtgctagtgctgggaggcaagtcacaggacgatgtcagcagatttgcccaggtgattcgatctagcgggattgtctccctcggcgtgggcgatagaaacatcgaccgcaccgagctccagactattaccaatgatccaagactcgttttcacagtgagagagttcagagagctgccgaacattgaggaaagaattatgaattcttttgggccaagtgccgcaactcctgctccacccggagtcgataccccccctccttccaggcccgagaaaaagaaggcagacatcgtgttcctcttggatggctccataaacttcagaagagattctttccaggaggtgttgcggtttgtatctgagattgtggacacagtgtatgaagatggagactctatccaagtgggcttggtccagtataattcggatcctactgatgagttttttctcaaggatttttctactaaaaggcaaatcattgatgcaatcaataaagtagtgtataaagggggtagacatgcaaacaccaaagtcggactggaacacctgagggtcaatcattttgtcccagaggccggtagtcgtcttgaccagcgcgtgccccagatagcattcgttattaccgggggaaagtctgtggaagatgcacaagacgtatctctggcgctgacccagcggggagtgaaggtatttgcggtcggggtgcgaaatatcgactctgaggaggtggggaaaattgcatccaattccgccactgcctttcgcgtgggcaatgtgcaggaattgagtgagctgtccgaacaggtgctcgagaccttgcacgatgctatgcatgaaactctgtgccctggagtgacagacgcagccaaggcctgtaatctcgatgttatactcggcttcgatggaagcagagaccagaacgtgttcgtcgcccaaaaggggttcgagagtaaagtcgacgccattctaaatcgcatcagccagatgcatagagtcagctgttcagggggtcggagtcccacagttcgtgtgtctgttgtagcgaacaccccatccggacccgtggaagcattcgattttgacgagtaccagcccgagatgcttgagaagttccgcaatatgagaagccagcacccgtatgtcctgactgaagataccctaaaagtttatttgaataagtttcgccagtcctctccagacagtgtaaaagtggtgatacatttcacagacggggctgacggcgatctggccgacctgcatcgggcttccgagaacctgcggcaggaaggggtccgggctctcatccttgtgggcttggagcgtgtagtgaatctcgagaggctcatgcacctagaatttggacggggatttatgtacgatcgaccgctgagactcaatctcctggatctcgattatgagttagccgagcagctggataatattgccgagaaagcgtgttgtggcgtgccatgcaagtgtagcggccagagaggggacagagggccaatcgggtccattggccctaaggggatcccgggagaggatgggtacagggggtaccccggagacgaaggcggacctggagaacggggtccccctggcgtgaatggcacccaggggttccagggttgccctggccagcgtggagttaagggctcaaggggcttccccggagaaaagggggaagtgggtgagatcggtctggatggattggacggagaggatggggataagggtcttcccggaagctccggcgagaaaggaaaccccggaaggcgcggtgataagggaccaagaggcgagaaaggcgagaggggagacgtaggtattcggggagaccccggaaaccctggccaggattcccaggaaaggggacctaagggcgaaacaggagacctggggcctatgggcgtgcctggacgcgacggcgtacctgggggacctggcgaaaccggaaaaaacggagggtttggcagaagaggccctccaggtgctaagggaaataagggagggccagggcagcccggtttcgaaggggaacagggtacacgaggagctcagggacccgctggaccagcgggtcctcctggattgattggcgagcagggcatcagcgggcctcgaggtagcggcggagctgctggggcacctggggaacgcggaagaacaggaccactcggtagaaaaggggagcctggcgagcccggacccaagggtggtattggtaaccgaggaccacgaggcgagaccggcgacgacggtcgcgacggcgtgggcagcgaaggaaggcggggaaaaaagggcgaaagaggatttccaggctaccccggaccaaaagggaacccaggcgaacctggccttaatggaaccacaggaccgaagggaatccgtggccgtcggggtaatagcggccctcctggtatagtcggccaaaaaggggaccccggatatcctggcccagccggacccaagggcaaccggggtgactccatcgatcagtgcgccctaattcagagcattaaagataaatgtccgtgttgttatggcccacttgagtgtcctgtttttccaaccgagctggcttttgctctcgacacatccgaaggggttaaccaagatacctttggcagaatgcgggatgtcgtcctcagcattgtgaacgatctgacgattgccgagtccaattgcccacgtggcgctagggtcgcagttgtgacctacaacaacgaagtcactacggagatccgtttcgcagacagcaagcggaaaagcgtattactcgataaaattaaaaatctgcaggttgcactgacaagtaagcagcagtctttggagaccgccatgtcatttgttgctagaaataccttcaagagggtccggaacgggtttctgatgagaaaggtggccgtgttcttcagcaacactccgacgcgcgcatccccacaactgcgagaagccgtgctcaaactgagcgacgccggaattacccccctgtttctcacccggcaagaggaccgccaactcatcaacgcattgcagataaacaatacagcggtggggcatgcgctcgtgctgcccgcaggtcgggaccttacagatttccttgagaatgtgctgacctgccatgtgtgtctggacatatgcaatattgacccgtcttgtggtttcggtagctggcggcctagcttccgggatagacgggctgctggatccgacgtcgacattgacatggcctttattctcgattctgccgagaccacaacattgttccagtttaacgagatgaagaagtacatcgcttacctggtgcggcagctggatatgtctcctgacccgaaggcaagtcagcacttcgctagggtagctgtcgtgcagcatgccccttcggaatccgtcgacaacgcatcaatgcctcctgtgaaagttgagttttcactgaccgactatggatccaaagagaagctggttgattttctcagtcgtggcatgacacagctgcagggtacacgggctcttggaagcgctatcgagtacaccatcgaaaacgtgttcgagagcgcaccgaacccacgggatcttaaaatagtagtgctaatgctgacaggagaagtcccggaacaacagcttgaggaggctcagcgagtgattctacaggctaaatgcaaaggttacttttttgttgttctcgggattggacggaaagtgaacatcaaggaggtttatactttcgccagcgagcccaatgacgtgttctttaagcttgtcgataaaagcaccgagctgaatgaggaaccattgatgagattcgggagactgctccctagtttcgtgagcagcgagaatgccttttacctatccccagacatccggaagcaatgcgactggttccagggagatcagcctaccaaaaatttggtcaagtttggccacaaacaggtgaacgtaccaaataatgtgaccagctcacccacatcaaatcccgtgaccacaacgaaaccggtgaccacaaccaagcccgtaaccacaacaacaaagccagtcacaaccactaccaaaccagtgacaataatcaatcagccatccgtaaagccggctgcggctaaacctgcacctgctaagcccgtggccgctaagcctgtggccactaaaatggccactgtcagaccacccgtggccgtgaagccggctaccgccgcaaagcccgttgccgcaaagcctgccgctgtgaggcccccagctgccgcagctgcaaaacccgtcgcaaccaagcctgaagtgcccaggccgcaggcagccaagccagccgctacaaagccagccacaactaaaccaatggtgaaaatgtcaagagaagtccaggtgttcgagattaccgagaactctgctaaactgcactgggaaagggctgagccaccagggccatacttctacgacctgactgtcacctcagcccacgaccaatctctggtgctgaagcagaatcttacagttacagacagggtgatcggcggtcttctagcagggcagacctaccacgttgcagtagtctgttatctgcgaagccaggtgcgagcaacatatcatggaagcttttccaccaaaaaatcacagccgccacctcctcagccagcgcgaagcgcttcctcctctactatcaatcttatggtctccacagagcccctcgccctgactgaaaccgacatctgcaagctgcctaaagatgagggcacttgtcgggactttattctgaagtggtactatgacccgaatacaaagagctgcgccagattttggtatggcggttgcgggggtaatgagaacaagtttggctctcagaaggaatgtgaaaaggtttgtgcgcctgtgttggccaagcctggcgttatcagcgtgatgggcacctat

SEQ ID NO: 230664 - DNA, 8916 bp, Artificial Sequence
  derived and/or modified sequence
atgaggaaacacagacatctaccactcgtggcggtcttttgcctgttcctctctggctttcctactacccatgcccaacagcaacaagccgctcaggacagtgccgatattatcttccttattgacggcagcaataataccgggtccgtaaactttgccgtgatcttggacttcttggtgaacctgttggagaaacttcctattgggacccagcagattcgggtaggcgtggtccaattctcagatgagcccagaacaatgttttctttagatacatattctacaaaggctcaggtcctcggtgctgtgaaggctctcggattcgctgggggtgaactcgctaatatcgggctggcattagactttgtcgtggagaatcactttacccgggctggcggaagccgcgtcgaggaaggagttccacaagtgctggttctgattagtgctggtcctagcagtgacgaaatccggtatggtgtggttgccctcaagcaggcatctgtcttctcattcggcctgggcgctcaggcagcctctagggctgaactgcagcacatcgctactgatgataacctcgtgttcactgtcccggaattccggagcttcggagatcttcaagagaagttactgccgtatatcgtgggagtggctcagaggcacattgtgttgaaaccgccaaccatagtgactcaggtcatagaagtcaataagcgggatatagtctttctggtggatggatcctccgcccttggcctcgccaatttcaacgcaatccgggactttatcgctaaagtcatccagcgcttggaaatcgggcaggacctcattcaggtggctgtcgcgcagtatgcggatacagtgcggccagaattttacttcaatacgcacccaaccaaacgggaggtgatcacagccgtacgcaagatgaagccattggatggaagcgccttgtatacaggcagcgcacttgactttgttaggaataacctgtttacaagctcagccggatacagagctgcggaaggaattccaaaactgctcgtcctgatcacaggcggaaagtctttagatgaaattagccagcccgcacaggagcttaagagatcttctatcatggccttcgccattggaaataagggggcagaccaggcagagctggaggagatcgcttttgactcctcacttgtattcatcccggcagagtttcgcgctgcgcctcttcaaggcatgctgcctggtctgctggcacctctgcgaacgctgtcgggcactccagaggtgcattctaacaaaagggatatcatattcctgctagatggttcagcaaacgttgggaagacgaactttccatatgtcagggactttgttatgaatctggtcaactctctggacatcgggaatgacaatatccgtgtagggctggtgcagttttctgacactccggtgaccgagttcagtcttaatacttaccagaccaagagcgatattctgggtcacctgagacagcttcagcttcagggcggaagcggcctgaacactgggtcagccttgagctacgtgtatgctaatcactttaccgaggcaggcggatcacgcatacgagaacacgtgcctcaattgcttttgctgttgaccgccggacagagcgaggattcatacctacaggctgccaacgccctcactcgcgctggtatcctaaccttctgtgtgggtgcctcacaggcaaacaaagcagagctagaacaaatcgccttcaacccgagcttggtctaccttatggatgacttcagttccctgccagctctgccgcagcagttgatccaacctcttacaacatacgtctccgggggagtagaagaagttcctctggcacagcctgagagcaaaagagacattctgttcctgtttgacgggtccgccaaccttgtgggccaatttccggtcgtccgggatttcctgtataaaataatcgatgagctgaacgtcaagccagaagggactcgaattgcagtggcccagtattcagatgatgtgaaggtagaatcacggtttgacgagcatcagagtaaaccggagatattgaatctcgttaaaaggatgaagattaagaccggcaaggcgctcaatctgggttacgctctggattatgcccaacggtacatctttgttaagtccgcaggctcgcgaatcgaggacggggtgttacaatttctggttctacttgtggctggacgttcttcagatagagtggacgggccagcctcaaacctgaaacagagcggggttgtgcccttcatttttcaggcaaagaacgcggatcctgccgaactcgaacagatcgtgctatcaccagcgttcattctggctgcagaaagtctgcccaagattggcgacctgcatccccaaattgtgaacttgcttaagagcgttcataatggagctcccgcacctgtcagcggcgaaaaggacgtcgtcttcctactagacggaagtgaaggcgtccgtagcgggtttcccctgctgaaggaatttgtccaacgcgtggtggaatctctcgacgtcggtcaggatcgtgtgagggtcgccgtggttcagtactctgatcgtacccgccctgagttttacctgaactcatacatgaataaacaggatgtggtgaacgccgtcagacagttgactctccttggcggacccactccaaacactggagccgctttggagttcgtcttaagaaacatcctcgtgagctctgccggaagtcgcatcactgagggtgtaccccagctcctcattgttctgaccgcagacagaagtggagacgacgtacgcaacccatccgtggtggtgaagaggggtggtgcggtgccgattggtatcggaatcggtaatgctgatattacagagatgcagactatttcattcattccagactttgccgtggctattcctaccttccgacagctaggaactgtgcaacaggtcatttccgagcgggtgacacagctcactcgtgaggaactttccagactgcaaccagtcctgcagcccttgccatcccccggagtagggggaaaacgtgacgttgtgttcctgatcgacggctcccagtccgcgggacccgaatttcaatacgtccgcacacttatcgaacgtctagtcgactacttggacgtcggattcgatacaacaagagtcgccgtgatccaattctccgacgaccccaaggttgaattcttgctcaatgcacactcctctaaggatgaagtgcagaatgcagtgcagcgtttgagaccaaagggcggacggcaaataaacgttggaaatgcactggagtacgtcagcagaaatattttcaagcgtcccttgggcagccgcattgaggagggtgtgccccagttcctggtgctgatcagctcaggtaaatctgacgatgaagttgatgaccccgcagtcgaactgaaacagttcggcgtggcgccttttactatcgccagaaatgccgaccaggaagaactggtgaaaatcagtctcagtcccgaatacgttttcagtgtgagcacatttcgggagttgcctagcttagagcagaagttgctgacacccattacaacattgacctcagaacaaattcagaaactccttgccagtactcgctacccccctccggctgttgaatcagacgccgcagatattgtgttcttgatcgattccagcgaaggagtgaggccagatggattcgctcatatccgcgacttcgttagccgaattgtgcgcaggctaaacattggccctagcaaagtcagagtgggagtggtgcagtttagtaatgatgtcttcccggaattttacctcaaaacctacaggagccaggcacccgtgttggacgctattcgtaggttgcgtctacgcggaggctctccccttaacactggtaaggccctggagtttgtggccagaaatcttttcgtgaagtccgccggatctagaattgaagacggggtgccccagcacctagtactagtgttggggggaaagtctcaggatgacgtgagccgttttgctcaggttatccgttcttccggaatcgtttcactaggcgtgggagacagaaatatcgaccgcaccgagctgcagaccatcactaacgacccccgtttggtcttcactgtacgcgagttccgcgaactgccaaacattgaggaaagaattatgaattcatttggccctagtgccgctacccctgcccctccgggagttgacacccctcctcctagcaggcctgagaaaaagaaggcagatatcgtcttcttactggacgggagcatcaatttccggagggatagctttcaggaggtgctaagatttgtcagcgagatcgttgatacagtttatgaagatggcgattctatccaggttggtctggttcagtacaacagcgatccgacagatgaatttttccttaaggacttcagcacaaagcgccagataatagatgccatcaacaaagtcgtctacaaggggggaagacatgccaataccaaggtaggacttgagcacttgcgtgtgaatcactttgtgcccgaggccggttcccgcctggaccagcgggtcccccaaatcgcctttgttataaccggaggcaaatccgtagaagacgcccaagatgtgtccctggcactgacacaaaggggggtcaaggtttttgccgtcggcgttcgaaatatcgattctgaggaggtgggaaagatcgcatctaactccgcaaccgcatttagagtgggaaacgttcaggagcttagcgagctgtctgagcaggtactcgaaacactccatgacgctatgcatgaaacattatgccctggggtgactgatgccgctaaggcatgtaacctggacgtgatccttggctttgatgggtccagggaccagaacgtctttgtggcgcaaaagggctttgaaagcaaggtagacgctatcctgaaccggataagccagatgcacagggtttcctgtagtggagggcgtagccctactgtaagggtctctgttgttgcaaacacccccagcggcccagtagaggccttcgacttcgatgaataccagcccgagatgctagaaaagttccgaaatatgcgctcacagcacccttacgttctgacagaggatacactaaaagtgtaccttaataagttccgacagtctagtcccgatagtgtaaaggtggtcatccacttcaccgacggggctgacggggatctggcggacctgcacagggccagcgagaacctcagacaggagggcgttagagcactgatcctggtgggactcgagcgcgtggtcaatctagaacgactgatgcacctcgagttcggtcgagggttcatgtatgaccgcccactccgcctcaaccttctggaccttgactatgaactggcagagcaactggataacatcgctgagaaggcttgctgcggagtcccatgcaagtgctcgggtcagaggggggacaggggaccaatcggctccatcggccctaagggaattcccggtgaggatggttatcgagggtaccctggcgacgaagggggacccggagaaaggggcccaccgggtgtgaacggcactcaggggttccaaggttgtcctggccaaaggggtgtgaagggttcgcgaggattcccgggtgagaagggagaggtgggtgaaattgggctcgacgggctggatggagaggatggggacaagggccttcctggatcttctggagagaaggggaaccctggtaggcggggagataagggaccgagaggagagaagggtgagcgcggtgacgtaggaatccggggagacccagggaaccccggacaggatagccaggaacggggtcccaaaggcgaaacgggtgacctgggcccaatgggggtcccgggacgggatggagtaccgggtggcccaggcgagacagggaagaacggaggcttcggcaggagaggaccacccggagccaaggggaataaaggcggacctggacagccaggtttcgagggtgaacagggcactcggggtgcgcaaggacccgctggtccagccggtccacccggattgatcggggaacagggcatatccggtccccgagggagcggtggagcagcaggcgctcctggcgagagagggagaacgggaccattggggagaaagggggaaccaggcgagccaggaccgaaaggcggaattggcaacaggggccctaggggagaaacaggcgacgacgggcgagatggtgtgggttcggaaggacgcagaggaaagaaaggagagcgagggttccccggttatccgggaccaaaaggaaaccccggagaacccggactcaatgggacgaccggccctaaaggcatccgcggacgtagagggaatagcggtcctccgggtatcgttggacaaaagggagatccagggtatcctgggcctgcaggtccaaagggaaatcggggtgacagtattgatcaatgcgctctgatccagagtattaaagacaagtgtccctgttgctacggcccacttgaatgcccggtgtttcctacagagctggctttcgccctcgatacatcagaaggggtgaatcaagacacattcggcaggatgcgggatgttgtgctttcaatcgtgaatgacctgacaatcgcagagtccaactgtcctagaggagccagagttgccgtcgtgacctataataacgaggtcacaacagaaatccggttcgctgacagcaagcgcaaatccgtattactggataagatcaagaacctgcaggtcgcactgacatctaagcagcagagcctggagactgccatgagttttgtcgcacggaatacattcaagcgggtgcggaacggatttttaatgaggaaagtagccgtcttcttctctaataccccaactcgcgcatcgccccagttgagagaagccgtgttgaagctttctgatgccggaatcactccgctgttcctaaccaggcaggaagataggcagctgattaacgcccttcagatcaacaatactgccgtcgggcatgccctggtgctgcctgccggaagagacctgactgactttctggagaacgtgttgacgtgccatgtgtgcctggatatctgtaacattgaccctagctgtggctttggcagctggaggcccagtttccgggacagacgcgcagcaggctcagacgttgatatcgatatggcgttcattttagactctgctgagacaactactcttttccagtttaatgagatgaaaaaatacatagcctatttagtccggcagttggacatgtcccctgaccccaaggcgagccagcattttgctagagttgcggtggtccagcatgcgcctagcgagagcgtcgacaacgccagcatgccccctgtcaaagtagagttttctcttactgactacggaagcaaggagaagctcgtggattttctgtcaagaggaatgacccagctgcagggcactagggctctgggctccgctattgaatacactatcgaaaacgtgttcgagtctgccccaaaccctagagatctaaaaattgtcgtgctgatgttgacaggagaagtgcccgagcagcagctcgaggaagcccaaagggtaattctccaggccaaatgtaaggggtatttttttgtcgtgctgggtataggtagaaaggttaacattaaggaggtctacacctttgccagcgagccaaacgacgtcttttttaagctggttgataaaagtaccgaactgaatgaagaaccactgatgcggttcggtcgattgcttccttccttcgtcagctctgaaaatgccttctatctgagcccagatattcgcaaacagtgcgactggttccagggagaccaacccacaaaaaacttggtcaagtttggtcataagcaggtaaacgtaccgaataatgtaacttcatcgccaacttcaaacccggtgaccactacaaaaccggtgacgaccacgaaacctgttacaacgacgactaaacccgtgacaaccacaactaagcctgtgacaattattaatcagccttcagtgaaaccagccgctgctaagccggcaccagccaagccagtcgcagccaaacccgtggcaaccaaaatggctactgtccggcctcctgtcgcggtaaaaccggcaactgcggctaagccagtggccgcaaaaccagccgctgtccgaccacccgctgcagccgctgccaagccagtcgccacgaaacctgaggtcccacgcccacaggcagcaaagccagcggctaccaaacctgccactacaaaacccatggtaaaaatgtctcgcgaagtgcaggtgtttgaaataaccgagaactccgctaaattgcattgggagcgagcagaaccccctggaccatacttctacgacctgacggtcactagtgctcatgatcaatcccttgttctgaagcagaacctgacagttacagatagggtcattgggggtctgctagctggacagacataccacgtggctgtggtgtgttacctgagaagccaggtgagggcgacataccatggctcgttttctactaagaagtctcagccccctcctccccagcccgcacgtagtgcctcaagcagcaccattaaccttatggtaagcaccgagccactggcgctgactgagacagacatttgtaagctgccgaaagacgagggcacctgcagagatttcatactgaaatggtattacgatcccaatacaaaatcttgtgcaagattctggtacgggggttgcggcggaaatgagaacaaatttggcagccagaaggaatgcgagaaggtgtgcgcaccagtactcgccaaacccggagtgatcagcgtgatgggcacatag

SEQ ID NO: 230665 - DNA, 8916 bp, Artificial Sequence
  derived and/or modified sequence
atgcgtaagcaccgacatctgcccctggtggctgttttttgtctgttcttgtctggtttccctactactcatgcacagcagcagcaggccgcacaggatagtgccgacataatttttctaatcgacggctctaataatactgggtctgtgaattttgccgtaatccttgatttcttggtcaacctcctagagaagctgccgatcgggacccagcaaatcagagtgggcgtcgtgcagtttagcgacgagccacgtacgatgttctccctggacacttacagcacaaaggcgcaggtgctgggtgcagtgaaggccctgggattcgcgggaggtgaactggctaatatcggattagctctggactttgtcgtggaaaatcattttacccgagctgggggaagcagggttgaagaaggagttcctcaggtgctcgtgttaatcagtgcagggccttcatcggatgagattcgttatggtgttgtggccctaaaacaggcctcagtcttttccttcggtctgggagctcaggccgcatctagggctgaactgcagcacattgctactgatgataacctagtattcactgtgccagaattccgatcgtttggtgacctccaggaaaagctgttgccatacatcgtaggcgtcgcccagcggcacatcgtgttaaagcctcccacgatcgtgactcaggtaatcgaagtgaacaagagggatattgtatttttggtggatggttcttctgcactggggcttgctaacttcaatgccatcagggattttattgcaaaggttatccagcgactggagatcggacaagacttaatccaagtggccgtggcacagtacgccgacaccgtgaggcctgaattctacttcaacacacacccaactaagagggaggtgattactgccgtgcgaaaaatgaagccactggacggttctgcactgtataccggcagtgcattggacttcgtccgaaacaatctcttcaccagttccgccggataccgcgctgcagaaggcattccaaagctgctggtcctgattaccggcggtaaatcgctcgacgaaatctcccagccggctcaagagcttaagcgatcatcaatcatggctttcgcaattgggaataagggagccgatcaggcagaactggaggagatagcattcgacagtagcctggtcttcattcccgcagaatttagggctgctcccctgcagggaatgctcccagggctccttgccccacttcgaaccctttcaggcacgccagaggtgcattccaataaacgagacattatttttttgctcgatgggagcgcaaatgtgggaaagactaactttccatatgttcgtgacttcgtgatgaatctggtgaactcactcgacattggcaatgataacatacgagtgggcctggtgcaattcagtgacaccccagtaacagagttctcactgaatacctatcagactaagagtgacatactaggccacttaaggcagttacaactgcagggtggttccggactcaacaccggatccgccctgtcctacgtgtatgccaatcatttcaccgaggctggaggaagtcggattagagaacatgtccctcaacttctcttgctgctcaccgcgggacaatccgaagatagctatctgcaggctgccaacgccttaacccgagctggaatactgaccttttgcgttggagcaagccaggcaaacaaggccgagttagagcagatcgcctttaatccgagtctggtgtatctgatggatgatttcagttccttgcccgcactgccgcagcagttaattcagcccctcaccacatatgtgagcggaggtgtagaagaggttcccctcgctcaaccagaatctaagcgggacattctctttctttttgacggatcagcaaacctcgtcggacagttccccgtcgttcgagattttctgtataaaattatcgatgaactaaacgttaagcccgaggggactaggatcgccgtagcacagtacagcgacgacgtgaaagtcgagtccagatttgatgagcaccaatcaaagccggagatcctgaatctggtcaagcggatgaaaattaaaaccggcaaagccctgaatcttggttatgcgctggactatgcacaacggtacatctttgtcaagagtgctggaagcaggattgaggacggcgtgctgcaatttttggtcctgctggtggcaggacggtccagcgaccgggtagacggccctgcctctaatctaaagcagagtggagtggtgcccttcattttccaggcaaagaacgctgatcccgctgagcttgaacagattgttctctcgccagcattcattctcgccgctgaatcactgcctaaaattggtgatctgcacccccaaatcgtcaacctattaaagtcagtacacaatggagctcctgcccctgttagcggcgagaaggatgtggtgtttctgctcgacggatccgaaggggtaaggtccggattcccactgcttaaagagttcgtgcagcgcgtcgtggaaagcctcgatgtgggccaggatagggttagagtggctgtggtccagtatagcgatcgcaccaggcctgagttctacctgaattcctatatgaacaagcaggatgtggtgaacgctgtcaggcagctcactttactggggggaccgaccccgaataccggagctgctctagaattcgtattgcgcaacatcttagtgagttcagcaggctcccgcatcacagaaggggtcccccagttgttaatcgtcctgacagcagatagaagtggtgacgacgtgcggaatcctagcgtggtggtgaaaaggggaggcgctgtacccattgggattggtataggaaacgccgatatcaccgaaatgcagactattagttttatccccgatttcgccgtcgctatacctactttcagacagctgggaactgtccagcaggtgatctcagagcgggttacacaactcacgcgcgaggagctgagcagactccagccagtgttacaacctctgccttcgcctggcgtcgggggaaagagggatgtagtttttctcatagacgggtcgcaatctgccggacccgagtttcaatacgtccgaacgctgatagagcgcctggtagattatcttgacgtaggattcgacactacccgggtggctgtgattcaattttccgatgatccgaaggttgagttcctcctgaacgcccactcctccaaagatgaagtccaaaatgctgtgcagaggctgcggccaaaagggggaaggcagatcaatgttgggaatgccctcgagtatgtgagtagaaacatcttcaaaagacctctggggtcacgcatcgaagagggcgtccctcagtttcttgtgctgatcagcagcggaaagagcgacgacgaagtggacgatccagccgtcgagcttaagcagttcggggtggccccatttaccattgcccgtaatgccgaccaggaggagctagttaagatctctctttctccagagtatgtgttcagcgttagtactttcagggagttgccatctctggagcaaaaactgctaacaccaatcacaactttgacctccgagcagatacagaagcttctagcgtctacccgttatcccccacccgctgtggaatctgatgcagccgacatcgtgtttttaattgacagcagtgagggagtacgacctgatgggtttgcccacatccgtgatttcgtatcccggatcgtgaggcgccttaatattggcccatcaaaggtgcgggtgggggtggtccagttttcaaacgatgtgttcccagaattctacctgaaaacctataggagtcaggcacccgtcctggacgctattaggaggcttaggctgcgaggcggatctcccttgaacacggggaaagctctcgaatttgtcgcacggaatctgttcgttaagagcgcaggttcacggattgaagatggagtgccccagcacttggtcctggttttggggggtaagagtcaagacgacgtgagcaggtttgcccaagtgatccggtcctcaggcatcgtgtccctgggggtgggcgacagaaatatcgaccgaactgaacttcagacaataaccaacgatccgcgacttgtgtttaccgtccgcgagtttagggagttgcccaatatcgaagagagaatcatgaatagttttggccctagcgccgctaccccggctcctccaggcgtggatacacctcctccttctcgccctgaaaagaaaaaggcggacatagtgttcctgttggatggaagtatcaacttcagaagggacagcttccaggaagtcttacggtttgtttccgagattgtggataccgtgtacgaagatggcgattcgatacaagttggacttgtccagtataactctgacccaactgatgagtttttcctgaaggatttctccacaaaaagacaaatcatcgacgctatcaacaaggtagtgtataagggaggccgacatgccaacacaaaggtgggcctcgagcacctccgcgtcaaccattttgtgccggaggcaggttcccggctcgatcagcgggtaccacagattgcatttgtgataactggtggaaaatcagttgaggacgcccaggacgttagcctcgcccttactcagaggggagtgaaagtctttgccgtcggggtccggaacatagattcagaggaagtaggcaagattgcaagcaactccgccacggccttccgggtggggaacgttcaggaactgagtgagctgtctgaacaggttttggaaaccttgcacgacgctatgcacgaaactctctgcccgggagtaaccgacgctgcaaaggcctgtaacctggatgttatacttggcttcgacggctcacgtgatcaaaatgtgtttgtggcccagaagggattcgaaagcaaagtagatgcaattctaaatagaatttctcagatgcacagagtgtcatgtagcgggggaaggtcacccactgtgcgagtgagcgtcgtggctaatactccttccggacctgttgaggcattcgatttcgatgaataccagcctgagatgctcgaaaagttcaggaacatgcgctctcagcacccctatgttttgacggaggatactttgaaagtctacctaaataagtttcggcagtcctcgccagatagcgtgaaggtggtgatccactttacggacggagccgacggcgacctcgccgatttacatcgggcaagcgagaacctcagacaggaaggggtcagagcgctaatcctggtgggcctcgagcgcgtggtcaatttagagcgcctgatgcacctcgagttcggacgaggatttatgtacgaccggcctctccgactgaatctgttagaccttgattacgaactagccgaacagctggacaacatagccgagaaagcttgctgcggggtaccatgcaaatgcagtgggcagcgcggtgatcgcggacccatcggttcaatcggcccaaagggcattcccggagaggatgggtatagaggctacccgggagacgaaggtggaccaggcgaacgaggtcctcccggagtaaacggcactcagggattccaaggatgccccggacaacgaggcgttaaaggcagcaggggcttccctggggagaagggtgaagtcggagaaattggtctggatggcctcgacggcgaggacggggataaggggctgcctggctccagcggtgagaaggggaatcccggtcgcaggggggacaagggacctcgcggtgaaaagggcgagagaggagacgttggtatcagaggcgatcccggtaaccccggacaggatagtcaggagcgcggtcctaagggcgagactggagacctgggcccaatgggggttcccggtagggacggcgtgcccggagggccaggggagactggcaagaatgggggtttcggtaggcgcggacctcccggagcgaaggggaataaaggagggcctgggcagccgggttttgagggagaacaggggacgagaggtgctcagggtccagccggtccagccggtcctccaggcctgataggggagcagggcatatctggtcccagggggtcaggtggtgctgcaggtgccccaggggagagggggagaaccggccctttgggcaggaagggagagccaggtgaacctggacctaaagggggtatcggaaacagaggtccccgtggagaaaccggggacgacggacgcgacggggtggggtctgagggtaggcgcggtaaaaagggcgagcgcggattcccgggttaccctggaccaaaaggcaaccctggagaacctggtctgaatggtaccaccggacccaaggggatacggggacgtaggggaaatagtggccctcccggaatcgttggacagaagggggatcccggttaccctggtcctgctgggccaaaagggaataggggagactctattgatcaatgcgctctgattcagtccataaaagacaaatgcccgtgctgctacgggccacttgaatgtccggtgtttcccaccgagttggcctttgcacttgataccagcgaaggagtcaaccaagatactttcggacgtatgcgcgatgttgtgttgagcatcgtgaacgatctaaccatcgccgagtccaactgccccaggggggcacgggtggccgtagtgacctataataacgaagtgaccaccgagatccggttcgctgacagcaaacgtaaaagcgttcttttagacaagatcaagaacctgcaagttgccctgacaagtaagcagcagtccttggagactgctatgagttttgtggctcgcaacacatttaaacgagtgcggaatgggttcttaatgaggaaggtggccgtgttttttagcaacacccccacccgcgctagcccccagctaagagaagctgtgttgaagctgtccgatgccggaattacacccctgtttctcacacgacaggaggatcgccaattaatcaatgcattgcaaataaacaacacagccgtgggccatgcactggtcctgccagccggacgggatctgacggacttcttggagaacgttctgacgtgtcatgtttgtctcgatatctgcaacatcgatccctcgtgtggctttggcagctggcgtccgtctttccgtgaccgtcgggcagccggttctgatgtggacattgatatggcattcatcctggattcagcagagacgaccactctgtttcagtttaatgaaatgaagaagtatatcgcatatctcgtgagacaactggatatgtctccagaccccaaagcctcgcaacactttgccagagtcgctgtagtccaacacgctccctcagaaagtgtagacaatgcctcaatgccaccagttaaagtggaattttccttgactgattatggctcaaaggaaaagttggttgatttcctgagccgtgggatgacccagctgcagggcactcgtgcgcttggctctgcaatagagtatacaatagagaatgtgtttgaaagcgcacccaacccgagggatttgaaaatcgtcgtgcttatgctaaccggagaggtaccagagcaacagctggaagaggcccagcgagtgatacttcaggctaaatgcaagggttatttcttcgttgtcctgggtattggtagaaaagtgaatattaaagaagtttacaccttcgcctccgagccaaatgatgtcttctttaaactggtcgataagtcaaccgaactgaatgaagagcctctaatgcgtttcggacgcttgttaccatcattcgtgagctccgagaatgcgttttatctttcccccgacattcgaaaacagtgcgactggtttcaaggggatcagcctacaaaaaacttggttaaattcgggcacaagcaagttaatgttcctaataacgtcaccagttcccccacttctaatcccgttactaccactaaaccagtcactactactaagccagttactactaccaccaaaccagtgacgactacaaccaagcctgtcacaattattaatcaaccttcagttaaacccgctgccgctaagcctgcacctgcaaagcccgtggctgctaagcccgtagctaccaaaatggccaccgtcaggcccccagttgcggttaagcccgctaccgccgcaaagccagtcgccgctaagccggcagctgtgcgcccacccgctgcagccgctgctaagcctgtcgccaccaagcccgaggtgcctaggcctcaagcagccaagcctgctgccactaagccggctacgactaagcccatggtgaagatgtcgagggaggttcaagtcttcgaaatcacagaaaattctgcaaagctccactgggaaagggccgagcccccaggaccctacttttacgacctgaccgtgacctccgcccacgaccagtctttggttctcaaacagaatttgacagtaacagacagagtcattggagggctgttggccggtcagacataccatgtcgctgtggtatgctacctcagatcacaggttagggctacatatcacggatcatttagcaccaagaaatcccagccgcctcctcctcagcctgccaggagtgccagcagctctacaattaacctgatggtttctaccgagcccctggccctcacagaaacagacatttgcaaattacccaaggacgagggcacctgcagggactttattttaaagtggtattacgatccaaatacaaaatcttgtgctcgcttctggtacggtggttgtgggggtaacgagaacaaatttggatcccagaaagagtgcgagaaagtatgcgccccagtcctcgccaaaccaggcgtcatatcagtgatgggtacctat

SEQ ID NO: 230666 - DNA, 8931 bp, Artificial Sequence
  derived and/or modified sequence
atgagaaagcataggcaccttcccttggtggcagtattttgcttgttcctatcaggttttccaactacccatgcgcagcagcagcaggccgatgttaaaaacggagccgccgccgatataattttcttggtagatagctcttggacaatcggtgaagaacattttcagttggttagagagttcctgtatgatgttgtcaaaagcctcgccgttggcgaaaacgacttccacttcgctcttgtgcagttcaacgggaatcctcatactgaattcctactgaatacatataggactaaacaggaggtcctgagccatatcagcaacatgagttacattggcggaaccaatcagacaggtaaaggcctggagtatatcatgcagagccatctgaccaaggccgcggggagtcgagccggggatggcgtgccccaggtaatcgtggtgcttacagacggccacagtaaggacggattggccctacctagcgccgagctgaagagcgcggatgtcaatgtctttgctataggcgtggaggatgctgatgagggagccctcaaggaaattgcctcagagccattaaatatgcatatgtttaacctcgagaactttacctcgttacatgacattgtgggcaacctggtttcatgtgttcactcctccgtgtcacccgagcgcgctggtgataccgagacgctgaaggacatcaccgttattgaggtcaacaaaagagatattgtttttctggtggacggttcatctgcattaggccttgccaactttaatgccatcagagacttcattgccaaagtgattcagcgcctagaaattggacaggatctgatacaagtggctgtagctcaatatgccgataccgttagacccgagttctacttcaatacccaccctaccaaacgggaggtgattacagcggtcagaaagatgaagcctttggacgggagtgcattgtacacaggcagtgctctggacttcgtgaggaacaatctctttacaagcagcgcgggttacagagcagcagaaggtatcccaaaactgctggtcctgattaccggtggcaaatcgctggacgaaataagccaacccgctcaggagctcaagaggtccagtattatggctttcgcgattggcaacaaaggcgcagaccaggcagaactagaggagatcgcttttgatagcagcctcgtgttcattccggctgaattcagagctgctcccctgcaaggaatgctgcctggtttgctggcgcccctgcggaccctatccggaacaccggaggtgcatagtaataagcgagacattatttttctccttgatggctccgctaacgttgggaagaccaacttcccatatgtgcgggattttgtaatgaacctcgtgaactctcttgacattgggaatgacaatattcgcgtgggcctcgtccagttttcggatacacctgtcactgaattctccttaaacacataccaaactaaaagcgatatcctgggccatttaagacaattgcagctgcagggggggtccggactcaatacaggatcagcactgagctacgtttatgcaaaccatttcacagaggccggggggtcccgaattcgcgaacacgtgcctcagttactcctcctccttaccgcaggacagtccgaagattcttacttacaagcagcaaacgcattgacaagggccgggatactgactttctgcgtgggcgcaagccaggccaacaaagccgaactcgaacaaatcgccttcaacccaagtctggtgtacctcatggatgacttctcctctctgcctgctctgccacaacagctgattcagcccctgaccacatacgtgtccggaggtgtggaagaggtgccactggcacagcccgagagtaaaagagatatcctgttcctgttcgacggcagcgccaaccttgtgggccagttccctgtggtgcgggactttctgtacaaaatcatcgatgagttaaacgtgaaaccagaaggaacacgcatcgccgtggcgcagtatagtgacgacgtgaaggtcgagtccagattcgatgaacatcagagcaaaccagaaattctgaacctggtgaagcgaatgaagatcaaaacagggaaagccttaaatttagggtacgctctcgattatgcgcagcgatatattttcgttaagtctgcgggaagtcggattgaggatggcgtcctgcagttcctcgtgttgcttgtcgcggggaggtcctccgatcgggtcgatgggccagcgtccaatcttaagcagtcgggcgtcgtaccgttcatctttcaggcgaaaaatgcagatcctgccgaattagaacaaatcgtcctgtcccctgcctttattctggctgcagaatcattgcctaagataggagacctccatccccaaattgtgaatctgttaaaaagtgtgcataacggagcacctgcgcccgtgagcggcgaaaaggacgtagtgttcctgctcgacgggtcagaaggagttcgcagcgggtttcccctgctcaaggaatttgtccagagagtggtggagagcctggacgtgggtcaggatagagtgcgcgtggcagttgtgcagtattctgacaggacacggcctgagttttatctaaattcttatatgaataaacaagacgtggtcaatgcagttagacaactcaccttgttaggaggacccacccccaatactggagccgcactggagttcgtcctgcgcaatatccttgtgtccagcgccgggagcaggataacagagggggtcccacagctcctaattgtcttaaccgctgacagaagcggcgatgacgtgaggaacccctcagtggtggtgaagagagggggggccgttccgattggaatcggtatcggaaatgccgatatcactgaaatgcagaccatttctttcattcccgactttgctgttgccatccctacttttaggcagctggggacagtccagcaagtgatctccgaacgcgtgacacaactgacgcgcgaggagctcagcaggttgcaaccagtgctccaacctctgcctagccccggcgtgggcggaaagcgtgatgtagtgttcctgattgacggctctcaaagtgctggacccgagtttcagtatgtcagaactcttattgagcgactggtcgactaccttgatgtggggtttgatacaacgagggtagcagtgattcagttcagtgatgatcccaaggtggaatttcttttaaatgcacacagcagcaaagatgaggtgcagaacgccgtccagcggctcagacctaaaggcggcaggcagattaacgttggaaacgctcttgaatatgtctcacgcaacatttttaagcgaccactcggctccagaatagaggaaggggttccccagttcctggtgctgatatcttcagggaagagtgacgatgaggtggatgaccccgcagtggaactgaagcagttcggggtcgccccattcaccatcgctcgtaacgcagatcaagaggagctggtgaagatttctttgagccccgagtatgtcttctcagtgagcacatttcgtgaattaccatctttagaacagaagttgctgacgccaatcacaacactgacctccgaacagatccagaagctcctggcgtccacccgctaccctccacccgcagtggagtctgacgctgctgacatcgtgtttctgatcgatagcagtgaaggtgtgcggccggatggttttgcccacattcgagacttcgtcagcagaatcgtccgtaggcttaatattggtccctccaaggttcgcgtgggcgtggttcagttctcaaacgatgtttttcccgaattttacctcaagacctatcgctctcaggctcctgtgctcgacgcgatccggcgtctaagacttcgaggcggcagtccactgaatacaggaaaggcactagaattcgtggcccgcaatctgtttgttaaaagtgctggcagccgcatagaggatggcgtcccgcagcatctggtgctcgtcctcggcggcaagtcccaggatgacgtgtctaggtttgcacaagtgattagatctagtgggattgtgtctctcggcgtgggggatcgaaacatcgacaggacagagctgcagaccatcaccaacgacccgagactggtctttacagtgcgagagttccgcgagctgccaaatatcgaggagagaataatgaactcctttggcccaagcgccgcaacgcccgccccacctggcgtggatacaccgcccccatccaggcccgaaaagaagaaagctgacatcgtctttttgctcgacggtagcatcaattttagaagggattccttccaggaggtactccggttcgtttctgaaatagtggataccgtctatgaggatggggactccattcaagtcggcctagtccaatacaactcagaccctacggatgaatttttcctgaaagacttctctactaagcggcaaataattgacgctatcaataaggttgtatataaaggcggacgccatgcgaataccaaggtgggtctcgagcatctgagggtaaaccattttgtccccgaagccggtagcagactggaccagagggtgccacagatcgccttcgtgattaccgggggaaaaagcgtggaagacgcccaggatgtgagcctggccctcacccagcgtggagtgaaagtgttcgccgtcggtgtgagaaatatcgattcggaggaagtaggaaaaattgctagcaacagtgctaccgccttccgagtgggtaacgtgcaggagcttagtgagctgagtgaacaagtcctcgagactttgcacgatgccatgcacgagacactgtgtccgggagtgaccgatgcggctaaggcctgtaacctagatgtcattttgggctttgatggctcccgggatcagaacgtttttgtggctcaaaagggcttcgaatctaaagtggacgccattcttaaccgcatttcgcagatgcacagagtgtcttgctccggcggcagatcaccaaccgttcgggtctcagtggtcgccaatactccatctggaccagtcgaagcctttgactttgatgagtaccagcccgagatgctcgagaaattcagaaatatgcgttcacaacacccttatgtcctgaccgaagatacactcaaggtctacttaaacaagttcaggcagagttcgccggattctgtgaaggtggtgatacacttcactgacggtgccgatggggatctggcagatctccaccgcgcgagtgaaaacctgagacaggaaggagttcgagccctcattttggttggactcgaacgagttgtaaatctcgagcggttgatgcatctagaattcggtcgtgggttcatgtacgaccggcccctgcgcttaaacctgctcgatctggattatgagttagccgaacaactggataatatcgctgaaaaggcctgctgcggggtgccatgcaaatgtagcggccagcgcggcgacaggggccctattggatcaatcggacctaaggggatccccggggaagatggctatcgggggtaccccggggacgagggaggcccaggcgagagaggtccccctggcgtcaacggtacacagggtttccaaggatgccccggacagcgcggtgttaagggaagccgcggattcccaggagaaaagggcgaggtcggtgaaatcggtttggatggcctggacggtgaggatggggataagggactcccaggctcatccggggaaaaaggaaacccaggacggagaggagataaggggccacgtggggaaaagggagaacgcggcgacgtggggataagaggagacccagggaatccagggcaggattctcaggagagagggcccaaaggggagaccggtgacttaggccccatgggagtgccagggcgtgatggagtgcctggggggccgggcgaaactgggaagaatggcggctttggaaggcggggcccccctggcgctaagggaaataagggaggcccaggtcaacccggcttcgagggggaacagggaacaagaggcgcacagggccctgcaggccccgcaggccctcctggcctcataggagagcaggggatctccgggccccgtggcagcggtggcgctgcgggggcgcctggggagcgcggccgcactgggccgttaggccggaagggagaacctggggaaccaggccctaaagggggcatcggtaaccgcggccccagaggagaaactggagatgacggccgagatggcgtgggaagtgaaggccgtcgtggcaagaaaggggaaagaggcttcccaggctaccccggacctaagggaaatcctggagagcctggactgaacggaaccaccggtccaaaaggaattagaggccgtcgtggaaattctggccccccaggcatcgtcggccagaaaggagatccaggatatcccggccccgcaggacctaaagggaaccggggcgactccattgaccagtgcgctttaatccagtcaattaaggacaaatgcccgtgctgctatggaccgttggagtgcccagtcttccccactgagctggcctttgccctcgatacttccgagggcgtcaatcaagatacgtttgggagaatgcgggatgtcgtgctcagtattgtcaacgacctgactattgccgaaagtaactgcccacgcggcgctcgggtggccgtggtgacttataacaatgaagtaacgactgagataagatttgcagattcaaaaaggaagtcggtgcttctcgacaagattaaaaatttgcaggtggcccttacctctaagcagcagagcctggaaacggcaatgagcttcgtcgcccgaaacaccttcaagcgggttcggaacggctttttaatgaggaaggtggccgtctttttctcaaacacccccacacgggcgagtccacaactcagggaggcagtgcttaaactctcagacgctggaatcactccgctgtttctgacccggcaggaggacaggcagctgataaacgccctccagattaataacactgccgtgggccatgctcttgtattgcccgccggccgagatctgacagacttcttggaaaatgtgctcacctgccatgtgtgtctcgacatctgcaacatcgatccatcttgcgggtttggctcatggagaccatccttccgagacagaagagcagccgggtcagatgtagatatagacatggctttcattctggacagcgccgagactacaaccctgttccagttcaatgagatgaagaaatatattgcctatctcgtgcgccaactcgatatgtctccagatccaaaagcaagccagcactttgccagggttgctgtggtacagcacgcaccatctgagagcgtagataacgcaagcatgccccccgtaaaggtggagttttctctaaccgattatgggtccaaggaaaaactggtggatttcctcagtaggggtatgacccaattgcagggcacccgggcccttggaagcgccatagaatacaccatcgagaatgtttttgaatccgcacctaatccaagggatttaaaaatagtcgtgctgatgttgaccggagaggtgcctgagcaacagttggaagaggctcagagagtcattttgcaggccaagtgcaaagggtatttttttgtggtgctcggaataggacgaaaggttaatatcaaggaggtgtacacattcgctagtgagcctaatgatgtgtttttcaaactggtggataagagcaccgagcttaatgaagagcctctgatgcgttttggccgtctactgccctcattcgttagctctgagaatgcattctacttaagtcctgatatccgcaaacagtgcgactggttccagggcgaccagcctacaaagaacctggtcaaattcggtcacaaacaggtgaatgtccccaacaacgtcacttcttcccccacgagtaacccggtgactacaactaagccagtcaccaccactaagccagttaccacaacaacgaaacctgtgacaacaacaacaaaacccgttacgatcatcaatcagcccagcgtgaagcctgcagcagctaagcctgctcctgcaaagcccgtcgctgccaaacctgtggctaccaaaatggccactgtaaggccccctgtcgccgtcaagcccgctacggcagccaagccagtggcagccaaaccggctgcagtgagacccccagcggccgccgccgctaaaccggtggcaacaaagcccgaagtgcctagaccacaggccgctaaacccgctgccacgaagcccgccaccaccaagcctatggtcaaaatgtcccgcgaagtccaagtgtttgagattacagaaaacagtgcgaagctgcattgggagagagcagagccacctgggccatatttctatgatcttacagtcacaagcgctcacgatcaaagcctcgttctcaagcaaaatctcaccgtgacggacagggtcatcggagggctcctggctgggcagacctatcacgttgccgtcgtgtgttatctccgatctcaagtcagggctacataccacggatctttttctaccaaaaagtcccaacctcccccccctcagcccgcgcgcagcgcatcctcctcaactatcaatctcatggtgtcaaccgagcccttggctctcacagagacagatatctgtaaactgcccaaagatgaagggacatgtagagactttattctgaagtggtactatgatcccaacacgaaatcctgcgctcggttttggtatggtggatgcgggggtaacgagaacaagtttggtagtcaaaaggaatgcgagaaagtctgtgcacccgtgctcgcgaaacccggggtaatttcagtaatggggacctag

SEQ ID NO: 230667 - DNA, 8916 bp, Artificial Sequence
  derived and/or modified sequence
atgcggaaacaccgccacctgccactcgtcgctgttttctgcctctttctgtcaggatttcccactactcacgcccaacagcaacaggcggcgcaggattcagctgatatcatctttctgattgatggatctaataatactggctctgtgaatttcgcagtgatcctggacttcctggtgaatctgctggagaagctccctattggcacccagcaaattagagtgggggtggttcagttcagcgacgaacccaggactatgttttcgctggatacatactcaaccaaagcccaagtgctaggcgcagttaaggccctggggttcgctggcggtgaactcgctaacatcggcctggccttggacttcgttgtggaaaatcacttcaccagagctggcgggtcccgtgtcgaagagggagtgccccaggtcctggtattaatcagtgccggtccctcgagtgatgagattcgatatggcgtggtggccctcaagcaggcctctgttttttcgtttgggctcggggcccaggctgcatcccgggctgaactacaacacattgccacagatgacaatctggtgttcactgtgcccgagttccggagcttcggggacttgcaggaaaagttattgccttatatagtgggcgtggcccagaggcacatcgtgcttaaacccccgactatagtgacccaagtcattgaggtgaacaagcgtgacatcgtctttctagtggatggttcttcagctttaggcctcgctaactttaacgcgatcagggacttcatcgccaaagtaattcagcgactcgagataggacaggacctcatccaggtggccgtggcacagtatgccgataccgtgcgacccgaattttacttcaacacccatcccaccaagagggaggtgatcactgctgtgcgtaaaatgaagccgctcgatggcagcgcactttacactggatcagccctcgactttgtgcgcaataacctgttcacttcctccgcaggatatagggccgcagaaggaataccaaaactgctcgtgcttattacgggcgggaagagcctggatgagatctctcaacctgcccaagaactgaagcgctcttcaataatggcgtttgccatcggtaacaagggtgcagatcaagccgaactggaagaaatagcctttgattcgtccctcgtttttataccagctgaattccgcgccgcacccttacaaggcatgctcccggggcttctcgctcccctgcgcacgctgtcaggcacacctgaggtgcactcaaacaagagagatatcatattcctattagatgggagtgcaaacgtgggaaaaacaaattttccttacgttcgggattttgtcatgaatctggtgaacagtctcgacatcggcaatgataatattcgggtcggactcgtgcagtttagcgacacaccagtgaccgaattctcccttaacacataccagaccaagtccgacattctgggtcacctgcgccagctccagctccaaggcggctctggcctgaatacgggttctgcgttgtcgtatgtatacgcaaatcacttcaccgaagccggcggaagcagaattcgggaacatgtgccgcagttactgctgctcttaaccgctggtcagtctgaagactcttatttgcaggccgccaatgccctgacacgggctggcatacttacattctgtgtcggcgcttctcaggccaacaaggctgaattggaacagattgcctttaatccctcactcgtgtatctgatggatgacttcagttccctgcctgccctcccgcaacaactcatacagcctttgactacttatgtgagtgggggagtggaagaggtcccacttgcccagccggagagcaaacgggacatcttgtttctgtttgatggctctgccaatcttgttggccagtttcccgtagtgagggatttcctgtacaaaatcatcgatgagctaaatgtcaaaccagaaggcaccaggattgcagtcgcacagtacagcgacgatgttaaggtagaatcccggttcgatgagcaccagtctaagccagagatactcaatttggtcaagaggatgaagattaaaaccggcaaagccctaaacctgggatacgccctcgattatgcacagcgctacattttcgtcaagagcgcaggctcacgaatcgaggacggcgtgctccaattccttgtcctcttggtagcagggagatcatctgacagggtggatggaccggctagcaatcttaagcagagtggggtggtgccgttcatattccaagcaaaaaacgccgaccctgcggagctagagcagatcgttctgagtcctgcctttatcctagcagccgaaagcttgcccaaaatcggtgacctgcacccacagatagtgaacctgcttaagagcgtgcataatggagctcctgcgcccgtatcgggagaaaaagatgtggtgttcttactggatgggtccgaaggggtaagaagtggctttccattgctcaaagagttcgtgcagagggtcgtggagtcgctggatgttggacaggatagggtacgagtcgccgtggtgcagtactcagacagaactaggcccgagttctacctgaacagctatatgaacaaacaggatgtggttaacgcggtaagacagttaactctcctcggagggcccacccctaatacgggcgccgctctggagtttgtattgcgcaatatcttggtgtcttccgccgggagcagaatcaccgaaggggtgccgcagcttctgattgtgttgactgctgatcgtagcggggatgatgtacgcaatccaagcgtcgttgtaaaacggggcggcgccgttcccattggtatcggcatcgggaacgccgacatcacagaaatgcagacaatcagctttattccagactttgcagtggccatacctaccttccgccagctgggaacagtacagcaggtgatctctgagcgagtcacccagcttaccagagaagagctctctcgccttcagcctgtgctgcagcctctgcccagtccaggggtcggaggaaagcgcgatgttgtctttctgattgatgggtcccagagtgccggacctgagtttcagtatgtgaggacattgatagaaagactggttgactaccttgatgtaggattcgataccacacgggtggcggttatacagttcagtgatgacccaaaggtggagttcctcttaaacgctcatagttccaaggacgaagtgcaaaatgcagttcagaggttaaggcccaaggggggcaggcaaattaatgtgggcaatgcactcgagtatgtgtcaagaaatatctttaagagacctctgggcagtaggatagaggaaggtgtcccccagtttctcgtcctcatctccagcggcaaaagcgatgatgaagtagacgatcccgctgtggaactgaagcagttcggtgtcgccccattcaccatcgcccgtaacgcagaccaggaggagctagttaaaatcagcctttcacccgagtatgtgttctccgtgtccacttttagggaacttccaagtctggagcagaaattacttacccccataacgactctgacaagtgaacagatacagaaactgctggcatctaccaggtatcccccccccgctgtggagtctgatgccgctgatatcgttttccttatagattcttcagagggggtgcgtccagacggctttgctcacatccgagactttgtgtctaggattgtcagacggctcaatatcggtccttctaaggtccgagttggggtggttcagttctccaatgatgtttttcccgagttctatttgaagacctatcgcagccaggctccagttctagacgccattaggcgactccgcctccgggggggaagcccactgaatacagggaaagcgcttgagttcgtcgcaagaaacctgttcgtcaaaagtgcagggtctcgtattgaggatggggtcccacaacatttggttctggtgctgggggggaaatctcaagatgacgtgtcaaggttcgcgcaggtaatcagaagttccggcattgtgtcactgggcgttggggacagaaatatagataggactgagctccagaccattactaatgatccccgactggtatttacagtgcgcgaattcagagaattgcctaatatcgaagagcgaatcatgaacagcttcggaccttctgctgcaacaccagctccgcccggtgtcgatacacctccgccctccaggcctgaaaaaaaaaaagcagacatcgtctttctgctggatgggagtatcaacttccgccgggacagttttcaggaagtattaagatttgtatcagagattgtggacacagtgtacgaagacggggactcaattcaagtcggcctagtgcaatacaattccgatccgactgatgagttctttttaaaggatttctcaactaagcgccagattatcgatgccataaataaagttgtgtacaagggtgggagacacgcaaacactaaggtcggcctggagcacttgagggtgaatcatttcgttcctgaagccggctctcggctggaccaaagggtgccacagatcgcattcgtcataacagggggcaagtctgtcgaagatgcccaggatgtctcacttgccctgacccagcgaggagtgaaggtatttgctgtgggagtcaggaatatcgactcagaggaggttggcaaaatcgcaagcaactccgcgactgcattccgcgtagggaacgttcaagaactgtctgagctgtctgagcaagtattagagactttgcatgacgccatgcacgagacactctgcccaggtgtcacagacgccgcgaaggcgtgcaacctggatgtcatcctgggtttcgatgggagtcgcgatcagaacgtgttcgtggctcaaaaaggtttcgagtccaaggttgatgccatcctgaacagaatcagtcagatgcatagggtaagctgttcaggcggccggtctcccacagtgcgcgtgtctgtcgttgccaataccccaagcggtccggtcgaagcttttgactttgatgagtaccagcccgagatgctagaaaaatttcgaaatatgagatctcaacacccttatgtgttgaccgaagataccctcaaagtttacctgaataaatttaggcaatcttccccagactcagtgaaggtggtcatccattttacagatggcgcagatggcgatcttgcagacttgcatagagccagcgagaatctccgacaggagggagtgcgggcactcatcctcgtcggcctagaaagagtcgttaacttggaacggctgatgcatctggagttcggcaggggatttatgtacgaccgcccacttcgccttaacttgctggacctggattacgagctcgccgaacagctcgataatatcgcagagaaggcctgctgcggggtgccgtgcaagtgttctgggcaacgcggcgaccggggtcccataggaagcatcggcccaaagggaattcctggtgaggatgggtatagaggctatcccggggatgagggcggacctggcgaaagaggccctcccggagttaacggaactcagggatttcagggttgtcccggccagcgtggagttaaaggtagcaggggcttcccaggcgagaagggagaggtgggtgaaatcggactagatggattggacggcgaggacggagataaaggactgcctggttccagcggtgagaagggtaaccctggaaggagaggggataagggcccacgtggtgagaagggggaaaggggggacgttggtatccgcggggatcctggaaatcccggccaagatagtcaggagcgggggcccaagggggagactggtgatctggggcccatgggcgttcctgggcgagacggtgtcccaggcggacctggagaaacaggcaagaacgggggatttggacgcaggggaccgcccggagcaaaagggaataagggcggaccaggccagcccggttttgaaggtgagcagggaacccgcggtgcacaggggcccgccggaccagctggcccccccggtctgatcggagagcaggggatttccggaccacgcggtagtggcggtgcagcgggggctcctggagagcgggggagaaccgggcctctggggcggaaaggcgagccaggcgagccaggacccaaggggggtattggtaacaggggccctaggggcgaaacgggcgatgacggtcgagatggagtgggatctgaggggagaagaggaaagaaaggggagaggggatttccagggtacccgggacccaaaggcaatcctggagaacctggcctgaacgggacaactggccccaagggcatcagaggcaggcgcggtaacagcgggcctccaggcattgtgggccagaaaggagaccctggttatcctggccccgccggccccaagggtaacaggggtgattccatcgaccagtgcgccttgattcagtcaattaaagacaagtgtccatgctgttatggcccattagaatgtcctgtcttcccaactgagttagcctttgccctcgacacttccgagggcgtgaatcaagacacattcggcaggatgagggacgtcgttctttctatcgtcaatgatcttaccattgccgagtccaactgccctaggggggctcgtgtggccgtcgtgacatacaataatgaggttactaccgagattagattcgccgactccaagcgaaagagcgtcctgctcgataagatcaaaaacctccaggttgcactgaccagtaaacagcagagcctcgagactgccatgtccttcgtggccagaaataccttcaaacgcgttcgtaacggtttcctcatgcggaaggtggctgtgttctttagtaatactccaaccagggcaagtccgcagcttcgcgaggcggtcctgaagttatcagacgcaggaatcacacctcttttcttgacaagacaggaggacagacagctcataaacgccctacagattaacaatactgctgtaggacacgcacttgtattacctgctggccgcgatttgacagattttctggagaatgttctgacatgtcacgtgtgcctggacatctgcaacatcgacccttcttgtggatttggatcgtggcgcccctccttcagagaccgtagagctgctgggtccgacgtggacatcgatatggccttcattctcgactccgctgagactaccactctcttccagttcaacgaaatgaaaaaatatattgcctatctcgtgcgccagttggatatgagccccgaccccaaagcttcgcaacacttcgcccgcgttgcagtggttcagcacgcaccgtccgaatccgtggataatgcaagtatgccacccgttaaagtggagtttagcctcactgactatggttccaaggaaaaactggtggatttcctgtcccggggcatgactcagctccagggaactcgagccctgggaagcgccatagagtacacaatcgagaatgtcttcgaaagcgcgccaaaccctcgagatcttaaaattgtagttttgatgcttaccggagaggtgcccgagcagcagcttgaggaggcacaacgcgtcattcttcaagccaagtgtaagggttacttttttgtggttctcgggatcggtcgtaaagtgaacataaaggaagtgtacacattcgcgtcggagcccaacgacgtctttttcaagcttgtggacaagtctaccgaactaaacgaagagcctctgatgagatttggccgactgctcccatcttttgtctcgagcgagaatgcattctatctttcccccgacatccggaaacaatgcgactggtttcagggggatcagccgaccaaaaacctcgtgaaatttggtcataagcaggtgaacgtgccaaataatgtgacctcttctccaacatccaaccctgtgacaacaaccaagccagttacaaccacaaagcccgtcacgactactactaaaccggtaacgactacaactaaacctgtgactatcattaaccagccgagcgtgaagcccgctgccgcaaagccagcgcccgccaagcctgtagcggcaaagcccgtggccaccaaaatggccactgtgcgaccacccgtggccgttaagcctgcgaccgccgcaaaaccagtcgcggccaagcccgcggccgtgagacctccggctgcagcggccgctaaacctgtcgcgactaagccagaagtgcctaggccccaagcggccaaacctgcggcaaccaagcctgccaccaccaagccaatggtgaagatgtccagggaggtgcaggtgtttgaaattacggagaattcagccaaattgcactgggaacgagccgagcctccagggccatatttctacgacctcacagtaacatcagcccacgatcaatccctggttctgaagcagaacctgaccgttactgatagggtaattggaggacttctggcaggtcagacttaccatgtggctgttgtctgctatctccggagtcaggttcgggccacatatcatgggtccttcagtacaaagaaaagccagcctccccctccccaacctgccaggagcgcctcaagctccacaatcaacctgatggtgagtacggagccacttgctcttacggaaacagacatttgcaaactgcccaaggacgaggggacttgtcgggatttcatacttaagtggtattacgatcccaacactaagtcctgcgcaaggttctggtatggtggctgcggagggaacgagaacaagtttggctcgcagaaagagtgcgagaaggtatgtgcacccgtcctcgctaaacccggggtgatcagtgtgatgggtacctag

SEQ ID NO: 230668 - DNA, 8916 bp, Artificial Sequence
  derived and/or modified sequence
atgaggaagcacagacatctgccactggtggctgtattttgcctgttcctgagtggcttccccaccacccacgcccagcagcagcaggcagcccaagactccgcagatatcatatttttaattgacggcagcaacaataccggctcggtcaatttcgcagttatcttagacttcttagtgaacctgctggaaaagttacctatcggcacacaacagatcagggtgggagtagtccaatttagcgatgagcctagaacaatgtttagcctcgacacatattccactaaagcccaggtgctgggcgctgttaaagctctggggtttgcagggggcgagctcgccaatatcggcctcgctctcgatttcgttgtggaaaatcacttcactagggccgggggctcccgggtagaagagggcgtgccgcaggtcctggttctcattagcgccggtcctagcagcgatgaaattagatacggagtcgtcgcattgaaacaagcctcagtcttttcttttggcctcggggcacaagccgcttctagagctgagttgcagcatatcgccacagacgacaacctggttttcactgttcctgagtttagatcattcggagacctgcaggaaaagcttctgccgtatatcgtgggggtggctcagcgccacatagtgttgaaaccacccacaatcgtgacacaagtaatcgaggtgaataaacgcgatatagtgttcctcgtggatggctcatccgccttgggactcgccaattttaacgcaatccgggatttcatcgcaaaggtgattcaaaggttggagatcggacaagatctaatccaagtggctgtcgcacagtatgccgacacggtgcgtcctgaattttactttaatacgcatccaacaaagcgggaggtgattaccgctgtgaggaagatgaagcccctcgatggaagtgccttgtatacgggttccgctttggactttgtgaggaacaatcttttcacaagctctgccggctatcgggccgcagaggggattcccaagctgctggtgctcattaccggcggtaaatctctggacgagatcagtcagccagcccaggagcttaaaagatcatctatcatggctttcgccatcgggaacaaaggcgccgaccaggcagagctcgaagagatcgcatttgactcctcactcgtgttcattccagctgagttccgtgctgctccattacaaggcatgctgccggggctactcgcccccttgcggacgctgagcggcacaccagaagtgcactctaataaacgcgacataatattcctactcgacggctcagcgaacgtaggcaaaacgaactttccctatgtgagggattttgtgatgaatctcgtgaatagtttggatatcggcaatgacaacatacgggtcggcctggttcagttctccgacacacctgtgactgaatttagtctgaacacctatcagacaaaaagcgacatcctggggcatctgcgccagctacaactgcaggggggttccggcttgaataccggatcagcactctcatacgtttatgccaatcattttaccgaggccggaggaagcaggatcagggaacatgtaccccagctgctgctgttgctcactgcaggacagtccgaagactcttaccttcaggcagcaaatgctctcaccagagctggtatcctcacattctgtgtgggcgcctcccaggccaataaggctgaattggaacaaattgccttcaacccaagccttgtttatctaatggatgacttttcaagcctgcccgctctgccgcagcagctcatccagccacttacgacatatgtctcaggcggcgtggaggaagtgccactggcacagccagaaagcaaaagggacattctctttctcttcgacggaagcgcaaaccttgtaggccaatttcccgtagtaagagatttcctgtacaaaattatagacgagctcaacgttaaacctgaaggaacgcgaattgccgtcgcacagtatagcgacgacgtgaaagtggagtcaagattcgatgagcaccagagtaaacctgagatactgaacctcgtgaagcgtatgaaaatcaagacggggaaggcactgaatctggggtatgcactcgattatgctcagcggtacattttcgtgaagtcagctggctcaagaatagaagatggagtgttgcaatttcttgtgctgcttgtagcaggccgatcatcggatagagtggacggtcccgcatctaaccttaaacagtccggggtcgtccctttcatttttcaagctaaaaacgcagacccagccgaacttgaacaaatagtgctgagcccagcttttatcttggcagccgaatcccttccgaaaatcggagaccttcacccacaaattgtgaacctgttgaagtcagtccataatggggcccccgccccagtctcaggcgagaaagacgtggtgttcctgctggatggcagcgagggggtaagaagcggctttcccctcttgaaggagtttgtccaacgggtggtggaatcattggatgttggccaagacagagtaagagtcgcagtggtgcagtattcagatagaactagaccagaattctacctgaattcctatatgaataagcaggatgttgtgaatgccgtacggcaactgaccttgttgggaggccctacgcctaatactggtgcagctctcgaatttgttctgaggaatattctggtgagtagcgccggaagccgcataactgagggcgtgccgcaacttctgatagtcctcactgcagacaggagtggcgatgatgtgcggaatccttccgtggtggtgaagagaggaggcgctgtacctatcgggattggaattggaaacgccgacataacagaaatgcagaccatcagcttcatccctgattttgcggtggctattccaacctttcgtcagctaggcacagttcagcaagttatctcagaaagagtgactcaactgaccagagaggaattgtcccgtctccaaccagtgctacagccactcccttctcctggagtcgggggaaagcgcgacgttgttttcctgattgacggttctcaatccgcaggccccgaatttcaatacgtccggactctaattgaaaggctggtggactatctggacgtcgggttcgataccaccagagtagctgtgatccagttttcagacgaccctaaagtcgaatttcttctgaacgcccactcctctaaagacgaagttcagaatgccgtgcagcgtcttagaccaaagggagggcggcagatcaacgtgggtaatgccctggagtatgtttcccggaacatctttaaacggcccctgggctcccggattgaggaaggggtccctcagttcctcgttctcatcagcagcgggaagtcagatgacgaagtggatgatccagcagtagagctgaagcagttcggggttgctccttttacaatcgcccgaaacgctgaccaagaagagctcgtgaagatctctctgtcaccagaatacgtcttttcagtttcaaccttccgtgaactcccatcgctagagcagaaactgcttacaccgatcacaactctgacaagcgagcagattcagaagcttctggcgagcactcgctatcccccccccgccgtagagagcgatgcagcagatatcgtgtttttgatcgacagttccgaaggagtgcgcccagacgggtttgctcatatcagagatttcgtgtcacgaatcgtccgtcggcttaacatcggacctagtaaagtcagagtgggggtcgttcaattctccaatgatgtgtttcccgagttttaccttaagacttataggagccaagcaccggtgttggatgcaatacgtcggttgaggcttaggggtggatccccccttaacacagggaaggcattagaattcgtagccagaaatctgttcgtcaaaagcgccggctcaagaatcgaggacggcgtgcctcagcacctggtgttggtcctcggaggaaagtctcaggacgatgtgtctagatttgctcaggtcattcggtccagcggaatcgtgagcctgggcgtcggggaccgcaacattgaccgaaccgaattacagacgataacaaacgatcccagactggtcttcacggttcgcgaatttagggaattgcccaacatcgaggagaggattatgaactctttcggcccaagcgccgccacgcccgctccgcctggagtggacaccccgcccccttcacggccagaaaaaaagaaggcagatatcgtgttcctgctggacggatcaatcaacttccggcgggattcattccaggaggtattgcgctttgtgagtgagatcgtggacaccgtgtacgaagatggagactcgatccaggtggggttggtgcagtacaactctgatcctaccgatgaatttttcctgaaggatttttccaccaagaggcaaatcatcgacgctattaataaggtagtgtacaaggggggtcggcacgcaaatacgaaggttggccttgaacacctgcgagtgaaccattttgtgccagaggcggggtcccgcctcgatcagagagtgccccaaatcgccttcgtcattactgggggaaagagcgtagaagatgcccaagatgtcagcttggctttgactcagaggggggtcaaagtcttcgctgtgggcgtacgcaatatagattctgaggaggttggtaaaatagcatcgaatagtgcaactgctttccgcgtgggaaacgtccaggagctgagtgagcttagcgaacaagtgctggaaaccctgcacgacgccatgcacgagaccttatgccccggtgtaactgatgctgctaaggcctgtaacttggatgttatcttggggttcgacggtagccgcgatcagaacgtattcgtcgcgcaaaagggattcgagtcgaaagtggatgcaatactgaatagaatctctcagatgcatcgcgtgtcctgtagcggcggccgatcccctaccgtgcgtgtcagcgtggtcgctaatactccctcgggcccggtcgaggcctttgactttgacgaataccagcccgaaatgctggaaaagttccggaacatgcggtctcagcatccatatgttcttaccgaggacacactgaaggtttacctcaataaattcagacagtcaagtccagactcggttaaagtcgtgattcacttcacagatggcgctgacggagacctagctgacctacatagagcaagcgagaacttgcgtcaagagggagtacgagctttaatccttgtgggcttggaaagggttgtcaatttagaacggttgatgcatctcgagttcggccgcggtttcatgtacgacaggccgctccgcttgaacctgcttgacctggactatgaactcgctgaacaactggacaatatcgcagagaaggcatgttgtggtgtgccttgcaaatgtagtgggcaaaggggagatcgcggtcccataggatctatcgggccgaagggaatccccggcgaggatggctacaggggataccctggggacgaaggaggacctggggagaggggaccaccaggcgtgaacgggactcagggcttccagggatgcccaggacagaggggcgtgaaggggtctagaggcttccctggagagaagggagaggttggggaaattgggctggatggcctggatggcgaagacggcgacaaaggtctccctggcagttccggtgaaaaggggaatcctggcagacgcggggacaagggacctaggggagaaaaaggggaacggggtgatgtcgggattcgtggcgaccctggcaacccagggcaagacagtcaggagaggggtcccaagggtgaaactggagaccttgggccaatgggagtgccaggccgagatggagtgcctggaggtccgggagagaccgggaaaaatggtgggttcggaaggcgcggtccccctggtgcaaaggggaacaaagggggcccaggtcaaccagggtttgagggtgagcagggaactcgaggagctcaaggaccagccggtccagcgggccctccagggttgataggagaacagggtatctccggacctagaggaagtggaggtgcggccggcgcgcccggagagcggggaagaacaggcccacttggacgaaaaggcgaaccaggggagccgggtcccaaagggggaatcggcaaccggggtcccaggggagaaacgggcgatgatggtcgtgacggagtagggtcagaaggcaggagaggtaaaaaaggcgagcggggctttccgggttatcccgggcctaagggaaaccctggggagccgggactgaatggcaccacgggccccaaaggtatccgcggacgtcgcggcaactcagggccccctggaatcgtggggcagaagggcgaccccggataccctgggccagccgggccaaaaggaaatagaggtgattccatagaccagtgtgcactgatacagagcatcaaggataagtgtccctgctgttatggtccactggaatgcccagtctttcctacagaacttgctttcgctctcgacacttctgaaggagtgaaccaggacacgttcggacgtatgagggatgtggtgttgtccatcgtaaatgaccttacaattgcagagtccaattgcccccggggagcacgcgtggctgtggttacatataacaacgaggttacaactgagatcaggttcgccgactcaaagaggaaaagtgtgctactggataaaatcaaaaatcttcaggtggctttaacttccaaacaacagtctttggaaactgccatgtcatttgtggctcgaaataccttcaagagagtgaggaacggcttcctgatgcggaaagtcgccgtattcttttctaatacccccacgagggcatcaccccagttgagggaggccgtcttaaagctatcagacgctggcatcacacctctgttccttaccaggcaagaggatcgccagctgatcaatgccctgcaaatcaataatacggccgtgggtcacgctctggtacttccagcaggaagggatttaactgactttctagagaatgtgctgacttgccacgtatgcctagatatatgcaacatagatcccagttgcggtttcgggagttggcgccctagcttccgagaccgcagagccgctggatccgacgttgacattgacatggctttcatccttgactctgctgaaactactaccctcttccagtttaacgaaatgaaaaaatacattgcgtatctcgtgcgacaattggatatgagccctgatcccaaagctagccagcacttcgccagggtggcagttgtgcaacacgcaccgagtgagagtgtggacaacgctagcatgcccccagtaaaagtcgaattcagcctgaccgattacggcagcaaagaaaaactggttgacttcctgagcagggggatgactcagctgcagggtacccgggcccttgggagtgcaatcgagtacacaattgaaaacgtgttcgagagtgctccaaatcccagggacctgaagattgtggtcctgatgctcacgggcgaggtgcctgaacaacaactggaggaggcccagagagtgatcctgcaggccaagtgcaagggttatttttttgtcgtactggggatcgggcgaaaggtcaacatcaaggaagtatacacattcgcttccgaacctaatgatgtattcttcaaactcgtagataaatccaccgagctgaacgaagagcctttgatgcgattcgggcgactgcttccgtcgttcgtatctagcgagaatgccttctatctatctcctgacatacggaagcaatgcgattggtttcagggtgaccaacctactaaaaacctggtaaagttcggccataaacaggtgaacgttcccaacaacgtgacctccagtcccactagcaatcctgtcactaccacaaagcctgttaccactaccaagcccgtgacaactacaactaagcccgtgacaacgacaacaaaaccagttacgattatcaatcaaccctccgtaaaacccgccgcagcaaagccggccccagccaagcccgttgctgccaaacctgtggcaaccaagatggctactgtacggccacccgtggcagtgaagcccgcaacagccgccaaaccagtggcagcaaagcctgccgcggttcgacctccagccgccgctgctgcgaaaccagtagccaccaaaccggaggtgccacgaccccaggctgcaaagccagccgcgactaagccagctaccacaaagccaatggttaaaatgtcaagagaggtgcaggtatttgagattactgaaaacagcgccaagctccattgggagagggctgaaccacctggcccctacttctacgatttgacagtgacctcagctcatgaccaaagtctggtgttgaaacagaatctgacagtgacagatagagtgattggtggccttctggctggccagacctatcatgttgcagtggtttgttacctgcgaagccaagttcgcgcaacctaccatggatcattttcaacaaagaaatcacagcccccacctccccaacctgcccgcagcgcttctagctctaccataaatcttatggtgagtacagaacccctagcgttgactgagacagacatctgcaaactccccaaggacgagggaacatgtagggatttcatcctgaagtggtactatgatccgaatactaaaagctgtgcaagattctggtatggcggatgcgggggaaatgaaaacaagttcggaagccagaaagagtgtgagaaggtgtgtgccccggttctcgccaagcctggtgtgatctcggtgatgggaacttag

SEQ ID NO: 230669 - DNA, 8931 bp, Artificial Sequence
  derived and/or modified sequence
atgagaaagcataggcaccttcccttggtggcagtattttgcttgttcctatcaggttttccaactacccatgcgcagcagcagcaggccgatgttaaaaacggagccgccgccgatataattttcttggtagatagctcttggacaatcggtgaagaacattttcagttggttagagagttcctgtatgatgttgtcaaaagcctcgccgttggcgaaaacgacttccacttcgctcttgtgcagttcaacgggaatcctcatactgaattcctactgaatacatataggactaaacaggaggtgctctcccatatatctaatatgtcctatatcgggggaaccaatcagacaggtaaaggtctagaatacatcatgcagtcccatttaacaaaggccgcgggatcacgagctggagatggggttcctcaggtgatcgtcgttctgaccgatggacacagtaaagacggcctggcactcccctccgccgaactgaaaagcgctgatgtgaatgtgttcgccattggagtcgaagacgctgacgaaggtgcactcaaagaaatcgcctctgaacccttgaatatgcacatgttcaacttagaaaatttcacgtccttgcatgatattgttgggaatttggtgagttgtgtgcatagcagcgttagtccggaacgtgctggtgataccgagaccttaaaggacatcactgtgattgaagtaaacaagagagacattgtgttcctggtagatggatccagtgccctcggcctggcaaattttaacgcaattagagatttcattgctaaagtaattcagcggctggaaatcggccaggacctgatccaagtcgctgtcgctcagtacgctgacaccgttcggcccgagttctacttcaacacccaccctactaagcgggaggtgattactgccgtcaggaaaatgaaacccttggatggttccgccctgtacactggatccgccttggacttcgtacggaacaatttgtttacctcttcagccggctatagagctgccgaggggatccctaagctgctcgttttgataaccggaggaaaatctttggacgagatctcccagccagctcaggaacttaaacgctcttccatcatggctttcgctatcgggaacaagggagctgaccaagctgaactggaagaaatagcattcgattcttcactggttttcatccctgccgaattcagagccgctccactgcaagggatgcttccaggactgcttgcgcctctgagaacattgagtggaaccccagaagtgcactctaataaaagagatattattttcctgctagacggtagcgctaatgtcggaaaaaccaatttcccatacgtgcgcgatttcgtcatgaacctggtaaatagcctcgatatcggcaacgacaacatcagagtaggtcttgttcagttctctgatacaccggtcaccgagttctcgctaaacacttatcagacaaagtcagacatcttagggcatttacggcagctgcaactgcagggcggtagcggacttaatacaggcagcgcattgtcatacgtttatgctaaccatttcactgaggctggcggcagcaggattcgtgaacacgtccctcagctgctcttactgttaactgctggtcaaagcgaagattcttatctgcaggctgcaaatgcactcaccagggctggtatactgactttctgtgttggcgcgtcccaggccaacaaagctgaactcgaacagattgcatttaacccgtccctcgtgtatctcatggacgatttcagtagtcttcccgctctgccacagcagttaatccagcccctcacaacttatgtgtccggcggtgtggaagaggtaccacttgcccagcctgaatcaaagcgggatattctcttcttgtttgatggatctgcaaatttagtgggacaattccctgtcgtaagggactttctgtacaagatcattgacgaattgaacgtgaagccagaaggaacccggatcgcggtcgcccagtattctgacgatgtcaaggtggaatccagattcgacgaacaccagtccaaacccgagattcttaacctggttaagcgaatgaaaatcaagaccggcaaggctctgaatctgggatatgcgcttgattacgcacagcggtatattttcgtgaaatctgctgggtccaggattgaggacggagttctgcaattcttagtgttactcgttgccggccgctcctctgatcgcgtggatgggcccgcatcaaaccttaagcagagtggagttgtcccttttatattccaggccaagaacgctgatcccgctgaattggagcagatagttttgagtccggccttcattctggcagccgaatcattacctaagataggcgatctccaccctcaaatcgtgaacctcctgaagtccgttcataacggcgcaccagccccagtcagcggagagaaagatgtcgtgttcctgctggatggcagtgagggagtcagatctgggttcccgctgttgaaagagtttgtgcagagagtagtagagtccctggacgtcggccaggacagagttagagtggccgtagtgcaatatagcgacaggaccagacccgaattctacctaaattcatacatgaataaacaggatgtcgtaaatgcggttcggcagttgacactccttggagggccgacaccaaataccggggccgccctggaatttgtcctgaggaacattttagtgtcaagtgctgggtctaggattactgaaggagtcccgcagctgctgatagtgttaacagctgacaggtctggtgatgacgtgaggaacccttctgttgtggtgaagaggggaggagcagtacccattgggatcggtattggcaatgcggatataacagagatgcaaacaattagttttataccagatttcgccgtcgcaattcctacattccggcagcttggaacagtgcaacaggtaattagtgaacgagttacgcagctgacccgagaggaacttagccgattgcagccggtcttacagcccttgccatccccaggtgtgggaggcaagcgggacgtagtgttcctgatcgatggcagccagagcgccggacccgagtttcaatacgtgagaacacttattgagagacttgtcgattatttagatgttggttttgacaccaccagagtcgctgtcattcaattctctgacgaccctaaggtagaatttcttctgaatgcgcattcctcaaaggacgaagtccagaacgctgtgcaaaggcttcgacctaaaggagggaggcagattaatgtcggaaacgcactcgagtacgttagccggaacatcttcaaaagaccactgggaagtcgtattgaggaaggagtccctcagttcttagttctgatttcgtccggtaagtccgatgacgaggtcgacgatcccgctgttgagctcaaacagtttggcgtggctccatttacgatcgccaggaatgcagaccaggaagagctcgtaaaaattagcctgagtcccgaatatgttttcagtgtttctacgttcagggaactacctagcttagagcagaaattgctgacaccgattactaccctcacctctgaacaaattcagaaactcctcgcctcaaccagatatccccccccagccgtggaaagtgatgcagccgacatcgtattcctgatcgatagtagtgaaggcgttcgcccggacggctttgcccacattcgcgattttgtatccagaatcgtgcgcagactgaacataggtccttctaaagtgcgggtgggtgtagtgcagttttctaacgacgtttttcctgagttctacctgaagacttaccggtctcaagcccccgtcctggacgccatcagacgtctgagacttcgtggcggcagcccgttaaacactggaaaagccctggaattcgtggcaaggaatttgttcgttaaatccgccggcagcagaatagaagatggagtcccccagcacctggttttggtactcggaggcaagtctcaagatgacgtttctcggtttgcacaagtcatccgatcttctggcatcgtttctttgggtgtgggggaccgcaacatagatcgcacagaactacagactattacaaatgatccccgcctggttttcactgtccgtgagtttcgcgagctaccaaacattgaagaacgaataatgaatagctttggcccaagtgctgcgacgcccgccccccccggcgtggacaccccaccacccagtagacccgagaagaaaaaagcagatatcgtatttttgctggatggatccattaactttagaagggattcattccaggaagtgctccggtttgtgagcgaaatagttgacactgtttacgaagacggcgatagcatccaggtaggactggttcagtacaactctgaccccaccgatgaatttttcctaaaggattttagcactaaacgacaaatcatagatgcgataaataaagtcgtttataaaggcggacggcatgcaaacactaaggtcgggttggagcacctaagagtcaaccactttgtgcccgaagcgggttccagactagatcagcgtgtaccgcaaatagcttttgtcatcaccgggggcaaatctgtggaggatgctcaagacgtgagcctggccctgacccagaggggagtaaaggtgttcgccgtcggagtgagaaacattgatagcgaagaagtaggaaaaattgcctctaacagcgcaactgccttccgtgtcggtaatgtacaggagctgagcgagctctcagaacaagtactcgagacactgcacgacgctatgcacgaaacactctgtccgggtgtgacagacgcagccaaggcctgcaatctcgatgttattctcggatttgacggttctagagatcagaatgttttcgtggcccaaaaagggttcgagtctaaggtggacgcaatactgaatcgaatttcccagatgcacagggtctcttgctctggcggccgttcccccacagtgcgcgtttcggtcgtcgccaacacaccttccggtccagtggaagcctttgattttgatgaataccaaccagagatgttggagaaatttaggaatatgcgttcacagcacccttatgttttaacagaagatacccttaaagtttatctgaacaaattccggcagagcagtccagactccgttaaagttgtgatccactttacagatggcgctgatggagacctggcggaccttcacagggccagtgagaatcttcgacaagagggcgtgagggcacttatccttgtgggcctggaaagagtcgtgaacctagaaagacttatgcatctcgaatttggccgcggatttatgtacgatcgccccctgcgcctcaacttgcttgacctcgactatgaactggccgaacagctcgataatatcgctgagaaagcctgttgtggggttccctgtaagtgtagcggacaaaggggggacagaggacccattgggagcataggcccaaaaggaattcctggtgaagatggatatcggggctatccgggggacgaaggtggaccaggggaacgcggccctcctggcgtgaatggaacgcagggctttcaaggatgcccgggtcagcgcggcgtaaaggggtctagaggctttccaggtgagaagggcgaggtgggcgagattggattggacggactggacggtgaagacggtgataaggggttaccagggagctcaggagaaaaaggaaacccaggccggagaggggacaagggaccccggggagaaaaaggcgagagaggtgacgtgggcatcaggggagacccagggaaccccggccaggattcgcaggaaagagggccgaagggagaaactggagatcttggtcccatgggcgtgcctggacgggacggcgttcccggcggacccggcgagacaggcaagaatggagggttcggtcgaagaggaccacccggcgcgaagggcaacaagggaggacctggccagcctgggtttgaaggggaacagggaactcgaggtgctcaggggcctgctggtccagctgggcctcctggcctcatcggtgagcaaggtatatcgggccctagaggtagtggcggcgccgcaggggccccaggcgagagaggcaggaccggacctctgggaagaaaaggggagcccggcgaacccggccccaagggggggattggcaatagagggccacgcggagagacaggcgatgatggacgtgacggcgtgggttcagagggccgccggggaaagaaaggggagagggggttcccaggttatccaggccccaaggggaatcccggtgaacccggtctcaatggcacgactggacccaaaggtattcgcgggcggcgcggtaatagtggtcccccaggaattgtgggccagaaaggggatccaggctatcccggcccggccggccctaagggaaaccgaggcgattctatcgatcagtgcgccctcattcaatctattaaagataaatgcccatgttgttatggcccgttggagtgtccagtgttccccactgaactggcctttgcactggatacgagtgaaggagttaaccaggatacattcgggaggatgcgcgacgtggtactgagtatagtcaacgatttaaccattgctgagtccaactgtcccaggggtgcccgcgtcgccgttgttacatataataatgaagttacaacagaaatccgctttgccgattcaaagagaaagtccgtgttgctggacaaaatcaaaaatctgcaagtggcacttacttccaagcagcagtccctggagaccgccatgagttttgtggctaggaatacattcaaacgggttagaaatggcttcctgatgagaaaagtcgcagtgttcttctccaatactccaacaagagcatcaccccaactgagagaagctgttcttaagcttagcgacgctggaattacccccctatttctgacccgacaggaggatcgacaactgataaacgccttacagattaacaatacagccgtcggacacgccctggtcttacccgccggcagagatttaaccgattttctggagaatgtgctgacctgccacgtctgtctcgatatatgcaacattgacccttcttgtggatttggtagctggagacccagtttcagagacaggagggccgcaggttccgacgtcgatatcgacatggcctttatccttgacagcgccgaaacgaccactttattccagttcaacgaaatgaaaaagtacatagcctatctcgtacgacagctagacatgagcccggatcccaaggctagccagcattttgcacgcgtggccgtagtgcagcatgcacctagcgaatcagtggataacgcaagcatgccccccgtcaaagtggaattctcattgacagattacggatcaaaggagaagttggtggactttctgagcagggggatgacccaattgcagggaactcgtgctctcggatctgcaatcgagtataccatagagaatgtcttcgaaagcgctcctaatcctcgggatcttaagatcgtcgtgcttatgttaactggcgaggtgccagagcagcagttagaagaagcccaacgcgtaatattacaggcgaaatgcaaggggtacttctttgttgtgctggggattggtagaaaagtgaatatcaaggaggtctacaccttcgcatccgaaccaaacgatgtcttttttaaactggtagacaagtcaacagaattgaatgaggaaccactgatgcggttcgggcggctgctcccatcatttgtcagttcagagaacgccttttacctatccccagatatccggaaacaatgcgattggtttcagggcgaccagcctaccaaaaatcttgtaaaatttggccacaagcaagtgaatgtgcccaataacgttacgtcatccccaacttctaaccccgtgaccaccacaaaaccagtgaccactacaaaacctgtaactacaactaccaagccagtgacaactactaccaaaccagtaacaatcattaatcagccgtctgtgaagcccgccgctgctaagcctgcgccagccaagcctgtggccgcaaagcccgtggcgactaagatggccaccgttcgcccccctgtcgctgtgaaacctgctaccgcagccaagcccgttgccgctaaaccagccgccgtccgccctccagccgctgccgctgccaagcccgtggcgaccaaacccgaggtgcccagaccccaagcagccaagcccgccgccactaagccagctactacgaaaccaatggtcaaaatgtcaagagaggtccaagtattcgagattaccgaaaacagtgcgaagctgcattgggagagagcagagccacctgggccatatttctatgatcttacagtcacaagcgctcacgatcaaagcctcgttctcaagcaaaatctcaccgtgacggacagggtcatcggagggctcctggctgggcagacctatcacgttgccgtcgtgtgttatctccgatctcaagtcagggctacataccacggatctttttctaccaaaaagtcccaacctcccccccctcagcccgcgcgcagcgcatcctcctcaactatcaatctcatggtgtcaaccgaaccactagctctaaccgaaaccgatatatgtaagctacctaaggatgaggggacatgcagggactttatcttaaaatggtactatgaccctaacacaaagtcctgcgcccgcttctggtatggggggtgtggaggaaatgagaataaatttgggagccagaaagaatgcgaaaaagtgtgcgcacccgtgttagcgaaacccggagtgattagcgtgatggggacctag

SEQ ID NO: 230670 - DNA, 8916 bp, Artificial Sequence
  derived and/or modified sequence
atgaggaaacaccgtcatctgcccttggtggccgttttctgtctgttcctctccggattccctacaacccatgctcagcagcaacaggcggcccaggatagcgccgacattatttttcttattgacggctccaacaatactggtagtgtgaattttgctgtgatcctggacttcttagtgaacctccttgaaaaacttcctataggtacccaacaaatcagggtcggcgtcgtgcagttctccgacgaaccccgcaccatgttttcattagacacttattctacgaaggctcaggtgttgggagcagtaaaggctttgggatttgctggcggggagttagccaatatcgggctggcactcgactttgttgtggagaatcactttacacgggcaggaggcagccgggttgaggagggcgtgccgcaagttttagttctgattagtgccggcccttcatcagacgaaatccgatacggcgtagttgccttgaaacaagcaagtgtattctccttcggactcggagcacaggccgcttcaagggcggaactgcagcacattgccactgacgataatctcgtgttcacggtgccagaatttcgatcgttcggggacctgcaggagaaattattgccgtatatcgtgggtgttgcccagcgccatatcgttctaaaacctcctaccatcgtaacacaagtcatagaggtaaacaaacgtgatattgtgttcctcgtcgacggatcttcagcactcggactcgctaacttcaatgccatcagggactttattgctaaagtgatccaaagacttgaaatcggacaagatctcatacaggtagccgtagctcaatacgctgacaccgtgcgccctgagttctattttaacacgcatcctactaagagggaggtgatcactgccgttcgtaaaatgaaaccgctggatggctctgccctgtatacaggctctgctctagattttgtgcgaaacaacctttttaccagctccgccgggtaccgcgccgcggagggcattcctaaacttctcgtgctcattacaggtgggaaatctttagatgaaatctcccaaccagcccaggaactgaaacgatcttctatcatggcattcgccattggaaataaaggtgccgaccaggcggaactcgaggaaatcgcttttgactcttcactggtgttcatacccgctgagtttcgggccgctcctctgcaaggcatgctgcccggactactagcacccctccggactctctcaggaacgcccgaagtacactctaataagcgcgacatcatatttttactggacggttccgcaaacgtcggcaagacaaactttccatacgttcgtgactttgtcatgaacctggtaaactctcttgacatcggtaatgataacatccgcgtaggcttggtccagttctccgatactccagttactgagttttctctgaatacctatcaaaccaaatcagatatccttggccatttgagacaactgcagttgcaaggtggcagtggacttaacacggggagtgcattaagttacgtttacgcaaaccactttacagaagctggcggctcccgcatccgcgaacacgtgcctcaactcctactcctgttaacggccgggcagtcagaagactcctacctacaagccgcaaatgcacttaccagggcagggatccttactttctgcgtcggggcctcccaggcaaacaaagcggagttagaacagatcgcgttcaacccgagccttgtgtacctgatggatgatttctcctcccttcccgcacttccccagcaattgattcagccccttaccacctatgttagcggcggggttgaagaggtacctcttgcgcaacccgagtccaaaagagacatcctctttctattcgacgggtctgcgaatctggtagggcaattcccagtcgtgcgtgactttttgtacaagataatagacgagctaaatgtcaaaccagaaggcactcggatcgcagtagctcagtatagcgacgacgtcaaggtcgagtcaagatttgatgagcaccagtcaaaacctgaaatactcaacctggtgaaacgaatgaagattaaaacggggaaagcgctcaaccttggatacgccttggattacgcccaaaggtacatcttcgtgaagtccgcaggcagcagaattgaggatggggttttacagttcctagtcctgctcgtagctgggagaagtagcgatagagtggatggtcccgctagcaatcttaaacagtctggtgtggtgcctttcatctttcaggctaaaaatgctgaccccgcagaacttgaacagattgtgctttcacctgctttcatattggctgctgaaagcctgcctaagataggggacctacacccccagattgttaatctgctcaagtctgtgcataacggcgctccagcacctgtctccggcgaaaaggacgtggttttcctactggatggttccgaaggtgtgcggagcggctttcctttgctgaaggagttcgtgcagcgcgtcgtcgagagtctcgatgtgggccaagatagagtgagagttgcagttgtccagtactccgacagaacacgccctgagttttatctcaattcttacatgaataaacaggatgtggtgaatgcagtaagacagctcacgttgctcggtggaccaacacccaacactggggcggctctggaattcgttctccgaaacatcttggtttctagcgcagggtcgagaatcaccgagggggtgccgcagcttctcatagttttaacagctgatagatctggggatgacgtccgcaacccttctgtggttgtgaaacgaggtggtgctgtcccaattggaatcgggattgggaatgccgatataactgaaatgcagacaatcagttttatacccgacttcgctgtagccataccgacctttagacaactgggtacagtccagcaggtcatatcagagagggtcacgcagctcacccgggaagagctgtcacgccttcagcccgtccttcagcccctccccagccctggagtcggaggaaagcgcgatgtggtgttcctcattgatgggagccaaagtgcaggtcccgagtttcagtacgtaaggactttgatcgagcggctagtggattacctcgacgtaggctttgacaccacacgagtagccgtcatacagtttagcgacgaccccaaagtagaattcctcctgaatgctcattccagtaaggacgaagttcaaaatgccgtacagagactgaggcctaagggcgggcggcaaattaacgtaggcaatgccctggagtatgtgtcccgcaatatcttcaagagaccactcggctcacgcatcgaagaaggtgtcccacagtttttggtccttatatcatccggtaaatctgacgacgaagttgacgacccagccgttgagttaaagcaatttggtgtagctccatttactatcgcccggaatgccgatcaggaagagctggtaaagataagcctgtcccctgaatacgtgttctccgtctcaacctttcgcgagctcccatccctggagcagaagctactcacccctatcacaaccctgacaagtgagcagatccagaaacttctagctagcaccagatatccacctcccgccgtggaatctgacgccgctgacattgtgttccttatcgactcctccgaaggtgtgcgccctgatggtttcgcccatataagagatttcgtctcgcgaattgtgcgacgtcttaatatcggcccgagcaaggttcgcgtgggggtagttcaattcagcaacgacgtcttcccagaattttacctcaagacttaccgctcccaggcccccgtactggacgcaatccgcaggctacgcctccgggggggaagcccactgaatacagggaaagcgcttgagttcgtcgcaagaaacctgttcgtcaaaagtgcagggtctcgtattgaggatggggtcccacaacatttggttctggtgctgggggggaaatctcaagatgacgtgtcaaggttcgcgcaggtaatcagaagttccggcattgtgtcactgggcgttggggacagaaatatagataggactgagctccagaccattactaatgatccccgactggtatttacagtgcgcgaattcagagaattgcctaatatcgaagagcgaataatgaactcattcggtccgtccgctgcaactcctgctcctcctggagttgacactcctccacccagcagaccagaaaagaagaaagctgacatcgtgtttctattggacggtagtatcaatttccggagagatagtttccaagaagtgcttcgattcgtatctgagatagtcgataccgtttatgaggacggcgactctatccaggtaggccttgtacagtataactccgacccaacagatgaatttttcctaaaggacttctctacaaagcgccaaattattgacgccatcaacaaggtagtgtacaagggcggacggcacgctaacaccaaggttgggctcgagcatctaagggtgaatcacttcgttccagaggcaggctccagattggaccagcgagtgccacagattgcatttgtcattacagggggaaaatcagttgaagatgcccaagatgtttctctggcccttactcagaggggtgtgaaagttttcgccgttggcgtccgcaatatagacagcgaagaagtggggaaaatagcaagcaactcagccaccgcttttcgggtaggaaacgtccaggaactttccgagctatctgaacaggtgttagaaaccttgcatgacgccatgcacgagacgctgtgtccgggcgtgacagatgcagctaaggcctgcaaccttgatgttattcttggttttgacggcagtcgcgatcagaatgtctttgtagcgcagaaaggcttcgaatcaaaggtcgacgccattcttaacagaatttctcaaatgcatcgtgtatcatgtagcggcggcaggagccccacagtccgcgtcagcgttgtggccaacacccccagcggaccagtagaggcattcgacttcgacgagtatcagcccgaaatgctggagaaattccgaaacatgcggtctcagcacccgtatgtattaacagaagacacgctgaaagtctatctgaataaatttcgccagtcctccccagatagtgtgaaagtggtgattcactttacagatggtgctgacggagatttagcagatttacatcgtgcttccgagaacctgagacaagagggcgtgagagcactgattttggtgggccttgagagagtcgtcaatttggaaagactcatgcacctggaattcggccgaggtttcatgtacgacaggcccctcagactgaatttgcttgacttagactacgaactcgccgaacagttggataacatcgcagaaaaggcatgttgtggtgttccatgtaagtgctctggccagcgaggtgaccgcggccccatcggttccattggtcccaaaggcattccaggggaagacggctataggggatacccaggtgacgagggcggaccaggagaaagaggacccccaggcgtcaacgggactcagggcttccagggctgcccagggcagcggggtgtcaaaggctctagaggcttccccggagaaaagggagaggttggcgaaattggcctggacggtttggatggcgaggatggcgataaaggactccccgggagttcaggtgaaaaaggaaatcctggaagacgcggtgataaggggcctagaggggaaaagggggagcggggtgatgttggtattcgaggagacccgggcaacccggggcaggacagtcaggagcgaggacctaaaggggagacgggagatctcggcccaatgggagtgccaggcagagatggcgttcctggaggaccaggcgagacaggcaaaaatggcggttttggccgcagaggtcccccaggcgccaagggcaataaaggggggcccggacagcccggattcgaaggtgaacagggaacacgaggggcacagggacccgcgggccctgctggcccccccggactgattggtgaacaggggatatctgggccacgaggatccggaggtgctgccggcgcaccaggcgagaggggacgcacagggccactggggagaaaaggcgagcctggggagcccggaccaaaaggaggcattggaaatcgaggtcccaggggtgaaactggtgatgacggccgcgatggggtggggagcgaaggacgccgaggaaagaaaggtgaacgaggattcccagggtaccctggccctaaaggtaacccaggcgagccgggactgaatggcaccactgggccgaaagggattcggggcagacgggggaactcagggcctcctggtattgtgggccagaagggggatcccggataccctggcccagccggtcccaagggaaatcgaggtgatagcattgaccaatgtgcactgatccaaagtatcaaagataaatgcccatgctgctacggcccacttgagtgcccggtgttccccactgaactagcattcgctctggatacatctgaaggtgtaaaccaggacacatttggtcgcatgagagacgtggtacttagtattgtgaacgatctgacgatcgctgagagtaattgtcccagaggggcgagggtcgcggtagtgacgtataacaatgaggtcacaacggaaattcgatttgccgacagcaagaggaagtcggtacttctcgataaaattaaaaacctgcaagtcgctctcaccagcaagcaacagtccctagagacagcgatgagctttgtagcgagaaatacattcaaaagggttaggaacggctttctgatgaggaaggtcgccgtgttcttttccaacacgcctacacgagccagtcctcaactgagagaggcggtgctgaaactgtcagatgcaggcattacacccttatttcttactcgccaagaagacagacaacttattaatgcgctacagattaacaacacagcagtaggccatgcattagtactccctgccggacgcgatctgaccgacttccttgagaatgtattaacttgtcacgtgtgtcttgatatttgtaatattgatcccagctgtgggttcgggtcctggagaccgagcttcagagatcgaagagccgcaggaagtgacgttgatattgacatggccttcattctggattccgccgaaactacaacactatttcagttcaatgagatgaagaaatatattgcctacctcgtgagacaactggacatgtcacctgatcctaaagcgtctcagcatttcgccagagtagccgtcgtgcagcatgctccgtcggagagtgtggacaatgcatcaatgccgcccgtgaaggtcgaattttctttaacggactatggtagcaaggagaaactggttgatttcttatcacgagggatgacccaacttcaaggcaccagagcgttggggtccgcaatcgagtataccattgagaatgtgttcgagtctgcacctaacccaagagatctgaaaatagtcgtgttaatgcttactggtgaagtaccagaacagcagctggaagaagctcagcgagtgatcctgcaggcaaaatgtaagggctatttctttgttgtgctgggaatcggacgcaaggtaaacattaaagaagtgtacactttcgcaagtgaaccaaacgacgtgttttttaaattggtcgacaaatcaacggaacttaacgaggaacccctgatgcgctttggacgattactgccctccttcgtgtcgagtgaaaatgccttctacctctcccctgacatccgcaaacagtgcgattggtttcagggtgatcagcccacaaagaatctggtaaaatttggccataagcaagtcaacgtacccaacaatgtcacttcttcacctacctctaacccagtaacaacaactaaacccgtcacaaccaccaagccagtgactacgacaacgaaacccgtgaccaccaccaccaagcccgtgaccatcatcaatcaaccgtcagtgaaacccgctgccgccaagcccgctcccgctaagcctgtcgccgcaaagccagttgcaacaaaaatggcgacagttaggcctccagttgccgtgaaacccgctacagctgctaagccggttgctgcaaagccggcagctgtcagacctcccgccgctgcagccgctaaaccagtcgcaaccaaacccgaagtgccccgaccacaggccgctaagccagccgccactaagcccgccacgactaagcccatggtcaaaatgagtagagaagttcaagtcttcgagatcacagagaactccgctaagctgcattgggaacgggccgaacctccaggcccatacttctacgacctgacagtcacatccgcccacgaccagtctcttgtcctcaagcaaaacctgactgtgactgatagggttatcggcggtttgctcgctggccagacctaccatgttgctgtcgtatgttacttaagaagccaggtgcgagctacgtaccacggctcattttccactaaaaaaagccagccccctcctccacagcctgcccgctctgcctcctcgagcactatcaacctgatggttagtacagaacctctcgccctaacagagactgatatatgcaaattgccaaaggacgagggtacctgcagagacttcatactgaaatggtattatgacccaaacacaaaatcctgcgcaagattctggtatggtggatgcggggggaacgagaacaagtttgggagccagaaagaatgcgagaaggtgtgtgctccagtactggctaagcccggtgttatttctgtcatgggcacatag

SEQ ID NO: 230671 - DNA, 8916 bp, Artificial Sequence
  derived and/or modified sequence
atgagaaagcacaggcacctgcctctggtggcagttttctgcctctttctgagcggcttccccacaactcacgcccagcaacagcaggccgcccaagattccgcagacatcatcttcctgattgacggctctaataacactggctctgtaaactttgcagtcatcttggattttctggtcaatctcctcgagaagctgcccattggcacacaacagatacgagtgggagtagtgcagttttctgatgagcctagaactatgttctcccttgatacttattctactaaagcacaggtcttgggcgctgttaaagctctggggtttgcagggggcgagctcgccaatatcggcctcgctctcgatttcgttgtggaaaatcacttcactagggccgggggctcccgggtagaagagggcgtgccgcaggtcctggttctcattagcgccggtcctagcagcgatgaaattagatacggagtcgtcgcattgaaacaagcctcagtcttttcttttggcctcggggcacaagccgcttctagagctgagttgcagcatatcgccacagacgacaacctggttttcactgttcctgagtttagaagttttggcgacctacaggaaaaattgcttccgtatatcgtgggcgtggcacaaagacacatcgtgttaaaacctccaacaatcgtcacgcaagtgattgaagtaaataaaagggacatcgtctttctcgtcgatggctctagcgcattaggactagctaatttcaatgcaatccgggacttcattgcaaaggtcattcagcggctggaaatcggtcaagacttaattcaggtggcagtcgcccaatatgccgatacagtacggcccgaattttatttcaatactcatcccactaaacgggaagtgatcactgcagtacggaaaatgaaaccccttgatggctctgctttgtacactgggagcgcactagactttgtccgaaacaatctgttcacatcctccgccgggtatcgagccgccgaagggattcccaaactcctcgtactcattacaggtggtaaatcactggatgagataagtcaacctgcacaagagttaaaaaggagctccattatggcctttgccattggcaataagggagccgatcaagccgaattagaagaaatcgcgttcgacagcagcctcgtgtttatccctgccgaattccgggctgctccacttcaaggaatgctgccaggcttgcttgccccactgaggaccttgtcaggtactcccgaagtgcattccaacaaacgcgacataatcttcctcttggacggctccgctaacgtcggcaaaaccaattttccatacgtgagggacttcgttatgaacctggtgaattcactcgatataggtaacgacaacataagggtcggactggtccagttcagtgatacccctgtcaccgaattctcactcaatacttatcagacaaagagcgacatactgggccacctcaggcagcttcagcttcaaggcggctccggtctcaacacaggttctgccttgagctatgtatacgctaatcattttaccgaggccggcggctctcgcatccgtgaacacgttccacaactgcttttactgcttacagctggtcagtccgaagattcttatttgcaagcagccaacgccttgaccagagccggcatcctgactttttgcgtcggggcatctcaggctaataaagctgaactagaacaaatcgcctttaacccctcactggtttatctcatggatgatttttcttcgcttcccgctctcccccaacaacttatccagccgctaaccacatatgtttctggcggagtggaggaggtccctcttgcccagcccgaatctaagagagatatcctttttcttttcgatggatccgccaatctagtgggacaatttccagttgtgcgcgatttcttgtataagattattgacgagcttaacgtgaagccggagggaacacgcattgcagttgctcaatactctgatgatgtcaaggttgagtcaagatttgacgaacaccagtcaaagcccgagatactgaatttggtaaagcgcatgaaaatcaaaaccggaaaagccctaaatctgggttacgcccttgactacgcacagagatacatcttcgtcaaatccgcaggctcacgtatcgaggacggcgtactgcaatttttagttttacttgtggccgggagaagtagcgaccgggtggatgggcccgcatcgaatctgaagcagtccggggttgtgccctttatatttcaggccaagaatgccgacccagcggagctggaacagatcgtgctgagccccgcattcattttagcagctgaatcattgccgaaaatcggcgatttacatccgcagatcgtgaacctactgaaaagcgtacataatggagcgcccgcacccgtgtctggggaaaaagatgtggtatttcttcttgatgggtccgagggcgttagatctggctttccactccttaaagagttcgttcagagggtagtcgaatccttggatgtgggacaggaccgggtaagggtggccgtagtgcagtactcagaccgcacccgaccagagttttaccttaactcttacatgaataaacaggacgtggtcaacgcagtgcgacagctgactctgctagggggacctactcccaacaccggagccgcattggaattcgtattgaggaatatcctcgtaagctccgcagggtcccgcatcactgagggggtgccacagttactaatagtgttgaccgccgataggtccggagatgacgttagaaatccttcagtcgtcgtgaagcgagggggagcagttcctatcggcatcggcataggaaatgctgacatcaccgagatgcagacaatcagttttattccagatttcgccgtagcaatccccacatttcgccagctgggcactgtgcaacaggttatttcagaacgcgtaacacaactgaccagagaggaattgtcccgtctccaaccagtgctacagccactcccttctcctggagtcgggggaaagcgcgacgttgttttcctgattgacggttctcaatccgcaggccccgaatttcaatacgtccggactctaattgaaaggctggtggactatctggacgtcgggttcgataccaccagagtagctgtgatccagttttcagacgaccctaaagtcgaatttcttctgaacgcccactcctctaaagacgaagttcagaatgccgtgcagcgtcttagaccaaagggaggaagacagatcaacgttgggaatgcactcgagtatgtgtctagaaatatcttcaagcgtcccctcggatctaggatcgaggaaggggtacctcaattcctcgtgttaatttccagcggaaagtctgatgatgaggttgacgatcctgccgtcgagctaaaacagtttggcgtagctccattcaccatagcccggaatgcagaccaagaggagctggtcaagatttccctatcccccgagtatgtgtttagcgtgtctactttccgtgagctgccttcactcgagcaaaaactgttaacaccaattaccactcttacctcagaacagattcagaagctgttggcttctacacgatacccaccaccagctgtggagtcagacgctgcagacattgtgttccttattgactctagtgaaggcgtgagacctgatggcttcgcccacatccgtgatttcgtttcccgtatcgtgagacggttaaacattggcccttctaaagttagggttggggttgtccagttttccaatgatgtgttccccgagttctatctgaagacttacagaagccaggctccggttctggacgcaatccgcagattgaggttgcgtggcgggtccccccttaatacaggcaaagctcttgagttcgtagcacgcaatctgttcgttaaatcggccggctcacgtatcgaggatggagtacctcaacacttagtgctggtcctgggcggtaagtcacaggacgatgttagcagatttgctcaggtgatccggtccagtgggattgtgtcactaggtgttggcgacaggaacatcgataggactgaactgcagaccattacaaacgatcctcggttagtcttcaccgtgcgggagtttagagagttacccaacattgaagaaagaataatgaattcctttgggccatctgcagccactcctgcgccccccggcgtcgacaccccaccaccttcgcgaccagagaaaaaaaaggccgacatcgtttttctgctggatggcagcattaactttaggcgtgattcctttcaagaggtactgcgatttgtcagtgagattgtggacactgtgtatgaggatggcgattccattcaagtagggctcgttcaatataactccgacccgacagacgaattttttctgaaagatttctccaccaagcgacaaataatcgacgccatcaataaagtcgtgtacaagggcggccgccacgctaataccaaagtcggacttgagcacctcagagtcaaccacttcgtgcccgaggccggctctcggctggaccagagagtaccccagatcgccttcgtaatcactggggggaagtctgtcgaggacgcacaggatgtctcactagcacttacacagagaggggttaaggtgtttgcggtcggagtgaggaatattgacagtgaggaagtcggcaaaatcgcaagcaattccgctacagcttttcgagttggcaatgtccaggaactgtccgaacttagcgagcaggtactcgaaacacttcatgatgcgatgcatgagaccctgtgtcctggcgtgactgatgccgctaaagcatgtaacttggacgtgattctcgggtttgatggcagcagagatcagaacgtgtttgtagcgcaaaaaggatttgaatccaaggtcgacgccattctgaacagaatctcccagatgcatagagtgtcttgtagcgggggcagaagccctacagtaagagtttcagttgtggctaatacacctagcgggcctgtggaggcatttgatttcgatgaatatcagccagagatgcttgagaagtttcggaacatgaggtcacagcacccatatgttctcactgaagacaccctgaaagtttacctcaataagtttaggcagtcctctcccgactcggttaaggtggttattcactttacagatggtgcggatggagacctggccgacctacaccgggctagcgaaaatctcagacaagaaggagttcgggccctgattctcgtcggtcttgagcgcgtcgtgaacttagagagactaatgcacctcgaatttgggcgaggattcatgtatgaccgtcccctgagactcaacttactcgatctggactacgaattggcagaacagctagataacattgccgaaaaagcttgttgtggggtgccttgcaaatgttcagggcagcgcggggatagggggcccatcggctctattggccctaaaggcattccaggcgaggatggctatagagggtacccaggagatgaagggggacccggagagcgcggcccgccaggcgttaacggcactcaggggttccaaggatgcccaggacaaaggggagtgaaaggaagccgagggtttcccggagaaaagggagaggtgggggagataggacttgatggcctcgacggtgaggatggagataaagggctgccagggtcaagcggagaaaaaggcaatccaggcagacggggggataagggaccaagaggagagaaaggagagagaggcgacgtgggaatccggggtgatcccggcaatcccggccaggatagtcaggagcgagggccaaagggcgaaacgggcgatctcggcccaatgggcgtccccggaagagatggcgtgccaggaggtcctggcgagacggggaagaatggcggattcggaaggcgcggccctccaggtgcaaaggggaacaaagggggcccaggtcaaccagggtttgagggtgagcagggaactcgaggagctcaaggaccagccggtccagcgggccctccagggttgataggagaacagggtatctccggacctagaggaagtggaggtgcggccggcgcgcccggagagcggggaagaacaggcccacttggacgaaaaggcgaaccaggggagccgggtcccaaagggggaatcggcaaccggggtcccaggggagaaacgggcgatgatggtcgtgacggagtagggtcagaaggcaggagaggcaagaaaggcgaaagagggttcccagggtaccctggccctaaaggaaacccaggagagccaggtttgaatggcacaaccgggcccaaaggaattcgtggcagacgtggcaactccggacccccaggaatcgtaggacaaaaaggagatccgggctacccagggccggctggcccaaaaggaaaccggggtgactctatcgaccagtgcgcgctaatacagtcaatcaaagataaatgtccctgctgttacggaccattggagtgcccagtgttccccacagaactggctttcgctcttgatacatctgagggagtgaaccaggacacgttcgggagaatgagggacgtagttctgtctattgtgaacgatctgacaattgccgaaagtaactgtcctcgcggagccagagttgctgtcgtcacatacaataacgaggtaactaccgaaatcagatttgctgactctaagcgaaagagcgtgctgctcgataaaatcaagaatctacaggtcgctttgaccagcaagcaacaatctcttgaaactgctatgtccttcgttgccagaaatacatttaaacgcgtgcgcaacggttttctcatgcgcaaagttgcggtgtttttttctaacacccctacccgggcctcgccccagctaagagaagccgtgcttaagctgagtgacgctggaatcaccccgctatttttgacacgccaggaggaccgtcagttaatcaacgccctccagatcaacaatacagcagtgggacacgcattggtcctcccggccggtcgcgatctgaccgacttcttagagaatgtcttaacttgtcatgtttgcctcgatatctgtaacatcgacccctcgtgtggctttggatcttggagacctagcttccgagaccgcagagccgctggatccgacgttgacattgacatggctttcatccttgactctgctgaaactactaccctcttccagtttaacgaaatgaaaaaatacattgcgtatctcgtgcgacaattggatatgagccctgatcccaaagctagccagcacttcgccagggtggcagttgtgcaacacgcaccgagtgagagtgtggacaacgctagcatgcccccagtaaaagtcgaattcagcctgaccgattacggcagcaaagaaaaactggttgacttcctgagcagggggatgacgcagcttcaggggacacgggctcttggaagtgccattgaatacacaattgaaaacgtattcgagtctgccccaaacccacgcgatctgaaaattgtagtcttaatgctgacaggggaggtgccggagcaacagctggaggaagcccaacgcgtcattctgcaggccaagtgcaagggttacttcttcgttgtgctgggaatcgggaggaaagttaatattaaagaggtctataccttcgcctctgagcctaacgacgtgttctttaaattagtggataaatcaactgaactcaacgaggagccgctcatgcgatttggtaggcttttaccttctttcgtcagttcagagaacgccttctatctcagccccgatataagaaaacagtgcgactggttccaaggcgaccaacccacaaagaatctcgtcaagttcggccataagcaagttaatgttccaaacaatgtcacctccagccctacttccaaccctgtgaccaccacaaagcccgtgacgaccacaaagcctgtcacgactaccaccaagcccgtaaccactacaaccaaacccgtgacaatcatcaaccaaccttcagtgaaacccgcagccgctaaaccagcgcccgctaagcctgtcgcagccaagccagtcgcaacaaaaatggctaccgtgcgcccacccgtggccgtgaaaccagctaccgcagccaagccagtcgcggctaagccagcagctgtcagaccaccagcggcagccgcagcgaagcccgtcgctacgaaaccagaggtgccgagaccacaggccgccaaacccgcagccactaaacccgccacaaccaagcctatggtcaaaatgtctcgagaagttcaagtttttgagatcaccgagaattccgccaagctccactgggagagagcggagccgccaggaccctatttctacgatctaaccgtgacatctgctcacgatcagtccctggttctcaaacagaacttaaccgtgacggaccgtgtgattggaggtctcctggccggacagacctatcatgtcgccgtggtgtgctacctacggagccaagttagagccacttatcacgggagtttcagtaccaagaaaagccagccacctcccccacaacctgcaagaagcgcttccagttctacaatcaacctgatggtttcaacggagcccctggccctcactgaaactgacatttgcaaattgcccaaagatgaggggacgtgtagagattttattttgaagtggtattacgatccaaatactaagtcttgcgctaggttttggtacggcggatgcggtggaaatgagaacaagttcggcagccagaaagaatgtgaaaaggtgtgcgctcccgttctggctaaaccaggtgtgatttctgtgatggggacctag

SEQ ID NO: 230672 - RNA, 8931 nt, Artificial Sequence
  derived and/or modified sequence
augagaaagcauaggcaccuucccuugguggcaguauuuugcuuguuccuaucagguuuuccaacuacccaugcgcagcagcagcaggccgauguuaaaaacggagccgccgccgauauaauuuucuugguagauagcucuuggacaaucggugaagaacauuuucaguugguuagagaguuccuguaugauguugucaaaagccucgccguuggcgaaaacgacuuccacuucgcucuugugcaguucaacgggaauccucauacugaauuccuacugaauacauauaggacuaaacaggagguccugagccauaucagcaacaugaguuacauuggcggaaccaaucagacagguaaaggccuggaguauaucaugcagagccaucugaccaaggccgcggggagucgagccggggauggcgugccccagguaaucguggugcuuacagacggccacaguaaggacggauuggcccuaccuagcgccgagcugaagagcgcggaugucaaugucuuugcuauaggcguggaggaugcugaugagggagcccucaaggaaauugccucagagccauuaaauaugcauauguuuaaccucgagaacuuuaccucguuacaugacauugugggcaaccugguuucauguguucacuccuccgugucacccgagcgcgcuggugauaccgagacgcugaaggacaucaccguuauugaggucaacaaaagagauauuguuuuucugguggacgguucaucugcauuaggccuugccaacuuuaaugccaucagagacuucauugccaaagugauucagcgccuagaaauuggacaggaucugauacaaguggcuguagcucaauaugccgauaccguuagacccgaguucuacuucaauacccacccuaccaaacgggaggugauuacagcggucagaaagaugaagccuuuggacgggagugcauuguacacaggcagugcucuggacuucgugaggaacaaucucuuuacaagcagcgcggguuacagagcagcagaagguaucccaaaacugcugguccugauuaccgguggcaaaucgcuggacgaaauaagccaacccgcucaggagcucaagagguccaguauuauggcuuucgcgauuggcaacaaaggcgcagaccaggcagaacuagaggagaucgcuuuugauagcagccucguguucauuccggcugaauucagagcugcuccccugcaaggaaugcugccugguuugcuggcgccccugcggacccuauccggaacaccggaggugcauaguaauaagcgagacauuauuuuucuccuugauggcuccgcuaacguugggaagaccaacuucccauaugugcgggauuuuguaaugaaccucgugaacucucuugacauugggaaugacaauauucgcgugggccucguccaguuuucggauacaccugucacugaauucuccuuaaacacauaccaaacuaaaagcgauauccugggccauuuaagacaauugcagcugcaggggggguccggacucaauacaggaucagcacugagcuacguuuaugcaaaccauuucacagaggccggggggucccgaauucgcgaacacgugccucaguuacuccuccuccuuaccgcaggacaguccgaagauucuuacuuacaagcagcaaacgcauugacaagggccgggauacugacuuucugcgugggcgcaagccaggccaacaaagccgaacucgaacaaaucgccuucaacccaagucugguguaccucauggaugacuucuccucucugccugcucugccacaacagcugauucagccccugaccacauacguguccggagguguggaagaggugccacuggcacagcccgagaguaaaagagauauccuguuccuguucgacggcagcgccaaccuugugggccaguucccuguggugcgggacuuucuguacaaaaucaucgaugaguuaaacgugaaaccagaaggaacacgcaucgccguggcgcaguauagugacgacgugaaggucgaguccagauucgaugaacaucagagcaaaccagaaauucugaaccuggugaagcgaaugaagaucaaaacagggaaagccuuaaauuuaggguacgcucucgauuaugcgcagcgauauauuuucguuaagucugcgggaagucggauugaggauggcguccugcaguuccucguguugcuugucgcggggagguccuccgaucgggucgaugggccagcguccaaucuuaagcagucgggcgucguaccguucaucuuucaggcgaaaaaugcagauccugccgaauuagaacaaaucguccuguccccugccuuuauucuggcugcagaaucauugccuaagauaggagaccuccauccccaaauugugaaucuguuaaaaagugugcauaacggagcaccugcgcccgugagcggcgaaaaggacguaguguuccugcucgacgggucagaaggaguucgcagcggguuuccccugcucaaggaauuuguccagagagugguggagagccuggacgugggucaggauagagugcgcguggcaguugugcaguauucugacaggacacggccugaguuuuaucuaaauucuuauaugaauaaacaagacguggucaaugcaguuagacaacucaccuuguuaggaggacccacccccaauacuggagccgcacuggaguucguccugcgcaauauccuuguguccagcgccgggagcaggauaacagagggggucccacagcuccuaauugucuuaaccgcugacagaagcggcgaugacgugaggaaccccucagugguggugaagagagggggggccguuccgauuggaaucgguaucggaaaugccgauaucacugaaaugcagaccauuucuuucauucccgacuuugcuguugccaucccuacuuuuaggcagcuggggacaguccagcaagugaucuccgaacgcgugacacaacugacgcgcgaggagcucagcagguugcaaccagugcuccaaccucugccuagccccggcgugggcggaaagcgugauguaguguuccugauugacggcucucaaagugcuggacccgaguuucaguaugucagaacucuuauugagcgacuggucgacuaccuugaugugggguuugauacaacgaggguagcagugauucaguucagugaugaucccaagguggaauuucuuuuaaaugcacacagcagcaaagaugaggugcagaacgccguccagcggcucagaccuaaaggcggcaggcagauuaacguuggaaacgcucuugaauaugucucacgcaacauuuuuaagcgaccacucggcuccagaauagaggaagggguuccccaguuccuggugcugauaucuucagggaagagugacgaugagguggaugaccccgcaguggaacugaagcaguucggggucgccccauucaccaucgcucguaacgcagaucaagaggagcuggugaagauuucuuugagccccgaguaugucuucucagugagcacauuucgugaauuaccaucuuuagaacagaaguugcugacgccaaucacaacacugaccuccgaacagauccagaagcuccuggcguccacccgcuacccuccacccgcaguggagucugacgcugcugacaucguguuucugaucgauagcagugaaggugugcggccggaugguuuugcccacauucgagacuucgucagcagaaucguccguaggcuuaauauuggucccuccaagguucgcgugggcgugguucaguucucaaacgauguuuuucccgaauuuuaccucaagaccuaucgcucucaggcuccugugcucgacgcgauccggcgucuaagacuucgaggcggcaguccacugaauacaggaaaggcacuagaauucguggcccgcaaucuguuuguuaaaagugcuggcagccgcauagaggauggcgucccgcagcaucuggugcucguccucggcggcaagucccaggaugacgugucuagguuugcacaagugauuagaucuagugggauugugucucucggcgugggggaucgaaacaucgacaggacagagcugcagaccaucaccaacgacccgagacuggucuuuacagugcgagaguuccgcgagcugccaaauaucgaggagagaauaaugaacuccuuuggcccaagcgccgcaacgcccgccccaccuggcguggauacaccgcccccauccaggcccgaaaagaagaaagcugacaucgucuuuuugcucgacgguagcaucaauuuuagaagggauuccuuccaggagguacuccgguucguuucugaaauaguggauaccgucuaugaggauggggacuccauucaagucggccuaguccaauacaacucagacccuacggaugaauuuuuccugaaagacuucucuacuaagcggcaaauaauugacgcuaucaauaagguuguauauaaaggcggacgccaugcgaauaccaaggugggucucgagcaucugaggguaaaccauuuuguccccgaagccgguagcagacuggaccagagggugccacagaucgccuucgugauuaccgggggaaaaagcguggaagacgcccaggaugugagccuggcccucacccagcguggagugaaaguguucgccgucggugugagaaauaucgauucggaggaaguaggaaaaauugcuagcaacagugcuaccgccuuccgaguggguaacgugcaggagcuuagugagcugagugaacaaguccucgagacuuugcacgaugccaugcacgagacacuguguccgggagugaccgaugcggcuaaggccuguaaccuagaugucauuuugggcuuugauggcucccgggaucagaacguuuuuguggcucaaaagggcuucgaaucuaaaguggacgccauucuuaaccgcauuucgcagaugcacagagugucuugcuccggcggcagaucaccaaccguucgggucucaguggucgccaauacuccaucuggaccagucgaagccuuugacuuugaugaguaccagcccgagaugcucgagaaauucagaaauaugcguucacaacacccuuauguccugaccgaagauacacucaaggucuacuuaaacaaguucaggcagaguucgccggauucugugaagguggugauacacuucacugacggugccgauggggaucuggcagaucuccaccgcgcgagugaaaaccugagacaggaaggaguucgagcccucauuuugguuggacucgaacgaguuguaaaucucgagcgguugaugcaucuagaauucggucguggguucauguacgaccggccccugcgcuuaaaccugcucgaucuggauuaugaguuagccgaacaacuggauaauaucgcugaaaaggccugcugcggggugccaugcaaauguagcggccagcgcggcgacaggggcccuauuggaucaaucggaccuaaggggauccccggggaagauggcuaucggggguaccccggggacgagggaggcccaggcgagagaggucccccuggcgucaacgguacacaggguuuccaaggaugccccggacagcgcgguguuaagggaagccgcggauucccaggagaaaagggcgaggucggugaaaucgguuuggauggccuggacggugaggauggggauaagggacucccaggcucauccggggaaaaaggaaacccaggacggagaggagauaaggggccacguggggaaaagggagaacgcggcgacguggggauaagaggagacccagggaauccagggcaggauucucaggagagagggcccaaaggggagaccggugacuuaggccccaugggagugccagggcgugauggagugccuggggggccgggcgaaacugggaagaauggcggcuuuggaaggcggggccccccuggcgcuaagggaaauaagggaggcccaggucaacccggcuucgagggggaacagggaacaagaggcgcacagggcccugcaggccccgcaggcccuccuggccucauaggagagcaggggaucuccgggccccguggcagcgguggcgcugcgggggcgccuggggagcgcggccgcacugggccguuaggccggaagggagaaccuggggaaccaggcccuaaagggggcaucgguaaccgcggccccagaggagaaacuggagaugacggccgagauggcgugggaagugaaggccgucguggcaagaaaggggaaagaggcuucccaggcuaccccggaccuaagggaaauccuggagagccuggacugaacggaaccaccgguccaaaaggaauuagaggccgucguggaaauucuggccccccaggcaucgucggccagaaaggagauccaggauaucccggccccgcaggaccuaaagggaaccggggcgacuccauugaccagugcgcuuuaauccagucaauuaaggacaaaugcccgugcugcuauggaccguuggagugcccagucuuccccacugagcuggccuuugcccucgauacuuccgagggcgucaaucaagauacguuugggagaaugcgggaugucgugcucaguauugucaacgaccugacuauugccgaaaguaacugcccacgcggcgcucggguggccguggugacuuauaacaaugaaguaacgacugagauaagauuugcagauucaaaaaggaagucggugcuucucgacaagauuaaaaauuugcagguggcccuuaccucuaagcagcagagccuggaaacggcaaugagcuucgucgcccgaaacaccuucaagcggguucggaacggcuuuuuaaugaggaagguggccgucuuuuucucaaacacccccacacgggcgaguccacaacucagggaggcagugcuuaaacucucagacgcuggaaucacuccgcuguuucugacccggcaggaggacaggcagcugauaaacgcccuccagauuaauaacacugccgugggccaugcucuuguauugcccgccggccgagaucugacagacuucuuggaaaaugugcucaccugccaugugugucucgacaucugcaacaucgauccaucuugcggguuuggcucauggagaccauccuuccgagacagaagagcagccgggucagauguagauauagacauggcuuucauucuggacagcgccgagacuacaacccuguuccaguucaaugagaugaagaaauauauugccuaucucgugcgccaacucgauaugucuccagauccaaaagcaagccagcacuuugccaggguugcugugguacagcacgcaccaucugagagcguagauaacgcaagcaugccccccguaaagguggaguuuucucuaaccgauuauggguccaaggaaaaacugguggauuuccucaguagggguaugacccaauugcagggcacccgggcccuuggaagcgccauagaauacaccaucgagaauguuuuugaauccgcaccuaauccaagggauuuaaaaauagucgugcugauguugaccggagaggugccugagcaacaguuggaagaggcucagagagucauuuugcaggccaagugcaaaggguauuuuuuuguggugcucggaauaggacgaaagguuaauaucaaggagguguacacauucgcuagugagccuaaugauguguuuuucaaacugguggauaagagcaccgagcuuaaugaagagccucugaugcguuuuggccgucuacugcccucauucguuagcucugagaaugcauucuacuuaaguccugauauccgcaaacagugcgacugguuccagggcgaccagccuacaaagaaccuggucaaauucggucacaaacaggugaauguccccaacaacgucacuucuucccccacgaguaacccggugacuacaacuaagccagucaccaccacuaagccaguuaccacaacaacgaaaccugugacaacaacaacaaaacccguuacgaucaucaaucagcccagcgugaagccugcagcagcuaagccugcuccugcaaagcccgucgcugccaaaccuguggcuaccaaaauggccacuguaaggcccccugucgccgucaagcccgcuacggcagccaagccaguggcagccaaaccggcugcagugagacccccagcggccgccgccgcuaaaccgguggcaacaaagcccgaagugccuagaccacaggccgcuaaacccgcugccacgaagcccgccaccaccaagccuauggucaaaaugucccgcgaaguccaaguguuugagauuacagaaaacagugcgaagcugcauugggagagagcagagccaccugggccauauuucuaugaucuuacagucacaagcgcucacgaucaaagccucguucucaagcaaaaucucaccgugacggacagggucaucggagggcuccuggcugggcagaccuaucacguugccgucguguguuaucuccgaucucaagucagggcuacauaccacggaucuuuuucuaccaaaaagucccaaccuccccccccucagcccgcgcgcagcgcauccuccucaacuaucaaucucauggugucaaccgagcccuuggcucucacagagacagauaucuguaaacugcccaaagaugaagggacauguagagacuuuauucugaagugguacuaugaucccaacacgaaauccugcgcucgguuuugguaugguggaugcggggguaacgagaacaaguuugguagucaaaaggaaugcgagaaagucugugcacccgugcucgcgaaacccgggguaauuucaguaauggggaccuag

SEQ ID NO: 230673 - RNA, 8916 nt, Artificial Sequence
  derived and/or modified sequence
augcggaaacaccgccaccugccacucgucgcuguuuucugccucuuucugucaggauuucccacuacucacgcccaacagcaacaggcggcgcaggauucagcugauaucaucuuucugauugauggaucuaauaauacuggcucugugaauuucgcagugauccuggacuuccuggugaaucugcuggagaagcucccuauuggcacccagcaaauuagagugggggugguucaguucagcgacgaacccaggacuauguuuucgcuggauacauacucaaccaaagcccaagugcuaggcgcaguuaaggcccugggguucgcuggcggugaacucgcuaacaucggccuggccuuggacuucguuguggaaaaucacuucaccagagcuggcgggucccgugucgaagagggagugccccagguccugguauuaaucagugccggucccucgagugaugagauucgauauggcgugguggcccucaagcaggccucuguuuuuucguuugggcucggggcccaggcugcaucccgggcugaacuacaacacauugccacagaugacaaucugguguucacugugcccgaguuccggagcuucggggacuugcaggaaaaguuauugccuuauauagugggcguggcccagaggcacaucgugcuuaaacccccgacuauagugacccaagucauugaggugaacaagcgugacaucgucuuucuaguggaugguucuucagcuuuaggccucgcuaacuuuaacgcgaucagggacuucaucgccaaaguaauucagcgacucgagauaggacaggaccucauccagguggccguggcacaguaugccgauaccgugcgacccgaauuuuacuucaacacccaucccaccaagagggaggugaucacugcugugcguaaaaugaagccgcucgauggcagcgcacuuuacacuggaucagcccucgacuuugugcgcaauaaccuguucacuuccuccgcaggauauagggccgcagaaggaauaccaaaacugcucgugcuuauuacgggcgggaagagccuggaugagaucucucaaccugcccaagaacugaagcgcucuucaauaauggcguuugccaucgguaacaagggugcagaucaagccgaacuggaagaaauagccuuugauucgucccucguuuuuauaccagcugaauuccgcgccgcacccuuacaaggcaugcucccggggcuucucgcuccccugcgcacgcugucaggcacaccugaggugcacucaaacaagagagauaucauauuccuauuagaugggagugcaaacgugggaaaaacaaauuuuccuuacguucgggauuuugucaugaaucuggugaacagucucgacaucggcaaugauaauauucgggucggacucgugcaguuuagcgacacaccagugaccgaauucucccuuaacacauaccagaccaaguccgacauucugggucaccugcgccagcuccagcuccaaggcggcucuggccugaauacggguucugcguugucguauguauacgcaaaucacuucaccgaagccggcggaagcagaauucgggaacaugugccgcaguuacugcugcucuuaaccgcuggucagucugaagacucuuauuugcaggccgccaaugcccugacacgggcuggcauacuuacauucugugucggcgcuucucaggccaacaaggcugaauuggaacagauugccuuuaaucccucacucguguaucugauggaugacuucaguucccugccugcccucccgcaacaacucauacagccuuugacuacuuaugugagugggggaguggaagaggucccacuugcccagccggagagcaaacgggacaucuuguuucuguuugauggcucugccaaucuuguuggccaguuucccguagugagggauuuccuguacaaaaucaucgaugagcuaaaugucaaaccagaaggcaccaggauugcagucgcacaguacagcgacgauguuaagguagaaucccgguucgaugagcaccagucuaagccagagauacucaauuuggucaagaggaugaagauuaaaaccggcaaagcccuaaaccugggauacgcccucgauuaugcacagcgcuacauuuucgucaagagcgcaggcucacgaaucgaggacggcgugcuccaauuccuuguccucuugguagcagggagaucaucugacaggguggauggaccggcuagcaaucuuaagcagagugggguggugccguucauauuccaagcaaaaaacgccgacccugcggagcuagagcagaucguucugaguccugccuuuauccuagcagccgaaagcuugcccaaaaucggugaccugcacccacagauagugaaccugcuuaagagcgugcauaauggagcuccugcgcccguaucgggagaaaaagaugugguguucuuacuggauggguccgaagggguaagaaguggcuuuccauugcucaaagaguucgugcagagggucguggagucgcuggauguuggacaggauaggguacgagucgccguggugcaguacucagacagaacuaggcccgaguucuaccugaacagcuauaugaacaaacaggaugugguuaacgcgguaagacaguuaacucuccucggagggcccaccccuaauacgggcgccgcucuggaguuuguauugcgcaauaucuuggugucuuccgccgggagcagaaucaccgaaggggugccgcagcuucugauuguguugacugcugaucguagcggggaugauguacgcaauccaagcgucguuguaaaacggggcggcgccguucccauugguaucggcaucgggaacgccgacaucacagaaaugcagacaaucagcuuuauuccagacuuugcaguggccauaccuaccuuccgccagcugggaacaguacagcaggugaucucugagcgagucacccagcuuaccagagaagagcucucucgccuucagccugugcugcagccucugcccaguccaggggucggaggaaagcgcgauguugucuuucugauugaugggucccagagugccggaccugaguuucaguaugugaggacauugauagaaagacugguugacuaccuugauguaggauucgauaccacacggguggcgguuauacaguucagugaugacccaaagguggaguuccucuuaaacgcucauaguuccaaggacgaagugcaaaaugcaguucagagguuaaggcccaaggggggcaggcaaauuaaugugggcaaugcacucgaguaugugucaagaaauaucuuuaagagaccucugggcaguaggauagaggaaggugucccccaguuucucguccucaucuccagcggcaaaagcgaugaugaaguagacgaucccgcuguggaacugaagcaguucggugucgccccauucaccaucgcccguaacgcagaccaggaggagcuaguuaaaaucagccuuucacccgaguauguguucuccguguccacuuuuagggaacuuccaagucuggagcagaaauuacuuacccccauaacgacucugacaagugaacagauacagaaacugcuggcaucuaccagguaucccccccccgcuguggagucugaugccgcugauaucguuuuccuuauagauucuucagagggggugcguccagacggcuuugcucacauccgagacuuugugucuaggauugucagacggcucaauaucgguccuucuaagguccgaguuggggugguucaguucuccaaugauguuuuucccgaguucuauuugaagaccuaucgcagccaggcuccaguucuagacgccauuaggcgacuccgccuccgggggggaagcccacugaauacagggaaagcgcuugaguucgucgcaagaaaccuguucgucaaaagugcagggucucguauugaggauggggucccacaacauuugguucuggugcugggggggaaaucucaagaugacgugucaagguucgcgcagguaaucagaaguuccggcauugugucacugggcguuggggacagaaauauagauaggacugagcuccagaccauuacuaaugauccccgacugguauuuacagugcgcgaauucagagaauugccuaauaucgaagagcgaaucaugaacagcuucggaccuucugcugcaacaccagcuccgcccggugucgauacaccuccgcccuccaggccugaaaaaaaaaaagcagacaucgucuuucugcuggaugggaguaucaacuuccgccgggacaguuuucaggaaguauuaagauuuguaucagagauuguggacacaguguacgaagacggggacucaauucaagucggccuagugcaauacaauuccgauccgacugaugaguucuuuuuaaaggauuucucaacuaagcgccagauuaucgaugccauaaauaaaguuguguacaagggugggagacacgcaaacacuaaggucggccuggagcacuugagggugaaucauuucguuccugaagccggcucucggcuggaccaaagggugccacagaucgcauucgucauaacagggggcaagucugucgaagaugcccaggaugucucacuugcccugacccagcgaggagugaagguauuugcugugggagucaggaauaucgacucagaggagguuggcaaaaucgcaagcaacuccgcgacugcauuccgcguagggaacguucaagaacugucugagcugucugagcaaguauuagagacuuugcaugacgccaugcacgagacacucugcccaggugucacagacgccgcgaaggcgugcaaccuggaugucauccuggguuucgaugggagucgcgaucagaacguguucguggcucaaaaagguuucgaguccaagguugaugccauccugaacagaaucagucagaugcauaggguaagcuguucaggcggccggucucccacagugcgcgugucugucguugccaauaccccaagcgguccggucgaagcuuuugacuuugaugaguaccagcccgagaugcuagaaaaauuucgaaauaugagaucucaacacccuuauguguugaccgaagauacccucaaaguuuaccugaauaaauuuaggcaaucuuccccagacucagugaagguggucauccauuuuacagauggcgcagauggcgaucuugcagacuugcauagagccagcgagaaucuccgacaggagggagugcgggcacucauccucgucggccuagaaagagucguuaacuuggaacggcugaugcaucuggaguucggcaggggauuuauguacgaccgcccacuucgccuuaacuugcuggaccuggauuacgagcucgccgaacagcucgauaauaucgcagagaaggccugcugcggggugccgugcaaguguucugggcaacgcggcgaccggggucccauaggaagcaucggcccaaagggaauuccuggugaggauggguauagaggcuaucccggggaugagggcggaccuggcgaaagaggcccucccggaguuaacggaacucagggauuucaggguugucccggccagcguggaguuaaagguagcaggggcuucccaggcgagaagggagaggugggugaaaucggacuagauggauuggacggcgaggacggagauaaaggacugccugguuccagcggugagaaggguaacccuggaaggagaggggauaagggcccacguggugagaagggggaaaggggggacguugguauccgcggggauccuggaaaucccggccaagauagucaggagcgggggcccaagggggagacuggugaucuggggcccaugggcguuccugggcgagacggugucccaggcggaccuggagaaacaggcaagaacgggggauuuggacgcaggggaccgcccggagcaaaagggaauaagggcggaccaggccagcccgguuuugaaggugagcagggaacccgcggugcacaggggcccgccggaccagcuggcccccccggucugaucggagagcaggggauuuccggaccacgcgguaguggcggugcagcgggggcuccuggagagcgggggagaaccgggccucuggggcggaaaggcgagccaggcgagccaggacccaagggggguauugguaacaggggcccuaggggcgaaacgggcgaugacggucgagauggagugggaucugaggggagaagaggaaagaaaggggagaggggauuuccaggguacccgggacccaaaggcaauccuggagaaccuggccugaacgggacaacuggccccaagggcaucagaggcaggcgcgguaacagcgggccuccaggcauugugggccagaaaggagacccugguuauccuggccccgccggccccaaggguaacaggggugauuccaucgaccagugcgccuugauucagucaauuaaagacaaguguccaugcuguuauggcccauuagaauguccugucuucccaacugaguuagccuuugcccucgacacuuccgagggcgugaaucaagacacauucggcaggaugagggacgucguucuuucuaucgucaaugaucuuaccauugccgaguccaacugcccuaggggggcucguguggccgucgugacauacaauaaugagguuacuaccgagauuagauucgccgacuccaagcgaaagagcguccugcucgauaagaucaaaaaccuccagguugcacugaccaguaaacagcagagccucgagacugccauguccuucguggccagaaauaccuucaaacgcguucguaacgguuuccucaugcggaagguggcuguguucuuuaguaauacuccaaccagggcaaguccgcagcuucgcgaggcgguccugaaguuaucagacgcaggaaucacaccucuuuucuugacaagacaggaggacagacagcucauaaacgcccuacagauuaacaauacugcuguaggacacgcacuuguauuaccugcuggccgcgauuugacagauuuucuggagaauguucugacaugucacgugugccuggacaucugcaacaucgacccuucuuguggauuuggaucguggcgccccuccuucagagaccguagagcugcuggguccgacguggacaucgauauggccuucauucucgacuccgcugagacuaccacucucuuccaguucaacgaaaugaaaaaauauauugccuaucucgugcgccaguuggauaugagccccgaccccaaagcuucgcaacacuucgcccgcguugcagugguucagcacgcaccguccgaauccguggauaaugcaaguaugccacccguuaaaguggaguuuagccucacugacuaugguuccaaggaaaaacugguggauuuccugucccggggcaugacucagcuccagggaacucgagcccugggaagcgccauagaguacacaaucgagaaugucuucgaaagcgcgccaaacccucgagaucuuaaaauuguaguuuugaugcuuaccggagaggugcccgagcagcagcuugaggaggcacaacgcgucauucuucaagccaaguguaaggguuacuuuuuugugguucucgggaucggucguaaagugaacauaaaggaaguguacacauucgcgucggagcccaacgacgucuuuuucaagcuuguggacaagucuaccgaacuaaacgaagagccucugaugagauuuggccgacugcucccaucuuuugucucgagcgagaaugcauucuaucuuucccccgacauccggaaacaaugcgacugguuucagggggaucagccgaccaaaaaccucgugaaauuuggucauaagcaggugaacgugccaaauaaugugaccucuucuccaacauccaacccugugacaacaaccaagccaguuacaaccacaaagcccgucacgacuacuacuaaaccgguaacgacuacaacuaaaccugugacuaucauuaaccagccgagcgugaagcccgcugccgcaaagccagcgcccgccaagccuguagcggcaaagcccguggccaccaaaauggccacugugcgaccacccguggccguuaagccugcgaccgccgcaaaaccagucgcggccaagcccgcggccgugagaccuccggcugcagcggccgcuaaaccugucgcgacuaagccagaagugccuaggccccaagcggccaaaccugcggcaaccaagccugccaccaccaagccaauggugaagauguccagggaggugcagguguuugaaauuacggagaauucagccaaauugcacugggaacgagccgagccuccagggccauauuucuacgaccucacaguaacaucagcccacgaucaaucccugguucugaagcagaaccugaccguuacugauaggguaauuggaggacuucuggcaggucagacuuaccauguggcuguugucugcuaucuccggagucagguucgggccacauaucauggguccuucaguacaaagaaaagccagccucccccuccccaaccugccaggagcgccucaagcuccacaaucaaccugauggugaguacggagccacuugcucuuacggaaacagacauuugcaaacugcccaaggacgaggggacuugucgggauuucauacuuaagugguauuacgaucccaacacuaaguccugcgcaagguucugguaugguggcugcggagggaacgagaacaaguuuggcucgcagaaagagugcgagaagguaugugcacccguccucgcuaaacccggggugaucagugugauggguaccuag

SEQ ID NO: 230674 - RNA, 8916 nt, Artificial Sequence
  derived and/or modified sequence
augaggaagcacagacaucugccacugguggcuguauuuugccuguuccugaguggcuuccccaccacccacgcccagcagcagcaggcagcccaagacuccgcagauaucauauuuuuaauugacggcagcaacaauaccggcucggucaauuucgcaguuaucuuagacuucuuagugaaccugcuggaaaaguuaccuaucggcacacaacagaucagggugggaguaguccaauuuagcgaugagccuagaacaauguuuagccucgacacauauuccacuaaagcccaggugcugggcgcuguuaaagcucugggguuugcagggggcgagcucgccaauaucggccucgcucucgauuucguuguggaaaaucacuucacuagggccgggggcucccggguagaagagggcgugccgcagguccugguucucauuagcgccgguccuagcagcgaugaaauuagauacggagucgucgcauugaaacaagccucagucuuuucuuuuggccucggggcacaagccgcuucuagagcugaguugcagcauaucgccacagacgacaaccugguuuucacuguuccugaguuuagaucauucggagaccugcaggaaaagcuucugccguauaucguggggguggcucagcgccacauaguguugaaaccacccacaaucgugacacaaguaaucgaggugaauaaacgcgauauaguguuccucguggauggcucauccgccuugggacucgccaauuuuaacgcaauccgggauuucaucgcaaaggugauucaaagguuggagaucggacaagaucuaauccaaguggcugucgcacaguaugccgacacggugcguccugaauuuuacuuuaauacgcauccaacaaagcgggaggugauuaccgcugugaggaagaugaagccccucgauggaagugccuuguauacggguuccgcuuuggacuuugugaggaacaaucuuuucacaagcucugccggcuaucgggccgcagaggggauucccaagcugcuggugcucauuaccggcgguaaaucucuggacgagaucagucagccagcccaggagcuuaaaagaucaucuaucauggcuuucgccaucgggaacaaaggcgccgaccaggcagagcucgaagagaucgcauuugacuccucacucguguucauuccagcugaguuccgugcugcuccauuacaaggcaugcugccggggcuacucgcccccuugcggacgcugagcggcacaccagaagugcacucuaauaaacgcgacauaauauuccuacucgacggcucagcgaacguaggcaaaacgaacuuucccuaugugagggauuuugugaugaaucucgugaauaguuuggauaucggcaaugacaacauacgggucggccugguucaguucuccgacacaccugugacugaauuuagucugaacaccuaucagacaaaaagcgacauccuggggcaucugcgccagcuacaacugcagggggguuccggcuugaauaccggaucagcacucucauacguuuaugccaaucauuuuaccgaggccggaggaagcaggaucagggaacauguaccccagcugcugcuguugcucacugcaggacaguccgaagacucuuaccuucaggcagcaaaugcucucaccagagcugguauccucacauucugugugggcgccucccaggccaauaaggcugaauuggaacaaauugccuucaacccaagccuuguuuaucuaauggaugacuuuucaagccugcccgcucugccgcagcagcucauccagccacuuacgacauaugucucaggcggcguggaggaagugccacuggcacagccagaaagcaaaagggacauucucuuucucuucgacggaagcgcaaaccuuguaggccaauuucccguaguaagagauuuccuguacaaaauuauagacgagcucaacguuaaaccugaaggaacgcgaauugccgucgcacaguauagcgacgacgugaaaguggagucaagauucgaugagcaccagaguaaaccugagauacugaaccucgugaagcguaugaaaaucaagacggggaaggcacugaaucugggguaugcacucgauuaugcucagcgguacauuuucgugaagucagcuggcucaagaauagaagauggaguguugcaauuucuugugcugcuuguagcaggccgaucaucggauagaguggacggucccgcaucuaaccuuaaacaguccggggucgucccuuucauuuuucaagcuaaaaacgcagacccagccgaacuugaacaaauagugcugagcccagcuuuuaucuuggcagccgaaucccuuccgaaaaucggagaccuucacccacaaauugugaaccuguugaagucaguccauaauggggcccccgccccagucucaggcgagaaagacgugguguuccugcuggauggcagcgaggggguaagaagcggcuuuccccucuugaaggaguuuguccaacgggugguggaaucauuggauguuggccaagacagaguaagagucgcaguggugcaguauucagauagaacuagaccagaauucuaccugaauuccuauaugaauaagcaggauguugugaaugccguacggcaacugaccuuguugggaggcccuacgccuaauacuggugcagcucucgaauuuguucugaggaauauucuggugaguagcgccggaagccgcauaacugagggcgugccgcaacuucugauaguccucacugcagacaggaguggcgaugaugugcggaauccuuccgugguggugaagagaggaggcgcuguaccuaucgggauuggaauuggaaacgccgacauaacagaaaugcagaccaucagcuucaucccugauuuugcgguggcuauuccaaccuuucgucagcuaggcacaguucagcaaguuaucucagaaagagugacucaacugaccagagaggaauugucccgucuccaaccagugcuacagccacucccuucuccuggagucgggggaaagcgcgacguuguuuuccugauugacgguucucaauccgcaggccccgaauuucaauacguccggacucuaauugaaaggcugguggacuaucuggacgucggguucgauaccaccagaguagcugugauccaguuuucagacgacccuaaagucgaauuucuucugaacgcccacuccucuaaagacgaaguucagaaugccgugcagcgucuuagaccaaagggagggcggcagaucaacguggguaaugcccuggaguauguuucccggaacaucuuuaaacggccccugggcucccggauugaggaaggggucccucaguuccucguucucaucagcagcgggaagucagaugacgaaguggaugauccagcaguagagcugaagcaguucgggguugcuccuuuuacaaucgcccgaaacgcugaccaagaagagcucgugaagaucucucugucaccagaauacgucuuuucaguuucaaccuuccgugaacucccaucgcuagagcagaaacugcuuacaccgaucacaacucugacaagcgagcagauucagaagcuucuggcgagcacucgcuaucccccccccgccguagagagcgaugcagcagauaucguguuuuugaucgacaguuccgaaggagugcgcccagacggguuugcucauaucagagauuucgugucacgaaucguccgucggcuuaacaucggaccuaguaaagucagagugggggucguucaauucuccaaugauguguuucccgaguuuuaccuuaagacuuauaggagccaagcaccgguguuggaugcaauacgucgguugaggcuuagggguggauccccccuuaacacagggaaggcauuagaauucguagccagaaaucuguucgucaaaagcgccggcucaagaaucgaggacggcgugccucagcaccugguguugguccucggaggaaagucucaggacgaugugucuagauuugcucaggucauucgguccagcggaaucgugagccugggcgucggggaccgcaacauugaccgaaccgaauuacagacgauaacaaacgaucccagacuggucuucacgguucgcgaauuuagggaauugcccaacaucgaggagaggauuaugaacucuuucggcccaagcgccgccacgcccgcuccgccuggaguggacaccccgcccccuucacggccagaaaaaaagaaggcagauaucguguuccugcuggacggaucaaucaacuuccggcgggauucauuccaggagguauugcgcuuugugagugagaucguggacaccguguacgaagauggagacucgauccaggugggguuggugcaguacaacucugauccuaccgaugaauuuuuccugaaggauuuuuccaccaagaggcaaaucaucgacgcuauuaauaagguaguguacaaggggggucggcacgcaaauacgaagguuggccuugaacaccugcgagugaaccauuuugugccagaggcggggucccgccucgaucagagagugccccaaaucgccuucgucauuacugggggaaagagcguagaagaugcccaagaugucagcuuggcuuugacucagaggggggucaaagucuucgcugugggcguacgcaauauagauucugaggagguugguaaaauagcaucgaauagugcaacugcuuuccgcgugggaaacguccaggagcugagugagcuuagcgaacaagugcuggaaacccugcacgacgccaugcacgagaccuuaugccccgguguaacugaugcugcuaaggccuguaacuuggauguuaucuugggguucgacgguagccgcgaucagaacguauucgucgcgcaaaagggauucgagucgaaaguggaugcaauacugaauagaaucucucagaugcaucgcguguccuguagcggcggccgauccccuaccgugcgugucagcguggucgcuaauacucccucgggcccggucgaggccuuugacuuugacgaauaccagcccgaaaugcuggaaaaguuccggaacaugcggucucagcauccauauguucuuaccgaggacacacugaagguuuaccucaauaaauucagacagucaaguccagacucgguuaaagucgugauucacuucacagauggcgcugacggagaccuagcugaccuacauagagcaagcgagaacuugcgucaagagggaguacgagcuuuaauccuugugggcuuggaaaggguugucaauuuagaacgguugaugcaucucgaguucggccgcgguuucauguacgacaggccgcuccgcuugaaccugcuugaccuggacuaugaacucgcugaacaacuggacaauaucgcagagaaggcauguuguggugugccuugcaaauguagugggcaaaggggagaucgcggucccauaggaucuaucgggccgaagggaauccccggcgaggauggcuacaggggauacccuggggacgaaggaggaccuggggagaggggaccaccaggcgugaacgggacucagggcuuccagggaugcccaggacagaggggcgugaaggggucuagaggcuucccuggagagaagggagagguuggggaaauugggcuggauggccuggauggcgaagacggcgacaaaggucucccuggcaguuccggugaaaaggggaauccuggcagacgcggggacaagggaccuaggggagaaaaaggggaacggggugaugucgggauucguggcgacccuggcaacccagggcaagacagucaggagaggggucccaagggugaaacuggagaccuugggccaaugggagugccaggccgagauggagugccuggagguccgggagagaccgggaaaaaugguggguucggaaggcgcggucccccuggugcaaaggggaacaaagggggcccaggucaaccaggguuugagggugagcagggaacucgaggagcucaaggaccagccgguccagcgggcccuccaggguugauaggagaacaggguaucuccggaccuagaggaaguggaggugcggccggcgcgcccggagagcggggaagaacaggcccacuuggacgaaaaggcgaaccaggggagccgggucccaaagggggaaucggcaaccggggucccaggggagaaacgggcgaugauggucgugacggaguagggucagaaggcaggagagguaaaaaaggcgagcggggcuuuccggguuaucccgggccuaagggaaacccuggggagccgggacugaauggcaccacgggccccaaagguauccgcggacgucgcggcaacucagggcccccuggaaucguggggcagaagggcgaccccggauacccugggccagccgggccaaaaggaaauagaggugauuccauagaccagugugcacugauacagagcaucaaggauaagugucccugcuguuaugguccacuggaaugcccagucuuuccuacagaacuugcuuucgcucucgacacuucugaaggagugaaccaggacacguucggacguaugagggaugugguguuguccaucguaaaugaccuuacaauugcagaguccaauugcccccggggagcacgcguggcugugguuacauauaacaacgagguuacaacugagaucagguucgccgacucaaagaggaaaagugugcuacuggauaaaaucaaaaaucuucagguggcuuuaacuuccaaacaacagucuuuggaaacugccaugucauuuguggcucgaaauaccuucaagagagugaggaacggcuuccugaugcggaaagucgccguauucuuuucuaauacccccacgagggcaucaccccaguugagggaggccgucuuaaagcuaucagacgcuggcaucacaccucuguuccuuaccaggcaagaggaucgccagcugaucaaugcccugcaaaucaauaauacggccgugggucacgcucugguacuuccagcaggaagggauuuaacugacuuucuagagaaugugcugacuugccacguaugccuagauauaugcaacauagaucccaguugcgguuucgggaguuggcgcccuagcuuccgagaccgcagagccgcuggauccgacguugacauugacauggcuuucauccuugacucugcugaaacuacuacccucuuccaguuuaacgaaaugaaaaaauacauugcguaucucgugcgacaauuggauaugagcccugaucccaaagcuagccagcacuucgccaggguggcaguugugcaacacgcaccgagugagaguguggacaacgcuagcaugcccccaguaaaagucgaauucagccugaccgauuacggcagcaaagaaaaacugguugacuuccugagcagggggaugacucagcugcaggguacccgggcccuugggagugcaaucgaguacacaauugaaaacguguucgagagugcuccaaaucccagggaccugaagauugugguccugaugcucacgggcgaggugccugaacaacaacuggaggaggcccagagagugauccugcaggccaagugcaaggguuauuuuuuugucguacuggggaucgggcgaaaggucaacaucaaggaaguauacacauucgcuuccgaaccuaaugauguauucuucaaacucguagauaaauccaccgagcugaacgaagagccuuugaugcgauucgggcgacugcuuccgucguucguaucuagcgagaaugccuucuaucuaucuccugacauacggaagcaaugcgauugguuucagggugaccaaccuacuaaaaaccugguaaaguucggccauaaacaggugaacguucccaacaacgugaccuccagucccacuagcaauccugucacuaccacaaagccuguuaccacuaccaagcccgugacaacuacaacuaagcccgugacaacgacaacaaaaccaguuacgauuaucaaucaacccuccguaaaacccgccgcagcaaagccggccccagccaagcccguugcugccaaaccuguggcaaccaagauggcuacuguacggccacccguggcagugaagcccgcaacagccgccaaaccaguggcagcaaagccugccgcgguucgaccuccagccgccgcugcugcgaaaccaguagccaccaaaccggaggugccacgaccccaggcugcaaagccagccgcgacuaagccagcuaccacaaagccaaugguuaaaaugucaagagaggugcagguauuugagauuacugaaaacagcgccaagcuccauugggagagggcugaaccaccuggccccuacuucuacgauuugacagugaccucagcucaugaccaaagucugguguugaaacagaaucugacagugacagauagagugauugguggccuucuggcuggccagaccuaucauguugcagugguuuguuaccugcgaagccaaguucgcgcaaccuaccauggaucauuuucaacaaagaaaucacagcccccaccuccccaaccugcccgcagcgcuucuagcucuaccauaaaucuuauggugaguacagaaccccuagcguugacugagacagacaucugcaaacuccccaaggacgagggaacauguagggauuucauccugaagugguacuaugauccgaauacuaaaagcugugcaagauucugguauggcggaugcgggggaaaugaaaacaaguucggaagccagaaagagugugagaaggugugugccccgguucucgccaagccuggugugaucucggugaugggaacuuag

SEQ ID NO: 230675 - RNA, 8931 nt, Artificial Sequence
  derived and/or modified sequence
augagaaagcauaggcaccuucccuugguggcaguauuuugcuuguuccuaucagguuuuccaacuacccaugcgcagcagcagcaggccgauguuaaaaacggagccgccgccgauauaauuuucuugguagauagcucuuggacaaucggugaagaacauuuucaguugguuagagaguuccuguaugauguugucaaaagccucgccguuggcgaaaacgacuuccacuucgcucuugugcaguucaacgggaauccucauacugaauuccuacugaauacauauaggacuaaacaggaggugcucucccauauaucuaauauguccuauaucgggggaaccaaucagacagguaaaggucuagaauacaucaugcagucccauuuaacaaaggccgcgggaucacgagcuggagaugggguuccucaggugaucgucguucugaccgauggacacaguaaagacggccuggcacuccccuccgccgaacugaaaagcgcugaugugaauguguucgccauuggagucgaagacgcugacgaaggugcacucaaagaaaucgccucugaacccuugaauaugcacauguucaacuuagaaaauuucacguccuugcaugauauuguugggaauuuggugaguugugugcauagcagcguuaguccggaacgugcuggugauaccgagaccuuaaaggacaucacugugauugaaguaaacaagagagacauuguguuccugguagauggauccagugcccucggccuggcaaauuuuaacgcaauuagagauuucauugcuaaaguaauucagcggcuggaaaucggccaggaccugauccaagucgcugucgcucaguacgcugacaccguucggcccgaguucuacuucaacacccacccuacuaagcgggaggugauuacugccgucaggaaaaugaaacccuuggaugguuccgcccuguacacuggauccgccuuggacuucguacggaacaauuuguuuaccucuucagccggcuauagagcugccgaggggaucccuaagcugcucguuuugauaaccggaggaaaaucuuuggacgagaucucccagccagcucaggaacuuaaacgcucuuccaucauggcuuucgcuaucgggaacaagggagcugaccaagcugaacuggaagaaauagcauucgauucuucacugguuuucaucccugccgaauucagagccgcuccacugcaagggaugcuuccaggacugcuugcgccucugagaacauugaguggaaccccagaagugcacucuaauaaaagagauauuauuuuccugcuagacgguagcgcuaaugucggaaaaaccaauuucccauacgugcgcgauuucgucaugaaccugguaaauagccucgauaucggcaacgacaacaucagaguaggucuuguucaguucucugauacaccggucaccgaguucucgcuaaacacuuaucagacaaagucagacaucuuagggcauuuacggcagcugcaacugcagggcgguagcggacuuaauacaggcagcgcauugucauacguuuaugcuaaccauuucacugaggcuggcggcagcaggauucgugaacacgucccucagcugcucuuacuguuaacugcuggucaaagcgaagauucuuaucugcaggcugcaaaugcacucaccagggcugguauacugacuuucuguguuggcgcgucccaggccaacaaagcugaacucgaacagauugcauuuaacccgucccucguguaucucauggacgauuucaguagucuucccgcucugccacagcaguuaauccagccccucacaacuuauguguccggcgguguggaagagguaccacuugcccagccugaaucaaagcgggauauucucuucuuguuugauggaucugcaaauuuagugggacaauucccugucguaagggacuuucuguacaagaucauugacgaauugaacgugaagccagaaggaacccggaucgcggucgcccaguauucugacgaugucaagguggaauccagauucgacgaacaccaguccaaacccgagauucuuaaccugguuaagcgaaugaaaaucaagaccggcaaggcucugaaucugggauaugcgcuugauuacgcacagcgguauauuuucgugaaaucugcuggguccaggauugaggacggaguucugcaauucuuaguguuacucguugccggccgcuccucugaucgcguggaugggcccgcaucaaaccuuaagcagaguggaguugucccuuuuauauuccaggccaagaacgcugaucccgcugaauuggagcagauaguuuugaguccggccuucauucuggcagccgaaucauuaccuaagauaggcgaucuccacccucaaaucgugaaccuccugaaguccguucauaacggcgcaccagccccagucagcggagagaaagaugucguguuccugcuggauggcagugagggagucagaucuggguucccgcuguugaaagaguuugugcagagaguaguagagucccuggacgucggccaggacagaguuagaguggccguagugcaauauagcgacaggaccagacccgaauucuaccuaaauucauacaugaauaaacaggaugucguaaaugcgguucggcaguugacacuccuuggagggccgacaccaaauaccggggccgcccuggaauuuguccugaggaacauuuuagugucaagugcugggucuaggauuacugaaggagucccgcagcugcugauaguguuaacagcugacaggucuggugaugacgugaggaacccuucuguuguggugaagaggggaggagcaguacccauugggaucgguauuggcaaugcggauauaacagagaugcaaacaauuaguuuuauaccagauuucgccgucgcaauuccuacauuccggcagcuuggaacagugcaacagguaauuagugaacgaguuacgcagcugacccgagaggaacuuagccgauugcagccggucuuacagcccuugccauccccaggugugggaggcaagcgggacguaguguuccugaucgauggcagccagagcgccggacccgaguuucaauacgugagaacacuuauugagagacuugucgauuauuuagauguugguuuugacaccaccagagucgcugucauucaauucucugacgacccuaagguagaauuucuucugaaugcgcauuccucaaaggacgaaguccagaacgcugugcaaaggcuucgaccuaaaggagggaggcagauuaaugucggaaacgcacucgaguacguuagccggaacaucuucaaaagaccacugggaagucguauugaggaaggagucccucaguucuuaguucugauuucguccgguaaguccgaugacgaggucgacgaucccgcuguugagcucaaacaguuuggcguggcuccauuuacgaucgccaggaaugcagaccaggaagagcucguaaaaauuagccugagucccgaauauguuuucaguguuucuacguucagggaacuaccuagcuuagagcagaaauugcugacaccgauuacuacccucaccucugaacaaauucagaaacuccucgccucaaccagauauccccccccagccguggaaagugaugcagccgacaucguauuccugaucgauaguagugaaggcguucgcccggacggcuuugcccacauucgcgauuuuguauccagaaucgugcgcagacugaacauagguccuucuaaagugcggguggguguagugcaguuuucuaacgacguuuuuccugaguucuaccugaagacuuaccggucucaagcccccguccuggacgccaucagacgucugagacuucguggcggcagcccguuaaacacuggaaaagcccuggaauucguggcaaggaauuuguucguuaaauccgccggcagcagaauagaagauggagucccccagcaccugguuuugguacucggaggcaagucucaagaugacguuucucgguuugcacaagucauccgaucuucuggcaucguuucuuugggugugggggaccgcaacauagaucgcacagaacuacagacuauuacaaaugauccccgccugguuuucacuguccgugaguuucgcgagcuaccaaacauugaagaacgaauaaugaauagcuuuggcccaagugcugcgacgcccgccccccccggcguggacaccccaccacccaguagacccgagaagaaaaaagcagauaucguauuuuugcuggauggauccauuaacuuuagaagggauucauuccaggaagugcuccgguuugugagcgaaauaguugacacuguuuacgaagacggcgauagcauccagguaggacugguucaguacaacucugaccccaccgaugaauuuuuccuaaaggauuuuagcacuaaacgacaaaucauagaugcgauaaauaaagucguuuauaaaggcggacggcaugcaaacacuaaggucggguuggagcaccuaagagucaaccacuuugugcccgaagcggguuccagacuagaucagcguguaccgcaaauagcuuuugucaucaccgggggcaaaucuguggaggaugcucaagacgugagccuggcccugacccagaggggaguaaagguguucgccgucggagugagaaacauugauagcgaagaaguaggaaaaauugccucuaacagcgcaacugccuuccgugucgguaauguacaggagcugagcgagcucucagaacaaguacucgagacacugcacgacgcuaugcacgaaacacucuguccgggugugacagacgcagccaaggccugcaaucucgauguuauucucggauuugacgguucuagagaucagaauguuuucguggcccaaaaaggguucgagucuaagguggacgcaauacugaaucgaauuucccagaugcacagggucucuugcucuggcggccguucccccacagugcgcguuucggucgucgccaacacaccuuccgguccaguggaagccuuugauuuugaugaauaccaaccagagauguuggagaaauuuaggaauaugcguucacagcacccuuauguuuuaacagaagauacccuuaaaguuuaucugaacaaauuccggcagagcaguccagacuccguuaaaguugugauccacuuuacagauggcgcugauggagaccuggcggaccuucacagggccagugagaaucuucgacaagagggcgugagggcacuuauccuugugggccuggaaagagucgugaaccuagaaagacuuaugcaucucgaauuuggccgcggauuuauguacgaucgcccccugcgccucaacuugcuugaccucgacuaugaacuggccgaacagcucgauaauaucgcugagaaagccuguugugggguucccuguaaguguagcggacaaaggggggacagaggacccauugggagcauaggcccaaaaggaauuccuggugaagauggauaucggggcuauccgggggacgaagguggaccaggggaacgcggcccuccuggcgugaauggaacgcagggcuuucaaggaugcccgggucagcgcggcguaaaggggucuagaggcuuuccaggugagaagggcgaggugggcgagauuggauuggacggacuggacggugaagacggugauaagggguuaccagggagcucaggagaaaaaggaaacccaggccggagaggggacaagggaccccggggagaaaaaggcgagagaggugacgugggcaucaggggagacccagggaaccccggccaggauucgcaggaaagagggccgaagggagaaacuggagaucuuggucccaugggcgugccuggacgggacggcguucccggcggacccggcgagacaggcaagaauggaggguucggucgaagaggaccacccggcgcgaagggcaacaagggaggaccuggccagccuggguuugaaggggaacagggaacucgaggugcucaggggccugcugguccagcugggccuccuggccucaucggugagcaagguauaucgggcccuagagguaguggcggcgccgcaggggccccaggcgagagaggcaggaccggaccucugggaagaaaaggggagcccggcgaacccggccccaagggggggauuggcaauagagggccacgcggagagacaggcgaugauggacgugacggcguggguucagagggccgccggggaaagaaaggggagaggggguucccagguuauccaggccccaaggggaaucccggugaacccggucucaauggcacgacuggacccaaagguauucgcgggcggcgcgguaauaguggucccccaggaauugugggccagaaaggggauccaggcuaucccggcccggccggcccuaagggaaaccgaggcgauucuaucgaucagugcgcccucauucaaucuauuaaagauaaaugcccauguuguuauggcccguuggaguguccaguguuccccacugaacuggccuuugcacuggauacgagugaaggaguuaaccaggauacauucgggaggaugcgcgacgugguacugaguauagucaacgauuuaaccauugcugaguccaacugucccaggggugcccgcgucgccguuguuacauauaauaaugaaguuacaacagaaauccgcuuugccgauucaaagagaaaguccguguugcuggacaaaaucaaaaaucugcaaguggcacuuacuuccaagcagcagucccuggagaccgccaugaguuuuguggcuaggaauacauucaaacggguuagaaauggcuuccugaugagaaaagucgcaguguucuucuccaauacuccaacaagagcaucaccccaacugagagaagcuguucuuaagcuuagcgacgcuggaauuaccccccuauuucugacccgacaggaggaucgacaacugauaaacgccuuacagauuaacaauacagccgucggacacgcccuggucuuacccgccggcagagauuuaaccgauuuucuggagaaugugcugaccugccacgucugucucgauauaugcaacauugacccuucuuguggauuugguagcuggagacccaguuucagagacaggagggccgcagguuccgacgucgauaucgacauggccuuuauccuugacagcgccgaaacgaccacuuuauuccaguucaacgaaaugaaaaaguacauagccuaucucguacgacagcuagacaugagcccggaucccaaggcuagccagcauuuugcacgcguggccguagugcagcaugcaccuagcgaaucaguggauaacgcaagcaugccccccgucaaaguggaauucucauugacagauuacggaucaaaggagaaguugguggacuuucugagcagggggaugacccaauugcagggaacucgugcucucggaucugcaaucgaguauaccauagagaaugucuucgaaagcgcuccuaauccucgggaucuuaagaucgucgugcuuauguuaacuggcgaggugccagagcagcaguuagaagaagcccaacgcguaauauuacaggcgaaaugcaagggguacuucuuuguugugcuggggauugguagaaaagugaauaucaaggaggucuacaccuucgcauccgaaccaaacgaugucuuuuuuaaacugguagacaagucaacagaauugaaugaggaaccacugaugcgguucgggcggcugcucccaucauuugucaguucagagaacgccuuuuaccuauccccagauauccggaaacaaugcgauugguuucagggcgaccagccuaccaaaaaucuuguaaaauuuggccacaagcaagugaaugugcccaauaacguuacgucauccccaacuucuaaccccgugaccaccacaaaaccagugaccacuacaaaaccuguaacuacaacuaccaagccagugacaacuacuaccaaaccaguaacaaucauuaaucagccgucugugaagcccgccgcugcuaagccugcgccagccaagccuguggccgcaaagcccguggcgacuaagauggccaccguucgccccccugucgcugugaaaccugcuaccgcagccaagcccguugccgcuaaaccagccgccguccgcccuccagccgcugccgcugccaagcccguggcgaccaaacccgaggugcccagaccccaagcagccaagcccgccgccacuaagccagcuacuacgaaaccaauggucaaaaugucaagagagguccaaguauucgagauuaccgaaaacagugcgaagcugcauugggagagagcagagccaccugggccauauuucuaugaucuuacagucacaagcgcucacgaucaaagccucguucucaagcaaaaucucaccgugacggacagggucaucggagggcuccuggcugggcagaccuaucacguugccgucguguguuaucuccgaucucaagucagggcuacauaccacggaucuuuuucuaccaaaaagucccaaccuccccccccucagcccgcgcgcagcgcauccuccucaacuaucaaucucauggugucaaccgaaccacuagcucuaaccgaaaccgauauauguaagcuaccuaaggaugaggggacaugcagggacuuuaucuuaaaaugguacuaugacccuaacacaaaguccugcgcccgcuucugguaugggggguguggaggaaaugagaauaaauuugggagccagaaagaaugcgaaaaagugugcgcacccguguuagcgaaacccggagugauuagcgugauggggaccuag

SEQ ID NO: 230676 - RNA, 8916 nt, Artificial Sequence
  derived and/or modified sequence
augaggaaacaccgucaucugcccuugguggccguuuucugucuguuccucuccggauucccuacaacccaugcucagcagcaacaggcggcccaggauagcgccgacauuauuuuucuuauugacggcuccaacaauacugguagugugaauuuugcugugauccuggacuucuuagugaaccuccuugaaaaacuuccuauagguacccaacaaaucagggucggcgucgugcaguucuccgacgaaccccgcaccauguuuucauuagacacuuauucuacgaaggcucagguguugggagcaguaaaggcuuugggauuugcuggcggggaguuagccaauaucgggcuggcacucgacuuuguuguggagaaucacuuuacacgggcaggaggcagccggguugaggagggcgugccgcaaguuuuaguucugauuagugccggcccuucaucagacgaaauccgauacggcguaguugccuugaaacaagcaaguguauucuccuucggacucggagcacaggccgcuucaagggcggaacugcagcacauugccacugacgauaaucucguguucacggugccagaauuucgaucguucggggaccugcaggagaaauuauugccguauaucguggguguugcccagcgccauaucguucuaaaaccuccuaccaucguaacacaagucauagagguaaacaaacgugauauuguguuccucgucgacggaucuucagcacucggacucgcuaacuucaaugccaucagggacuuuauugcuaaagugauccaaagacuugaaaucggacaagaucucauacagguagccguagcucaauacgcugacaccgugcgcccugaguucuauuuuaacacgcauccuacuaagagggaggugaucacugccguucguaaaaugaaaccgcuggauggcucugcccuguauacaggcucugcucuagauuuugugcgaaacaaccuuuuuaccagcuccgccggguaccgcgccgcggagggcauuccuaaacuucucgugcucauuacaggugggaaaucuuuagaugaaaucucccaaccagcccaggaacugaaacgaucuucuaucauggcauucgccauuggaaauaaaggugccgaccaggcggaacucgaggaaaucgcuuuugacucuucacugguguucauacccgcugaguuucgggccgcuccucugcaaggcaugcugcccggacuacuagcaccccuccggacucucucaggaacgcccgaaguacacucuaauaagcgcgacaucauauuuuuacuggacgguuccgcaaacgucggcaagacaaacuuuccauacguucgugacuuugucaugaaccugguaaacucucuugacaucgguaaugauaacauccgcguaggcuugguccaguucuccgauacuccaguuacugaguuuucucugaauaccuaucaaaccaaaucagauauccuuggccauuugagacaacugcaguugcaagguggcaguggacuuaacacggggagugcauuaaguuacguuuacgcaaaccacuuuacagaagcuggcggcucccgcauccgcgaacacgugccucaacuccuacuccuguuaacggccgggcagucagaagacuccuaccuacaagccgcaaaugcacuuaccagggcagggauccuuacuuucugcgucggggccucccaggcaaacaaagcggaguuagaacagaucgcguucaacccgagccuuguguaccugauggaugauuucuccucccuucccgcacuuccccagcaauugauucagccccuuaccaccuauguuagcggcgggguugaagagguaccucuugcgcaacccgaguccaaaagagacauccucuuucuauucgacgggucugcgaaucugguagggcaauucccagucgugcgugacuuuuuguacaagauaauagacgagcuaaaugucaaaccagaaggcacucggaucgcaguagcucaguauagcgacgacgucaaggucgagucaagauuugaugagcaccagucaaaaccugaaauacucaaccuggugaaacgaaugaagauuaaaacggggaaagcgcucaaccuuggauacgccuuggauuacgcccaaagguacaucuucgugaaguccgcaggcagcagaauugaggaugggguuuuacaguuccuaguccugcucguagcugggagaaguagcgauagaguggauggucccgcuagcaaucuuaaacagucugguguggugccuuucaucuuucaggcuaaaaaugcugaccccgcagaacuugaacagauugugcuuucaccugcuuucauauuggcugcugaaagccugccuaagauaggggaccuacacccccagauuguuaaucugcucaagucugugcauaacggcgcuccagcaccugucuccggcgaaaaggacgugguuuuccuacuggaugguuccgaaggugugcggagcggcuuuccuuugcugaaggaguucgugcagcgcgucgucgagagucucgaugugggccaagauagagugagaguugcaguuguccaguacuccgacagaacacgcccugaguuuuaucucaauucuuacaugaauaaacaggauguggugaaugcaguaagacagcucacguugcucgguggaccaacacccaacacuggggcggcucuggaauucguucuccgaaacaucuugguuucuagcgcagggucgagaaucaccgagggggugccgcagcuucucauaguuuuaacagcugauagaucuggggaugacguccgcaacccuucugugguugugaaacgagguggugcugucccaauuggaaucgggauugggaaugccgauauaacugaaaugcagacaaucaguuuuauacccgacuucgcuguagccauaccgaccuuuagacaacuggguacaguccagcaggucauaucagagagggucacgcagcucacccgggaagagcugucacgccuucagcccguccuucagccccuccccagcccuggagucggaggaaagcgcgaugugguguuccucauugaugggagccaaagugcaggucccgaguuucaguacguaaggacuuugaucgagcggcuaguggauuaccucgacguaggcuuugacaccacacgaguagccgucauacaguuuagcgacgaccccaaaguagaauuccuccugaaugcucauuccaguaaggacgaaguucaaaaugccguacagagacugaggccuaagggcgggcggcaaauuaacguaggcaaugcccuggaguaugugucccgcaauaucuucaagagaccacucggcucacgcaucgaagaaggugucccacaguuuuugguccuuauaucauccgguaaaucugacgacgaaguugacgacccagccguugaguuaaagcaauuugguguagcuccauuuacuaucgcccggaaugccgaucaggaagagcugguaaagauaagccuguccccugaauacguguucuccgucucaaccuuucgcgagcucccaucccuggagcagaagcuacucaccccuaucacaacccugacaagugagcagauccagaaacuucuagcuagcaccagauauccaccucccgccguggaaucugacgccgcugacauuguguuccuuaucgacuccuccgaaggugugcgcccugaugguuucgcccauauaagagauuucgucucgcgaauugugcgacgucuuaauaucggcccgagcaagguucgcguggggguaguucaauucagcaacgacgucuucccagaauuuuaccucaagacuuaccgcucccaggcccccguacuggacgcaauccgcaggcuacgccuccgggggggaagcccacugaauacagggaaagcgcuugaguucgucgcaagaaaccuguucgucaaaagugcagggucucguauugaggauggggucccacaacauuugguucuggugcugggggggaaaucucaagaugacgugucaagguucgcgcagguaaucagaaguuccggcauugugucacugggcguuggggacagaaauauagauaggacugagcuccagaccauuacuaaugauccccgacugguauuuacagugcgcgaauucagagaauugccuaauaucgaagagcgaauaaugaacucauucgguccguccgcugcaacuccugcuccuccuggaguugacacuccuccacccagcagaccagaaaagaagaaagcugacaucguguuucuauuggacgguaguaucaauuuccggagagauaguuuccaagaagugcuucgauucguaucugagauagucgauaccguuuaugaggacggcgacucuauccagguaggccuuguacaguauaacuccgacccaacagaugaauuuuuccuaaaggacuucucuacaaagcgccaaauuauugacgccaucaacaagguaguguacaagggcggacggcacgcuaacaccaagguugggcucgagcaucuaagggugaaucacuucguuccagaggcaggcuccagauuggaccagcgagugccacagauugcauuugucauuacagggggaaaaucaguugaagaugcccaagauguuucucuggcccuuacucagaggggugugaaaguuuucgccguuggcguccgcaauauagacagcgaagaaguggggaaaauagcaagcaacucagccaccgcuuuucggguaggaaacguccaggaacuuuccgagcuaucugaacagguguuagaaaccuugcaugacgccaugcacgagacgcuguguccgggcgugacagaugcagcuaaggccugcaaccuugauguuauucuugguuuugacggcagucgcgaucagaaugucuuuguagcgcagaaaggcuucgaaucaaaggucgacgccauucuuaacagaauuucucaaaugcaucguguaucauguagcggcggcaggagccccacaguccgcgucagcguuguggccaacacccccagcggaccaguagaggcauucgacuucgacgaguaucagcccgaaaugcuggagaaauuccgaaacaugcggucucagcacccguauguauuaacagaagacacgcugaaagucuaucugaauaaauuucgccaguccuccccagauagugugaaaguggugauucacuuuacagauggugcugacggagauuuagcagauuuacaucgugcuuccgagaaccugagacaagagggcgugagagcacugauuuuggugggccuugagagagucgucaauuuggaaagacucaugcaccuggaauucggccgagguuucauguacgacaggccccucagacugaauuugcuugacuuagacuacgaacucgccgaacaguuggauaacaucgcagaaaaggcauguugugguguuccauguaagugcucuggccagcgaggugaccgcggccccaucgguuccauuggucccaaaggcauuccaggggaagacggcuauaggggauacccaggugacgagggcggaccaggagaaagaggacccccaggcgucaacgggacucagggcuuccagggcugcccagggcagcggggugucaaaggcucuagaggcuuccccggagaaaagggagagguuggcgaaauuggccuggacgguuuggauggcgaggauggcgauaaaggacuccccgggaguucaggugaaaaaggaaauccuggaagacgcggugauaaggggccuagaggggaaaagggggagcggggugauguugguauucgaggagacccgggcaacccggggcaggacagucaggagcgaggaccuaaaggggagacgggagaucucggcccaaugggagugccaggcagagauggcguuccuggaggaccaggcgagacaggcaaaaauggcgguuuuggccgcagaggucccccaggcgccaagggcaauaaaggggggcccggacagcccggauucgaaggugaacagggaacacgaggggcacagggacccgcgggcccugcuggcccccccggacugauuggugaacaggggauaucugggccacgaggauccggaggugcugccggcgcaccaggcgagaggggacgcacagggccacuggggagaaaaggcgagccuggggagcccggaccaaaaggaggcauuggaaaucgaggucccaggggugaaacuggugaugacggccgcgaugggguggggagcgaaggacgccgaggaaagaaaggugaacgaggauucccaggguacccuggcccuaaagguaacccaggcgagccgggacugaauggcaccacugggccgaaagggauucggggcagacgggggaacucagggccuccugguauugugggccagaagggggaucccggauacccuggcccagccggucccaagggaaaucgaggugauagcauugaccaaugugcacugauccaaaguaucaaagauaaaugcccaugcugcuacggcccacuugagugcccgguguuccccacugaacuagcauucgcucuggauacaucugaagguguaaaccaggacacauuuggucgcaugagagacgugguacuuaguauugugaacgaucugacgaucgcugagaguaauugucccagaggggcgagggucgcgguagugacguauaacaaugaggucacaacggaaauucgauuugccgacagcaagaggaagucgguacuucucgauaaaauuaaaaaccugcaagucgcucucaccagcaagcaacagucccuagagacagcgaugagcuuuguagcgagaaauacauucaaaaggguuaggaacggcuuucugaugaggaaggucgccguguucuuuuccaacacgccuacacgagccaguccucaacugagagaggcggugcugaaacugucagaugcaggcauuacacccuuauuucuuacucgccaagaagacagacaacuuauuaaugcgcuacagauuaacaacacagcaguaggccaugcauuaguacucccugccggacgcgaucugaccgacuuccuugagaauguauuaacuugucacgugugucuugauauuuguaauauugaucccagcuguggguucggguccuggagaccgagcuucagagaucgaagagccgcaggaagugacguugauauugacauggccuucauucuggauuccgccgaaacuacaacacuauuucaguucaaugagaugaagaaauauauugccuaccucgugagacaacuggacaugucaccugauccuaaagcgucucagcauuucgccagaguagccgucgugcagcaugcuccgucggagaguguggacaaugcaucaaugccgcccgugaaggucgaauuuucuuuaacggacuaugguagcaaggagaaacugguugauuucuuaucacgagggaugacccaacuucaaggcaccagagcguugggguccgcaaucgaguauaccauugagaauguguucgagucugcaccuaacccaagagaucugaaaauagucguguuaaugcuuacuggugaaguaccagaacagcagcuggaagaagcucagcgagugauccugcaggcaaaauguaagggcuauuucuuuguugugcugggaaucggacgcaagguaaacauuaaagaaguguacacuuucgcaagugaaccaaacgacguguuuuuuaaauuggucgacaaaucaacggaacuuaacgaggaaccccugaugcgcuuuggacgauuacugcccuccuucgugucgagugaaaaugccuucuaccucuccccugacauccgcaaacagugcgauugguuucagggugaucagcccacaaagaaucugguaaaauuuggccauaagcaagucaacguacccaacaaugucacuucuucaccuaccucuaacccaguaacaacaacuaaacccgucacaaccaccaagccagugacuacgacaacgaaacccgugaccaccaccaccaagcccgugaccaucaucaaucaaccgucagugaaacccgcugccgccaagcccgcucccgcuaagccugucgccgcaaagccaguugcaacaaaaauggcgacaguuaggccuccaguugccgugaaacccgcuacagcugcuaagccgguugcugcaaagccggcagcugucagaccucccgccgcugcagccgcuaaaccagucgcaaccaaacccgaagugccccgaccacaggccgcuaagccagccgccacuaagcccgccacgacuaagcccauggucaaaaugaguagagaaguucaagucuucgagaucacagagaacuccgcuaagcugcauugggaacgggccgaaccuccaggcccauacuucuacgaccugacagucacauccgcccacgaccagucucuuguccucaagcaaaaccugacugugacugauaggguuaucggcgguuugcucgcuggccagaccuaccauguugcugucguauguuacuuaagaagccaggugcgagcuacguaccacggcucauuuuccacuaaaaaaagccagcccccuccuccacagccugcccgcucugccuccucgagcacuaucaaccugaugguuaguacagaaccucucgcccuaacagagacugauauaugcaaauugccaaaggacgaggguaccugcagagacuucauacugaaaugguauuaugacccaaacacaaaauccugcgcaagauucugguaugguggaugcggggggaacgagaacaaguuugggagccagaaagaaugcgagaaggugugugcuccaguacuggcuaagcccgguguuauuucugucaugggcacauag

SEQ ID NO: 230677 - RNA, 8916 nt, Artificial Sequence
  derived and/or modified sequence
augagaaagcacaggcaccugccucugguggcaguuuucugccucuuucugagcggcuuccccacaacucacgcccagcaacagcaggccgcccaagauuccgcagacaucaucuuccugauugacggcucuaauaacacuggcucuguaaacuuugcagucaucuuggauuuucuggucaaucuccucgagaagcugcccauuggcacacaacagauacgagugggaguagugcaguuuucugaugagccuagaacuauguucucccuugauacuuauucuacuaaagcacaggucuugggcgcuguuaaagcucugggguuugcagggggcgagcucgccaauaucggccucgcucucgauuucguuguggaaaaucacuucacuagggccgggggcucccggguagaagagggcgugccgcagguccugguucucauuagcgccgguccuagcagcgaugaaauuagauacggagucgucgcauugaaacaagccucagucuuuucuuuuggccucggggcacaagccgcuucuagagcugaguugcagcauaucgccacagacgacaaccugguuuucacuguuccugaguuuagaaguuuuggcgaccuacaggaaaaauugcuuccguauaucgugggcguggcacaaagacacaucguguuaaaaccuccaacaaucgucacgcaagugauugaaguaaauaaaagggacaucgucuuucucgucgauggcucuagcgcauuaggacuagcuaauuucaaugcaauccgggacuucauugcaaaggucauucagcggcuggaaaucggucaagacuuaauucagguggcagucgcccaauaugccgauacaguacggcccgaauuuuauuucaauacucaucccacuaaacgggaagugaucacugcaguacggaaaaugaaaccccuugauggcucugcuuuguacacugggagcgcacuagacuuuguccgaaacaaucuguucacauccuccgccggguaucgagccgccgaagggauucccaaacuccucguacucauuacaggugguaaaucacuggaugagauaagucaaccugcacaagaguuaaaaaggagcuccauuauggccuuugccauuggcaauaagggagccgaucaagccgaauuagaagaaaucgcguucgacagcagccucguguuuaucccugccgaauuccgggcugcuccacuucaaggaaugcugccaggcuugcuugccccacugaggaccuugucagguacucccgaagugcauuccaacaaacgcgacauaaucuuccucuuggacggcuccgcuaacgucggcaaaaccaauuuuccauacgugagggacuucguuaugaaccuggugaauucacucgauauagguaacgacaacauaagggucggacugguccaguucagugauaccccugucaccgaauucucacucaauacuuaucagacaaagagcgacauacugggccaccucaggcagcuucagcuucaaggcggcuccggucucaacacagguucugccuugagcuauguauacgcuaaucauuuuaccgaggccggcggcucucgcauccgugaacacguuccacaacugcuuuuacugcuuacagcuggucaguccgaagauucuuauuugcaagcagccaacgccuugaccagagccggcauccugacuuuuugcgucggggcaucucaggcuaauaaagcugaacuagaacaaaucgccuuuaaccccucacugguuuaucucauggaugauuuuucuucgcuucccgcucucccccaacaacuuauccagccgcuaaccacauauguuucuggcggaguggaggaggucccucuugcccagcccgaaucuaagagagauauccuuuuucuuuucgauggauccgccaaucuagugggacaauuuccaguugugcgcgauuucuuguauaagauuauugacgagcuuaacgugaagccggagggaacacgcauugcaguugcucaauacucugaugaugucaagguugagucaagauuugacgaacaccagucaaagcccgagauacugaauuugguaaagcgcaugaaaaucaaaaccggaaaagcccuaaaucuggguuacgcccuugacuacgcacagagauacaucuucgucaaauccgcaggcucacguaucgaggacggcguacugcaauuuuuaguuuuacuuguggccgggagaaguagcgaccggguggaugggcccgcaucgaaucugaagcaguccgggguugugcccuuuauauuucaggccaagaaugccgacccagcggagcuggaacagaucgugcugagccccgcauucauuuuagcagcugaaucauugccgaaaaucggcgauuuacauccgcagaucgugaaccuacugaaaagcguacauaauggagcgcccgcacccgugucuggggaaaaagaugugguauuucuucuugauggguccgagggcguuagaucuggcuuuccacuccuuaaagaguucguucagaggguagucgaauccuuggaugugggacaggaccggguaaggguggccguagugcaguacucagaccgcacccgaccagaguuuuaccuuaacucuuacaugaauaaacaggacguggucaacgcagugcgacagcugacucugcuagggggaccuacucccaacaccggagccgcauuggaauucguauugaggaauauccucguaagcuccgcagggucccgcaucacugagggggugccacaguuacuaauaguguugaccgccgauagguccggagaugacguuagaaauccuucagucgucgugaagcgagggggagcaguuccuaucggcaucggcauaggaaaugcugacaucaccgagaugcagacaaucaguuuuauuccagauuucgccguagcaauccccacauuucgccagcugggcacugugcaacagguuauuucagaacgcguaacacaacugaccagagaggaauugucccgucuccaaccagugcuacagccacucccuucuccuggagucgggggaaagcgcgacguuguuuuccugauugacgguucucaauccgcaggccccgaauuucaauacguccggacucuaauugaaaggcugguggacuaucuggacgucggguucgauaccaccagaguagcugugauccaguuuucagacgacccuaaagucgaauuucuucugaacgcccacuccucuaaagacgaaguucagaaugccgugcagcgucuuagaccaaagggaggaagacagaucaacguugggaaugcacucgaguaugugucuagaaauaucuucaagcguccccucggaucuaggaucgaggaagggguaccucaauuccucguguuaauuuccagcggaaagucugaugaugagguugacgauccugccgucgagcuaaaacaguuuggcguagcuccauucaccauagcccggaaugcagaccaagaggagcuggucaagauuucccuaucccccgaguauguguuuagcgugucuacuuuccgugagcugccuucacucgagcaaaaacuguuaacaccaauuaccacucuuaccucagaacagauucagaagcuguuggcuucuacacgauacccaccaccagcuguggagucagacgcugcagacauuguguuccuuauugacucuagugaaggcgugagaccugauggcuucgcccacauccgugauuucguuucccguaucgugagacgguuaaacauuggcccuucuaaaguuaggguugggguuguccaguuuuccaaugauguguuccccgaguucuaucugaagacuuacagaagccaggcuccgguucuggacgcaauccgcagauugagguugcguggcggguccccccuuaauacaggcaaagcucuugaguucguagcacgcaaucuguucguuaaaucggccggcucacguaucgaggauggaguaccucaacacuuagugcugguccugggcgguaagucacaggacgauguuagcagauuugcucaggugauccgguccagugggauugugucacuagguguuggcgacaggaacaucgauaggacugaacugcagaccauuacaaacgauccucgguuagucuucaccgugcgggaguuuagagaguuacccaacauugaagaaagaauaaugaauuccuuugggccaucugcagccacuccugcgccccccggcgucgacaccccaccaccuucgcgaccagagaaaaaaaaggccgacaucguuuuucugcuggauggcagcauuaacuuuaggcgugauuccuuucaagagguacugcgauuugucagugagauuguggacacuguguaugaggauggcgauuccauucaaguagggcucguucaauauaacuccgacccgacagacgaauuuuuucugaaagauuucuccaccaagcgacaaauaaucgacgccaucaauaaagucguguacaagggcggccgccacgcuaauaccaaagucggacuugagcaccucagagucaaccacuucgugcccgaggccggcucucggcuggaccagagaguaccccagaucgccuucguaaucacuggggggaagucugucgaggacgcacaggaugucucacuagcacuuacacagagagggguuaagguguuugcggucggagugaggaauauugacagugaggaagucggcaaaaucgcaagcaauuccgcuacagcuuuucgaguuggcaauguccaggaacuguccgaacuuagcgagcagguacucgaaacacuucaugaugcgaugcaugagacccuguguccuggcgugacugaugccgcuaaagcauguaacuuggacgugauucucggguuugauggcagcagagaucagaacguguuuguagcgcaaaaaggauuugaauccaaggucgacgccauucugaacagaaucucccagaugcauagagugucuuguagcgggggcagaagcccuacaguaagaguuucaguuguggcuaauacaccuagcgggccuguggaggcauuugauuucgaugaauaucagccagagaugcuugagaaguuucggaacaugaggucacagcacccauauguucucacugaagacacccugaaaguuuaccucaauaaguuuaggcaguccucucccgacucgguuaaggugguuauucacuuuacagauggugcggauggagaccuggccgaccuacaccgggcuagcgaaaaucucagacaagaaggaguucgggcccugauucucgucggucuugagcgcgucgugaacuuagagagacuaaugcaccucgaauuugggcgaggauucauguaugaccguccccugagacucaacuuacucgaucuggacuacgaauuggcagaacagcuagauaacauugccgaaaaagcuuguuguggggugccuugcaaauguucagggcagcgcggggauagggggcccaucggcucuauuggcccuaaaggcauuccaggcgaggauggcuauagaggguacccaggagaugaagggggacccggagagcgcggcccgccaggcguuaacggcacucagggguuccaaggaugcccaggacaaaggggagugaaaggaagccgaggguuucccggagaaaagggagaggugggggagauaggacuugauggccucgacggugaggauggagauaaagggcugccagggucaagcggagaaaaaggcaauccaggcagacggggggauaagggaccaagaggagagaaaggagagagaggcgacgugggaauccggggugaucccggcaaucccggccaggauagucaggagcgagggccaaagggcgaaacgggcgaucucggcccaaugggcguccccggaagagauggcgugccaggagguccuggcgagacggggaagaauggcggauucggaaggcgcggcccuccaggugcaaaggggaacaaagggggcccaggucaaccaggguuugagggugagcagggaacucgaggagcucaaggaccagccgguccagcgggcccuccaggguugauaggagaacaggguaucuccggaccuagaggaaguggaggugcggccggcgcgcccggagagcggggaagaacaggcccacuuggacgaaaaggcgaaccaggggagccgggucccaaagggggaaucggcaaccggggucccaggggagaaacgggcgaugauggucgugacggaguagggucagaaggcaggagaggcaagaaaggcgaaagaggguucccaggguacccuggcccuaaaggaaacccaggagagccagguuugaauggcacaaccgggcccaaaggaauucguggcagacguggcaacuccggacccccaggaaucguaggacaaaaaggagauccgggcuacccagggccggcuggcccaaaaggaaaccggggugacucuaucgaccagugcgcgcuaauacagucaaucaaagauaaaugucccugcuguuacggaccauuggagugcccaguguuccccacagaacuggcuuucgcucuugauacaucugagggagugaaccaggacacguucgggagaaugagggacguaguucugucuauugugaacgaucugacaauugccgaaaguaacuguccucgcggagccagaguugcugucgucacauacaauaacgagguaacuaccgaaaucagauuugcugacucuaagcgaaagagcgugcugcucgauaaaaucaagaaucuacaggucgcuuugaccagcaagcaacaaucucuugaaacugcuauguccuucguugccagaaauacauuuaaacgcgugcgcaacgguuuucucaugcgcaaaguugcgguguuuuuuucuaacaccccuacccgggccucgccccagcuaagagaagccgugcuuaagcugagugacgcuggaaucaccccgcuauuuuugacacgccaggaggaccgucaguuaaucaacgcccuccagaucaacaauacagcagugggacacgcauugguccucccggccggucgcgaucugaccgacuucuuagagaaugucuuaacuugucauguuugccucgauaucuguaacaucgaccccucguguggcuuuggaucuuggagaccuagcuuccgagaccgcagagccgcuggauccgacguugacauugacauggcuuucauccuugacucugcugaaacuacuacccucuuccaguuuaacgaaaugaaaaaauacauugcguaucucgugcgacaauuggauaugagcccugaucccaaagcuagccagcacuucgccaggguggcaguugugcaacacgcaccgagugagaguguggacaacgcuagcaugcccccaguaaaagucgaauucagccugaccgauuacggcagcaaagaaaaacugguugacuuccugagcagggggaugacgcagcuucaggggacacgggcucuuggaagugccauugaauacacaauugaaaacguauucgagucugccccaaacccacgcgaucugaaaauuguagucuuaaugcugacaggggaggugccggagcaacagcuggaggaagcccaacgcgucauucugcaggccaagugcaaggguuacuucuucguugugcugggaaucgggaggaaaguuaauauuaaagaggucuauaccuucgccucugagccuaacgacguguucuuuaaauuaguggauaaaucaacugaacucaacgaggagccgcucaugcgauuugguaggcuuuuaccuucuuucgucaguucagagaacgccuucuaucucagccccgauauaagaaaacagugcgacugguuccaaggcgaccaacccacaaagaaucucgucaaguucggccauaagcaaguuaauguuccaaacaaugucaccuccagcccuacuuccaacccugugaccaccacaaagcccgugacgaccacaaagccugucacgacuaccaccaagcccguaaccacuacaaccaaacccgugacaaucaucaaccaaccuucagugaaacccgcagccgcuaaaccagcgcccgcuaagccugucgcagccaagccagucgcaacaaaaauggcuaccgugcgcccacccguggccgugaaaccagcuaccgcagccaagccagucgcggcuaagccagcagcugucagaccaccagcggcagccgcagcgaagcccgucgcuacgaaaccagaggugccgagaccacaggccgccaaacccgcagccacuaaacccgccacaaccaagccuauggucaaaaugucucgagaaguucaaguuuuugagaucaccgagaauuccgccaagcuccacugggagagagcggagccgccaggacccuauuucuacgaucuaaccgugacaucugcucacgaucagucccugguucucaaacagaacuuaaccgugacggaccgugugauuggaggucuccuggccggacagaccuaucaugucgccguggugugcuaccuacggagccaaguuagagccacuuaucacgggaguuucaguaccaagaaaagccagccaccucccccacaaccugcaagaagcgcuuccaguucuacaaucaaccugaugguuucaacggagccccuggcccucacugaaacugacauuugcaaauugcccaaagaugaggggacguguagagauuuuauuuugaagugguauuacgauccaaauacuaagucuugcgcuagguuuugguacggcggaugcgguggaaaugagaacaaguucggcagccagaaagaaugugaaaaggugugcgcucccguucuggcuaaaccaggugugauuucugugauggggaccuag

SEQ ID NO: 230678 - protein, 365 aa, Artificial Sequence
  derived and/or modified sequence
MDRAALLGLARLCALWAALLVLFPYGAQGNWMWLGIASFGVPEKLGCANLPLNSRQKELCKRKPYLLPSIREGARLGIQECGSQFRHERWNCMITAAATTAPMGASPLFGYELSSGTKETAFIYAVMAAGLVHSVTRSCSAGNMTECSCDTTLQNGGSASEGWHWGGCSDDVQYGMWFSRKFLDFPIGNTTGKENKVLLAMNLHNNEAGRQAVAKLMSVDCRCHGVSGSCAVKTCWKTMSSFEKIGHLLKDKYENSIQISDKTKRKMRRREKDQRKIPIHKDDLLYVNKSPNYCVEDKKLGIPGTQGRECNRTSEGADGCNLLCCGRGYNTHVVRHVERCECKFIWCCYVRCRRCESMTDVHTCK

SEQ ID NO: 230679 - DNA, 3147 bp, Artificial Sequence
  derived and/or modified sequence
agaagtttctcacctaggaatgcgaggggcgctcccgcatctcctgcacatctccacccctgcgcaggaggagatccccaggctgctctctccatctctcctacagctccctgcaaacgagggggaagctgctgagagtccctatcactgctggccttttaatgttgtatgcaaggaggaagagggcgagggataacttggtgctggacaactgacctgcggcccgaagggcctctggggagggggtgcaaaagaggagcggctgggctgggggactccatgcgggggcgatggacagggcggcgctcctgggactggcccgcttgtgcgcgctgtgggcagccctgctcgtgctgttcccctacggagcccaaggaaactggatgtggttgggcattgcctccttcggggttccagagaagctgggctgcgccaatttgccgctgaacagccgccagaaggagctgtgcaagaggaaaccgtacctgctgccgagcatccgagagggcgcccggctgggcattcaggagtgcgggagccagttcagacacgagagatggaactgcatgatcaccgccgccgccactaccgccccgatgggcgccagccccctctttggctacgagctgagcagcggcaccaaagagacagcatttatttatgctgtgatggctgcaggcctggtgcattctgtgaccaggtcatgcagtgcaggcaacatgacagagtgttcctgtgacaccaccttgcagaacggcggctcagcaagtgaaggctggcactgggggggctgctccgatgatgtccagtatggcatgtggttcagcagaaagttcctagatttccccatcggaaacaccacgggcaaagaaaacaaagtactattagcaatgaacctacataacaatgaagctggaaggcaggctgtcgccaagttgatgtcagtagactgccgctgccacggagtttccggctcctgtgctgtgaaaacatgctggaaaaccatgtcttcttttgaaaagattggccatttgttgaaggataaatatgaaaacagtatccagatatcagacaaaacaaagaggaaaatgcgcaggagagaaaaagatcagaggaaaataccaatccataaggatgatctgctctatgttaataagtctcccaactactgtgtagaagataagaaactgggaatcccagggacacaaggcagagaatgcaaccgtacatcagagggtgcagatggctgcaacctcctctgctgtggccgaggttacaacacccatgtggtcaggcacgtggagaggtgtgagtgtaagttcatctggtgctgctatgtccgttgcaggaggtgtgaaagcatgactgatgtccacacttgcaagtaaccactccatccagccttgggcaagatgcctcagcaatatacaatggcattgcaaccagagaggtgcccatccctgtgcagcgctagtaaagttgactcttgcagtggaatccctagaaccttggacctgagagtttcccttacctgatcgacatattttcctttatctgatcaacccatcaatcatgtggatttcttgggattctaatgttgaaaaggtttatattcaccttttgatgatttggggaatatatattgacatacaaggaagataatctgtttcctaagcaagaaataacaggaaagatcccttatgccaggaggcctgccatactcaggataagatccttgaatatggaacttagttacaggactcaataatggtgggtgaacattagtcatttttaaaagacacctcttatagcaataaggagacattaacatgaatctcatttattctctcagtattttaactgaagaaattatactgtttgtgtgtggatagaagatgttgaaaagttaacataagcattgggtgctgacttaccctttcatgtacttccaaagaaaggtaatcaaaaagaatcttcttaagtgatataatatccctaaaaaaatgatcattacagatgtttagtgacaaagaatcaatatgtaaaaagtataatgaatgatttagattttaagtgccttttcactgggagaatctggaaaaacctccataaggtatatagcaatctttgatctttagattcatacttttatcacagatcagtttcaactgttaaaaacccacctctgagatactggggggaggatcctgaaacatgcgggaaaaggagaggtaaacagtggaggtaaaaatataatttcatacattgtaaagaaaagcaccctttaaatgtgtaaagacagtgttttgtaaagaattttgtttaaaaagtttctattttgtaaatacagtacttaagttatatgatttatattaaaacatttattgacaaagcctaagagctaaggcagtaaaattatctcataaataatattagcttattttttttcatactattaatgctatttttttggacatcgaagagaatttaacttagcagttagttatatggatgtgtatttcttgctaaaatgacagttttatatgttatagattaaaatatgttgcaaaatatcaaaaatttgtgttatttcagcagtaagattaattgaattctcttttcacattagttatgcttaactcataaggttattataataaattatattagtaaaagtcttaactggaaaaaagaatctaaatcagaatagtgatcaatttgtggatttgatatcctggatatttattatattttatgtaatgctgcatttctatttgaatgttaagtggtctttcttgtttttaatattcatgcatgtatattcatcatattttacaaggttcctggtaaaaattacagggctctatttaaggatgtattttaatgtaaatgcttatgttttttatgaattgttaaatatttcagtattatatagaaaaaaatagatttttaaaattcagaatggacaaagagaatattcattttcttattaataagataaagaaatgtttccctgccccacagtcttcattctatttctctttaattttattcactgaggcagagaaacaatttttgaaaaagagcaaacccatggaaaatgtctcagatctaatattaaaatcaagactaagcatttaactgtga

SEQ ID NO: 230680 - DNA, 1098 bp, Artificial Sequence
  derived and/or modified sequence
atggatcgcgctgccctcctaggtctcgctcgactctgtgcactgtgggcagccctactggtgcttttcccttacggagcacaaggaaattggatgtggctgggcattgcctcatttggcgtacctgagaagctggggtgcgccaacctgccactgaatagccgccaaaaggagctgtgcaagagaaagccttacctgcttccctctatacgggaaggcgccaggcttggaattcaggaatgtggcagccaattccgccacgaacggtggaactgcatgatcacagcagccgctacgactgctccaatgggggcgtccccgctgttcgggtacgagctgtcctccggcaccaaggagacagcctttatatacgcagtgatggctgctgggctcgtgcattccgttactcgctcctgtagtgccggtaatatgactgaatgcagctgcgatacaacattgcagaacggtggatccgcttctgagggatggcactggggggggtgcagcgacgacgtccagtacggcatgtggttcagcagaaagtttcttgattttcccattggaaataccaccggtaaggagaataaggttctgctcgctatgaatcttcacaacaatgaagctggacgccaagcagtggccaagctgatgagcgtggactgtagatgccacggagtgtcgggaagttgtgcagtgaaaacttgctggaaaacgatgtcgagcttcgagaaaataggccacttgctcaaggataaatatgagaatagcatacagattagcgacaaaacaaaacggaaaatgcgtaggcgcgagaaagaccagcgtaagattcccatccacaaagacgacctgctttatgttaacaaaagtcccaattattgtgttgaggacaagaagttggggataccgggaacacaaggcagagagtgcaatcggacgagtgaaggggcagatggttgtaacttgctttgctgcggaagaggttacaatacacacgtggtgcggcacgtggaacggtgtgagtgtaagttcatttggtgctgctacgttcgttgcagaagatgcgaatcaatgaccgacgtgcacacctgcaaatag

SEQ ID NO: 230681 - DNA, 1098 bp, Artificial Sequence
  derived and/or modified sequence
atggaccgggccgccctgctgggcctggcccggctgtgtgccctgtgggccgccctgctggtgctcttcccctatggagcccagggcaactggatgtggctgggcatcgccagctttggagtgcctgagaagctgggctgtgccaacctgcccctgaacagccggcagaaggagctgtgcaagaggaagccctacctgctgcccagcatccgggagggcgcccggctgggcatccaggagtgtggcagccagttcagacatgagcgctggaactgcatgatcacagctgctgccaccacagcccccatgggcgccagccccctgtttggctatgagctgagcagcggcaccaaggagacagccttcatctatgctgtgatggctgctggcctggtgcacagcgtgaccaggagctgcagcgctggcaacatgacagagtgcagctgtgacaccaccctgcagaatggaggcagcgccagcgagggctggcactggggcggctgcagtgatgatgtgcagtatggcatgtggttcagcaggaagttcctggacttccccatcggcaacaccaccgggaaggagaacaaggtgctgctggccatgaacctgcacaacaatgaggccggccggcaggccgtggccaagctgatgtctgtggactgccgctgccacggcgtgtctggcagctgtgctgtgaagacctgctggaagaccatgagcagctttgagaagattggccacctgctgaaggacaagtatgagaacagcatccagatcagtgacaagaccaagaggaagatgagaagaagagagaaggaccagaggaagatccccatccacaaggatgacctgctgtatgtgaacaagagccccaactactgtgtggaggacaagaagctgggcatccctggcacccagggccgggagtgcaacagaaccagcgagggcgcagatggctgcaacctgctgtgctgcggccggggctacaacacccacgtggtgcgccacgtggagcgctgtgagtgcaagttcatctggtgctgctacgtgcgctgcagaagatgtgagagcatgacagatgtgcacacctgcaagtag

SEQ ID NO: 230682 - DNA, 1098 bp, Artificial Sequence
  derived and/or modified sequence
atggaccgggccgccctgctgggcctggcccggctgtgcgccctgtgggccgctcttttagtgctctttccttacggggcccaggggaactggatgtggctcggaatcgcttcgtttggtgtacccgaaaagttgggctgtgcaaacttgccgctcaacagccgtcaaaaagagctgtgcaaacgaaaaccctatctgctaccatctattagggaaggagcccgactggggatccaggagtgtggaagtcagttccgccacgagcgttggaattgcatgattaccgccgccgcgaccaccgcccccatgggcgcatctcccctgttcggatacgaattgtcaagtgggacaaaggagactgcatttatctatgctgtgatggcagccggtttagtgcactccgtgaccaggagttgctccgccgggaatatgaccgaatgttcgtgcgacaccacacttcagaatgggggttccgctagtgagggatggcattggggtggctgttcagatgacgtgcaatacggtatgtggttctctcgcaagtttctcgattttcctataggaaacaccactgggaaggagaacaaggtccttctggcgatgaatcttcacaataatgaggccggcaggcaagccgtggccaagttgatgtctgtggactgccggtgtcacggagtcagtggctcgtgtgctgttaaaacatgctggaagactatgtcatctttcgagaagatcggtcatttgctcaaagacaagtacgaaaattctatccagatttccgacaagaccaagcgcaaaatgaggcgcagagaaaaggaccaaaggaagatcccaattcataaggatgatctactgtatgtcaacaaatccccaaactattgcgttgaagataagaagcttggaattcccggcacccaagggcgcgagtgcaatcgcacttccgaaggcgccgacggttgtaatctcctgtgctgtgggcggggatacaatacgcacgtggttcggcatgttgagagatgtgagtgtaaatttatatggtgttgttatgtaaggtgcaggcggtgtgagtcaatgacagatgttcatacttgcaagtag

SEQ ID NO: 230683 - DNA, 1098 bp, Artificial Sequence
  derived and/or modified sequence
atggaccgggcagccctgctgggcttagcacgcctgtgtgccctgtgggcagccttgcttgtgttgttcccttatggagcacagggaaattggatgtggctggggatcgcctcattcggagttcccgagaagctgggatgcgccaaccttcctctgaattcgcggcagaaggaactctgtaaacggaagccctatcttctcccctccatcagagagggagctaggctagggatacaggaatgcgggtctcagttccgccatgagcgatggaactgcatgattacagcggctgcgacgactgctcccatgggtgcgtctcctcttttcggttatgaattgtccagcggcaccaaggaaactgccttcatttacgcagtcatggcagctggactggtgcactcagttacccgcagttgctccgcgggtaatatgaccgagtgtagctgcgacaccactctgcaaaatggcggttcagcttctgaaggctggcattggggtggatgctcggatgacgtgcaatatggcatgtggtttagccgtaagttcctggatttccccatcgggaataccaccggtaaggagaacaaggtgctgcttgccatgaacctccacaataatgaggccggacggcaggcagtagctaagcttatgtcggtcgattgcaggtgtcacggggtgtctggctcttgtgctgtaaaaacctgttggaaaaccatgagctctttcgaaaagatcggacatcttctcaaggacaagtatgagaattcaatccagatctcagataaaaccaagagaaaaatgagacggcgagaaaaggaccaacgcaagatccctattcacaaagacgatttactgtacgtgaacaaatccccgaactattgcgtggaggataagaagctcggaattcctggcacccagggcagagagtgcaaccgcacatcagaaggcgctgatggatgtaatctgctttgttgtggtcgcggatacaatacacatgtggtacgacatgtagagagatgcgaatgcaaatttatttggtgctgttacgttcgctgtagacgatgtgagtccatgaccgacgtgcacacctgtaagtag

SEQ ID NO: 230684 - DNA, 1098 bp, Artificial Sequence
  derived and/or modified sequence
atggatagggccgccctgttaggtctggcccggctttgtgcactgtgggctgctttattagttctgttcccatacggggctcaggggaattggatgtggctgggcatcgcatcgtttggcgtgcccgaaaagctgggttgtgccaatctgcctctgaattcacgacagaaagaactctgtaaacggaaaccatacctactcccatctatcagagaaggggccagactgggtattcaagaatgcgggagccagtttcgccacgagcggtggaactgcatgattaccgccgcagcgacaaccgcccccatgggagccagccccttgtttgggtacgagttatcttccggaacgaaagaaaccgcttttatatacgccgtcatggcagccggattggtacattctgtcactagatcttgcagcgcaggaaacatgactgaatgcagctgcgacaccacccttcaaaatgggggctccgcatcagaggggtggcattggggaggatgctcagatgatgtgcagtacggtatgtggttctctcgaaaattcctggatttcccaatcggtaacactaccggcaaggaaaataaggtgctcctcgccatgaacctgcacaataacgaagccggacgtcaagctgtggccaagctgatgagtgtcgactgcagatgtcacggagtgagcggaagctgtgctgtaaagacatgttggaaaactatgtcttctttcgaaaagatcggccatctgcttaaagacaaatatgaaaattctatccagatatcggacaagacgaaaagaaagatgagaagaagagagaaagaccaacgaaagataccaatccacaaagacgacctcctgtatgtcaacaagagtccgaattattgtgtcgaggataaaaaattgggtataccgggcacccaaggacgggaatgcaaccgaacctccgagggcgctgatggctgcaatcttctgtgttgtggccgaggctacaatactcatgtcgtgcggcatgttgagagatgtgagtgcaaattcatctggtgttgttatgtcagatgcagacgctgcgaatcgatgacagatgttcacacctgtaaatag

SEQ ID NO: 230685 - DNA, 1098 bp, Artificial Sequence
  derived and/or modified sequence
atggaccgagcagcccttctgggactggcaaggctttgcgccctttgggccgcacttctcgtgctgttcccatatggcgctcaggggaattggatgtggctcggaattgccagcttcggtgtgccagagaaacttggatgtgcgaacttgccgctgaattcaaggcaaaaggaactttgtaagcggaaaccttatctattgcctagcattcgtgagggggcccgactagggatccaggagtgcggatctcagtttagacatgagagatggaattgcatgatcactgccgcagcaactactgcacccatgggagcatcacctttattcggctacgagctgagctctggaacaaaggagaccgcctttatatacgctgtgatggcagctggactggtgcactctgttactcgaagctgctctgccggcaacatgacagaatgctcttgcgacacgacactacaaaacggaggttcagcctctgaaggatggcattggggtgggtgctcggacgatgtgcagtacgggatgtggttcagccgtaaattcttagattttcctatcgggaacaccaccggaaaggagaacaaggtcctccttgccatgaatctccataacaacgaagccggccgacaagccgttgccaaacttatgagcgtagactgtaggtgtcacggtgttagtgggtcctgtgccgtgaagacttgttggaagactatgagcagtttcgagaagatcggtcacctgctgaaagacaagtatgaaaatagcatccagatctcggacaaaactaagagaaagatgcggcgaagagaaaaggaccagcggaaaatccccatccacaaagacgatctgctgtatgttaacaaatctccgaattactgcgtcgaggataagaaattggggatccctggaacgcaaggtcgcgaatgcaataggacaagcgaaggggcggacggttgcaatctcctgtgctgtgggaggggctacaacactcacgttgttcggcatgtcgagaggtgtgaatgtaaatttatctggtgctgttacgtacgatgccgccggtgtgagagcatgaccgacgtgcacacctgtaagtag

SEQ ID NO: 230686 - DNA, 1098 bp, Artificial Sequence
  derived and/or modified sequence
atggacagagccgccctgctgggcctggccagactgtgcgccctgtgggccgccctgctggtgctgttcccctacggcgcccagggcaactggatgtggctgggcatcgccagcttcggcgtgcccgagaagctgggctgcgccaacctgcccctgaacagcagacagaaggagctgtgcaagagaaagccctacctgctgcccagcatcagagagggcgccagactgggcatccaggagtgcggcagccagttcagacacgagagatggaactgcatgatcaccgccgccgccaccaccgcccccatgggcgccagccccctgttcggctacgagctgagcagcggcaccaaggagaccgccttcatctacgccgtgatggccgccggcctggtgcacagcgtgaccagaagctgcagcgccggcaacatgaccgagtgcagctgcgacaccaccctgcagaacggcggcagcgccagcgagggctggcactggggcggctgcagcgacgacgtgcagtacggcatgtggttcagcagaaagttcctggacttccccatcggcaacaccaccggcaaggagaacaaggtgctgctggccatgaacctgcacaacaacgaggccggcagacaggccgtggccaagctgatgagcgtggactgcagatgccacggcgtgagcggcagctgcgccgtgaagacctgctggaagaccatgagcagcttcgagaagatcggccacctgctgaaggacaagtacgagaacagcatccagatcagcgacaagaccaagagaaagatgagaagaagagagaaggaccagagaaagatccccatccacaaggacgacctgctgtacgtgaacaagagccccaactactgcgtggaggacaagaagctgggcatccccggcacccagggcagagagtgcaacagaaccagcgagggcgccgacggctgcaacctgctgtgctgcggcagaggctacaacacccacgtggtgagacacgtggagagatgcgagtgcaagttcatctggtgctgctacgtgagatgcagaagatgcgagagcatgaccgacgtgcacacctgcaagtag

SEQ ID NO: 230687 - protein, 759 aa, Artificial Sequence
  derived and/or modified sequence
MSKRLRSSEVCADCSGPDPSWASVNRGTFLCDECCSVHRSLGRHISQVRHLKHTPWPPTLLQMVETLYNNGANSIWEHSLLDPASIMSGRRKANPQDKVHPNKAEFIRAKYQMLAFVHRLPCRDDDSVTAKDLSKQLHSSVRTGNLETCLRLLSLGAQANFFHPEKGNTPLHVASKAGQILQAELLAVYGADPGTQDSSGKTPVDYARQGGHHELAERLVEIQYELTDRLAFYLCGRKPDHKNGQHFIIPQMADSSLDLSELAKAAKKKLQSLSNHLFEELAMDVYDEVDRRETDAVWLATQNHSALVTETTVVPFLPVNPEYSSTRNQGRQKLARFNAHEFATLVIDILSDAKRRQQGSSLSGSKDNVELILKTINNQHSVESQDNDQPDYDSVASDEDTDLETTASKTNRQKSLDSDLSDGPVTVQEFMEVKNALVASEAKIQQLMKVNNNLSDELRIMQKKLQTLQSENSNLRKQATTNVYQVQTGSEYTDTSNHSSLKRRPSARGSRPMSMYETGSGQKPYLPMGEASRPEESRMRLQPFPAHIGRSALVTSSSSLPSFPSTLSWSRDESARRASRLEKQNSTPESDYDNTPNDMEPDGMGSSRKGRQRSMVWPGDGLVPDTAEPHVAPSPTLPSTEDVIRKTEQITKNIQELLRAAQENKHDSYIPCSERIHVAVTEMAALFPKKPKSDMVRTSLRLLTSSAYRLQSECKKTLPGDPGSPTDVQLVTQQVIQCAYDIAKAAKQLVTITTKENNN

SEQ ID NO: 230688 - DNA, 2280 bp, Artificial Sequence
  derived and/or modified sequence
atgtccaagagactgcgctcatcagaggtctgcgccgactgctctggcccagacccatcatgggcttccgtgaatagaggaacttttctttgcgacgagtgctgcagcgtacaccgttcactaggccgacatataagccaagtgaggcacttgaaacatacaccttggccccctaccctcctgcagatggtcgagacactgtacaacaacggagctaacagtatctgggagcattccttactggacccagcctccatcatgagcggacgacgtaaagccaaccctcaggacaaagtacatcctaacaaggcagaattcatccgcgcgaagtaccagatgctggcctttgtgcaccgactcccttgtcgagacgacgacagcgttactgcaaaagacctgagtaaacagctgcacagcagtgtccgcactggtaatctggagacatgtctgcgtcttctatcattaggtgcacaggccaacttctttcacccagaaaagggcaacacgcctctgcacgtggcgagtaaagcaggccagatactgcaagccgagctcctggcagtgtacggggcagaccctgggacgcaagactcctccggaaaaacacccgtcgattacgcacgccaaggagggcaccatgagcttgccgagcgattagttgagatccagtacgagctgaccgaccgattggcattttatctgtgcggaagaaagccggatcacaagaacggccagcacttcattattccgcagatggcagactcctccctggatctctcagagttagccaaggccgccaaaaagaaattacagtctctcagcaatcacctcttcgaggagctagccatggacgtctatgacgaagtcgaccggagagaaacagacgctgtctggctggctacacagaatcacagcgcccttgtgactgaaacaactgttgtgccgttcctgcccgtcaacccagagtattcttctacgcggaatcaggggcggcagaaactagcgcgattcaatgctcacgagttcgctaccctggtaatagacattctcagcgacgccaaacggagacaacaggggtctagcctcagcgggagtaaggataatgttgaacttatacttaagactattaacaaccaacacagcgtggaatcgcaggataatgaccaacccgactacgatagtgtcgcatccgacgaggacactgacctagagaccacggcctcaaagaccaaccggcaaaaaagcctggacagcgatctgtccgacgggcccgtaaccgttcaggagttcatggaggtaaaaaatgcccttgtggcctccgaagccaagatccaacaactgatgaaagtaaataacaacctgtcagatgaactccgcataatgcagaaaaaactacaaacgcttcagtccgagaacagcaatctgaggaagcaggccaccaccaatgtgtaccaggtccagaccgggtcagaatacaccgacacttcaaaccatagtagcttgaaacgccgcccatctgctcggggcagccgccccatgagcatgtatgaaacaggcagcggacagaaaccctatctgcctatgggggaggcttcccggcctgaggagtccagaatgaggcttcaaccatttccagctcatatcggccggtctgcactagtgacgtcatctagtagcttgccgagcttcccttcgactttgagttggtcaagggacgaatctgcaagacgggcctctagactcgagaagcagaactcaacccccgagagtgactacgacaatacaccaaatgacatggaacccgatggcatgggcagtagccggaaggggcgccagcggtcaatggtgtggccaggcgacggcctcgtgccagacacagccgaaccacacgttgcacctagccctaccttgccgtcgaccgaagatgtcattcgaaaaacagagcagatcacaaaaaacatccaagaactcctgcgtgccgcccaggagaacaagcacgacagttacataccctgctctgagagaatccacgtagccgttaccgaaatggctgccctatttccaaagaagcctaaatctgacatggtgcgcaccagccttaggttgctgacctctagtgcctacaggttgcagtctgagtgcaagaagactctgcctggcgaccccgggtcacccactgacgtccaactggttactcaacaagtgatccagtgcgcctacgacattgccaaagccgccaaacagcttgtcaccataactactaaggaaaacaacaattag

SEQ ID NO: 230689 - DNA, 2280 bp, Artificial Sequence
  derived and/or modified sequence
atgagcaagaggctgcggagcagcgaggtgtgtgccgactgcagcggccctgaccccagctgggcctctgtgaacagaggcaccttcctgtgtgatgagtgctgcagcgtgcacaggagcctgggccgccacatcagccaggtgcgccacctgaagcacaccccctggccacccaccctgctgcagatggtggagaccctgtacaacaacggggccaacagcatctgggagcacagcctgctggaccctgccagcatcatgagcggccgcaggaaggccaacccccaggacaaggtgcaccccaacaaggccgagttcatccgggccaagtaccagatgctggcctttgtgcaccggctgccctgcagagatgatgattctgtgacagccaaggacctgagcaagcagctgcacagctctgtgaggactggaaacctggagacctgcctgcggctgctgagcctgggcgcccaggccaacttcttccaccctgagaagggcaacacccccctgcacgtggccagcaaggccggccagatcctgcaggccgagctgctggccgtgtatggagctgaccccggcacccaggacagcagcggcaagacccctgtggactatgcccggcagggcggccaccacgagctggccgagcggctggtggagatccagtatgagctgacagaccggctggccttctacctgtgtggcaggaagccagaccacaagaatggccagcacttcatcatcccccagatggctgacagcagcctggacctgtctgagctggccaaggccgccaagaagaagctgcagagcctgagcaaccacctgtttgaggagctggccatggatgtgtatgatgaggtggacagaagagaaacagatgctgtgtggctggccacccagaaccacagcgccctggtgacagagaccaccgtggtgcccttcctgcctgtgaaccctgagtacagcagcaccaggaaccagggccggcagaagctggcccgcttcaatgcccacgagtttgccaccctggtgattgacatcctgagtgatgccaagaggcggcagcagggcagcagcctgagcggcagcaaggacaacgtggagctgatcctgaagaccatcaacaaccagcacagcgtggagagccaggacaatgaccagcctgactatgacagcgtggccagtgatgaggacacagacctggagaccacagccagcaagaccaaccggcagaagagcctggacagcgacctgagtgatggccctgtgacagtgcaggagttcatggaggtgaagaatgccctggtggccagcgaggccaagatccagcagctgatgaaggtgaacaacaacctgagtgatgagctgcgcatcatgcagaagaagctgcagaccctgcagagcgagaacagcaacctgaggaagcaggccaccaccaacgtgtaccaggtgcagacaggcagcgagtacacagacaccagcaaccacagcagcctgaagagaagacccagcgcccggggcagccggcccatgtccatgtatgagaccggcagcggccagaagccctacctgcccatgggagaggccagcaggcctgaggagagcaggatgaggctgcagcccttccctgcccacatcggccgcagcgccctggtgaccagcagcagcagcctgcccagcttccccagcaccctgtcctggagcagagatgagagcgcccggcgggccagccggctggagaagcagaacagcaccccagagagtgactatgacaacaccccaaatgacatggagccagatggcatgggcagcagcaggaagggccggcagaggtccatggtgtggccaggagatggcctggtgcctgacacagctgagccccacgtggcccccagccccaccctgcccagcacagaagatgtgatcaggaagacagagcagatcaccaagaacatccaggagctgctgcgggccgcccaggagaacaagcatgacagctacatcccctgcagcgagcgcatccacgtggccgtgacagagatggccgccctcttccccaagaagcccaagagtgacatggtgaggaccagcctgcggctgctgaccagcagcgcctaccgcctgcagagcgagtgcaagaagaccctgcccggggaccccggcagccccacagatgtgcagctggtgacccagcaggtgatccagtgtgcctatgacatcgccaaggccgccaagcagctggtgaccatcaccaccaaggagaacaacaactag

SEQ ID NO: 230690 - DNA, 2280 bp, Artificial Sequence
  derived and/or modified sequence
atgagcaagcggctgcggagcagcgaggtgtgcgccgactgcagcggccccgacccgtcttgggcttcagtcaatagggggacgttcctctgcgacgagtgctgctccgtgcatagaagtctgggccgccatatatcccaggtgcgccatctgaagcacacaccttggcctccaacactgctgcaaatggtcgaaacactctacaataatggcgccaattctatctgggaacattccctgctcgaccccgcttctattatgtcaggccgcaggaaggctaacccacaggataaggtgcatcccaataaagctgaatttatacgggcaaagtaccagatgctcgccttcgtgcaccggcttccttgccgtgacgacgactccgttactgccaaagacttgagtaaacagctgcattcatctgtgaggaccggaaaccttgagacctgccttcgactgctaagtcttggtgcacaggccaacttttttcatcctgagaaaggaaacacgcccctgcatgtcgccagcaaagcaggtcagattctccaggctgaactgttggcggtttatggagccgatcctgggactcaggatagctccggaaaaactcctgtcgattacgcgcgtcaagggggacatcatgagcttgcggaacggctggtggaaatccagtatgagctgacagaccgactggccttctacctgtgtggacgcaagcccgatcataaaaacggacaacattttattattccccagatggccgatagctcactggacctgtccgagcttgcgaaggctgccaagaagaagctacagtccctttctaaccacttgtttgaggaattagccatggacgtgtacgatgaggtcgacaggagagaaacggacgctgtctggctcgccacacagaaccatagcgcgctggtgaccgaaaccacagttgtgccctttctccctgtcaacccagaatactccagcactagaaaccagggacggcagaagctggcgagatttaatgcgcacgagttcgccaccctcgtgattgacattctatctgatgccaagagacgacagcagggttccagtctgtccgggagcaaagataacgttgaactgattttgaaaaccatcaacaaccagcactctgtggaaagccaggacaatgaccaacctgactatgatagtgtagcttctgacgaggataccgacctggagacaacggcaagtaagactaaccggcagaagagcctcgacagcgatctcagcgacgggcccgttaccgtgcaagagtttatggaggtgaagaacgccctggtagcctccgaggcgaagatccagcagttgatgaaggtcaacaataatttaagtgacgagctgagaattatgcagaagaagttacagaccctgcagagcgagaacagcaatctccggaaacaggcaactacaaatgtataccaggtccaaaccggttccgaatatactgatacctctaaccactcctctctgaaaagaaggccatctgcacgggggtcacggcctatgagtatgtacgaaacaggatccgggcagaaaccctatctacccatgggggaggcaagcaggccagaagaatcccgtatgcgcctccagccttttcccgcacacattggtagatctgcgctggtcacttcctcaagttctttgccctcttttccaagcacattgagctggagtagagacgagtccgcgcgccgcgcctcccgtcttgagaaacagaactctaccccagagtctgactatgacaacacacccaacgacatggagccagacggtatgggttcttctcggaaaggcagacagaggtcgatggtatggcccggagatgggttggttccagatacagccgagccgcatgtggcccccagccctactctgccaagtaccgaggatgtaataaggaagacggagcaaatcaccaagaatattcaggaactgctcagagctgcccaggaaaataagcatgattcctatatcccgtgttctgagcggattcacgtagccgtgactgagatggccgctctctttcctaagaagcctaagagcgatatggtgcggacaagcctgcgcttgctgacatcctctgcatatagactgcagtcagaatgtaagaagactcttccgggtgaccctgggtcaccgactgacgtgcagctcgtgacccagcaggtcatccagtgtgcgtacgacatcgcaaaagcagccaaacaacttgtcaccataacaacaaaagagaacaacaattag

SEQ ID NO: 230691 - DNA, 2280 bp, Artificial Sequence
  derived and/or modified sequence
atgtcaaaaagactcagaagttccgaagtttgcgctgattgcagcggccctgacccttcttgggcatcggtgaaccgcggtaccttcctttgtgatgaatgctgttccgttcaccgtagcctgggtcgccatatttcccaagtcaggcatctgaaacacaccccttggccaccgaccctgttgcaaatggtcgagacactctataataacggggcaaattccatctgggagcactcactgctcgatcccgcatctatcatgagtggaaggcgcaaagccaatcctcaagacaaagtccatcctaataaagctgagttcatcagagccaagtatcaaatgctggcattcgtgcacagactgccctgcagggacgatgatagcgttacggccaaagacttgagtaagcagctgcacagttccgtccgaactggcaacctggaaacttgcttgagactactgtctctgggagcgcaggctaatttcttccatccagaaaagggcaacacccctttacacgtggcatctaaggccggacaaatcctgcaagccgaattgctggctgtgtatggcgcagacccaggcacacaggacagttccggtaaaacaccagtggactatgcacggcaagggggacaccacgaactggccgaaagactggtggagatccagtacgaacttaccgaccgactggctttctacctgtgtggcagaaagccagatcacaaaaacggccagcactttatcattccacagatggcagactccagcctggatctgagcgaacttgcgaaggctgcaaaaaaaaagctgcagtctctgtctaatcatttatttgaagagcttgccatggacgtgtatgatgaagtggaccgaagagagaccgacgccgtgtggctggccacccagaaccatagcgctcttgtcaccgaaacaactgtggttcccttcctgcccgtgaacccggaatactcctccactagaaaccagggtcggcagaaactagccagatttaatgctcacgagttcgctactcttgttattgacatcctcagcgacgcgaaacgcagacaacagggatctagtctcagcggctctaaggacaacgttgagctgatcttgaagactatcaacaaccagcacagtgtggaatctcaggacaacgatcagcctgattacgatagtgtggcatctgatgaagatacagacctggagacaactgcttcaaagacaaatcgtcagaagtcactcgacagtgatttatctgatggacccgtgactgtgcaggagttcatggaagtaaaaaacgctctggttgcgagtgaggcgaagatccagcagctgatgaaggtcaataataatctatccgacgaattgcgtattatgcagaagaaactgcagacattgcagtctgaaaactctaacctcaggaaacaggcaacaaccaacgtgtaccaggtccagaccggcagcgaatatactgatacaagcaatcacagcagtctgaaacggcgtccctccgcacgcggaagccgccctatgtctatgtatgaaacaggaagtggccagaagccatatttgccaatgggggaggcatcccgcccagaggagtcaagaatgcggctccagccctttccggctcatatcggccgaagcgcgttagtgactagcagctcaagtctgccaagtttccccagcactttgtcatggagcagagatgaaagcgcaagacgggcaagccgtttggagaaacagaattcgactcctgagtctgactatgacaatacacccaatgacatggagcccgacggtatggggtcatccagaaagggcagacaaaggtctatggtgtggcctggcgacggtctagtgccagatacggcagagccccacgttgcaccgagtcccaccctgccgtcgacagaggacgtgattcgcaagacggagcagattactaagaatatccaggaacttttacgcgctgcacaggaaaataagcatgacagctatattccctgttctgagaggatccacgtggcagttaccgagatggccgcattgtttccgaagaagccgaagagcgacatggtgcgcacatctttgcgcctcctaaccagctcagcgtataggctccagagcgagtgcaaaaaaacactcccaggcgatccgggttcacctaccgatgtgcaactggtcacacaacaggtaattcaatgcgcctacgacatcgcgaaggccgctaagcagctggtgactatcaccaccaaagaaaacaacaattag

SEQ ID NO: 230692 - DNA, 5456 bp, Artificial Sequence
  derived and/or modified sequence
atgtcgaaacggctccggagcagcgaggtgtgcgctgactgcagcgggccggatccttcctgggcatcagtaaataggggaacgtttttatgtgatgagtgctgcagtgtccatcggagtctagggcgccatatctcccaagtgaggcatctgaaacacacaccgtggcctccaacactgcttcagatggttgagaccttgtataataacggtgctaactctatatgggagcattctttgctggaccctgcgtctattatgagtggaagacgtaaagctaatccacaggataaagtacatcccaataaagcggaattcatcagagccaagtatcagatgttagcgttcgtccatcgcttgccctgccgggatgacgatagtgtgactgccaaagatcttagcaagcaactccattcgagcgtgagaacagggaatcttgaaacctgtttgagactgttatctttaggagcacaagccaacttctttcatcctgaaaaaggaaacaccccactccatgttgcctccaaagcagggcagattttacaggctgaattattggcagtatatggagcagacccaggcacacaggattctagtgggaaaactcccgttgattatgcaaggcaaggagggcaccatgagctggcagagcgcctcgtggaaatacagtatgagctaacggacagactagccttctatctctgtggcaggaaaccagatcacaaaaatggacagcactttataatacctcaaatggcagacagcagcctggatttgtctgaattggcaaaagctgctaagaagaaacttcaatctctaagtaatcatttgtttgaagaacttgccatggatgtgtacgatgaagttgacaggcgagagacggatgcagtctggcttgccacgcaaaaccacagcgccctggtaaccgagacaacggtcgtcccctttcttccggtcaatcctgagtactcatcaacacgaaatcagggcagacagaagttagctcggttcaacgcccatgagtttgccacgctggtcattgacattctcagtgacgccaagaggagacagcagggcagttctctctcgggttcaaaagacaatgtggagctcatactgaaaaccatcaataaccagcacagcgttgagagtcaagacaacgatcagcccgactatgacagcgtggcatcagacgaagacacagatttggaaaccactgcaagcaaaacaaaccggcagaagagcctagattcagatttatcagatggaccagtcactgtacaggaatttatggaggtcaaaaacgctctagtggcttctgaggccaagatacagcagctaatgaaggtgaataacaacttgagtgacgagctgagaattatgcagaaaaagcttcaaacactccagagtgaaaattcgaacctcaggaaacaggccacaaccaatgtatatcaggtgcaaactggttctgagtacacagacacttccaaccactcttccttaaagagacgtccgtctgcccggggcagtaggcccatgtccatgtacgagaccggatcaggtcagaaaccatatctcccaatgggagaagcgagccgccccgaagagagcaggatgagactccagcccttccccgcgcacatcgggaggagtgcacttgtgacctcctcttcatctctgccttccttcccctccacactttcctggtcgagggacgaaagcgcccgaagggcatccaggctggagaagcagaacagcacacctgagagtgactacgacaacactcccaacgacatggagccagatggcatggggtcaagccgaaagggacggcaaagaagtatggtgtggccaggggatggcttggtaccagacacagcagaaccccatgtggccccaagccccactctccctagcaccgaagatgtcatcaggaagactgaacagatcaccaaaaacatacaggagctcttaagagcagcccaagaaaataaacatgacagttatattccctgctcagagaggatacacgtagctgttacagaaatggcagcattattccccaaaaaacccaagtctgatatggtgaggacttcccttcgtttactgacgtccagtgcctaccgactgcagtcagagtgcaagaagaccctcccaggggaccccggctcacccacagacgttcagctggtcacgcagcaggtcatccagtgtgcgtacgacatcgccaaggctgccaagcagctggttaccatcaccaccaaagagaacaacaactgacaagggcagggcaccgcctcctctgttttctaggctttataaagtccaatttcaaattcagacgcagaactcttcagatttctacaaaaagaaacatttaatgacggtttaaaactttttaaaagaaaactcagtattatttttgcatgttttctaaccaattttcaactatttaacccacttgccttattttgtgcctatttgctggtttagtttctgatgttcggttgtgttgtcaacaactgttgagttgatcacatacatccaaaagtatagtttcattgtctaaagtttgtgaaaacttttccatcccttaaaactccctgcctatggctgaaactataaatgaaatttttcataaaacattttcttgagagagttcagttaaaaaagaaaaaatcagcgtcatttgttccctgccaagcatcgtgcaataagtgaatttcctggcctacttcataatctctaagtttggggtatctccaagcatgtatgtagagaaaggactttgccgctttttaaaactagtgtcacagtctctcttgggaggaaacaatgaattggttcatttcttctcagtgttttaccctgttacatgttctgttatttaatgttgttatctcaagctcctatctcttgatgttttcttgtcatcttgaaggctccatggaatgagataaagcattgacccaccacaggacatctcatgaagccatgttcagggtaggagctccacgcacatcaccacccattgtcaggtgctctccctcacccctgtaagccagacagtttgttcaaaacctgcagcaaagagaagcatcagtctaacaagccagaactcattttgtgccacccatttaggtatcactaccatgaactatagggaaaagaaatcacctactccctgacactgtgttgtacccttcatccaaaagtcagcttgcttctctgaccacttacagctttctcacatgagttgcttcacatttttcatcatctttaaggacttcttataaggaaagatgtatcgtatcgcagtcatctgagttagtttctcctccatcacctcatgagtacttaaaaattagacatcaactttcaagagttccttagagagtgtgctctagctggctgcctgctaccccaaagctctgaaagagtaaggttgaagtgctggaacatgctcagattgttttttagttactcaaaagccccttcttgttctgaatgtgaaagctcttcccgttcctgcttactgcagccattctgtgtgtgtggttcagaccctggcctagggccggtgatgtggatgagtgaagggagccaggtacacggcagcagggcagaggagactatggggagcccaccgcctacacagtaggggcagtagcccccagctccacgcctgttgccatgtggaaaagtgggcctagggtggccacagctttgatttttcaagagacaagaaacctagatgttttttggtgccatctctccatttataaatgttggcaaccaatttgaacactttcagagaccatgtgcaggtgagctgtgtcctctaggctgccagctcacagcccccaccccagggccctgtaagctgtgcagtgtgagggcctggcttccccggacacacctggagcagcctctgagtcttacccgtaatggagccggccaaccctgtgtgttatgttgctgtcgctcctgtttttaaccatatgttctgtcccatagcagtcattcacacatgtgaagaagacacaagaatcaaagtacaagttgcctcaatacatgctaataactaagcttctattttcacaggactgatcgatgcacacctttatagcttgaccatatgctgtcatgaaagtagcaccccgacggtgcttgctttactaagtcaccgtgtgtggatgcttttgtcgcattttgcttcactgtgagtagcatgggaaaagggtccacgtctccaaaagactcttccacttgtttgtcccacagccctaagtgccacattgctgttggatgctcccgggatgccttctagaagggggcctcccaccttaagttcaggcgccatctgatagccttttctgcaggcttcatgtccttagctgaccctcctttatcttgcaaacccctgcccctgctgtcccagggaggacgggcttctgtagaggcttctgggaaatgagctgtctgcaggaggtgaagcagtgttttccttggaatgtttgaggacctgcaatagaagatgttgcctttatggccctagagaaagtcaaggaacatggggaccaacaaagcatttccagttgtaagaatatgtcagaagagtgctcggttagcccacggtgccaaaactccaaacaagttccccggtggaatgacgtggccattggagggctgcaggtcgtcctctctgtatgtgccccgcgcatttccttggcctcatctgagatctggtgtcagagttctctgctcctgttggcaaatcgcaccttatctgaacatttgttccagccaccttttgcacatggattccgtaccttgcactagcaatgtctaccttcagtaacgtcgttctttttcaccctgtattctcaatgatcccttcctccccatatgccacccttcccccaaagctgatagggcagaggtgcactttatgaaactggcacttgactgaacagaaggaaacagctgtacctctaagctcctttcacagaaatcgtcatctgccttggaatgcaaatagttcttatttgccaaagaacagtgaattgggcccaaagatcaaacacagcatttcatgtaatcagaattctaaacgcacaactcgggagctgtgcacggcttctcaagtgattcagttgcagaaccaagagcaaaactcgcctgtttttgtcctcaatggcacccatgagctttccaatagtatagttttctttctttccttgtcctggttgaaggtaacgtgttcctagaaaagaaaatgctgcataggaaaactgagatgccttttattccaacgtgtttgatccctgtcactcattattctgtactttttattgtacattctattcctgtaattattgtgccctttaagtgttgtaaaatcgttttggaatttgtgcctgctagttatgcaataaacaggctctacaagtgtt

SEQ ID NO: 230693 - DNA, 2280 bp, Artificial Sequence
  derived and/or modified sequence
atgagcaagagactgagaagcagcgaggtgtgcgccgactgcagcggccccgaccccagctgggccagcgtgaacagaggcaccttcctgtgcgacgagtgctgcagcgtgcacagaagcctgggcagacacatcagccaggtgagacacctgaagcacaccccctggccccccaccctgctgcagatggtggagaccctgtacaacaacggcgccaacagcatctgggagcacagcctgctggaccccgccagcatcatgagcggcagaagaaaggccaacccccaggacaaggtgcaccccaacaaggccgagttcatcagagccaagtaccagatgctggccttcgtgcacagactgccctgcagagacgacgacagcgtgaccgccaaggacctgagcaagcagctgcacagcagcgtgagaaccggcaacctggagacctgcctgagactgctgagcctgggcgcccaggccaacttcttccaccccgagaagggcaacacccccctgcacgtggccagcaaggccggccagatcctgcaggccgagctgctggccgtgtacggcgccgaccccggcacccaggacagcagcggcaagacccccgtggactacgccagacagggcggccaccacgagctggccgagagactggtggagatccagtacgagctgaccgacagactggccttctacctgtgcggcagaaagcccgaccacaagaacggccagcacttcatcatcccccagatggccgacagcagcctggacctgagcgagctggccaaggccgccaagaagaagctgcagagcctgagcaaccacctgttcgaggagctggccatggacgtgtacgacgaggtggacagaagagagaccgacgccgtgtggctggccacccagaaccacagcgccctggtgaccgagaccaccgtggtgcccttcctgcccgtgaaccccgagtacagcagcaccagaaaccagggcagacagaagctggccagattcaacgcccacgagttcgccaccctggtgatcgacatcctgagcgacgccaagagaagacagcagggcagcagcctgagcggcagcaaggacaacgtggagctgatcctgaagaccatcaacaaccagcacagcgtggagagccaggacaacgaccagcccgactacgacagcgtggccagcgacgaggacaccgacctggagaccaccgccagcaagaccaacagacagaagagcctggacagcgacctgagcgacggccccgtgaccgtgcaggagttcatggaggtgaagaacgccctggtggccagcgaggccaagatccagcagctgatgaaggtgaacaacaacctgagcgacgagctgagaatcatgcagaagaagctgcagaccctgcagagcgagaacagcaacctgagaaagcaggccaccaccaacgtgtaccaggtgcagaccggcagcgagtacaccgacaccagcaaccacagcagcctgaagagaagacccagcgccagaggcagcagacccatgagcatgtacgagaccggcagcggccagaagccctacctgcccatgggcgaggccagcagacccgaggagagcagaatgagactgcagcccttccccgcccacatcggcagaagcgccctggtgaccagcagcagcagcctgcccagcttccccagcaccctgagctggagcagagacgagagcgccagaagagccagcagactggagaagcagaacagcacccccgagagcgactacgacaacacccccaacgacatggagcccgacggcatgggcagcagcagaaagggcagacagagaagcatggtgtggcccggcgacggcctggtgcccgacaccgccgagccccacgtggcccccagccccaccctgcccagcaccgaggacgtgatcagaaagaccgagcagatcaccaagaacatccaggagctgctgagagccgcccaggagaacaagcacgacagctacatcccctgcagcgagagaatccacgtggccgtgaccgagatggccgccctgttccccaagaagcccaagagcgacatggtgagaaccagcctgagactgctgaccagcagcgcctacagactgcagagcgagtgcaagaagaccctgcccggcgaccccggcagccccaccgacgtgcagctggtgacccagcaggtgatccagtgcgcctacgacatcgccaaggccgccaagcagctggtgaccatcaccaccaaggagaacaacaactag

SEQ ID NO: 230694 - protein, 661 aa, Artificial Sequence
  derived and/or modified sequence
MSKRLRSSEVCADCSGPDPSWASVNRGTFLCDECCSVHRSLGRHISQVRHLKHTPWPPTLLQMVETLYNNGANSIWEHSLLDPASIMSGRRKANPQDKVHPNKAEFIRAKYQMLAFVHRLPCRDDDSVTAKDLSKQLHSSVRTGNLETCLRLLSLGAQANFFHPEKGNTPLHVASKAGQILQAELLAVYGADPGTQDSSGKTPVDYARQGGHHELAERLVEIQYELTDRLAFYLCGRKPDHKNGQHFIIPQMADSSLDLSELAKAAKKKLQSLSNHLFEELAMDVYDEVDRRETDAVWLATQNHSALVTETTVVPFLPVNPEYSSTRNQGRQKLARFNAHEFATLVIDILSDAKRRQQGSSLSGSKDNVELILKTINNQHSVESQDNDQPDYDSVASDEDTDLETTASKTNRQKSLDSDLSDGPVTVQEFMEVKNALVASEAKIQQLMKIGRSALVTSSSSLPSFPSTLSWSRDESARRASRLEKQNSTPESDYDNTPNDMEPDGMGSSRKGRQRSMVWPGDGLVPDTAEPHVAPSPTLPSTEDVIRKTEQITKNIQELLRAAQENKHDSYIPCSERIHVAVTEMAALFPKKPKSDMVRTSLRLLTSSAYRLQSECKKTLPGDPGSPTDVQLVTQQVIQCAYDIAKAAKQLVTITTKENNN

SEQ ID NO: 230695 - protein, 646 aa, Artificial Sequence
  derived and/or modified sequence
MSKRLRSSEVCADCSGPDPSWASVNRGTFLCDECCSVHRSLGRHISQVRHLKHTPWPPTLLQMVETLYNNGANSIWEHSLLDPASIMSGRRKANPQDKVHPNKAEFIRAKYQMLAFVHRLPCRDDDSVTAKDLSKQLHSSVRTGNLETCLRLLSLGAQANFFHPEKGNTPLHVASKAGQILQAELLAVYGADPGTQDSSGKTPVDYARQGGHHELAERLVEIQYELTDRLAFYLCGRKPDHKNGQHFIIPQMADSSLDLSELAKAAKKKLQSLSNHLFEELAMDVYDEVDRRETDAVWLATQNHSALVTETTVVPFLPVNPEYSSTRNQGRQKLARFNAHEFATLVIDILSDAKRRQQGSSLSGSKDNVELILKTINNQHSVESQDNDQPDYDSVASDEDTDLETTASKTNRQKSLDSDLSDGPVTVQEFMEVKNALVASEAKIQQLMKVNNNLSDELRIMQKKASRLEKQNSTPESDYDNTPNDMEPDGMGSSRKGRQRSMVWPGDGLVPDTAEPHVAPSPTLPSTEDVIRKTEQITKNIQELLRAAQENKHDSYIPCSERIHVAVTEMAALFPKKPKSDMVRTSLRLLTSSAYRLQSECKKTLPGDPGSPTDVQLVTQQVIQCAYDIAKAAKQLVTITTKENNN

SEQ ID NO: 230696 - protein, 631 aa, Artificial Sequence
  derived and/or modified sequence
MSKRLRSSEVCADCSGPDPSWASVNRGTFLCDECCSVHRSLGRHISQVRHLKHTPWPPTLLQMVETLYNNGANSIWEHSLLDPASIMSGRRKANPQDKVHPNKAEFIRAKYQMLAFVHRLPCRDDDSVTAKDLSKQLHSSVRTGNLETCLRLLSLGAQANFFHPEKGNTPLHVASKAGQILQAELLAVYGADPGTQDSSGKTPVDYARQGGHHELAERLVEIQYELTDRLAFYLCGRKPDHKNGQHFIIPQMADSSLDLSELAKAAKKKLQSLSNHLFEELAMDVYDEVDRRETDAVWLATQNHSALVTETTVVPFLPVNPEYSSTRNQGRQKLARFNAHEFATLVIDILSDAKRRQQGSSLSGSKDNVELILKTINNQHSVESQDNDQPDYDSVASDEDTDLETTASKTNRQKSLDSDLSDGPVTVQEFMEVKNALVASEAKIQQLMKASRLEKQNSTPESDYDNTPNDMEPDGMGSSRKGRQRSMVWPGDGLVPDTAEPHVAPSPTLPSTEDVIRKTEQITKNIQELLRAAQENKHDSYIPCSERIHVAVTEMAALFPKKPKSDMVRTSLRLLTSSAYRLQSECKKTLPGDPGSPTDVQLVTQQVIQCAYDIAKAAKQLVTITTKENNN

SEQ ID NO: 230697 - DNA, 1986 bp, Artificial Sequence
  derived and/or modified sequence
atgagcaagcgtcttcggagctctgaagtgtgcgctgactgctccggtcctgatcctagttgggcaagcgtcaatcggggtacttttctttgcgacgagtgctgttctgtgcacagaagcctcgggcgccatatcagccaggtccgtcacctgaagcacacgccttggcctccaacacttctgcaaatggtagagaccttatataacaatggggctaactcgatctgggagcatagcctgctcgaccctgcttcaataatgtccggccgtaggaaggctaatccgcaggataaggtccaccccaacaaagctgaatttatcagggcaaaataccaaatgctggcctttgtgcaccgcctgccttgtagggacgacgacagcgtcacagcaaaagacctatctaagcaacttcactcctcagtgcggacgggtaatctggagacctgtctgcgcctgctgtccctgggagctcaggccaacttttttcacccagaaaagggaaacacccccctccacgtggcttctaaggccggccagattctgcaggccgagctcctggctgtgtatggagccgaccctgggacacaggacagcagcgggaagacgccagtggattacgccaggcaggggggacaccacgaactggcagagaggctagttgagatacagtatgagctgacagataggctcgctttctatctgtgcggcaggaagccagaccataagaatgggcagcactttataatcccccagatggcagatagttcactggacctgagcgaactggccaaggctgcaaagaagaagctgcaatcactcagcaatcacctgtttgaggagctagccatggatgtgtatgatgaggtggatcggagagaaacagacgccgtgtggctcgcaacgcaaaatcatagcgccctggtgactgaaaccactgtggtgcccttcttaccggtgaatccagaatattccagcacaagaaaccagggccggcaaaagctagctaggttcaacgcccacgagttcgcaacactggtaatcgatatcctgagtgatgcaaagcgcaggcagcagggcagcagcctatcaggcagcaaggacaacgtggagctcattcttaagaccatcaacaaccagcattcagtggagagccaggacaacgatcagccggactatgatagcgtggcttctgatgaagacaccgacctggaaaccacagcaagtaaaaccaacagacaaaagtccctggactcagatctttctgacggtccagtcacagtacaggagtttatggaggtaaagaatgcattggtggcgtccgaggctaaaattcagcaactgatgaagattggacggtccgctctggtgacttcgtcaagcagcctgccctccttcccaagtactctctcttggagccgcgacgaatccgcaagacgtgctagcaggctggaaaagcagaacagcacgccagagtctgattacgacaacactccgaatgacatggaaccagacggcatgggaagctcaagaaaggggcgccagcggtctatggtgtggccgggggacggtttagtaccggacacagctgaacctcacgtggccccttcaccaaccctcccctcaactgaggatgttatcaggaaaactgaacagatcaccaagaacatacaggagcttctcagagccgctcaggaaaataagcacgactcatatattccatgcagtgaacgcatccatgtggcagtgaccgagatggccgccctttttccaaagaaacccaagagcgacatggtgcgaacatcccttcgtctcctcacaagttcagcctatcggctacagtctgagtgcaagaagactctacccggcgaccccggaagcccaaccgatgtgcagcttgtcactcagcaggtcatccaatgcgcttatgacattgcaaaggccgctaagcagctggtaacaatcaccaccaaggagaacaacaattag

SEQ ID NO: 230698 - DNA, 1941 bp, Artificial Sequence
  derived and/or modified sequence
atgtcaaagaggctgcggtcgtccgaagtgtgtgccgattgtagcggccctgacccctcttgggcttctgtaaaccggggcacctttttatgcgatgagtgttgctccgtccatcggagtctgggacgccatatatctcaggtgcgtcatttgaagcatacaccatggccacccactttgctccaaatggtcgaaaccttatacaacaatggggcaaactctatatgggaacactcattgctggaccctgcatcaatcatgtcgggtcgcaggaaggcaaatcctcaggacaaagtacatccaaataaagctgaattcatccgggcaaagtatcaaatgttagctttcgttcacaggctcccttgtcgagacgacgactctgttactgccaaggacctctctaaacagcttcattccagtgtgagaacgggaaatctcgagacttgtctccgcctgttgagcctcggagcgcaggccaattttttccaccctgagaagggaaacactccattacacgtggcctcaaaagcaggccaaattctccaggcagaactactcgccgtgtatggggcagaccccggcacacaggactctagcgggaagacacctgtagattatgctcggcaaggcgggcaccacgaactggccgagcggctggtcgagatccagtacgagttgactgatcgccttgcattctacttgtgcggcagaaagccagaccataaaaatgggcagcatttcatcatccctcagatggccgatagctccctggatctgagcgagttggcaaaggccgcgaaaaaaaagctgcagagtttgtctaatcacttgtttgaggagctagctatggatgtctatgacgaagtcgatcggagggagacagacgccgtgtggctggccacacaaaatcactccgcccttgtgactgaaacaaccgtagttccatttttgcccgtgaatcctgaatatagctctacccggaaccaggggcgccagaagcttgcccgctttaacgcgcacgaatttgcaaccctggtgatcgacatcctcagtgatgctaagcgtcggcagcaaggaagttcgctgtccggatctaaggataacgtagaattgatcctcaagacaattaataatcagcactctgtggagagtcaggacaacgaccaacctgattatgattccgtcgccagcgacgaagatacagatttagagactaccgcctccaagactaaccggcagaaatctttagactccgatctaagcgacggaccagtgactgtccaggaatttatggaggttaagaacgctctcgtcgcttcagaagccaagatacagcaactaatgaaggtgaataataatttgagcgacgaactccggatcatgcagaagaaagcctcacggctcgaaaaacagaacagcacgccagagagcgattacgacaacacccccaacgacatggaacctgatggaatgggcagtagtcggaagggccgccaaaggtctatggtgtggcccggggatgggctagtcccagatacagcggaaccccacgtggcaccatcccccaccctgcccagcaccgaagacgtcattcgtaaaaccgagcagattacaaaaaatattcaagaactgctgagagcagcccaagagaataaacacgattcatacattccctgtagcgaaagaatccacgtagcagtgacagagatggccgctttgttcccaaagaagcccaaatcagatatggtacggacaagcctgcggctgctgaccagctctgcataccggctgcaatccgagtgtaaaaagactcttcctggcgacccgggctcacccactgacgtgcagttggtcacacagcaggttatccagtgcgcctacgatatcgccaaggccgccaaacaacttgtgacaattaccaccaaggaaaacaataactag

SEQ ID NO: 230699 - DNA, 1896 bp, Artificial Sequence
  derived and/or modified sequence
atgtcgaagaggttgcgatcttctgaggtgtgcgcagactgttccgggcctgacccctcatgggccagcgtcaaccgggggacctttctgtgcgatgagtgctgctctgtgcacaggtccctggggaggcacatttctcaggtgcgtcacctgaagcatacgccttggccaccaacattgctccaaatggtcgagactctctacaataacggcgctaatagtatttgggaacactctctgttagatccggcgtctataatgagcgggcgcaggaaagccaacccccaagataaggttcacccgaacaaggccgagttcatcagggcaaagtaccaaatgctcgcctttgtccataggctcccttgccgggatgacgactcagttaccgcgaaagacctgtcgaaacagctgcattcctcagtgcgcacaggtaatcttgagacctgcttgagactgctaagcctcggcgctcaggcaaacttcttccaccccgagaagggcaatacgccactgcacgtggcatctaaggccgggcagatccttcaagccgaactcctggccgtgtatggggctgaccccggcacacaggacagctcaggaaagacaccggtggactacgccaggcagggcggacaccacgagctagcggaaaggctggtcgagattcagtatgagctaaccgatagactggccttttatttgtgcggacgtaaacctgatcacaagaacggccagcatttcattattccccagatggcagactcttcattggacttgagtgaactggccaaggctgctaaaaagaaactgcagtcattaagcaatcatctatttgaggaactcgcaatggatgtttacgatgaggtagacaggcgtgagaccgacgccgtgtggctggcaacccagaaccacagcgctcttgttaccgaaaccacagtagtcccttttctcccggtgaatcccgaatactcgagcacacgtaaccaaggaaggcagaagctcgctaggttcaatgctcacgaattcgccaccctcgtcatcgatatcctgagtgacgccaagagacgtcagcaaggatccagcctgtctggatccaaggacaatgtggaattgatcctgaagacgatcaataatcaacacagcgtggaatcacaggataacgatcagcctgattatgactctgttgcatccgatgaggatactgatcttgaaaccactgcaagcaagaccaaccgtcaaaaaagcctggacagtgacctgagtgatggccctgtaaccgttcaggaattcatggaggtgaagaatgctttggtcgcatccgaagcgaagatccagcagctgatgaaagcatccagactcgagaagcagaacagtacacctgagtcagactatgataacactccaaacgatatggaaccagatggaatgggctcatctcggaagggtagacagagatccatggtctggccaggtgacggactagtgcccgatactgccgaaccccatgtggcccccagccccacactcccctcaaccgaagatgtcattcgtaagactgagcaaatcacaaaaaacatacaagaattattgcgagcggcccaggagaacaagcacgattcttacataccctgttcagagaggatccacgtggcagtgaccgaaatggccgccctgtttcctaaaaaaccaaagagcgatatggttaggacctctctgcggctcctgacctcttcagcttaccggctccagagtgagtgtaagaagacgctgcctggggatccaggctccccaactgacgtgcagctggtgacccaacaagtgatccagtgcgcctatgatattgcgaaggccgctaagcagcttgtgacaataacgacaaaagagaataataactag

SEQ ID NO: 230700 - DNA, 1986 bp, Artificial Sequence
  derived and/or modified sequence
atgagcaagaggctgcggagcagcgaggtgtgtgccgactgcagcggccctgaccccagctgggcctctgtgaacagaggcaccttcctgtgtgatgagtgctgcagcgtgcacaggagcctgggccgccacatcagccaggtgcgccacctgaagcacaccccctggccacccaccctgctgcagatggtggagaccctgtacaacaacggggccaacagcatctgggagcacagcctgctggaccctgccagcatcatgagcggccgcaggaaggccaacccccaggacaaggtgcaccccaacaaggccgagttcatccgggccaagtaccagatgctggcctttgtgcaccggctgccctgcagagatgatgattctgtgacagccaaggacctgagcaagcagctgcacagctctgtgaggactggaaacctggagacctgcctgcggctgctgagcctgggcgcccaggccaacttcttccaccctgagaagggcaacacccccctgcacgtggccagcaaggccggccagatcctgcaggccgagctgctggccgtgtatggagctgaccccggcacccaggacagcagcggcaagacccctgtggactatgcccggcagggcggccaccacgagctggccgagcggctggtggagatccagtatgagctgacagaccggctggccttctacctgtgtggcaggaagccagaccacaagaatggccagcacttcatcatcccccagatggctgacagcagcctggacctgtctgagctggccaaggccgccaagaagaagctgcagagcctgagcaaccacctgtttgaggagctggccatggatgtgtatgatgaggtggacagaagagaaacagatgctgtgtggctggccacccagaaccacagcgccctggtgacagagaccaccgtggtgcccttcctgcctgtgaaccctgagtacagcagcaccaggaaccagggccggcagaagctggcccgcttcaatgcccacgagtttgccaccctggtgattgacatcctgagtgatgccaagaggcggcagcagggcagcagcctgagcggcagcaaggacaacgtggagctgatcctgaagaccatcaacaaccagcacagcgtggagagccaggacaatgaccagcctgactatgacagcgtggccagtgatgaggacacagacctggagaccacagccagcaagaccaaccggcagaagagcctggacagcgacctgagtgatggccctgtgacagtgcaggagttcatggaggtgaagaatgccctggtggccagcgaggccaagatccagcagctgatgaagattggccgcagcgccctggtgaccagcagcagcagcctgcccagcttccccagcaccctgtcctggagcagagatgagagcgcccggcgggccagccggctggagaagcagaacagcaccccagagagtgactatgacaacaccccaaatgacatggagccagatggcatgggcagcagcaggaagggccggcagaggtccatggtgtggccaggagatggcctggtgcctgacacagctgagccccacgtggcccccagccccaccctgcccagcacagaagatgtgatcaggaagacagagcagatcaccaagaacatccaggagctgctgcgggccgcccaggagaacaagcatgacagctacatcccctgcagcgagcgcatccacgtggccgtgacagagatggccgccctcttccccaagaagcccaagagtgacatggtgaggaccagcctgcggctgctgaccagcagcgcctaccgcctgcagagcgagtgcaagaagaccctgcccggggaccccggcagccccacagatgtgcagctggtgacccagcaggtgatccagtgtgcctatgacatcgccaaggccgccaagcagctggtgaccatcaccaccaaggagaacaacaactag

SEQ ID NO: 230701 - DNA, 1941 bp, Artificial Sequence
  derived and/or modified sequence
atgagcaagaggctgcggagcagcgaggtgtgtgccgactgcagcggccctgaccccagctgggcctctgtgaacagaggcaccttcctgtgtgatgagtgctgcagcgtgcacaggagcctgggccgccacatcagccaggtgcgccacctgaagcacaccccctggccacccaccctgctgcagatggtggagaccctgtacaacaacggggccaacagcatctgggagcacagcctgctggaccctgccagcatcatgagcggccgcaggaaggccaacccccaggacaaggtgcaccccaacaaggccgagttcatccgggccaagtaccagatgctggcctttgtgcaccggctgccctgcagagatgatgattctgtgacagccaaggacctgagcaagcagctgcacagctctgtgaggactggaaacctggagacctgcctgcggctgctgagcctgggcgcccaggccaacttcttccaccctgagaagggcaacacccccctgcacgtggccagcaaggccggccagatcctgcaggccgagctgctggccgtgtatggagctgaccccggcacccaggacagcagcggcaagacccctgtggactatgcccggcagggcggccaccacgagctggccgagcggctggtggagatccagtatgagctgacagaccggctggccttctacctgtgtggcaggaagccagaccacaagaatggccagcacttcatcatcccccagatggctgacagcagcctggacctgtctgagctggccaaggccgccaagaagaagctgcagagcctgagcaaccacctgtttgaggagctggccatggatgtgtatgatgaggtggacagaagagaaacagatgctgtgtggctggccacccagaaccacagcgccctggtgacagagaccaccgtggtgcccttcctgcctgtgaaccctgagtacagcagcaccaggaaccagggccggcagaagctggcccgcttcaatgcccacgagtttgccaccctggtgattgacatcctgagtgatgccaagaggcggcagcagggcagcagcctgagcggcagcaaggacaacgtggagctgatcctgaagaccatcaacaaccagcacagcgtggagagccaggacaatgaccagcctgactatgacagcgtggccagtgatgaggacacagacctggagaccacagccagcaagaccaaccggcagaagagcctggacagcgacctgagtgatggccctgtgacagtgcaggagttcatggaggtgaagaatgccctggtggccagcgaggccaagatccagcagctgatgaaggtgaacaacaacctgagtgatgagctgcgcatcatgcagaagaaggccagccggctggagaagcagaacagcaccccagagagtgactatgacaacaccccaaatgacatggagccagatggcatgggcagcagcaggaagggccggcagaggtccatggtgtggccaggagatggcctggtgcctgacacagctgagccccacgtggcccccagccccaccctgcccagcacagaagatgtgatcaggaagacagagcagatcaccaagaacatccaggagctgctgcgggccgcccaggagaacaagcatgacagctacatcccctgcagcgagcgcatccacgtggccgtgacagagatggccgccctcttccccaagaagcccaagagtgacatggtgaggaccagcctgcggctgctgaccagcagcgcctaccgcctgcagagcgagtgcaagaagaccctgcccggggaccccggcagccccacagatgtgcagctggtgacccagcaggtgatccagtgtgcctatgacatcgccaaggccgccaagcagctggtgaccatcaccaccaaggagaacaacaactag

SEQ ID NO: 230702 - DNA, 1896 bp, Artificial Sequence
  derived and/or modified sequence
atgagcaagaggctgcggagcagcgaggtgtgtgccgactgcagcggccctgaccccagctgggcctctgtgaacagaggcaccttcctgtgtgatgagtgctgcagcgtgcacaggagcctgggccgccacatcagccaggtgcgccacctgaagcacaccccctggccacccaccctgctgcagatggtggagaccctgtacaacaacggggccaacagcatctgggagcacagcctgctggaccctgccagcatcatgagcggccgcaggaaggccaacccccaggacaaggtgcaccccaacaaggccgagttcatccgggccaagtaccagatgctggcctttgtgcaccggctgccctgcagagatgatgattctgtgacagccaaggacctgagcaagcagctgcacagctctgtgaggactggaaacctggagacctgcctgcggctgctgagcctgggcgcccaggccaacttcttccaccctgagaagggcaacacccccctgcacgtggccagcaaggccggccagatcctgcaggccgagctgctggccgtgtatggagctgaccccggcacccaggacagcagcggcaagacccctgtggactatgcccggcagggcggccaccacgagctggccgagcggctggtggagatccagtatgagctgacagaccggctggccttctacctgtgtggcaggaagccagaccacaagaatggccagcacttcatcatcccccagatggctgacagcagcctggacctgtctgagctggccaaggccgccaagaagaagctgcagagcctgagcaaccacctgtttgaggagctggccatggatgtgtatgatgaggtggacagaagagaaacagatgctgtgtggctggccacccagaaccacagcgccctggtgacagagaccaccgtggtgcccttcctgcctgtgaaccctgagtacagcagcaccaggaaccagggccggcagaagctggcccgcttcaatgcccacgagtttgccaccctggtgattgacatcctgagtgatgccaagaggcggcagcagggcagcagcctgagcggcagcaaggacaacgtggagctgatcctgaagaccatcaacaaccagcacagcgtggagagccaggacaatgaccagcctgactatgacagcgtggccagtgatgaggacacagacctggagaccacagccagcaagaccaaccggcagaagagcctggacagcgacctgagtgatggccctgtgacagtgcaggagttcatggaggtgaagaatgccctggtggccagcgaggccaagatccagcagctgatgaaggccagccggctggagaagcagaacagcaccccagagagtgactatgacaacaccccaaatgacatggagccagatggcatgggcagcagcaggaagggccggcagaggtccatggtgtggccaggagatggcctggtgcctgacacagctgagccccacgtggcccccagccccaccctgcccagcacagaagatgtgatcaggaagacagagcagatcaccaagaacatccaggagctgctgcgggccgcccaggagaacaagcatgacagctacatcccctgcagcgagcgcatccacgtggccgtgacagagatggccgccctcttccccaagaagcccaagagtgacatggtgaggaccagcctgcggctgctgaccagcagcgcctaccgcctgcagagcgagtgcaagaagaccctgcccggggaccccggcagccccacagatgtgcagctggtgacccagcaggtgatccagtgtgcctatgacatcgccaaggccgccaagcagctggtgaccatcaccaccaaggagaacaacaactag

SEQ ID NO: 230703 - DNA, 1986 bp, Artificial Sequence
  derived and/or modified sequence
atgagcaagcggctgcggagcagcgaggtgtgcgccgactgcagcgggcccgatccaagctgggcctccgttaaccgcggtactttcctctgtgatgagtgctgttcagtgcaccgatccctggggaggcacatatcccaggtgaggcatcttaagcacacgccatggccaccaacactcctgcagatggtcgaaactctctacaacaatggggccaatagtatctgggaacacagcttgttagatcctgcttcaattatgtcaggccgtagaaaggccaacccacaagataaggttcatcctaataaagccgagtttatcagggctaaataccagatgctggcgtttgtgcataggcttccatgccgagacgatgacagcgttacagcaaaggatctttccaagcaactacattcctccgtccggaccggcaatttggagacatgtctgagactcctgtctcttggggcgcaagccaacttctttcaccctgagaaggggaatactccactgcatgtggcaagtaaggccggacagatcctgcaggccgagctgctcgctgtgtacggtgccgaccctgggactcaggattcgtccgggaagaccccagtcgactatgctcgtcaggggggccatcacgaactggcagagcgactcgtcgagattcaatacgaactcactgatcggctggctttttacctctgcggccgtaaaccggaccacaaaaacggtcagcactttatcattcctcagatggcagactcaagcctggacttatccgagttggctaaggctgccaagaagaaactgcaatccctgtcgaaccaccttttcgaagaactggcgatggatgtatacgatgaggtagaccggagagagaccgacgctgtgtggctggccacacagaatcacagcgcactggtaacggagaccaccgttgtcccttttctgccggtaaaccctgagtatagttctacccgcaaccagggtagacagaaactcgcccgcttcaacgcacacgagttcgcgacccttgtcattgacattctgtctgatgctaaacgcaggcagcagggctcctcgttgagcggtagtaaggacaatgtcgagctgatactgaaaacaattaacaatcagcacagtgtggaatcgcaagataacgatcaacccgactacgattcggtggcctccgatgaggacacagacttggagaccaccgcctcaaagacgaatcgccaaaagtctttggattcagatctgtccgatgggcccgtaaccgtacaggagttcatggaggtgaaaaacgccttggtcgctagtgaagctaagattcagcagctgatgaaaatcggccgttctgctcttgtaacaagctcatcctccctgccctcttttccctcaacactgtcgtggtctcgcgacgagtccgctcgtagggcctctcgcttggagaagcagaattcgacacctgaatctgactatgataacaccccgaatgatatggagccggatgggatgggcagtagtagaaagggaagacagcgcagtatggtgtggcccggggacggactggtgccagacaccgctgaaccccatgtggcaccgagccctactctcccatcgacagaggatgtgattcgaaagaccgaacagataacgaaaaatatccaggaactgctgagagcagctcaggagaacaaacacgactcttacattccatgttccgagcgcatccacgtggctgtcaccgaaatggctgccctcttccccaaaaaacctaagtccgacatggtccggacaagcctgcggctcttgacttcatccgcttaccggctgcagtctgagtgtaaaaagaccctgcccggcgacccagggagcccgactgacgttcagttagtgacacaacaggtaatccagtgcgcatacgacatcgccaaagccgcaaaacaactggttacgatcacaactaaggaaaataataactag

SEQ ID NO: 230704 - DNA, 1941 bp, Artificial Sequence
  derived and/or modified sequence
atgagcaagcggctgcggagcagcgaggtgtgcgccgactgcagcggaccagatccaagctgggccagtgtcaatagagggacctttctgtgcgatgaatgttgttcagtgcatcgtagtcttggacgccatatctcccaggtaaggcatttgaaacacaccccatggcccccaacactgctacagatggtcgaaacactctataataacggtgctaactctatctgggagcactccctcctggaccctgctagcattatgtctgggcgccgcaaggccaacccccaggataaggttcacccaaacaaggccgagtttattagggcgaaatatcagatgctggcgtttgtgcaccgccttccttgccgcgacgatgactcagtcacagccaaagacctgtctaagcagcttcatagctccgtgaggacaggaaatttagaaacttgcctcaggctgctttcactcggcgcccaggcgaacttttttcaccccgagaaaggcaacacccccttacacgtagccagtaaggcaggtcagattctgcaggcagagctattagctgtctacggagccgacccagggacccaggacagctccggtaaaactccggtcgactatgccagacaaggcggacatcatgaacttgcagaacggctagtggaaatacagtacgagctgaccgacaggttagctttctacctgtgcgggcgaaagccagaccacaagaatggtcaacacttcatcataccgcaaatggcagactctagccttgacttatctgaactggctaaggctgctaagaagaaactgcagtctctgtcaaatcatctgttcgaagagctggcaatggatgtctatgacgaagtggaccggagagaaaccgacgcagtctggctcgcgacccagaatcactccgcactcgtcacagagaccaccgtggtgccctttctcccagttaatcccgagtattcatctacaagaaatcagggtcgccaaaagctcgcccgctttaacgcccacgagttcgctactctcgtcattgacatcttatcagacgccaaacgtagacaacagggatcctccctgtctggctccaaagacaatgtggagctgattctaaagacgataaacaatcagcactccgtggaatcacaggacaacgaccaacctgactatgacagtgttgcaagtgatgaagacactgaccttgagaccacggccagcaagaccaatagacagaaatcattagacagcgatctatcagatgggcccgtgacagttcaggaatttatggaggtgaagaacgcactggtggcaagcgaagccaagatccaacagcttatgaaagtaaacaacaacctctctgatgaactgaggatcatgcaaaaaaaagcttcacggctggaaaaacagaattcaactccagagtccgattacgataatactcccaatgacatggaaccggatgggatgggatcgagtcggaaaggtaggcagcggtcaatggtgtggcctggtgacggcctggtgccagatacggccgagccgcacgtcgctccttcccccaccctgccgagtacagaagacgtgattcgcaagacggaacagatcaccaagaacattcaggagcttctccgggcagcacaggaaaacaaacacgactcttatatcccgtgcagcgagcggatccacgtcgctgttaccgagatggctgctctgtttcccaaaaaacctaaaagtgacatggtgcggactagcctgcggttgctgacaagttctgcttacaggttgcaatccgagtgtaagaagactctcccaggtgatcccggctctccaaccgatgtgcaactggtgacgcagcaggtgattcaatgcgcttacgatattgccaaagctgctaagcagctggtaactatcaccactaaggagaataataactag

SEQ ID NO: 230705 - DNA, 1896 bp, Artificial Sequence
  derived and/or modified sequence
atgagcaagcggctgcggagcagcgaggtgtgcgccgactgcagcgggcccgacccctcatgggcatctgtcaacaggggaacattcctgtgcgacgagtgttgttcagtgcaccgatcactaggaagacacatatctcaggtgaggcatctgaagcacacaccttggcccccgacacttttgcagatggtggaaacgctctacaacaacggtgcaaatagtatttgggaacattccctattggacccggcctcaataatgtcaggaaggcggaaagcaaatccccaggataaagtgcaccctaacaaagccgagttcattcgggccaaatatcagatgctggctttcgttcaccggttgccctgccgcgacgatgactctgtcacagccaaagacctttctaaacagctccactcctctgtccggaccggtaaccttgagacctgcctgagactgctaagcctgggcgctcaggctaacttttttcatccagagaaaggaaatacccctctacacgttgcatctaaggcaggccagattctgcaggctgaacttctggcggtgtatggcgctgaccccggaacacaggattctagcggtaaaactcctgtggactacgcccgccaaggtggccaccacgagctggctgaaaggctggttgagatccagtacgaactaacagaccgactcgctttttatctgtgtggtcggaaacctgatcacaaaaacggacaacactttattatcccacagatggccgactcttcgctagacctgagcgaacttgcaaaggctgccaaaaaaaagctgcagtcgctgtccaaccatctgttcgaagagttggccatggatgtatacgacgaggtggatcggcgcgaaacagatgcggtctggctggcaacgcagaaccattccgccctcgtcacagagacgacagtcgtgccatttcttcccgtgaatccagaatactcatccacaaggaaccaaggccgccagaagctggcccgctttaatgcgcatgagtttgctacactggtgatcgatattctgagtgatgctaagcgccgccagcagggatcttctctgtcaggctccaaggataacgtggagctgattctcaagactattaacaaccaacatagcgtcgaatcccaggacaatgaccagccggactacgactctgtcgctagcgatgaggacacggatctcgaaacgacagcctccaagacaaaccggcagaaaagcctcgattccgacctgtctgatgggcctgtcacagtgcaggaatttatggaggtaaagaacgcactagtggcctctgaagctaagattcagcagctaatgaaggcaagtcgcttagagaaacagaattcaacccccgagagtgactacgacaacaccccaaacgacatggaaccagacggaatgggaagcagccggaagggccgccagcggtctatggtgtggccgggggacggcttagtgccagacacagcggagccgcatgtcgctccttctcccacactgccaagcactgaggatgtgatacgtaagaccgagcaaattaccaaaaatattcaggaattgttgcgcgccgcccaggaaaacaaacacgacagttacattccgtgttctgagagaattcacgtagctgtaacggagatggcagctttgtttccaaaaaaaccgaagtctgatatggtgaggacctctctccggctccttacatctagtgcatatcgcttgcagagtgagtgcaaaaaaacactcccaggcgatccgggcagcccgacagacgtgcagttggtgacacagcaagttatccagtgcgcttacgatatcgctaaagctgccaagcagctggttaccataacaacaaaagagaataacaattag

SEQ ID NO: 230706 - DNA, 1986 bp, Artificial Sequence
  derived and/or modified sequence
atgtccaaaaggttgcggagttctgaagtgtgcgctgattgttcaggtccggacccgagctgggcatctgtcaatagaggaacttttctgtgtgatgagtgctgctccgttcaccggagtcttgggcgacacatttctcaggttcggcatctgaagcacacgccatggcccccaacgctgcttcagatggtggaaacactctacaacaatggagctaattccatttgggagcactccctgttggatccagcttctattatgagcggacgcagaaaagccaatccccaggataaagttcatccgaataaggctgagttcatacgggctaaataccagatgctggcctttgtacacagactgccctgccgggacgacgacagcgttacagctaaagatctctcaaagcagctacatagctctgttcgaaccggtaatcttgagacttgtctcagattgctctccctgggcgctcaggcaaacttttttcacccagaaaagggaaatacgccactgcatgtggcctctaaagcaggccagattcttcaggccgagctccttgccgtgtatggggctgacccgggtacacaggattcctccggcaaaacaccagtagactatgccagacaagggggtcatcacgaactggcggagcgcttggtcgagattcagtatgagcttaccgacaggttggccttctatctgtgtgggagaaagcccgaccacaaaaacggccagcattttataatccctcagatggcagattcctctctcgatttatcggagctggccaaggcggctaaaaaaaagttgcagagcttgtccaatcatctgtttgaagaactggcaatggacgtgtatgacgaggttgacaggagagagaccgacgctgtgtggctcgccactcagaatcatagcgccctagtgactgaaacaaccgtagttccctttctgcccgttaatccagagtactcttcaacacgaaatcaggggagacaaaaactggcccgatttaatgcccacgagttcgccaccttggtcattgatattctatccgatgcaaaaaggcggcagcagggcagctcactgagcgggagcaaggacaacgtcgaactcattttgaaaacgattaataaccagcattcagtggagagccaggacaacgaccaacctgattacgactctgttgcaagtgatgaggacactgacttagagacaaccgctagcaaaaccaatcgacagaagtctctcgactccgatctgagtgacggacccgttaccgtgcaggagttcatggaagtcaaaaacgccttagtcgccagtgaagccaaaattcagcagttgatgaaaataggtcgatctgctctggttaccagctcatcatccttgccatcctttccgtcaacgcttagctggagtagggacgagtccgccagacgagcatctcggcttgagaagcagaacagcacccccgaatccgattacgacaacactccaaatgacatggagccagacggcatggggagttcaaggaaggggaggcaaaggtctatggtgtggcccggagacgggcttgtccccgatactgcggagccccacgttgccccttctcctaccctgcctagcaccgaggatgtgatcaggaagactgagcaaataactaagaatatccaagagctcctgcgagccgcacaggaaaacaaacatgattcatacatcccttgttctgaaagaattcatgtcgctgtgactgagatggcagcgttattccctaagaagcccaagagtgacatggttcggacaagcctacgtctgttgacgagctctgcatacagactccaatccgagtgtaagaaaacgctccctggcgatccagggagccctactgatgtgcagctggtcacacagcaagtcattcaatgtgcctatgatatcgctaaagctgctaagcaactggtcacaatcaccaccaaggagaacaataactag

SEQ ID NO: 230707 - DNA, 1941 bp, Artificial Sequence
  derived and/or modified sequence
atgagtaagcggctgcgctcatcagaggtctgcgcagactgcagtgggccagacccctcttgggccagcgtgaaccgcggaacctttctttgcgatgaatgctgttcagtccaccggtccctgggccgacacatttcccaggtgcgtcatctgaaacacactccatggccgcctacgctcctgcagatggtggaaacactctacaacaatggagctaattccatttgggagcactctctcttggatccagcatccataatgagtggacggaggaaggccaatccgcaggacaaagtgcatcccaataaggcagagttcattagagcaaagtaccaaatgctcgcttttgtacaccgtctgccatgtcgggacgatgattcagtgaccgctaaggacctctcaaaacagttgcacagctcagtccggactggaaacctggaaacctgtctgaggctgctttctttaggtgctcaggccaactttttccatccagagaaagggaacaccccactccacgtggcctccaaggccggtcagattcttcaagccgaattgctagctgtgtatggggctgatccgggaactcaggattcttctggcaagaccccagtggattacgctcgtcagggtggtcatcacgaactggctgagcggctggtggagatccaatatgaacttaccgacaggctggccttctatctctgcgggagaaagccggaccataagaatgggcagcacttcataattcctcaaatggctgactcaagccttgacctttcagaacttgctaaagctgccaaaaaaaagctccagtcgctgagtaatcacttgtttgaagaacttgcgatggacgtgtatgacgaggtagatcgcagagagactgatgcggtctggctggcgactcagaatcactcggcactagtgacagagaccaccgtcgttccatttctgccagtcaaccccgagtactctagcaccaggaatcagggccgacagaagcttgccagatttaatgcccatgagtttgcgacgctagtgattgatatactgtccgacgcgaagcgacgccagcaggggtcctctctatccggctccaaggacaatgtcgagctcatcctgaagaccattaacaatcagcatagcgtggaatcccaggacaatgaccagcccgactatgactcagtggctagcgacgaggacacggatctggagacaactgcttctaagacaaatagacagaaatctctggattcagatctctcagacggccctgttaccgtgcaggagttcatggaggttaaaaacgccctggtcgccagtgaagccaagattcaacagcttatgaaagtaaataacaacttgtctgatgagctgaggattatgcagaaaaaggcttcacggttagaaaagcaaaattccacccccgagtctgattatgataatacacccaacgacatggaacctgatggcatgggctcctcccgcaagggacggcagcgcagtatggtgtggcccggtgatgggttggttcctgatacagccgagccacatgtagcgcctagcccaaccttgcccagtactgaggatgtgatccgcaaaactgaacagattaccaagaatattcaggagctgttaagagctgcacaggagaacaagcatgactcatacatcccatgctccgagcggatccatgtcgccgttaccgaaatggctgcgctgttccccaagaaaccgaaatccgatatggtccgtaccagtctgcgcctactcactagcagtgcataccgactgcaatctgagtgcaaaaagacattacctggggacccgggtagtcccacagacgtacagctggtaacgcagcaagtgatccaatgtgcctacgatatcgcgaaagctgctaagcagctggtcacaattaccaccaaggagaacaacaactag

SEQ ID NO: 230708 - DNA, 1896 bp, Artificial Sequence
  derived and/or modified sequence
atgtcgaagaggttgcgctctagcgaggtctgtgcagattgtagcgggcctgacccgtcatgggctagcgtgaatcgaggaaccttcttatgcgacgagtgctgttctgttcataggagcctgggcagacacatatctcaggtccgacatttgaagcacacaccttggcctcctacactgctgcaaatggtggagacactttacaacaacggggctaatagcatatgggagcatagcttgttagaccctgcgtcaattatgtccgggagaaggaaagccaatccacaggacaaggtgcacccaaacaaggccgagttcatcagagctaagtaccagatgctggccttcgttcaccggctcccctgcagagacgacgattccgtgacagccaaagatctgtccaaacagctccactccagtgtgcggaccggaaatctggaaacttgtttacgactactgtcgctgggcgctcaagctaatttctttcaccccgagaagggtaatacccccctccacgtggcgtctaaggccggacagattctacaggccgagttgcttgccgtgtatggggctgatcctggcacgcaggattcatctggtaagactccggtcgattacgcaagacagggcggacatcatgaattggccgagaggctcgttgaaatccagtatgagctcaccgataggctggctttctacttgtgcggccgtaagcccgatcacaagaatggccaacacttcattattccgcagatggccgatagctcgcttgacctctccgaactcgccaaagcagccaaaaagaaactccaatcactgagtaatcacctgtttgaggagctcgccatggacgtgtatgatgaggtggacaggagggagactgatgcagtttggctggctacgcagaaccatagtgcactagttacagaaacgaccgtcgtaccattcctgcccgttaatcctgaatatagcagcacccggaatcagggaagacaaaaactcgcgaggttcaacgcacacgagttcgccaccctggtgatcgacatcttgagtgatgctaagaggcgacagcagggctctagtctgtccggctcaaaagacaatgtagagctgatcctcaagaccattaataaccagcacagtgtggaatcccaggacaatgatcagccagactatgattcagtggcatccgacgaggacactgacctcgagacaacagcctctaagaccaatagacaaaagagcctcgactcagacctttcggatggccctgtcactgttcaggagtttatggaagtgaaaaacgcactcgttgcgtcagaagcaaagattcagcagctcatgaaagcttctcggctggagaagcagaatagcacccccgaatcagactatgacaatactcctaatgacatggaaccggacgggatgggcagttcccggaaaggaagacagcgctcaatggtttggcccggagatggactggtgccggatacagccgaaccacacgttgcccctagtccaacccttccaagtacggaggacgtgattagaaagacagaacagatcaccaagaatattcaagaactcctgcgcgctgcccaggaaaacaagcacgacagttacatcccttgcagcgagaggatccacgtggcggtcacagaaatggctgctctctttccgaagaagccaaagtcggacatggttcgcacatccttgagactcttgacgagttctgcctaccgcctgcagtccgaatgtaagaaaactctgccaggagaccccggatcgcccactgacgttcagctagtgacgcagcaggttatacagtgtgcgtatgacatagcgaaagccgctaaacagcttgtgacaatcaccacaaaagaaaacaataattag

SEQ ID NO: 230709 - DNA, 5327 bp, Artificial Sequence
  derived and/or modified sequence
acctccccgcgcgtgcgtgctgtgccaaggctgcaaggcgctgaggggagaggcgccgccgtcagcgccgccgcagctgggacccgttagagcggaagcgccgccgccaccgccgcctttgctgtcccccggcctctagttccccgcaggtgggaggtgggagccatgtcgaaacggctccggagcagcgaggtgtgcgctgactgcagcgggccggatccttcctgggcatcagtaaataggggaacgtttttatgtgatgagtgctgcagtgtccatcggagtctagggcgccatatctcccaagtgaggcatctgaaacacacaccgtggcctccaacactgcttcagatggttgagaccttgtataataacggtgctaactctatatgggagcattctttgctggaccctgcgtctattatgagtggaagacgtaaagctaatccacaggataaagtacatcccaataaagcggaattcatcagagccaagtatcagatgttagcgttcgtccatcgcttgccctgccgggatgacgatagtgtgactgccaaagatcttagcaagcaactccattcgagcgtgagaacagggaatcttgaaacctgtttgagactgttatctttaggagcacaagccaacttctttcatcctgaaaaaggaaacaccccactccatgttgcctccaaagcagggcagattttacaggctgaattattggcagtatatggagcagacccaggcacacaggattctagtgggaaaactcccgttgattatgcaaggcaaggagggcaccatgagctggcagagcgcctcgtggaaatacagtatgagctaacggacagactagccttctatctctgtggcaggaaaccagatcacaaaaatggacagcactttataatacctcaaatggcagacagcagcctggatttgtctgaattggcaaaagctgctaagaagaaacttcaatctctaagtaatcatttgtttgaagaacttgccatggatgtgtacgatgaagttgacaggcgagagacggatgcagtctggcttgccacgcaaaaccacagcgccctggtaaccgagacaacggtcgtcccctttcttccggtcaatcctgagtactcatcaacacgaaatcagggcagacagaagttagctcggttcaacgcccatgagtttgccacgctggtcattgacattctcagtgacgccaagaggagacagcagggcagttctctctcgggttcaaaagacaatgtggagctcatactgaaaaccatcaataaccagcacagcgttgagagtcaagacaacgatcagcccgactatgacagcgtggcatcagacgaagacacagatttggaaaccactgcaagcaaaacaaaccggcagaagagcctagattcagatttatcagatggaccagtcactgtacaggaatttatggaggtcaaaaacgctctagtggcttctgaggccaagatacagcagctaatgaagatcgggaggagtgcacttgtgacctcctcttcatctctgccttccttcccctccacactttcctggtcgagggacgaaagcgcccgaagggcatccaggctggagaagcagaacagcacacctgagagtgactacgacaacactcccaacgacatggagccagatggcatggggtcaagccgaaagggacggcaaagaagtatggtgtggccaggggatggcttggtaccagacacagcagaaccccatgtggccccaagccccactctccctagcaccgaagatgtcatcaggaagactgaacagatcaccaaaaacatacaggagctcttaagagcagcccaagaaaataaacatgacagttatattccctgctcagagaggatacacgtagctgttacagaaatggcagcattattccccaaaaaacccaagtctgatatggtgaggacttcccttcgtttactgacgtccagtgcctaccgactgcagtcagagtgcaagaagaccctcccaggggaccccggctcacccacagacgttcagctggtcacgcagcaggtcatccagtgtgcgtacgacatcgccaaggctgccaagcagctggttaccatcaccaccaaagagaacaacaactgacaagggcagggcaccgcctcctctgttttctaggctttataaagtccaatttcaaattcagacgcagaactcttcagatttctacaaaaagaaacatttaatgacggtttaaaactttttaaaagaaaactcagtattatttttgcatgttttctaaccaattttcaactatttaacccacttgccttattttgtgcctatttgctggtttagtttctgatgttcggttgtgttgtcaacaactgttgagttgatcacatacatccaaaagtatagtttcattgtctaaagtttgtgaaaacttttccatcccttaaaactccctgcctatggctgaaactataaatgaaatttttcataaaacattttcttgagagagttcagttaaaaaagaaaaaatcagcgtcatttgttccctgccaagcatcgtgcaataagtgaatttcctggcctacttcataatctctaagtttggggtatctccaagcatgtatgtagagaaaggactttgccgctttttaaaactagtgtcacagtctctcttgggaggaaacaatgaattggttcatttcttctcagtgttttaccctgttacatgttctgttatttaatgttgttatctcaagctcctatctcttgatgttttcttgtcatcttgaaggctccatggaatgagataaagcattgacccaccacaggacatctcatgaagccatgttcagggtaggagctccacgcacatcaccacccattgtcaggtgctctccctcacccctgtaagccagacagtttgttcaaaacctgcagcaaagagaagcatcagtctaacaagccagaactcattttgtgccacccatttaggtatcactaccatgaactatagggaaaagaaatcacctactccctgacactgtgttgtacccttcatccaaaagtcagcttgcttctctgaccacttacagctttctcacatgagttgcttcacatttttcatcatctttaaggacttcttataaggaaagatgtatcgtatcgcagtcatctgagttagtttctcctccatcacctcatgagtacttaaaaattagacatcaactttcaagagttccttagagagtgtgctctagctggctgcctgctaccccaaagctctgaaagagtaaggttgaagtgctggaacatgctcagattgttttttagttactcaaaagccccttcttgttctgaatgtgaaagctcttcccgttcctgcttactgcagccattctgtgtgtgtggttcagaccctggcctagggccggtgatgtggatgagtgaagggagccaggtacacggcagcagggcagaggagactatggggagcccaccgcctacacagtaggggcagtagcccccagctccacgcctgttgccatgtggaaaagtgggcctagggtggccacagctttgatttttcaagagacaagaaacctagatgttttttggtgccatctctccatttataaatgttggcaaccaatttgaacactttcagagaccatgtgcaggtgagctgtgtcctctaggctgccagctcacagcccccaccccagggccctgtaagctgtgcagtgtgagggcctggcttccccggacacacctggagcagcctctgagtcttacccgtaatggagccggccaaccctgtgtgttatgttgctgtcgctcctgtttttaaccatatgttctgtcccatagcagtcattcacacatgtgaagaagacacaagaatcaaagtacaagttgcctcaatacatgctaataactaagcttctattttcacaggactgatcgatgcacacctttatagcttgaccatatgctgtcatgaaagtagcaccccgacggtgcttgctttactaagtcaccgtgtgtggatgcttttgtcgcattttgcttcactgtgagtagcatgggaaaagggtccacgtctccaaaagactcttccacttgtttgtcccacagccctaagtgccacattgctgttggatgctcccgggatgccttctagaagggggcctcccaccttaagttcaggcgccatctgatagccttttctgcaggcttcatgtccttagctgaccctcctttatcttgcaaacccctgcccctgctgtcccagggaggacgggcttctgtagaggcttctgggaaatgagctgtctgcaggaggtgaagcagtgttttccttggaatgtttgaggacctgcaatagaagatgttgcctttatggccctagagaaagtcaaggaacatggggaccaacaaagcatttccagttgtaagaatatgtcagaagagtgctcggttagcccacggtgccaaaactccaaacaagttccccggtggaatgacgtggccattggagggctgcaggtcgtcctctctgtatgtgccccgcgcatttccttggcctcatctgagatctggtgtcagagttctctgctcctgttggcaaatcgcaccttatctgaacatttgttccagccaccttttgcacatggattccgtaccttgcactagcaatgtctaccttcagtaacgtcgttctttttcaccctgtattctcaatgatcccttcctccccatatgccacccttcccccaaagctgatagggcagaggtgcactttatgaaactggcacttgactgaacagaaggaaacagctgtacctctaagctcctttcacagaaatcgtcatctgccttggaatgcaaatagttcttatttgccaaagaacagtgaattgggcccaaagatcaaacacagcatttcatgtaatcagaattctaaacgcacaactcgggagctgtgcacggcttctcaagtgattcagttgcagaaccaagagcaaaactcgcctgtttttgtcctcaatggcacccatgagctttccaatagtatagttttctttctttccttgtcctggttgaaggtaacgtgttcctagaaaagaaaatgctgcataggaaaactgagatgccttttattccaacgtgtttgatccctgtcactcattattctgtactttttattgtacattctattcctgtaattattgtgccctttaagtgttgtaaaatcgttttggaatttgtgcctgctagttatgcaataaacaggctctacaagtgtt

SEQ ID NO: 230710 - DNA, 5282 bp, Artificial Sequence
  derived and/or modified sequence
acctccccgcgcgtgcgtgctgtgccaaggctgcaaggcgctgaggggagaggcgccgccgtcagcgccgccgcagctgggacccgttagagcggaagcgccgccgccaccgccgcctttgctgtcccccggcctctagttccccgcaggtgggaggtgggagccatgtcgaaacggctccggagcagcgaggtgtgcgctgactgcagcgggccggatccttcctgggcatcagtaaataggggaacgtttttatgtgatgagtgctgcagtgtccatcggagtctagggcgccatatctcccaagtgaggcatctgaaacacacaccgtggcctccaacactgcttcagatggttgagaccttgtataataacggtgctaactctatatgggagcattctttgctggaccctgcgtctattatgagtggaagacgtaaagctaatccacaggataaagtacatcccaataaagcggaattcatcagagccaagtatcagatgttagcgttcgtccatcgcttgccctgccgggatgacgatagtgtgactgccaaagatcttagcaagcaactccattcgagcgtgagaacagggaatcttgaaacctgtttgagactgttatctttaggagcacaagccaacttctttcatcctgaaaaaggaaacaccccactccatgttgcctccaaagcagggcagattttacaggctgaattattggcagtatatggagcagacccaggcacacaggattctagtgggaaaactcccgttgattatgcaaggcaaggagggcaccatgagctggcagagcgcctcgtggaaatacagtatgagctaacggacagactagccttctatctctgtggcaggaaaccagatcacaaaaatggacagcactttataatacctcaaatggcagacagcagcctggatttgtctgaattggcaaaagctgctaagaagaaacttcaatctctaagtaatcatttgtttgaagaacttgccatggatgtgtacgatgaagttgacaggcgagagacggatgcagtctggcttgccacgcaaaaccacagcgccctggtaaccgagacaacggtcgtcccctttcttccggtcaatcctgagtactcatcaacacgaaatcagggcagacagaagttagctcggttcaacgcccatgagtttgccacgctggtcattgacattctcagtgacgccaagaggagacagcagggcagttctctctcgggttcaaaagacaatgtggagctcatactgaaaaccatcaataaccagcacagcgttgagagtcaagacaacgatcagcccgactatgacagcgtggcatcagacgaagacacagatttggaaaccactgcaagcaaaacaaaccggcagaagagcctagattcagatttatcagatggaccagtcactgtacaggaatttatggaggtcaaaaacgctctagtggcttctgaggccaagatacagcagctaatgaaggtgaataacaacttgagtgacgagctgagaattatgcagaaaaaggcatccaggctggagaagcagaacagcacacctgagagtgactacgacaacactcccaacgacatggagccagatggcatggggtcaagccgaaagggacggcaaagaagtatggtgtggccaggggatggcttggtaccagacacagcagaaccccatgtggccccaagccccactctccctagcaccgaagatgtcatcaggaagactgaacagatcaccaaaaacatacaggagctcttaagagcagcccaagaaaataaacatgacagttatattccctgctcagagaggatacacgtagctgttacagaaatggcagcattattccccaaaaaacccaagtctgatatggtgaggacttcccttcgtttactgacgtccagtgcctaccgactgcagtcagagtgcaagaagaccctcccaggggaccccggctcacccacagacgttcagctggtcacgcagcaggtcatccagtgtgcgtacgacatcgccaaggctgccaagcagctggttaccatcaccaccaaagagaacaacaactgacaagggcagggcaccgcctcctctgttttctaggctttataaagtccaatttcaaattcagacgcagaactcttcagatttctacaaaaagaaacatttaatgacggtttaaaactttttaaaagaaaactcagtattatttttgcatgttttctaaccaattttcaactatttaacccacttgccttattttgtgcctatttgctggtttagtttctgatgttcggttgtgttgtcaacaactgttgagttgatcacatacatccaaaagtatagtttcattgtctaaagtttgtgaaaacttttccatcccttaaaactccctgcctatggctgaaactataaatgaaatttttcataaaacattttcttgagagagttcagttaaaaaagaaaaaatcagcgtcatttgttccctgccaagcatcgtgcaataagtgaatttcctggcctacttcataatctctaagtttggggtatctccaagcatgtatgtagagaaaggactttgccgctttttaaaactagtgtcacagtctctcttgggaggaaacaatgaattggttcatttcttctcagtgttttaccctgttacatgttctgttatttaatgttgttatctcaagctcctatctcttgatgttttcttgtcatcttgaaggctccatggaatgagataaagcattgacccaccacaggacatctcatgaagccatgttcagggtaggagctccacgcacatcaccacccattgtcaggtgctctccctcacccctgtaagccagacagtttgttcaaaacctgcagcaaagagaagcatcagtctaacaagccagaactcattttgtgccacccatttaggtatcactaccatgaactatagggaaaagaaatcacctactccctgacactgtgttgtacccttcatccaaaagtcagcttgcttctctgaccacttacagctttctcacatgagttgcttcacatttttcatcatctttaaggacttcttataaggaaagatgtatcgtatcgcagtcatctgagttagtttctcctccatcacctcatgagtacttaaaaattagacatcaactttcaagagttccttagagagtgtgctctagctggctgcctgctaccccaaagctctgaaagagtaaggttgaagtgctggaacatgctcagattgttttttagttactcaaaagccccttcttgttctgaatgtgaaagctcttcccgttcctgcttactgcagccattctgtgtgtgtggttcagaccctggcctagggccggtgatgtggatgagtgaagggagccaggtacacggcagcagggcagaggagactatggggagcccaccgcctacacagtaggggcagtagcccccagctccacgcctgttgccatgtggaaaagtgggcctagggtggccacagctttgatttttcaagagacaagaaacctagatgttttttggtgccatctctccatttataaatgttggcaaccaatttgaacactttcagagaccatgtgcaggtgagctgtgtcctctaggctgccagctcacagcccccaccccagggccctgtaagctgtgcagtgtgagggcctggcttccccggacacacctggagcagcctctgagtcttacccgtaatggagccggccaaccctgtgtgttatgttgctgtcgctcctgtttttaaccatatgttctgtcccatagcagtcattcacacatgtgaagaagacacaagaatcaaagtacaagttgcctcaatacatgctaataactaagcttctattttcacaggactgatcgatgcacacctttatagcttgaccatatgctgtcatgaaagtagcaccccgacggtgcttgctttactaagtcaccgtgtgtggatgcttttgtcgcattttgcttcactgtgagtagcatgggaaaagggtccacgtctccaaaagactcttccacttgtttgtcccacagccctaagtgccacattgctgttggatgctcccgggatgccttctagaagggggcctcccaccttaagttcaggcgccatctgatagccttttctgcaggcttcatgtccttagctgaccctcctttatcttgcaaacccctgcccctgctgtcccagggaggacgggcttctgtagaggcttctgggaaatgagctgtctgcaggaggtgaagcagtgttttccttggaatgtttgaggacctgcaatagaagatgttgcctttatggccctagagaaagtcaaggaacatggggaccaacaaagcatttccagttgtaagaatatgtcagaagagtgctcggttagcccacggtgccaaaactccaaacaagttccccggtggaatgacgtggccattggagggctgcaggtcgtcctctctgtatgtgccccgcgcatttccttggcctcatctgagatctggtgtcagagttctctgctcctgttggcaaatcgcaccttatctgaacatttgttccagccaccttttgcacatggattccgtaccttgcactagcaatgtctaccttcagtaacgtcgttctttttcaccctgtattctcaatgatcccttcctccccatatgccacccttcccccaaagctgatagggcagaggtgcactttatgaaactggcacttgactgaacagaaggaaacagctgtacctctaagctcctttcacagaaatcgtcatctgccttggaatgcaaatagttcttatttgccaaagaacagtgaattgggcccaaagatcaaacacagcatttcatgtaatcagaattctaaacgcacaactcgggagctgtgcacggcttctcaagtgattcagttgcagaaccaagagcaaaactcgcctgtttttgtcctcaatggcacccatgagctttccaatagtatagttttctttctttccttgtcctggttgaaggtaacgtgttcctagaaaagaaaatgctgcataggaaaactgagatgccttttattccaacgtgtttgatccctgtcactcattattctgtactttttattgtacattctattcctgtaattattgtgccctttaagtgttgtaaaatcgttttggaatttgtgcctgctagttatgcaataaacaggctctacaagtgtt

SEQ ID NO: 230711 - DNA, 2424 bp, Artificial Sequence
  derived and/or modified sequence
acctccccgcgcgtgcgtgctgtgccaaggctgcaaggcgctgaggggagaggcgccgccgtcagcgccgccgcagctgggacccgttagagcggaagcgccgccgccaccgccgcctttgctgtcccccggcctctagttccccgcaggtgggaggtgggagccatgtcgaaacggctccggagcagcgaggtgtgcgctgactgcagcgggccggatccttcctgggcatcagtaaataggggaacgtttttatgtgatgagtgctgcagtgtccatcggagtctagggcgccatatctcccaagtgaggcatctgaaacacacaccgtggcctccaacactgcttcagatggttgagaccttgtataataacggtgctaactctatatgggagcattctttgctggaccctgcgtctattatgagtggaagacgtaaagctaatccacaggataaagtacatcccaataaagcggaattcatcagagccaagtatcagatgttagcgttcgtccatcgcttgccctgccgggatgacgatagtgtgactgccaaagatcttagcaagcaactccattcgagcgtgagaacagggaatcttgaaacctgtttgagactgttatctttaggagcacaagccaacttctttcatcctgaaaaaggaaacaccccactccatgttgcctccaaagcagggcagattttacaggctgaattattggcagtatatggagcagacccaggcacacaggattctagtgggaaaactcccgttgattatgcaaggcaaggagggcaccatgagctggcagagcgcctcgtggaaatacagtatgagctaacggacagactagccttctatctctgtggcaggaaaccagatcacaaaaatggacagcactttataatacctcaaatggcagacagcagcctggatttgtctgaattggcaaaagctgctaagaagaaacttcaatctctaagtaatcatttgtttgaagaacttgccatggatgtgtacgatgaagttgacaggcgagagacggatgcagtctggcttgccacgcaaaaccacagcgccctggtaaccgagacaacggtcgtcccctttcttccggtcaatcctgagtactcatcaacacgaaatcagggcagacagaagttagctcggttcaacgcccatgagtttgccacgctggtcattgacattctcagtgacgccaagaggagacagcagggcagttctctctcgggttcaaaagacaatgtggagctcatactgaaaaccatcaataaccagcacagcgttgagagtcaagacaacgatcagcccgactatgacagcgtggcatcagacgaagacacagatttggaaaccactgcaagcaaaacaaaccggcagaagagcctagattcagatttatcagatggaccagtcactgtacaggaatttatggaggtcaaaaacgctctagtggcttctgaggccaagatacagcagctaatgaaggcatccaggctggagaagcagaacagcacacctgagagtgactacgacaacactcccaacgacatggagccagatggcatggggtcaagccgaaagggacggcaaagaagtatggtgtggccaggggatggcttggtaccagacacagcagaaccccatgtggccccaagccccactctccctagcaccgaagatgtcatcaggaagactgaacagatcaccaaaaacatacaggagctcttaagagcagcccaagaaaataaacatgacagttatattccctgctcagagaggatacacgtagctgttacagaaatggcagcattattccccaaaaaacccaagtctgatatggtgaggacttcccttcgtttactgacgtccagtgcctaccgactgcagtcagagtgcaagaagaccctcccaggggaccccggctcacccacagacgttcagctggtcacgcagcaggtcatccagtgtgcgtacgacatcgccaaggctgccaagcagctggttaccatcaccaccaaagagaacaacaactgacaagggcagggcaccgcctcctctgttttctaggctttataaagtccaatttcaaattcagacgcagaactcttcagatttctacaaaaagaaacatttaatgacggtttaaaactttttaaaagaaaactcagtattatttttgcatgttttctaaccaattttcaactatttaacccacttgccttattttgtgcctatttgctggtttagtttctgatgttcggttgtgttgtcaacaactgttgagttgatcacatacatccaaaagtatagtttcattgtctaaagtttgtgaaaacttttccatcccttaaaactccctgcctatggctgaaactataaatgaaatttttcataaaa

SEQ ID NO: 230712 - DNA, 1986 bp, Artificial Sequence
  derived and/or modified sequence
atgagcaagagactgagaagcagcgaggtgtgcgccgactgcagcggccccgaccccagctgggccagcgtgaacagaggcaccttcctgtgcgacgagtgctgcagcgtgcacagaagcctgggcagacacatcagccaggtgagacacctgaagcacaccccctggccccccaccctgctgcagatggtggagaccctgtacaacaacggcgccaacagcatctgggagcacagcctgctggaccccgccagcatcatgagcggcagaagaaaggccaacccccaggacaaggtgcaccccaacaaggccgagttcatcagagccaagtaccagatgctggccttcgtgcacagactgccctgcagagacgacgacagcgtgaccgccaaggacctgagcaagcagctgcacagcagcgtgagaaccggcaacctggagacctgcctgagactgctgagcctgggcgcccaggccaacttcttccaccccgagaagggcaacacccccctgcacgtggccagcaaggccggccagatcctgcaggccgagctgctggccgtgtacggcgccgaccccggcacccaggacagcagcggcaagacccccgtggactacgccagacagggcggccaccacgagctggccgagagactggtggagatccagtacgagctgaccgacagactggccttctacctgtgcggcagaaagcccgaccacaagaacggccagcacttcatcatcccccagatggccgacagcagcctggacctgagcgagctggccaaggccgccaagaagaagctgcagagcctgagcaaccacctgttcgaggagctggccatggacgtgtacgacgaggtggacagaagagagaccgacgccgtgtggctggccacccagaaccacagcgccctggtgaccgagaccaccgtggtgcccttcctgcccgtgaaccccgagtacagcagcaccagaaaccagggcagacagaagctggccagattcaacgcccacgagttcgccaccctggtgatcgacatcctgagcgacgccaagagaagacagcagggcagcagcctgagcggcagcaaggacaacgtggagctgatcctgaagaccatcaacaaccagcacagcgtggagagccaggacaacgaccagcccgactacgacagcgtggccagcgacgaggacaccgacctggagaccaccgccagcaagaccaacagacagaagagcctggacagcgacctgagcgacggccccgtgaccgtgcaggagttcatggaggtgaagaacgccctggtggccagcgaggccaagatccagcagctgatgaagatcggcagaagcgccctggtgaccagcagcagcagcctgcccagcttccccagcaccctgagctggagcagagacgagagcgccagaagagccagcagactggagaagcagaacagcacccccgagagcgactacgacaacacccccaacgacatggagcccgacggcatgggcagcagcagaaagggcagacagagaagcatggtgtggcccggcgacggcctggtgcccgacaccgccgagccccacgtggcccccagccccaccctgcccagcaccgaggacgtgatcagaaagaccgagcagatcaccaagaacatccaggagctgctgagagccgcccaggagaacaagcacgacagctacatcccctgcagcgagagaatccacgtggccgtgaccgagatggccgccctgttccccaagaagcccaagagcgacatggtgagaaccagcctgagactgctgaccagcagcgcctacagactgcagagcgagtgcaagaagaccctgcccggcgaccccggcagccccaccgacgtgcagctggtgacccagcaggtgatccagtgcgcctacgacatcgccaaggccgccaagcagctggtgaccatcaccaccaaggagaacaacaactag

SEQ ID NO: 230713 - DNA, 1941 bp, Artificial Sequence
  derived and/or modified sequence
atgagcaagagactgagaagcagcgaggtgtgcgccgactgcagcggccccgaccccagctgggccagcgtgaacagaggcaccttcctgtgcgacgagtgctgcagcgtgcacagaagcctgggcagacacatcagccaggtgagacacctgaagcacaccccctggccccccaccctgctgcagatggtggagaccctgtacaacaacggcgccaacagcatctgggagcacagcctgctggaccccgccagcatcatgagcggcagaagaaaggccaacccccaggacaaggtgcaccccaacaaggccgagttcatcagagccaagtaccagatgctggccttcgtgcacagactgccctgcagagacgacgacagcgtgaccgccaaggacctgagcaagcagctgcacagcagcgtgagaaccggcaacctggagacctgcctgagactgctgagcctgggcgcccaggccaacttcttccaccccgagaagggcaacacccccctgcacgtggccagcaaggccggccagatcctgcaggccgagctgctggccgtgtacggcgccgaccccggcacccaggacagcagcggcaagacccccgtggactacgccagacagggcggccaccacgagctggccgagagactggtggagatccagtacgagctgaccgacagactggccttctacctgtgcggcagaaagcccgaccacaagaacggccagcacttcatcatcccccagatggccgacagcagcctggacctgagcgagctggccaaggccgccaagaagaagctgcagagcctgagcaaccacctgttcgaggagctggccatggacgtgtacgacgaggtggacagaagagagaccgacgccgtgtggctggccacccagaaccacagcgccctggtgaccgagaccaccgtggtgcccttcctgcccgtgaaccccgagtacagcagcaccagaaaccagggcagacagaagctggccagattcaacgcccacgagttcgccaccctggtgatcgacatcctgagcgacgccaagagaagacagcagggcagcagcctgagcggcagcaaggacaacgtggagctgatcctgaagaccatcaacaaccagcacagcgtggagagccaggacaacgaccagcccgactacgacagcgtggccagcgacgaggacaccgacctggagaccaccgccagcaagaccaacagacagaagagcctggacagcgacctgagcgacggccccgtgaccgtgcaggagttcatggaggtgaagaacgccctggtggccagcgaggccaagatccagcagctgatgaaggtgaacaacaacctgagcgacgagctgagaatcatgcagaagaaggccagcagactggagaagcagaacagcacccccgagagcgactacgacaacacccccaacgacatggagcccgacggcatgggcagcagcagaaagggcagacagagaagcatggtgtggcccggcgacggcctggtgcccgacaccgccgagccccacgtggcccccagccccaccctgcccagcaccgaggacgtgatcagaaagaccgagcagatcaccaagaacatccaggagctgctgagagccgcccaggagaacaagcacgacagctacatcccctgcagcgagagaatccacgtggccgtgaccgagatggccgccctgttccccaagaagcccaagagcgacatggtgagaaccagcctgagactgctgaccagcagcgcctacagactgcagagcgagtgcaagaagaccctgcccggcgaccccggcagccccaccgacgtgcagctggtgacccagcaggtgatccagtgcgcctacgacatcgccaaggccgccaagcagctggtgaccatcaccaccaaggagaacaacaactag

SEQ ID NO: 230714 - DNA, 1896 bp, Artificial Sequence
  derived and/or modified sequence
atgagcaagagactgagaagcagcgaggtgtgcgccgactgcagcggccccgaccccagctgggccagcgtgaacagaggcaccttcctgtgcgacgagtgctgcagcgtgcacagaagcctgggcagacacatcagccaggtgagacacctgaagcacaccccctggccccccaccctgctgcagatggtggagaccctgtacaacaacggcgccaacagcatctgggagcacagcctgctggaccccgccagcatcatgagcggcagaagaaaggccaacccccaggacaaggtgcaccccaacaaggccgagttcatcagagccaagtaccagatgctggccttcgtgcacagactgccctgcagagacgacgacagcgtgaccgccaaggacctgagcaagcagctgcacagcagcgtgagaaccggcaacctggagacctgcctgagactgctgagcctgggcgcccaggccaacttcttccaccccgagaagggcaacacccccctgcacgtggccagcaaggccggccagatcctgcaggccgagctgctggccgtgtacggcgccgaccccggcacccaggacagcagcggcaagacccccgtggactacgccagacagggcggccaccacgagctggccgagagactggtggagatccagtacgagctgaccgacagactggccttctacctgtgcggcagaaagcccgaccacaagaacggccagcacttcatcatcccccagatggccgacagcagcctggacctgagcgagctggccaaggccgccaagaagaagctgcagagcctgagcaaccacctgttcgaggagctggccatggacgtgtacgacgaggtggacagaagagagaccgacgccgtgtggctggccacccagaaccacagcgccctggtgaccgagaccaccgtggtgcccttcctgcccgtgaaccccgagtacagcagcaccagaaaccagggcagacagaagctggccagattcaacgcccacgagttcgccaccctggtgatcgacatcctgagcgacgccaagagaagacagcagggcagcagcctgagcggcagcaaggacaacgtggagctgatcctgaagaccatcaacaaccagcacagcgtggagagccaggacaacgaccagcccgactacgacagcgtggccagcgacgaggacaccgacctggagaccaccgccagcaagaccaacagacagaagagcctggacagcgacctgagcgacggccccgtgaccgtgcaggagttcatggaggtgaagaacgccctggtggccagcgaggccaagatccagcagctgatgaaggccagcagactggagaagcagaacagcacccccgagagcgactacgacaacacccccaacgacatggagcccgacggcatgggcagcagcagaaagggcagacagagaagcatggtgtggcccggcgacggcctggtgcccgacaccgccgagccccacgtggcccccagccccaccctgcccagcaccgaggacgtgatcagaaagaccgagcagatcaccaagaacatccaggagctgctgagagccgcccaggagaacaagcacgacagctacatcccctgcagcgagagaatccacgtggccgtgaccgagatggccgccctgttccccaagaagcccaagagcgacatggtgagaaccagcctgagactgctgaccagcagcgcctacagactgcagagcgagtgcaagaagaccctgcccggcgaccccggcagccccaccgacgtgcagctggtgacccagcaggtgatccagtgcgcctacgacatcgccaaggccgccaagcagctggtgaccatcaccaccaaggagaacaacaactag

SEQ ID NO: 230715 - protein, 346 aa, Artificial Sequence
  derived and/or modified sequence
MEKLRLLGLRYQEYVTRHPAATAQLETAVRGFSYLLAGRFADSHELSELVYSASNLLVLLNDGILRKELRKKLPVSLSQQKLLTWLSVLECVEVFMEMGAAKVWGEVGRWLVIALVQLAKAVLRMLLLLWFKAGLQTSPPIVPLDRETQAQPPDGDHSPGNHEQSYVGKRSNRVVRTLQNTPSLHSRHWGAPQQREGRQQQHHEELSATPTPLGLQETIAEFLYIARPLLHLLSLGLWGQRSWKPWLLAGVVDVTSLSLLSDRKGLTRRERRELRRRTILLLYYLLRSPFYDRFSEARILFLLQLLADHVPGVGLVTTSQRAASPCLPARPHTQPWSPPAFLPGHP

SEQ ID NO: 230716 - DNA, 1041 bp, Artificial Sequence
  derived and/or modified sequence
atggagaaattgcggctactggggctgcgctaccaggagtatgtaactcgccatccggctgccaccgctcaactcgagactgctgtacgcgggttcagctatctgctcgctggtaggtttgccgattctcacgaactcagtgagttggtctacagcgcctccaatctcctggtgttgctcaatgatggcatcctccgcaaggagctgcggaagaaacttccagtaagtctgtctcaacagaaactactgacgtggctttccgtgcttgagtgtgtcgaagtattcatggaaatgggcgcagccaaagtttggggggaagtcggacgctggcttgttatcgcgcttgttcagcttgccaaggctgtgctgcggatgttgcttctgctctggttcaaagcgggactgcagacctctccacccatagttcctctggaccgagagactcaggctcagccaccagacggcgatcacagccccggcaaccacgaacagagttatgtcgggaaacgctccaacagggttgtgaggaccctgcagaacaccccctctctgcatagcaggcattggggagctccacaacagagagagggccgccagcagcagcatcacgaggagctgtcagccaccccaacacccttaggactgcaggaaaccatagccgagttcctctacattgctcgtcccctgctgcacctgctgagtttgggcctttgggggcagcgctcctggaaaccctggctgctggcaggagtggtggatgtcacctctctaagcctcctaagtgaccggaaaggattgaccagacgagaacgtcgggaactgcggaggcgaaccatccttttgctgtactacctgttgcggtctccattttatgaccgcttttcagaggcacgcatcttgtttctgttacagctgttagcggatcacgttccaggagtcggtctggtgaccacaagtcagcgggctgcctccccatgcctacccgcgcggccgcacacccagccatggagcccccctgccttcttgcccgggcatccatag

SEQ ID NO: 230717 - DNA, 1041 bp, Artificial Sequence
  derived and/or modified sequence
atggagaagctgcggctgctgggcctgcgctaccaggagtatgtgaccaggcaccctgctgccacagcccagctggagacagctgtgcggggcttctcctacctgctggccggccgctttgctgacagccatgagctgtctgagctggtgtacagcgccagcaacctgctggtgctgctgaatgatggcatcctgaggaaggagctgaggaagaagctgcctgtgtccctgagccagcagaagctgctgacctggctgtctgtgctggagtgtgtggaggtgttcatggagatgggcgccgccaaggtgtggggcgaggtgggccgctggctggtgattgccctggtgcagctggccaaggctgtgctgaggatgctgctgctgctgtggttcaaggccggcctgcagaccagcccccccatcgtgcccctggaccgggagacccaggcccagcccccagatggagaccacagccctggcaaccacgagcagagctatgtgggcaagaggagcaacagagtggtgaggaccctgcagaacacccccagcctgcacagccgccactggggcgccccccagcagcgggagggccggcagcagcagcaccacgaggagctgagcgccacccccacccccctgggcctgcaggagaccatcgccgagttcctgtacatcgcccggcccctgctgcacctgctgagcctgggcctgtggggccagaggtcctggaagccctggctgctggccggcgtggtggatgtgaccagcctgagcctgctgagtgacaggaagggcctgacccggcgggagcggcgggagctgcggcggaggaccatcctgctgctgtactacctgctgcggagccccttctatgaccgcttcagcgaggcccgcatcctcttcctgctgcagctgctggccgaccacgtgcctggggtgggcctggtgaccaccagccagagagctgccagcccctgcctgcctgcccggccccacacccagccctggagccccccagccttcctgcccggccacccctag

SEQ ID NO: 230718 - DNA, 1041 bp, Artificial Sequence
  derived and/or modified sequence
atggagaagctgcggctgctgggcctgcggtaccaggagtacgtgacaaggcaccctgcagccactgcccaactggagacagctgtccgcggtttctcctatttgctcgccggaagatttgctgattcacatgagttgagcgagttagtgtattccgcctctaacctcttagtacttttgaacgacggcatcctgcggaaagaactgaggaagaagttgcctgtctccctatctcagcagaagctgttaacttggctcagcgttttagagtgcgtggaagtcttcatggagatgggggcggcaaaagtatggggcgaagtgggtagatggctcgtgattgcgttggtgcaattggccaaagccgtgctgcgaatgctattactgttgtggttcaaggccgggctgcagacttcacctcccatcgtgccacttgaccgcgagacccaagcccaaccccctgatggcgatcattcccccggaaatcacgagcagagttatgttgggaagcgcagcaaccgcgttgtgaggactctgcagaacacgccttcattgcattctcgccattggggagcacctcaacaaagagagggtagacagcaacagcatcatgaggaactctctgctacacctacacctctaggcctccaagagacaattgcggagtttctatacatcgcccggccgttgctgcacttgctgtccctcggtttgtggggtcagcgatcctggaagccctggctgttggcaggcgtggtcgacgtaactagcctcagccttctgtccgatcggaaggggctgactcggcgggagaggcgtgagctgaggcgccgaactatcctcctcctgtattacctgttgagatctcccttctacgaccgctttagcgaggcgcgtattctgtttttgctgcagctcctggcagaccatgttcccggcgtgggcttggtcacgacctctcaaagggcagccagcccctgtctcccagctcgcccccacactcagccatggagcccacccgcttttctccccggacacccctag

SEQ ID NO: 230719 - DNA, 1479 bp, Artificial Sequence
  derived and/or modified sequence
gtcggtgccgagggcaggatggagaagctgcggctcctgggcctccgctaccaggagtacgtgactcgtcacccggccgccacggcccagctggagacagcagtgcggggcttcagttacctgctggcaggtcgattcgccgattcgcacgagctgtcagagctggtgtactctgcctctaacctgcttgtgctgctcaatgacgggatcctacggaaggagcttcggaaaaagttgcctgtgtcgctgtcccagcagaagctgctgacatggctgagcgtgctggagtgcgtggaggtgttcatggagatgggagctgccaaggtgtggggtgaagtgggccgctggcttgtcatcgccctcgtccagctggccaaggctgtactgcggatgctcctgctgctctggttcaaggctggcctccagacttcaccccctatcgttccactggacagagagacccaggcacagcccccggatggtgaccacagccctggcaaccatgagcagtcctacgtggggaagcggtcaaaccgggtggtgcgaaccctccagaacacgccgtccctgcactccaggcactggggagctccccagcagcgggagggacggcagcagcagcatcacgaggagctgagtgcgacccccacccccctggggctgcaggagaccatcgcagagtttttgtacattgcccggccgctgctgcacttgctcagcctgggcctgtggggtcagaggtcgtggaaaccctggctcttggctggtgttgtggacgtgaccagcctgagcctcctgagtgacagaaagggcctgacccggagggagcggcgggagctgcggcgccggaccatcctgctgctctactacctgctgcgctctcctttctatgaccgcttctccgaggccaggatcctcttcctgctccagttgctggccgaccacgtccctggcgttggcctggtcacaacgtcccagcgtgcggcctctccgtgcctaccggccaggccccacacacagccctggtcgccaccagcgttcctcccaggacacccttgactgcgctctcctgtgacgatgccactgcagcccgcaccttgtcactgctgggccaagaagccttcactaggagtgggatccaggctcctctcccacagaaagcggtgacttcacctcatggagcccgggaagctgctcgcctcggcagccataggagcgaacactgctgctctctcgctggcccctggtgaggacaggaagcctgaacccgggtgatggctgaacgctgcccagcgtgtcttctggctggggccctccgtctgccccttctccgcagggccctgtggctctggcagccccaggccatggcgttgccagcctccctgtgacagagcctggtgaacagtgagcctggctcccacgcaagtggcactttaagccctgcatcctcggttgagagtaaaaggcttttctccctta

SEQ ID NO: 230720 - DNA, 1041 bp, Artificial Sequence
  derived and/or modified sequence
atggaaaaactgaggctgctcggcctgagatatcaggaatatgtgacacgccatcccgcagcaaccgcccagctagaaacagccgttcgcggatttagctacctgctggccggaagatttgccgattcgcatgaactgtcagagctcgtctactcagcctccaaccttcttgtgctgctgaatgacggcatactgcgcaaagagttgaggaaaaaattacccgtaagtttgagtcaacagaaattactcacttggctatcagtgctggaatgtgtggaagtctttatggagatgggtgctgcaaaggtttggggggaagtgggcaggtggttggtcatcgccctcgttcagctcgccaaagctgtccttcgtatgttgctgctgttatggtttaaggctgggttgcagacctctccacccatagtgcccttggaccgcgaaactcaagcacagccaccggatggagatcactctcctggcaatcacgagcaatcatacgtcggaaagcggtctaaccgggttgtgaggactctgcagaatactccatcccttcactctagacactggggggctcctcagcagcgcgaaggaaggcagcagcagcatcatgaggagctctccgcaactcctactccattagggctgcaggaaaccatagcagagtttttgtatattgctaggcccctgctgcatctgctgagcttgggactctggggccagaggagctggaaaccctggcttctggccggagtggtggacgtgactagtctctccctgctcagtgatcggaaggggttaacccggcgagagcgccgagaactgagacgccgtacgattctcctgctatactacctcctgcggtctcccttctacgatcggtttagtgaggccaggatcttgttcctgttgcaattgttagcggaccatgtccctggggtgggcctcgtcacaacatcccagagagctgcatccccatgtctccctgctcggccacatacccagccgtggagtcctccagcgtttctccccggtcacccctag

SEQ ID NO: 230721 - DNA, 1041 bp, Artificial Sequence
  derived and/or modified sequence
atggagaagctgagactgctgggcctgagataccaggagtacgtgaccagacaccccgccgccaccgcccagctggagaccgccgtgagaggcttcagctacctgctggccggcagattcgccgacagccacgagctgagcgagctggtgtacagcgccagcaacctgctggtgctgctgaacgacggcatcctgagaaaggagctgagaaagaagctgcccgtgagcctgagccagcagaagctgctgacctggctgagcgtgctggagtgcgtggaggtgttcatggagatgggcgccgccaaggtgtggggcgaggtgggcagatggctggtgatcgccctggtgcagctggccaaggccgtgctgagaatgctgctgctgctgtggttcaaggccggcctgcagaccagcccccccatcgtgcccctggacagagagacccaggcccagccccccgacggcgaccacagccccggcaaccacgagcagagctacgtgggcaagagaagcaacagagtggtgagaaccctgcagaacacccccagcctgcacagcagacactggggcgccccccagcagagagagggcagacagcagcagcaccacgaggagctgagcgccacccccacccccctgggcctgcaggagaccatcgccgagttcctgtacatcgccagacccctgctgcacctgctgagcctgggcctgtggggccagagaagctggaagccctggctgctggccggcgtggtggacgtgaccagcctgagcctgctgagcgacagaaagggcctgaccagaagagagagaagagagctgagaagaagaaccatcctgctgctgtactacctgctgagaagccccttctacgacagattcagcgaggccagaatcctgttcctgctgcagctgctggccgaccacgtgcccggcgtgggcctggtgaccaccagccagagagccgccagcccctgcctgcccgccagaccccacacccagccctggagcccccccgccttcctgcccggccacccctag

SEQ ID NO: 230722 - protein, 866 aa, Artificial Sequence
  derived and/or modified sequence
MPAVSLPPKENALFKRILRCYEHKQYRNGLKFCKQILSNPKFAEHGETLAMKGLTLNCLGKKEEAYELVRRGLRNDLKSHVCWHVYGLLQRSDKKYDEAIKCYRNALKWDKDNLQILRDLSLLQIQMRDLEGYRETRYQLLQLRPAQRASWIGYAIAYHLLEDYEMAAKILEEFRKTQQTSPDKVDYEYSELLLYQNQVLREAGLYREALEHLCTYEKQICDKLAVEETKGELLLQLCRLEDAADVYRGLQERNPENWAYYKGLEKALKPANMLERLKIYEEAWTKYPRGLVPRRLPLNFLSGEKFKECLDKFLRMNFSKGCPPVFNTLRSLYKDKEKVAIIEELVVGYETSLKSCRLFNPNDDGKEEPPTTLLWVQYYLAQHYDKIGQPSIALEYINTAIESTPTLIELFLVKAKIYKHAGNIKEAARWMDEAQALDTADRFINSKCAKYMLKANLIKEAEEMCSKFTREGTSAVENLNEMQCMWFQTECAQAYKAMNKFGEALKKCHEIERHFIEITDDQFDFHTYCMRKITLRSYVDLLKLEDVLRQHPFYFKAARIAIEIYLKLHDNPLTDENKEHEADTANMSDKELKKLRNKQRRAQKKAQIEEEKKNAEKEKQQRNQKKKKDDDDEEIGGPKEELIPEKLAKVETPLEEAIKFLTPLKNLVKNKIETHLFAFEIYFRKEKFLLMLQSVKRAFAIDSSHPWLHECMIRLFNTAVCESKDLSDTVRTVLKQEMNRLFGATNPKNFNETFLKRNSDSLPHRLSAAKMVYYLDPSSQKRAIELATTLDESLTNRNLQTCMEVLEALYDGSLGDCKEAAEIYRANCHKLFPYALAFMPPGYEEDMKITVNGDSSAEAEELANEI

SEQ ID NO: 230723 - protein, 740 aa, Artificial Sequence
  derived and/or modified sequence
MRDLEGYRETRYQLLQLRPAQRASWIGYAIAYHLLEDYEMAAKILEEFRKTQQTSPDKVDYEYSELLLYQNQVLREAGLYREALEHLCTYEKQICDKLAVEETKGELLLQLCRLEDAADVYRGLQERNPENWAYYKGLEKALKPANMLERLKIYEEAWTKYPRGLVPRRLPLNFLSGEKFKECLDKFLRMNFSKGCPPVFNTLRSLYKDKEKVAIIEELVVGYETSLKSCRLFNPNDDGKEEPPTTLLWVQYYLAQHYDKIGQPSIALEYINTAIESTPTLIELFLVKAKIYKHAGNIKEAARWMDEAQALDTADRFINSKCAKYMLKANLIKEAEEMCSKFTREGTSAVENLNEMQCMWFQTECAQAYKAMNKFGEALKKCHEIERHFIEITDDQFDFHTYCMRKITLRSYVDLLKLEDVLRQHPFYFKAARIAIEIYLKLHDNPLTDENKEHEADTANMSDKELKKLRNKQRRAQKKAQIEEEKKNAEKEKQQRNQKKKKDDDDEEIGGPKEELIPEKLAKVETPLEEAIKFLTPLKNLVKNKIETHLFAFEIYFRKEKFLLMLQSVKRAFAIDSSHPWLHECMIRLFNTAVCESKDLSDTVRTVLKQEMNRLFGATNPKNFNETFLKRNSDSLPHRLSAAKMVYYLDPSSQKRAIELATTLDESLTNRNLQTCMEVLEALYDGSLGDCKEAAEIYRANCHKLFPYALAFMPPGYEEDMKITVNGDSSAEAEELANEI

SEQ ID NO: 230724 - DNA, 2223 bp, Artificial Sequence
  derived and/or modified sequence
atgagagacctggagggctacagagagaccagataccagctgctgcagctgagacccgcccagagagccagctggatcggctacgccatcgcctaccacctgctggaggactacgagatggccgccaagatcctggaggagttcagaaagacccagcagaccagccccgacaaggtggactacgagtacagcgagctgctgctgtaccagaaccaggtgctgagagaggccggcctgtacagagaggccctggagcacctgtgcacctacgagaagcagatctgcgacaagctggccgtggaggagaccaagggcgagctgctgctgcagctgtgcagactggaggacgccgccgacgtgtacagaggcctgcaggagagaaaccccgagaactgggcctactacaagggcctggagaaggccctgaagcccgccaacatgctggagagactgaagatctacgaggaggcctggaccaagtaccccagaggcctggtgcccagaagactgcccctgaacttcctgagcggcgagaagttcaaggagtgcctggacaagttcctgagaatgaacttcagcaagggctgcccccccgtgttcaacaccctgagaagcctgtacaaggacaaggagaaggtggccatcatcgaggagctggtggtgggctacgagaccagcctgaagagctgcagactgttcaaccccaacgacgacggcaaggaggagccccccaccaccctgctgtgggtgcagtactacctggcccagcactacgacaagatcggccagcccagcatcgccctggagtacatcaacaccgccatcgagagcacccccaccctgatcgagctgttcctggtgaaggccaagatctacaagcacgccggcaacatcaaggaggccgccagatggatggacgaggcccaggccctggacaccgccgacagattcatcaacagcaagtgcgccaagtacatgctgaaggccaacctgatcaaggaggccgaggagatgtgcagcaagttcaccagagagggcaccagcgccgtggagaacctgaacgagatgcagtgcatgtggttccagaccgagtgcgcccaggcctacaaggccatgaacaagttcggcgaggccctgaagaagtgccacgagatcgagagacacttcatcgagatcaccgacgaccagttcgacttccacacctactgcatgagaaagatcaccctgagaagctacgtggacctgctgaagctggaggacgtgctgagacagcaccccttctacttcaaggccgccagaatcgccatcgagatctacctgaagctgcacgacaaccccctgaccgacgagaacaaggagcacgaggccgacaccgccaacatgagcgacaaggagctgaagaagctgagaaacaagcagagaagagcccagaagaaggcccagatcgaggaggagaagaagaacgccgagaaggagaagcagcagagaaaccagaagaagaagaaggacgacgacgacgaggagatcggcggccccaaggaggagctgatccccgagaagctggccaaggtggagacccccctggaggaggccatcaagttcctgacccccctgaagaacctggtgaagaacaagatcgagacccacctgttcgccttcgagatctacttcagaaaggagaagttcctgctgatgctgcagagcgtgaagagagccttcgccatcgacagcagccacccctggctgcacgagtgcatgatcagactgttcaacaccgccgtgtgcgagagcaaggacctgagcgacaccgtgagaaccgtgctgaagcaggagatgaacagactgttcggcgccaccaaccccaagaacttcaacgagaccttcctgaagagaaacagcgacagcctgccccacagactgagcgccgccaagatggtgtactacctggaccccagcagccagaagagagccatcgagctggccaccaccctggacgagagcctgaccaacagaaacctgcagacctgcatggaggtgctggaggccctgtacgacggcagcctgggcgactgcaaggaggccgccgagatctacagagccaactgccacaagctgttcccctacgccctggccttcatgccccccggctacgaggaggacatgaagatcaccgtgaacggcgacagcagcgccgaggccgaggagctggccaacgagatctag

SEQ ID NO: 230725 - DNA, 2601 bp, Artificial Sequence
  derived and/or modified sequence
atgcccgccgtcagcttgccaccaaaagaaaatgccctttttaaacgcattctgaggtgttacgagcataaacagtatcggaacgggctgaagttctgcaaacagattctgtcaaaccctaagtttgccgaacacggggagaccttagccatgaaaggacttacacttaattgtcttggaaagaaggaggaagcttatgaactggtgcgcagaggcctgaggaatgatctgaaaagccacgtctgttggcacgtgtatggtttgctgcagcggtcggacaagaagtatgatgaggctatcaagtgctatcgaaacgcgctcaaatgggacaaagacaatctccagattctcagggatctcagcctcctgcagatacagatgagagaccttgagggctacagggagaccagataccagctgttgcagctgagacccgctcagagggcttcctggatcggatacgcgattgcttatcacctgctggaggactacgaaatggctgctaaaattcttgaggagttccgaaaaacccagcagaccagccccgacaaggtagactacgaatacagcgagcttctgctctaccagaaccaggtgctgagggaggctggtttgtacagagaagctctcgagcatctctgtacttatgaaaagcaaatctgcgacaagttggctgtagaagaaaccaagggagagttactactgcaactgtgtcgcttggaagacgccgcagacgtttacagagggttgcaggaacgaaatccagagaattgggcatactacaaaggcctggaaaaggcgctcaagcctgccaacatgctagagcgcctaaagatatacgaggaggcatggaccaaatacccgcgcggcctggtgccacggcgactccccctaaatttcctgtcgggggagaaatttaaggagtgcttagacaaatttctgcggatgaacttctcgaagggatgccccccggtctttaatactctcagatcactgtataaggacaaggagaaagtggccatcatcgaagaactcgttgtggggtacgagacatctctgaagtcttgccgtctctttaacccaaatgatgacggtaaggaggaaccccccaccacactgctgtgggtgcagtattatctcgcgcagcactacgataagattggacagccgtccatagccctcgaatatattaacactgcgatcgaatccacacctacactgatcgaattattcctggtgaaagccaagatttataagcacgccgggaatataaaggaagcagccagatggatggatgaggcccaggccctcgacacggccgaccggttcatcaattcaaaatgcgcaaaatacatgttgaaggctaatcttattaaggaagctgaggaaatgtgtagcaagtttactcgtgagggaacttcagcagtagagaacttaaatgaaatgcaatgtatgtggttccagactgaatgtgcccaagcctataaggctatgaacaagtttggagaggctcttaaaaaatgccacgaaatcgagaggcatttcatcgaaatcacagatgatcagttcgacttccatacctactgcatgcgtaagattactctccggagctatgttgacctgctgaaattggaagacgtgcttcgccagcaccccttctattttaaggcagcccggattgcgatcgagatttatctaaaactgcacgacaaccccctcaccgatgaaaacaaggaacacgaggccgacactgccaacatgtccgacaaggagctgaagaaactccgaaataagcagaggcgggcccagaagaaggcccaaatcgaggaggagaagaaaaatgcagaaaaggagaagcaacaaaggaatcaaaaaaagaaaaaggatgatgacgacgaggagataggcggtcccaaagaagagctgatccccgagaagctggctaaagtagagacaccactggaggaggcgatcaagttcctcacacccctcaaaaacctggtgaaaaacaaaattgaaacccatctcttcgctttcgaaatttatttcagaaaggagaaatttctcctcatgctgcagtcagtaaaacgcgcatttgccatcgatagctcgcatccctggcttcatgagtgtatgatcagactcttcaacactgctgtgtgtgaaagcaaggatctgtctgacacagtgaggacggtgctgaaacaggaaatgaacagactgttcggtgccacaaaccctaagaacttcaatgaaacattccttaagcgtaattcagacagcttaccccaccgtctgtcggctgcgaagatggtgtactacttggacccctcatcccagaagagggccatcgaactagcaaccacgctggatgaatccctcaccaaccgcaacctccagacctgcatggaggtcctcgaagctctgtatgacggatccttgggggactgtaaagaggccgcagaaatatacagggctaactgtcacaaactgttcccgtacgctctggctttcatgcctcccggatatgaagaggacatgaagattaccgtaaatggggactcctccgccgaagccgaagaactggccaacgagatttag

SEQ ID NO: 230726 - DNA, 2223 bp, Artificial Sequence
  derived and/or modified sequence
atgcgcgacctagagggttatcgggaaacccgctatcagctcttgcagctgaggcccgctcaacgtgcctcctggatcggatacgccattgcctaccacttattggaagattatgagatggcagccaagattcttgaggagttcaggaaaactcaacaaacctcaccagacaaagtcgattacgagtactcggaattactgctttatcaaaatcaggttctgcgggaggctggtctgtacagagaggcattagaacacttgtgtacatacgagaaacaaatctgcgataagttagctgttgaggagacaaaaggcgagttgctcttgcagttgtgtcgtcttgaagacgcagcggacgtttatcggggtcttcaggaaagaaaccctgagaattgggcctactacaaagggctggaaaaggcactgaaacccgccaatatgttggaacgactgaagatttatgaggaggcctggaccaagtacccccggggactggtgcccaggcggctgcccctgaattttctgtctggtgaaaagtttaaggagtgcctggacaagttcctaagaatgaactttagcaagggttgtcctcccgtgttcaataccctcaggtcactgtacaaggacaaagagaaggtagctattattgaagaactcgtcgtaggatatgaaacatctctcaagtcttgtaggctgttcaacccgaacgacgatggtaaagaggagcctcccaccactctgctgtgggttcaatactacctcgcgcagcactatgataaaatcggccagccttctattgctctggagtacatcaacacggctatcgaatccacacccactctgatcgaactcttcctggtgaaggcaaagatctacaagcacgccggcaacattaaagaggcggccagatggatggacgaggcacaggcactcgataccgccgatcgcttcattaattcaaagtgcgctaagtacatgctgaaggctaacctcattaaagaagccgaggagatgtgtagcaaatttacccgggaaggtacctcagctgttgagaatctcaatgagatgcaatgtatgtggtttcagactgagtgcgctcaagcatacaaggccatgaacaagtttggtgaggccctcaagaaatgtcatgagatcgagcggcatttcattgaaatcactgatgaccagtttgatttccacacttattgtatgcgaaagatcactctgagaagttacgtggacctgttgaaacttgaggatgtcttacgacagcaccctttttacttcaaggctgccaggattgcaatagaaatctacctaaaactgcatgataatcccctgacggatgaaaataaagagcacgaagctgatacagcaaatatgtcagacaaagagctcaaaaaactgcgaaacaagcagaggagagcccagaaaaaggcccagatcgaagaagaaaaaaaaaacgctgagaaagagaagcaacagcgcaaccaaaagaaaaagaaggatgacgatgacgaggagatcgggggtcctaaggaggaacttatccccgagaagctggccaaggttgaaactcccctggaagaagccatcaagttcctcacacccctgaaaaatctggtcaagaacaaaattgaaacacacctctttgctttcgagatatattttcgaaaagaaaagttcctgctgatgttgcagtccgttaaaagagccttcgcgattgattctagccatccatggcttcacgagtgtatgatcagactgttcaataccgctgtatgtgaatccaaggatctgtcggacaccgtgagaactgtgttaaagcaggagatgaatcgcctgttcggagcgaccaatcccaaaaattttaacgaaacgtttctgaaacggaacagcgactcacttccccataggctaagcgcagcgaaaatggtgtactacttagatccctcaagtcagaagagagcaattgagttggcgaccactctcgatgagtcgctgacaaaccggaacttgcagacgtgtatggaagtactggaagcgctctacgacggaagtttgggcgactgtaaggaagcagctgagatctaccgggcaaattgtcacaagctgtttccgtacgccttggcattcatgccgcctgggtacgaagaagacatgaagatcacagtgaatggggattcttccgccgaagccgaagagcttgcgaacgagatttag

SEQ ID NO: 230727 - DNA, 2601 bp, Artificial Sequence
  derived and/or modified sequence
atgcctgctgtgtccctgccccccaaggaaaatgccctcttcaagaggatcctgcgctgctatgagcacaagcagtacagaaatggcctgaagttctgcaagcagatcctgagcaaccccaagtttgctgagcacggggagaccctggccatgaagggcctgaccctgaactgcctgggcaagaaggaggaggcctatgagctggtgcggcggggcctgagaaatgacctgaagagccacgtgtgctggcacgtgtatggcctgctgcagaggagtgacaagaagtatgatgaggccatcaagtgctacagaaatgccctgaagtgggacaaggacaacctgcagatcctgcgggacctgagcctgctgcagatccagatgagggacctggagggctaccgggagacccgctaccagctgctgcagctgcggcctgcccagagggcctcctggattggctacgccatcgcctaccacctgctggaggactatgagatggccgccaagatcctggaggagttcaggaagacccagcagaccagcccagacaaggtggactatgagtacagcgagctgctgctgtaccagaaccaggtgctgcgggaggccggcctgtaccgggaggccctggagcacctgtgcacctatgagaagcagatctgtgacaagctggccgtggaggagaccaagggggagctgctgctgcagctgtgccgcctggaggatgctgctgatgtgtaccggggcctgcaggagagaaatcctgagaactgggcctactacaagggcctggagaaggccctgaagccagccaacatgctggagcggctgaagatctatgaggaggcctggaccaagtacccccggggcctggtgccccggcggctgcccctgaacttcctgagcggggagaagttcaaggagtgcctggacaagttcctgaggatgaacttcagcaagggctgcccccctgtgttcaacaccctgcggagcctgtacaaggacaaggagaaggtggccatcatcgaggagctggtggtgggctatgagaccagcctgaagagctgccgcctcttcaaccccaatgatgatggcaaggaggagccccccaccaccctgctgtgggtgcagtactacctggcccagcactatgacaagattggccagcccagcatcgccctggagtacatcaacacagccatcgagagcacccccaccctcatcgagctgttcctggtgaaggccaagatctacaagcatgctggcaacatcaaggaggccgcccgctggatggatgaggcccaggccctggacacagctgaccgcttcatcaacagcaaatgtgccaagtacatgctgaaggccaacctgatcaaggaggccgaggagatgtgcagcaagttcacccgggagggcaccagcgctgtggagaacctgaatgagatgcagtgcatgtggttccagacagaatgtgcccaggcctacaaggccatgaacaagtttggagaggccctgaagaagtgccatgaaattgagcggcacttcatcgagatcacagatgaccagtttgacttccacacctactgcatgaggaagatcaccctgcggagctatgtggacctgctgaagctggaggatgtgctgcggcagcaccccttctacttcaaggccgcccgcatcgccatcgagatctacctgaagctgcatgacaaccccctgacagatgagaacaaggagcacgaggccgacacagccaacatgtctgacaaggagctgaagaagctgaggaacaagcagaggcgggcccagaagaaggcccagatcgaggaggagaagaagaatgctgagaaggagaagcagcagaggaaccagaagaagaagaaggatgatgatgatgaggagattggaggccccaaggaggagctgatccctgagaagctggccaaggtggagacccccctggaggaggccatcaagttcctgacccccctgaagaacctggtgaagaacaagattgagacccacctgtttgcctttgagatctacttcaggaaggagaagttcctgctgatgctgcagagcgtgaagagggcctttgccatcgacagcagccacccctggctgcacgagtgcatgatccgcctcttcaacacagctgtgtgtgagagcaaggacctgagtgacacagtgaggacagtgctgaagcaggagatgaacagactctttggagccaccaaccccaagaacttcaatgagaccttcctgaagaggaacagcgacagcctgccccaccggctgtctgctgccaagatggtgtactacctggaccccagcagccagaagagggccatcgagctggccaccaccctggatgagagcctgaccaacagaaacctgcagacctgcatggaggtgctggaggccctgtatgatggcagcctgggggactgcaaggaggccgctgagatctaccgggccaactgccacaagctgttcccctatgccctggccttcatgcctcctggctatgaggaggacatgaagatcaccgtgaatggagacagcagcgctgaggccgaggagctggccaatgagatctag

SEQ ID NO: 230728 - DNA, 2223 bp, Artificial Sequence
  derived and/or modified sequence
atgagggacctggagggctaccgggagacccgctaccagctgctgcagctgcggcctgcccagagggcctcctggattggctacgccatcgcctaccacctgctggaggactatgagatggccgccaagatcctggaggagttcaggaagacccagcagaccagcccagacaaggtggactatgagtacagcgagctgctgctgtaccagaaccaggtgctgcgggaggccggcctgtaccgggaggccctggagcacctgtgcacctatgagaagcagatctgtgacaagctggccgtggaggagaccaagggggagctgctgctgcagctgtgccgcctggaggatgctgctgatgtgtaccggggcctgcaggagagaaatcctgagaactgggcctactacaagggcctggagaaggccctgaagccagccaacatgctggagcggctgaagatctatgaggaggcctggaccaagtacccccggggcctggtgccccggcggctgcccctgaacttcctgagcggggagaagttcaaggagtgcctggacaagttcctgaggatgaacttcagcaagggctgcccccctgtgttcaacaccctgcggagcctgtacaaggacaaggagaaggtggccatcatcgaggagctggtggtgggctatgagaccagcctgaagagctgccgcctcttcaaccccaatgatgatggcaaggaggagccccccaccaccctgctgtgggtgcagtactacctggcccagcactatgacaagattggccagcccagcatcgccctggagtacatcaacacagccatcgagagcacccccaccctcatcgagctgttcctggtgaaggccaagatctacaagcatgctggcaacatcaaggaggccgcccgctggatggatgaggcccaggccctggacacagctgaccgcttcatcaacagcaaatgtgccaagtacatgctgaaggccaacctgatcaaggaggccgaggagatgtgcagcaagttcacccgggagggcaccagcgctgtggagaacctgaatgagatgcagtgcatgtggttccagacagaatgtgcccaggcctacaaggccatgaacaagtttggagaggccctgaagaagtgccatgaaattgagcggcacttcatcgagatcacagatgaccagtttgacttccacacctactgcatgaggaagatcaccctgcggagctatgtggacctgctgaagctggaggatgtgctgcggcagcaccccttctacttcaaggccgcccgcatcgccatcgagatctacctgaagctgcatgacaaccccctgacagatgagaacaaggagcacgaggccgacacagccaacatgtctgacaaggagctgaagaagctgaggaacaagcagaggcgggcccagaagaaggcccagatcgaggaggagaagaagaatgctgagaaggagaagcagcagaggaaccagaagaagaagaaggatgatgatgatgaggagattggaggccccaaggaggagctgatccctgagaagctggccaaggtggagacccccctggaggaggccatcaagttcctgacccccctgaagaacctggtgaagaacaagattgagacccacctgtttgcctttgagatctacttcaggaaggagaagttcctgctgatgctgcagagcgtgaagagggcctttgccatcgacagcagccacccctggctgcacgagtgcatgatccgcctcttcaacacagctgtgtgtgagagcaaggacctgagtgacacagtgaggacagtgctgaagcaggagatgaacagactctttggagccaccaaccccaagaacttcaatgagaccttcctgaagaggaacagcgacagcctgccccaccggctgtctgctgccaagatggtgtactacctggaccccagcagccagaagagggccatcgagctggccaccaccctggatgagagcctgaccaacagaaacctgcagacctgcatggaggtgctggaggccctgtatgatggcagcctgggggactgcaaggaggccgctgagatctaccgggccaactgccacaagctgttcccctatgccctggccttcatgcctcctggctatgaggaggacatgaagatcaccgtgaatggagacagcagcgctgaggccgaggagctggccaatgagatctag

SEQ ID NO: 230729 - DNA, 2601 bp, Artificial Sequence
  derived and/or modified sequence
atgcccgccgtgagcctgccccccaaggagaacgccctgttcaagcggatccttaggtgttacgagcataagcagtatcgtaatgggttgaagttctgtaaacagatcctaagcaatcctaaattcgctgagcatggagaaacactggccatgaagggactgacattaaattgtctgggcaaaaaggaagaggcatacgagttggtgcgaagaggactccggaacgatctgaaatcacatgtgtgttggcacgtgtacggcttgctgcagcgttctgataagaaatacgatgaggccatcaagtgctaccgaaacgctctgaagtgggataaagataaccttcagattttgagagacctctctctgctccaaatacagatgcgggatctggaaggctatcgcgaaacccgctatcaactgctccagctgcggcctgcgcagcgggcctcttggattggatacgccatcgcctaccatctcctggaagactacgagatggccgccaagatcctagaggaatttcggaaaacacaacaaacatcccccgataaggtggactacgagtactcagaactgctgctctaccagaaccaggtgcttcgcgaagcgggcctgtatcgggaagctcttgaacatctatgtacctatgaaaaacagatatgtgacaagctggcagtggaggagaccaagggggagttactgctacaattgtgtcggttagaggatgctgccgatgtttacagaggcttacaggaacgcaatccagagaactgggcgtattataaaggactggagaaagccctcaagcctgcgaacatgttggagagacttaaaatctatgaagaggcttggacgaaatatccccgaggcctggtaccccggcgactccctctgaacttcctgagcggcgaaaaattcaaggagtgcctagacaagtttctccgaatgaatttctcaaaaggctgccccccggtgtttaacaccttgcggagtctgtacaaggataaagaaaaggttgccatcatcgaggagctggttgtgggttatgaaacgagccttaaaagctgcagactgttcaatcctaacgacgatgggaaggaagagcctccaacgacactgctttgggtccagtattacctagcccagcactatgataagatcggtcaacccagcattgcactggaatatatcaatacggctattgagtcgacccccactctcatcgagctgtttctagtgaaagctaagatctacaagcatgcgggaaatatcaaagaagcagctcgctggatggacgaggctcaagccttagacactgctgatcggtttataaattctaagtgcgccaaatatatgcttaaggccaacctcatcaaggaggccgaagagatgtgctctaaatttacccgtgagggaacatccgccgtggagaatctgaatgagatgcagtgcatgtggtttcagactgagtgcgcacaggcttataaggcaatgaacaaatttggagaggccctgaagaagtgtcacgagatcgaaagacacttcattgagatcacggatgaccagttcgattttcacacgtattgcatgagaaagattacactcaggagctatgtagaccttcttaagctggaagatgtcctacgccagcatccattttacttcaaagccgcccggatcgcgatcgaaatatacttgaagcttcatgacaatcctctgactgacgaaaataaagagcacgaggccgataccgccaatatgtccgacaaagagctgaagaaactccgcaataaacagcgtcgtgcccagaagaaggcccagatcgaagaggagaaaaagaatgccgagaaggaaaaacaacagcgtaatcagaagaaaaaaaaagatgatgacgatgaggagatcggtggacctaaagaggagttgattcccgagaagttagccaaagtggagacccctcttgaagaggcaatcaaatttctgacacccttgaaaaatctggtaaagaataagatcgagacccacttatttgcctttgagatctatttccgaaaggagaagtttctcctcatgctgcagtctgtgaagagagcgttcgctattgatagctctcacccatggctccacgaatgcatgatccgacttttcaacacggccgtgtgcgagtccaaagatctaagcgataccgtacgtaccgtcttgaaacaggagatgaaccgcttattcggagcaactaatcccaagaatttcaacgaaaccttcctgaagcgcaacagcgactctttgcctcaccgcctatcagcagcaaagatggtttactaccttgatccttcttcccagaaacgcgccattgaactggcgaccacactggatgagtcactgactaaccgcaatctccagacctgtatggaagtcctggaggccttatacgatggctctttgggagactgcaaggaggctgctgaaatctaccgggctaactgtcacaaactgttcccctatgccctggcgttcatgccccccggctatgaggaggacatgaaaatcactgttaatggcgactctagcgcggaagctgaggagttagcaaatgagatctag

SEQ ID NO: 230730 - DNA, 2223 bp, Artificial Sequence
  derived and/or modified sequence
atgcgggacctggagggctaccgggagacccggtaccagctgctgcaactgcgccccgcccaaagggccagctggatcggttacgccatcgcttaccacctgctggaggactatgaaatggccgcaaagattctggaggagttccggaagacgcagcaaacttcccccgataaggtggattatgagtactctgagttgttgttgtatcagaatcaggtgctccgtgaagccggtctgtacagagaagcgctagaacacctgtgcacttatgagaagcagatttgcgataagctggcggtcgaagaaaccaagggggagttactcttgcagctttgtcggcttgaagatgctgccgatgtgtacaggggactgcaggagaggaatccagagaattgggcctattacaaggggctggaaaaagcattaaaacccgccaatatgcttgagagattaaaaatttacgaggaggcatggactaagtacccaagaggattagtgcctcggcgcctcccgctgaacttcttgtcaggggagaagttcaaagagtgtttggacaaatttctacgcatgaatttttccaaaggatgcccccctgtgtttaacacccttcggagcctctacaaggataaagaaaaggttgctattattgaggagttggtagtgggctatgaaacatcactcaagtcctgtcggctgttcaaccctaatgacgatggaaaagaagaacccccaacaactctgctgtgggttcagtattatctggcccagcattatgataagataggtcaacccagcatagccctggagtatataaacacggcaattgaatccactccgaccctgatcgagctatttctcgtgaaagccaagatctacaaacatgccgggaacatcaaggaggcggcaagatggatggacgaggcccaggcactggataccgcagacagatttatcaacagcaaatgcgcaaaatacatgttgaaggccaatctgattaaagaggccgaagagatgtgcagtaagtttacaagagagggcacctctgcagtggaaaaccttaacgaaatgcagtgcatgtggttccagaccgagtgtgctcaggcatataaggctatgaacaaattcggcgaggcactgaagaaatgtcacgagatcgaacggcattttatcgagataaccgatgaccaatttgactttcacacttactgtatgcgaaagatcacgctgaggtcctatgtggatctccttaaactggaggacgtcctcaggcagcacccgttctacttcaaagcggccaggatcgcgatagagatatatctcaagctgcatgacaacccactcactgatgaaaacaaagaacacgaagcggacactgctaatatgtcggataaagagctgaaaaaacttaggaacaaacagcggcgtgctcaaaagaaagctcaaattgaggaggagaagaaaaacgcagaaaaggaaaagcaacaaaggaaccaaaagaaaaaaaaagacgatgacgacgaggagatcgggggccctaaagaagagctgattcccgagaagctggcaaaggttgagaccccactggaggaggccatcaaattcctcaccccgttgaagaacctggtgaaaaataagatcgaaactcacctgtttgcctttgaaatttactttcggaaagaaaaattcctacttatgttacaatcagtaaagagggccttcgccatagactcttcacacccttggctgcacgaatgtatgatacgcttgtttaacacagccgtatgcgagtccaaggatttaagcgacactgtacggacggtcctcaagcaagaaatgaatcggttatttggagcgacaaacccgaaaaacttcaacgaaacattccttaaacggaattccgactccctgccgcaccgactgtccgctgcaaaaatggtgtattaccttgacccttcttcccaaaagcgggccatcgaattagctactacgcttgatgagtctttaaccaacaggaacctgcagacatgtatggaggtactggaagctctgtacgacggatctttaggcgactgcaaagaggcagcggaaatttacagggcaaactgccataaactctttccttacgccctggccttcatgccgcctggttatgaagaagatatgaaaattaccgttaacggggacagtagtgccgaagcggaagaattggctaacgaaatttag

SEQ ID NO: 230731 - DNA, 2601 bp, Artificial Sequence
  derived and/or modified sequence
atgccagccgtttcccttccacccaaagaaaatgcacttttcaaaagaatcctgcgatgttacgaacacaagcagtatcggaacgggttgaagttttgtaagcagatcctaagcaatcccaagttcgcggaacacggcgaaaccctggccatgaagggcctgacacttaactgcctggggaagaaagaggaggcttatgagctggtgcggaggggcctgcgcaatgatttgaaatctcatgtctgctggcatgtctacggactcctacagcggtccgacaaaaagtatgacgaggcgatcaaatgttacaggaacgcactgaaatgggataaggacaacctgcagatcttgcgggacctcagcctgcttcagattcaaatgcgagacttagagggctatcgagaaacccgatatcagctgctacagttgcgccctgcgcagagagcgagctggattggatatgccattgcctatcacctcctggaagactatgaaatggccgctaagatccttgaagaatttaggaaaacacagcagacaagccctgacaaggtagactacgagtactcggaactgctgctgtaccagaatcaggtgctacgggaggctggtctctaccgcgaagctctggagcatctctgcacttacgagaagcagatctgtgataagctggcggtagaagagactaagggggagctactgttacagctttgcaggctcgaggatgcagccgacgtttacagagggctgcaggagaggaaccctgaaaattgggcgtactataagggcctggagaaagcgctgaaaccggcaaatatgctggagcgcttgaagatctacgaagaggcatggaccaagtacccccgagggcttgtgccgaggaggctcccactgaactttctgtcaggtgagaagtttaaagaatgtctggacaagtttctgaggatgaacttttctaagggctgtcccccagtgtttaacactctgcggagtctgtataaggataaagaaaaggtcgcaattattgaagagctggtcgtggggtatgagacttcccttaagagttgccgcctttttaacccgaacgacgatgggaaagaggaacctcccaccactctcctctgggtgcagtactatctcgcacaacactacgacaaaatagggcaaccctccatcgccctggagtatatcaacactgcaatcgaaagtacgcctacactcattgaactgttcctcgtcaaagccaaaatatataagcacgcaggtaacatcaaggaagccgctcgctggatggatgaagctcaggcactggacacggccgaccgttttatcaactctaagtgtgccaaatacatgctgaaagcaaacctcattaaagaagcagaggagatgtgctcaaaattcacccgggagggcacctcagccgttgaaaatctcaacgagatgcagtgtatgtggttccagacggagtgcgcccaagcctataaggcaatgaataagtttggcgaagccctgaagaagtgtcacgaaattgaaaggcactttatcgagatcactgacgatcagttcgactttcatacctattgcatgcgtaaaattacccttcgctcgtacgtggacttgctcaagctggaggacgtgctccgacagcaccccttttatttcaaagccgcacgcatcgccattgaaatctacctcaagctgcatgacaaccctctaactgatgagaataaagagcacgaggctgacaccgcgaacatgtccgacaaggaactgaaaaaactccgaaacaaacagaggcgagcacagaaaaaagctcagatcgaggaagaaaaaaagaacgctgaaaaggagaaacagcagaggaaccagaaaaaaaaaaaagatgacgacgatgaggaaatcggcggaccaaaagaagagcttatccccgaaaagctggcaaaggttgaaacccctcttgaagaggccatcaagttccttacccctctcaagaacctcgtcaagaacaagattgaaacacacctcttcgctttcgagatatacttccggaaagaaaagtttttgctaatgctgcagtcagtcaagagagcttttgcaattgacagttcacatccatggctccatgaatgcatgatcagactttttaacacagctgtgtgcgagtcgaaggatttatccgacacagttagaacagtgctaaagcaagagatgaatcgcttatttggcgctactaaccccaagaattttaatgaaacattcctgaagcgcaactctgattcattgccacataggcttagcgccgctaagatggtttattacctcgacccgtcttcccagaagcgggctatagagctcgccacgactctagatgaaagtcttacaaatcgtaatctccagacttgcatggaagtcttggaagccctgtacgacggaagtctgggcgattgcaaggaagccgctgagatttaccgtgctaactgtcataaactgttcccatacgccctggcttttatgcccccaggctatgaagaggacatgaagattacggtgaatggagacagttctgccgaggcagaggagctggctaacgagatctag

SEQ ID NO: 230732 - DNA, 2223 bp, Artificial Sequence
  derived and/or modified sequence
atgagggatctcgaggggtatagagaaacaagataccagctcctccaacttaggcccgctcaaagagccagctggatagggtacgcaatcgcctaccacttactggaagactacgagatggccgctaagattcttgaggagttccgtaaaacacagcagacctcaccggacaaagtggactacgaatacagcgaactgctgctgtaccaaaaccaggtgctacgtgaagctggtctgtaccgagaggcccttgagcatctgtgcacttatgagaagcaaatctgcgacaagctagccgtggaggagaccaaaggcgaactcctgcttcagctatgccgcctcgaagatgcagctgacgtctatcgcggacttcaggagcggaatcccgaaaattgggcctattacaagggtcttgaaaaggccctgaagccagcaaatatgctggagcggctgaagatctacgaagaggcctggactaagtacccgcgaggcctggtgcctcggagattacccctgaactttctgagtggggagaagttcaaagagtgtctggacaagttcttacggatgaacttcagcaagggatgcccacccgtgtttaatacactaaggtccctgtacaaggacaaggagaaggtggccataatcgaagagctcgtagtcggctacgagacgtccctaaagtcttgtaggttgtttaaccccaatgatgacgggaaggaggaaccaccgacaaccctcctgtgggtgcaatactacctggcacagcactatgacaagattgggcagccctccatagctctggagtacattaacacagcaattgaatctactcctaccttaattgaactattcctggtcaaagcgaagatttataagcacgccggaaatataaaagaagctgccaggtggatggatgaagcgcaagccttggatacagccgaccgttttatcaactctaaatgcgcgaagtacatgttgaaggccaacctcatcaaagaggccgaagagatgtgctccaagtttactcgggaagggacctccgcggttgaaaacctaaatgaaatgcagtgcatgtggtttcagactgaatgcgctcaagcatacaaagctatgaataaattcggcgaggcgctgaaaaaatgccacgagatagaacgacatttcatagagattaccgacgatcaatttgattttcatacctactgcatgcgcaaaataacacttaggtcctatgtggacctcctgaagcttgaagacgtgctgcggcagcaccctttctactttaaagccgctagaattgccatcgagatctacctgaaactgcatgataatccattgacggatgaaaataaagagcacgaggctgacacagccaacatgtccgacaaggaactcaaaaaactgcggaacaagcagagacgggctcaaaagaaggcgcagatcgaggaggagaagaagaacgctgagaaagagaaacaacagaggaaccagaaaaagaagaaagatgatgatgacgaagaaatcggtggccctaaagaagagctgattccagaaaagctggccaaagtagagacacctctggaggaagctataaagtttcttactccactgaaaaatttggtgaaaaataagatcgaaacgcacctgtttgcgtttgagatctacttcaggaaggaaaagttccttctaatgctgcagtccgtgaaaagggcctttgcgatagattcctcccatccttggttgcatgagtgtatgataagactcttcaacaccgccgtgtgcgaatctaaggatctttcggacactgtgaggacagtccttaaacaggaaatgaacagactgtttggtgctacaaatcctaagaactttaacgaaacgtttctcaagaggaactccgacagcctgccccaccgcttgtccgctgctaaaatggtgtattatttggatccatctagccagaaaagggcaatagaactggcgacaacactggatgaaagcctcaccaatagaaacctgcaaacatgtatggaggtgctcgaggcgctgtacgatgggagcttgggcgactgcaaggaagcagccgagatctaccgtgcaaactgccataaactcttcccatatgcacttgcattcatgcctcctgggtatgaagaagacatgaaaatcactgtcaatggtgattcaagcgcagaggctgaagaattagccaatgaaatctag

SEQ ID NO: 230733 - DNA, 2627 bp, Artificial Sequence
  derived and/or modified sequence
attttggctgcctctgtcggtctgttcagttaccacgtgaaccgccgacggagacccgtagtgggggaggcggcggcagcgttaagtgagaaaggattaacattgaactgtttggggaaaaaggaagaagcttatgaattggttcgtagaggtttgagaaatgacttgaagagtcatgtgtgttggcacgtttatggccttcttcagaggtcagacaagaagtatgatgaagccattaagtgttacagaaatgcactaaaatgggataaagacaatcttcaaatcttaagggacctttccttactacagattcaaatgcgagatcttgagggttacagggaaacgaggtatcagttacttcagcttcgacctgcgcagagagcatcatggattggttatgctattgcttaccatttattagaagattatgaaatggcagcaaagattttagaagaatttaggaaaacacaacagacatcccctgacaaggtggattatgaatatagtgaactactcttatatcagaatcaagttcttcgggaagcaggtctctatagagaagctttggaacatctttgtacctatgaaaagcagatttgtgataaacttgctgtagaagaaaccaaaggggaacttctgttgcaactatgtcgtttggaagatgctgcagatgtttatagaggattgcaagagagaaatcctgaaaactgggcctattacaaaggcttggaaaaagcactcaagccagctaatatgttagaacggctaaaaatttatgaggaagcctggactaaatatcccaggggactggtgccaagaaggctgccgttaaactttttatctggtgagaagtttaaagaatgtttggataagttcctaaggatgaatttcagcaagggttgcccaccagtcttcaatactttaagatcattatacaaagacaaagaaaaggtggcaatcatagaagagttagtagtaggttatgaaacctctctaaaaagctgccggttatttaaccccaatgatgatggaaaggaggaaccaccaaccacattactttgggtccagtactacttggcacaacattatgacaaaattggtcagccatctattgctttggagtacataaatactgctattgaaagtacacctacattaatagaactctttctcgtgaaagctaaaatctataagcatgctggaaatattaaagaagctgcaaggtggatggatgaggcccaggccttggacacagcagacagatttatcaactccaaatgtgcaaaatacatgctaaaagccaacctgattaaagaagctgaagaaatgtgctcaaagtttacaagggaaggaacatcagcggtagagaatttgaatgaaatgcagtgcatgtggttccaaacagaatgtgcccaggcttataaagcaatgaataaatttggtgaagcacttaagaaatgtcatgagattgagagacattttatagaaatcactgatgaccagtttgactttcatacatactgtatgaggaagattacccttagatcatatgtggacttattaaaactagaagatgtacttcgacagcatccattttacttcaaggcagcaagaattgctatagagatctatttgaagcttcatgacaacccccttacagatgagaataaagaacacgaagctgatacagcaaacatgtctgacaaagagctaaagaagctacgtaataaacaaagaagagctcaaaagaaagcccagatagaagaagagaaaaaaaatgcagaaaaagaaaagcagcagagaaatcagaaaaagaagaaggatgatgatgatgaggagataggaggtccaaaagaagaacttattccagagaaactggccaaggttgaaactccattggaagaagctattaaatttttaacaccgttgaagaacttggtgaagaacaagatagagactcatctttttgcctttgagatttactttaggaaagaaaagtttcttttgatgctacaatcagtaaagagggcatttgctattgattctagtcatccctggcttcatgagtgtatgattcgtctctttaatactgcagtgtgtgaaagtaaagatttatctgatacagttagaacagtattaaaacaagaaatgaatcgtctttttggagcaacgaatccaaagaattttaatgaaacttttctgaaaaggaattctgattcattgccacacagattatcagctgccaaaatggtatattacttagatccttctagtcagaagcgagctatagagttggcaacaacacttgatgaatctctcactaacagaaacctccagacatgtatggaggtattggaagccttgtatgatggtagcctaggagactgtaaagaagctgctgaaatttatagagcaaattgtcataagcttttcccttatgctttggctttcatgcctcctggatatgaagaggatatgaagatcacagttaatggagatagttctgcagaagctgaagaactggccaatgaaatttgaacatcactaaacaagcaaatggaatgactttggaccatatctagtatataatatttttgtcacgcacctgctgcattgctctaacttac

SEQ ID NO: 230734 - DNA, 6208 bp, Artificial Sequence
  derived and/or modified sequence
gtgttaggaagcgtgacccgggtgggaaaaccctccgcgtccgccattttggctgcctctgtcggtctgttcagttaccacgtgaaccgccgacggagacccgtagtgggggaggcggcggcagcgttaagtgagaaaggaaaaaagacaacgaggaaaaaggaggtgtccgggtagggcaacgcggcgacacccgaggcctggtggtggcggcggatcgagatattcaaggctgaagcagctacggaacggcagcggcggcggtcggacaaactgactgaccgagccgggtggtggcgggagcagcgggagcagccggaacgatgccggccgtgagcctcccgcccaaggagaatgcgctcttcaagcggatcttgaggtgttatgaacataaacagtatagaaatggattgaaattctgtaaacaaatactttctaatcccaaatttgcagagcatggagaaaccttggctatgaaaggattaacattgaactgtttggggaaaaaggaagaagcttatgaattggttcgtagaggtttgagaaatgacttgaagagtcatgtgtgttggcacgtttatggccttcttcagaggtcagacaagaagtatgatgaagccattaagtgttacagaaatgcactaaaatgggataaagacaatcttcaaatcttaagggacctttccttactacagattcaaatgcgagatcttgagggttacagggaaacgaggtatcagttacttcagcttcgacctgcgcagagagcatcatggattggttatgctattgcttaccatttattagaagattatgaaatggcagcaaagattttagaagaatttaggaaaacacaacagacatcccctgacaaggtggattatgaatatagtgaactactcttatatcagaatcaagttcttcgggaagcaggtctctatagagaagctttggaacatctttgtacctatgaaaagcagatttgtgataaacttgctgtagaagaaaccaaaggggaacttctgttgcaactatgtcgtttggaagatgctgcagatgtttatagaggattgcaagagagaaatcctgaaaactgggcctattacaaaggcttggaaaaagcactcaagccagctaatatgttagaacggctaaaaatttatgaggaagcctggactaaatatcccaggggactggtgccaagaaggctgccgttaaactttttatctggtgagaagtttaaagaatgtttggataagttcctaaggatgaatttcagcaagggttgcccaccagtcttcaatactttaagatcattatacaaagacaaagaaaaggtggcaatcatagaagagttagtagtaggttatgaaacctctctaaaaagctgccggttatttaaccccaatgatgatggaaaggaggaaccaccaaccacattactttgggtccagtactacttggcacaacattatgacaaaattggtcagccatctattgctttggagtacataaatactgctattgaaagtacacctacattaatagaactctttctcgtgaaagctaaaatctataagcatgctggaaatattaaagaagctgcaaggtggatggatgaggcccaggccttggacacagcagacagatttatcaactccaaatgtgcaaaatacatgctaaaagccaacctgattaaagaagctgaagaaatgtgctcaaagtttacaagggaaggaacatcagcggtagagaatttgaatgaaatgcagtgcatgtggttccaaacagaatgtgcccaggcttataaagcaatgaataaatttggtgaagcacttaagaaatgtcatgagattgagagacattttatagaaatcactgatgaccagtttgactttcatacatactgtatgaggaagattacccttagatcatatgtggacttattaaaactagaagatgtacttcgacagcatccattttacttcaaggcagcaagaattgctatagagatctatttgaagcttcatgacaacccccttacagatgagaataaagaacacgaagctgatacagcaaacatgtctgacaaagagctaaagaagctacgtaataaacaaagaagagctcaaaagaaagcccagatagaagaagagaaaaaaaatgcagaaaaagaaaagcagcagagaaatcagaaaaagaagaaggatgatgatgatgaggagataggaggtccaaaagaagaacttattccagagaaactggccaaggttgaaactccattggaagaagctattaaatttttaacaccgttgaagaacttggtgaagaacaagatagagactcatctttttgcctttgagatttactttaggaaagaaaagtttcttttgatgctacaatcagtaaagagggcatttgctattgattctagtcatccctggcttcatgagtgtatgattcgtctctttaatactgcagtgtgtgaaagtaaagatttatctgatacagttagaacagtattaaaacaagaaatgaatcgtctttttggagcaacgaatccaaagaattttaatgaaacttttctgaaaaggaattctgattcattgccacacagattatcagctgccaaaatggtatattacttagatccttctagtcagaagcgagctatagagttggcaacaacacttgatgaatctctcactaacagaaacctccagacatgtatggaggtattggaagccttgtatgatggtagcctaggagactgtaaagaagctgctgaaatttatagagcaaattgtcataagcttttcccttatgctttggctttcatgcctcctggatatgaagaggatatgaagatcacagttaatggagatagttctgcagaagctgaagaactggccaatgaaatttgaacatcactaaacaagcaaatggaatgactttggaccatatctagtatataatatttttgtcacgcacctgctgcattgctctaacttacacagaatgagaggagtaaatgttcttgccttcaaatagtgttttacgttttttatcctgctgaaaaagtatatataaaatatctaacattacaggatagaggttcagtttcttaaaaaattaaagctgctaaaattgagtggttaaaaaagataccttatcctattcctccccacccacccatgtttttaaactaatttatataaaatctggaggctgttacagctaacaaagcaggtgtgtggcagaaatattactttaaatttgtcttgtgagattttactatatctcagacagcataaatgctgttttagcactggattctttcactgagcacaaagagttgttggggctttagcatctgactgattttgttacggggttgattctgaccataggaagtatgcaatgtgaatcactatttacagagaaacctacaacagatgcttgatgttgtagaaactgggacatatagataccaagcaaaattataagaaacctataaggtgttcaatacgcttgtgtttccaaaattcactgtacatgatcagtttggtgttcttgtaccacagtttttaactgaaggaaccagttgtaacagtctcaattttaactaaaacttgaagaactaaaacaacaatgcaaacctttcagcattgtttggccaaacttgttaaaactgtaatgcaagaaccaaatgcactgtgatgtggcaccaactaattagcaagcatgaatttttcacccaagagtgaaaaaaggaaaatctaccatggcttgaagttaaagagcagaactcctgactaccattctatgactgatcaaaagactaatagttaaaaacctcagcaggccttgttcacgatatgcagaaaaaaaagtgctgcagtttagatacctctggaatttttccacagtgtcacaggtttgtaatacttgaagccctacatttctaagaatatatttcttgctcagttgtttcaggcaagcccaagactttgtaatttttaaagggcccaagattttttttttttttttttttttcaaataacagaccagcttctttttcttgcagttacagatgtaatttcctttttgttgtcaaacataaggtaccaaatatgatgcaataaattgttttgaaaaacagttgtgtgaatatttcaactaatctgtgttgggcttctgtgaaatacacaggtggaaacagaggtgcaagccagaggcaatgtaatatgctgtaaggctagtgcagatgggagctttttagaaggggctaagtgctggtgtcagggaaattccataatgaagtagaatgctgctcctgcattaagatttcattgagggcaaggctggtggcaggtactatgaatgtaattcataatttaaaaggaaaactaaaaactattttgatttgggaaaatgagccttaatttgttaaacctatacactgagaactagcctcaggcttaatattctcattgcatttgcaagatctgagcaaataagattaagtaaaacaaatcaattgtatatataattgacctttttgtggaacatgtagtttatagaaagtatactctaaagggaatttgccgaagaccttttactgattgaacagttgtgctacaatcaacttttcatagtacatgacctgcattccacatctcagtctaacagtttagtagtgatgtaaagagaagtacaaaccgaactccagtgctttgttatgttttattaactggccctgtctcaggaacatcttaacagatggcaaaaaaacaaaaactttttttcaactcctatgagtggcaactgaagttcttattgttgggaaagaacactagtcctacctctgccactaatgaggtgtttggaggaggtaccagccatataatagggggtgtatgtgtgaattttgtttaaactctactgtatattgaaatgaaattcatttatttgtcttgacaatgttcaaatgatgtagattgtcttagaatgaatattcataagtactcagaactcttaagatgcagatgccacccgtgaggagctaaattcctaatgtgtattgtattccaacccaattttactggaactattgaataaatcttttattttctttcaggtttacttgatagtggatacattggtgtcagaggaccttgactgggttcattttatgtccagacatcacccctgaaacactgtactgtactatcttgctctgagtagtatcaactggatcgtctcatatttgcctcattcatcctattaatttcaaatgatactgtgggggaaaaacagggttagaaaaacaagtggaaaaaatggagtgatgttgtaatctaaacaagtgccttatgtttattgctaagaactggtgttaccaacccttttgagaagaaagggtctcttgacctgtattaacataggaaagtaaagttctttttgtttttctttatattcagctactcttgtcatttctcgttgaaaaactaaaatctgactaggttagtttactcagctttaattagatagttgagtcatatattttcaacatttttctgtatcgtatttattatgcacaaaaataaagtgtgatctctaatagcatggctaaaggtaatgccaatattagtgaatagctttgctgtgggctttatcaggcccttgtttttcacagtgttgtttgtactccatggtgtattgctattagagctgtgaaatgaaagctgtgactttatgaagagatcaaaaaaagtgtggtccagattcaggtaggttgtggtaagttcagggaagtcttgtatgatttctaagaatatttcagttaccatgtatagtatttgggaaaagctgtaatgtaaaatattggactttgttgcaagataggtatatacttgtgtcagataattaaagccttaaattttgaaatgaatctttgagatttcaaagaaagactgacctttcaaatagaaggcggtctttctattctagctaatgccccacttctttaagttataaacaaagtttcatgataccattctgctatcatctaaactttgctgaactctactgccaacctacattaaaaacaaagtcccacgaaatggctgtgttacaccatagtgagcagaaacttaaattttgttctaattttgatggttgaaaaatttcaacctgtagcaataaa

SEQ ID NO: 230735 - DNA, 2601 bp, Artificial Sequence
  derived and/or modified sequence
atgcccgccgtgagcctgccccccaaggagaacgccctgttcaagagaatcctgagatgctacgagcacaagcagtacagaaacggcctgaagttctgcaagcagatcctgagcaaccccaagttcgccgagcacggcgagaccctggccatgaagggcctgaccctgaactgcctgggcaagaaggaggaggcctacgagctggtgagaagaggcctgagaaacgacctgaagagccacgtgtgctggcacgtgtacggcctgctgcagagaagcgacaagaagtacgacgaggccatcaagtgctacagaaacgccctgaagtgggacaaggacaacctgcagatcctgagagacctgagcctgctgcagatccagatgagagacctggagggctacagagagaccagataccagctgctgcagctgagacccgcccagagagccagctggatcggctacgccatcgcctaccacctgctggaggactacgagatggccgccaagatcctggaggagttcagaaagacccagcagaccagccccgacaaggtggactacgagtacagcgagctgctgctgtaccagaaccaggtgctgagagaggccggcctgtacagagaggccctggagcacctgtgcacctacgagaagcagatctgcgacaagctggccgtggaggagaccaagggcgagctgctgctgcagctgtgcagactggaggacgccgccgacgtgtacagaggcctgcaggagagaaaccccgagaactgggcctactacaagggcctggagaaggccctgaagcccgccaacatgctggagagactgaagatctacgaggaggcctggaccaagtaccccagaggcctggtgcccagaagactgcccctgaacttcctgagcggcgagaagttcaaggagtgcctggacaagttcctgagaatgaacttcagcaagggctgcccccccgtgttcaacaccctgagaagcctgtacaaggacaaggagaaggtggccatcatcgaggagctggtggtgggctacgagaccagcctgaagagctgcagactgttcaaccccaacgacgacggcaaggaggagccccccaccaccctgctgtgggtgcagtactacctggcccagcactacgacaagatcggccagcccagcatcgccctggagtacatcaacaccgccatcgagagcacccccaccctgatcgagctgttcctggtgaaggccaagatctacaagcacgccggcaacatcaaggaggccgccagatggatggacgaggcccaggccctggacaccgccgacagattcatcaacagcaagtgcgccaagtacatgctgaaggccaacctgatcaaggaggccgaggagatgtgcagcaagttcaccagagagggcaccagcgccgtggagaacctgaacgagatgcagtgcatgtggttccagaccgagtgcgcccaggcctacaaggccatgaacaagttcggcgaggccctgaagaagtgccacgagatcgagagacacttcatcgagatcaccgacgaccagttcgacttccacacctactgcatgagaaagatcaccctgagaagctacgtggacctgctgaagctggaggacgtgctgagacagcaccccttctacttcaaggccgccagaatcgccatcgagatctacctgaagctgcacgacaaccccctgaccgacgagaacaaggagcacgaggccgacaccgccaacatgagcgacaaggagctgaagaagctgagaaacaagcagagaagagcccagaagaaggcccagatcgaggaggagaagaagaacgccgagaaggagaagcagcagagaaaccagaagaagaagaaggacgacgacgacgaggagatcggcggccccaaggaggagctgatccccgagaagctggccaaggtggagacccccctggaggaggccatcaagttcctgacccccctgaagaacctggtgaagaacaagatcgagacccacctgttcgccttcgagatctacttcagaaaggagaagttcctgctgatgctgcagagcgtgaagagagccttcgccatcgacagcagccacccctggctgcacgagtgcatgatcagactgttcaacaccgccgtgtgcgagagcaaggacctgagcgacaccgtgagaaccgtgctgaagcaggagatgaacagactgttcggcgccaccaaccccaagaacttcaacgagaccttcctgaagagaaacagcgacagcctgccccacagactgagcgccgccaagatggtgtactacctggaccccagcagccagaagagagccatcgagctggccaccaccctggacgagagcctgaccaacagaaacctgcagacctgcatggaggtgctggaggccctgtacgacggcagcctgggcgactgcaaggaggccgccgagatctacagagccaactgccacaagctgttcccctacgccctggccttcatgccccccggctacgaggaggacatgaagatcaccgtgaacggcgacagcagcgccgaggccgaggagctggccaacgagatctag

SEQ ID NO: 230736 - protein, 1136 aa, Artificial Sequence
  derived and/or modified sequence
MKVTVCFGRTGIVVPCKEGQLRVGELTQQALQRYLKTREKGPGYWVKIHHLEYTDGGILDPDDVLADVVEDKDKLIAVFEEQEPLHKIESPSGNPADRQSPDAFETEVAAQLAAFKPIGGEIEVTPSALKLGTPLLVRRSSDPVPGPPADTQPSASHPGGQSLKLVVPDSTQNLEDREVLNGVQTELLTSPRTKDTLSDMTRTVEISGEGGPLGIHVVPFFSSLSGRILGLFIRGIEDNSRSKREGLFHENECIVKINNVDLVDKTFAQAQDVFRQAMKSPSVLLHVLPPQNREQYEKSVIGSLNIFGNNDGVLKTKVPPPVHGKSGLKTANLTGTDSPETDASASLQQNKSPRVPRLGGKPSSPSLSPLMGFGSNKNAKKIKIDLKKGPEGLGFTVVTRDSSIHGPGPIFVKNILPKGAAIKDGRLQSGDRILEVNGRDVTGRTQEELVAMLRSTKQGETASLVIARQEGHFLPRELKGEPDCCALSLETSEQLTFEIPLNDSGSAGLGVSLKGNKSRETGTDLGIFIKSIIHGGAAFKDGRLRMNDQLIAVNGESLLGKSNHEAMETLRRSMSMEGNIRGMIQLVILRRPERPMEDPAECGAFSKPCFENCQNAVTTSRRNDNSILHPLGTCSPQDKQKGLLLPNDGWAESEVPPSPTPHSALGLGLEDYSHSSGVDSAVYFPDQHINFRSVTPARQPESINLKASKSMDLVPDESKVHSLAGQKSDGLSDKSSHSGQGALNCESAPQGNSELEDMENKARKVKKTKEKEKKKEKGKLKVKEKKRKEENEDPERKIKKKGFGAMLRFGKKKEDKGGKAEQKGTLKHGGLREEELEKMKEERERIGAKHQELREKQARGLLDYATGAIGSVYDMDDDEMDPNYARVNHFREPCTSANVFRSPSPPRAGPFGYPRDGHPLSPERDHLEGLYAKVNKPYHPLVPADSGRPTGGSTDRIQKLRKEYYQARREGFPLYEDDEGRARPSEYDLLWVPGRGPDGNAHNLRFEGMERQYASLPRGGPADPVDYLPAAPRGLYKERELPYYPGAHPMHPPKGSYPRPTELRVADLRYPQHYPPPPAPQHKGPFRQDVPPSPPQHQRMPAYQETGRPGPRGGSPDQYPYRTQDSRQKNPMTAAV

SEQ ID NO: 230737 - DNA, 3411 bp, Artificial Sequence
  derived and/or modified sequence
atgaaggtgaccgtgtgcttcggcagaaccggcatcgtggtgccctgcaaggagggccagctgagagtgggcgagctgacccagcaggccctgcagagatacctgaagaccagagagaagggccccggctactgggtgaagatccaccacctggagtacaccgacggcggcatcctggaccccgacgacgtgctggccgacgtggtggaggacaaggacaagctgatcgccgtgttcgaggagcaggagcccctgcacaagatcgagagccccagcggcaaccccgccgacagacagagccccgacgccttcgagaccgaggtggccgcccagctggccgccttcaagcccatcggcggcgagatcgaggtgacccccagcgccctgaagctgggcacccccctgctggtgagaagaagcagcgaccccgtgcccggcccccccgccgacacccagcccagcgccagccaccccggcggccagagcctgaagctggtggtgcccgacagcacccagaacctggaggacagagaggtgctgaacggcgtgcagaccgagctgctgaccagccccagaaccaaggacaccctgagcgacatgaccagaaccgtggagatcagcggcgagggcggccccctgggcatccacgtggtgcccttcttcagcagcctgagcggcagaatcctgggcctgttcatcagaggcatcgaggacaacagcagaagcaagagagagggcctgttccacgagaacgagtgcatcgtgaagatcaacaacgtggacctggtggacaagaccttcgcccaggcccaggacgtgttcagacaggccatgaagagccccagcgtgctgctgcacgtgctgcccccccagaacagagagcagtacgagaagagcgtgatcggcagcctgaacatcttcggcaacaacgacggcgtgctgaagaccaaggtgcccccccccgtgcacggcaagagcggcctgaagaccgccaacctgaccggcaccgacagccccgagaccgacgccagcgccagcctgcagcagaacaagagccccagagtgcccagactgggcggcaagcccagcagccccagcctgagccccctgatgggcttcggcagcaacaagaacgccaagaagatcaagatcgacctgaagaagggccccgagggcctgggcttcaccgtggtgaccagagacagcagcatccacggccccggccccatcttcgtgaagaacatcctgcccaagggcgccgccatcaaggacggcagactgcagagcggcgacagaatcctggaggtgaacggcagagacgtgaccggcagaacccaggaggagctggtggccatgctgagaagcaccaagcagggcgagaccgccagcctggtgatcgccagacaggagggccacttcctgcccagagagctgaagggcgagcccgactgctgcgccctgagcctggagaccagcgagcagctgaccttcgagatccccctgaacgacagcggcagcgccggcctgggcgtgagcctgaagggcaacaagagcagagagaccggcaccgacctgggcatcttcatcaagagcatcatccacggcggcgccgccttcaaggacggcagactgagaatgaacgaccagctgatcgccgtgaacggcgagagcctgctgggcaagagcaaccacgaggccatggagaccctgagaagaagcatgagcatggagggcaacatcagaggcatgatccagctggtgatcctgagaagacccgagagacccatggaggaccccgccgagtgcggcgccttcagcaagccctgcttcgagaactgccagaacgccgtgaccaccagcagaagaaacgacaacagcatcctgcaccccctgggcacctgcagcccccaggacaagcagaagggcctgctgctgcccaacgacggctgggccgagagcgaggtgccccccagccccaccccccacagcgccctgggcctgggcctggaggactacagccacagcagcggcgtggacagcgccgtgtacttccccgaccagcacatcaacttcagaagcgtgacccccgccagacagcccgagagcatcaacctgaaggccagcaagagcatggacctggtgcccgacgagagcaaggtgcacagcctggccggccagaagagcgacggcctgagcgacaagagcagccacagcggccagggcgccctgaactgcgagagcgccccccagggcaacagcgagctggaggacatggagaacaaggccagaaaggtgaagaagaccaaggagaaggagaagaagaaggagaagggcaagctgaaggtgaaggagaagaagagaaaggaggagaacgaggaccccgagagaaagatcaagaagaagggcttcggcgccatgctgagattcggcaagaagaaggaggacaagggcggcaaggccgagcagaagggcaccctgaagcacggcggcctgagagaggaggagctggagaagatgaaggaggagagagagagaatcggcgccaagcaccaggagctgagagagaagcaggccagaggcctgctggactacgccaccggcgccatcggcagcgtgtacgacatggacgacgacgagatggaccccaactacgccagagtgaaccacttcagagagccctgcaccagcgccaacgtgttcagaagccccagcccccccagagccggccccttcggctaccccagagacggccaccccctgagccccgagagagaccacctggagggcctgtacgccaaggtgaacaagccctaccaccccctggtgcccgccgacagcggcagacccaccggcggcagcaccgacagaatccagaagctgagaaaggagtactaccaggccagaagagagggcttccccctgtacgaggacgacgagggcagagccagacccagcgagtacgacctgctgtgggtgcccggcagaggccccgacggcaacgcccacaacctgagattcgagggcatggagagacagtacgccagcctgcccagaggcggccccgccgaccccgtggactacctgcccgccgcccccagaggcctgtacaaggagagagagctgccctactaccccggcgcccaccccatgcacccccccaagggcagctaccccagacccaccgagctgagagtggccgacctgagatacccccagcactacccccccccccccgccccccagcacaagggccccttcagacaggacgtgccccccagccccccccagcaccagagaatgcccgcctaccaggagaccggcagacccggccccagaggcggcagccccgaccagtacccctacagaacccaggacagcagacagaagaaccccatgaccgccgccgtgtag

SEQ ID NO: 230738 - DNA, 3411 bp, Artificial Sequence
  derived and/or modified sequence
atgaaggtcactgtttgctttgggcgcactggaatagtggttccatgtaaagaaggtcagctcagagtcggggagctcacccagcaggctcttcaaaggtacttgaagaccagagagaagggccccggatattgggtcaagattcaccatctggagtacacagatggcggtatccttgaccctgatgacgttctggcagatgtggttgaggacaaagataaactgatcgctgtgtttgaggagcaagaacccctgcacaaaatcgagtctccctctggcaaccctgccgaccgtcagtctccagatgccttcgagactgaggtagcagcccaactcgccgctttcaaaccaataggcggtgagatcgaagtcaccccgtcagctctgaagctgggcacacccctgctggtccggcgcagttcagaccccgtgcccgggccaccggccgatacacagccatctgcaagtcatcctggcggccagtcgctgaagctagtggtccctgacagtacccagaatctcgaggatagggaggtcttgaatggggtgcagaccgaactcctgacgtcccctcggactaaggataccctgtccgacatgacccgcaccgtggagatttcaggagaagggggtcccctgggaattcacgtggtgcccttcttctcctccctttctggaagaattctgggcctgttcatcagagggatcgaggacaactctagatccaagagagagggcctgtttcacgagaatgaatgcattgttaaaataaataacgtcgacttggtggataagacatttgctcaagcccaagatgtgttcaggcaggcaatgaagtccccgtccgtcctgctccatgtcctgcccccccagaatagagagcagtatgaaaagtccgtcatcggaagccttaacatctttgggaacaatgacggagttctgaagaccaaagttcctccccccgtgcacgggaagagcggcttgaaaacggccaatctgaccggaacagactctcccgaaacagacgcgtctgcctctttgcagcagaataaatctcccagggttcccagactcgggggcaaaccctcctcccccagcctttcccccttaatgggtttcgggtctaacaaaaacgctaagaagatcaaaattgacttgaagaaaggcccggagggattaggatttacagtcgttactcgggattcaagtatacatggacccggccctatttttgtcaagaacatcctaccaaagggcgcagcaataaaagatgggaggctccaaagcggtgaccggatacttgaggtcaatggtagagacgtcactggtcgcacacaggaggagctcgttgccatgctgcgatcaaccaagcaaggcgagaccgcctcgttggtcatcgcccgccaggaagggcactttttaccaagagagctgaaaggggaacctgattgctgtgcccttagcctagaaacatcagagcaattgacattcgaaatccccctgaacgattccggttccgctgggctaggcgtttctctgaaaggcaacaagagccgagaaaccggcaccgacctgggcatcttcatcaaatccattatccacggaggtgccgcgttcaaggatggtagattgcggatgaatgatcagctgatagcagttaacggtgaaagcttgttagggaaaagcaaccatgaagccatggaaactctccgaagatccatgtccatggaaggcaatattcggggcatgattcagttggtgatcctgcgaagaccagagcgccccatggaagatcccgcggaatgcggcgccttcagcaaaccgtgttttgaaaattgccaaaacgctgtgaccacctctcgtaggaatgataactcgatcctgcatccgctgggtacctgtagtccacaggataaacagaaaggcctgttgctacctaacgatggctgggctgaaagtgaggttcctccctcgcctaccccccatagcgcgctcggcctgggtttggaggactactcacattccagtggcgttgattccgccgtgtactttcctgaccaacatattaatttcaggagcgtgacccctgctaggcagcctgagtcaataaatctgaaggcctctaagtctatggatctggtgccagatgagtctaaggtgcattctcttgccggccaaaagtctgatggactgagtgataaaagcagtcacagtggacaaggagctctgaattgcgaaagtgccccacagggcaacagcgagttggaggatatggaaaacaaggccagaaaggtgaagaagaccaaggagaaggaaaaaaagaaggaaaaggggaagctgaaagtgaaggagaagaagcggaaagaggaaaatgaagaccctgaaagaaagatcaagaagaagggcttcggtgctatgctccgtttcggcaagaaaaaagaggataagggtggcaaagcggagcagaagggcacattaaaacacggcggcttacgagaggaggagctggagaagatgaaagaagaaagggaaaggattggcgcaaaacaccaggaactgagagaaaaacaagctcgtggactgctggactatgccacaggggctattgggtctgtgtacgacatggatgacgacgaaatggatcccaactatgcccgtgttaaccattttcgcgaaccatgcacctctgcgaacgtgttccgatccccctcacctcctcgggctggcccattcggctacccaagagacggccaccccttgtcgcctgagagagatcatctggaaggcctgtacgccaaggtaaataagccatatcatcccctggtgccagcagactccgggaggcccacaggtggatctaccgaccggattcaaaagttaagaaaggaatactatcaagcccgaagggaagggttccccctgtatgaagatgatgagggtcgtgcacgcccttctgagtacgatctgttgtgggtgcctggaaggggccccgacgggaatgcccacaacctgagattcgagggcatggaacgtcagtacgcctctttgccccgcggcggaccagctgatccagtggattacctaccagccgcgccccgcggcttgtataaagagagggagctgccttactaccccggcgcccaccctatgcatccccccaaagggtcatacccgaggcctacagagttgagggtggctgacctgcgatatcctcagcactaccctccaccaccagccccacagcataaaggcccgttcagacaagatgtgccccctagccctccacagcaccaacgcatgccggcgtatcaggagacaggccgacccggccctcggggcggcagtccagaccaatacccttataggactcaagattctagacagaaaaaccctatgacagcagcggtatag

SEQ ID NO: 230739 - DNA, 3411 bp, Artificial Sequence
  derived and/or modified sequence
atgaaggtgacagtgtgctttggaagaacaggcatcgtggtgccctgcaaggagggccagctgcgggtgggggagctgacccagcaggccctgcagcgctacctgaagacccgggagaagggccctggctactgggtgaagatccaccacctggagtacacagatggcggcatcctggaccctgatgatgtgctggctgatgtggtggaggacaaggacaagctgattgctgtgtttgaggagcaggagcccctgcacaagattgagagccccagcggcaacccagctgaccggcagagcccagatgcctttgaaacagaggtggccgcccagctggccgccttcaagcccatcggcggggagattgaggtgaccccatctgccctgaagctgggcacccccctgctggtgcggcgcagcagtgaccctgtgcccggccccccagctgacacccagcccagcgccagccaccctgggggccagagcctgaagctggtggtgcctgacagcacccagaacctggaggaccgggaggtgctgaatggagtgcagacagagctgctgaccagccccaggaccaaggacaccctgagtgacatgaccaggacagtggagatctctggagagggcggccccctgggcatccacgtggtgcccttcttcagcagcctgagcggccgcatcctgggcctcttcatccggggcatcgaggacaacagccgcagcaagcgggagggcctcttccatgaaaatgaatgcatcgtgaagatcaacaacgtggacctggtggacaagacctttgcccaggcccaggatgtgttccggcaggccatgaagagccccagcgtgctgctgcacgtgctgcccccccagaaccgggagcagtatgagaagtctgtgattggcagcctgaacatctttggaaataatgatggagtgctgaagaccaaggtgcccccacctgtgcacggcaagagcggcctgaagacagccaacctgaccggcacagacagccctgagacagatgccagcgccagcctgcagcagaacaagagcccccgggtgccccggctgggcggcaagcccagcagccccagcctgagccccctgatgggcttcggcagcaacaagaatgccaagaagatcaagattgacctgaagaagggccctgagggcctgggcttcaccgtggtgacccgggacagcagcatccacggccctggccccatctttgtgaagaacatcctgcccaagggggccgccatcaaggatggccgcctgcagagcggggaccgcatcctggaggtgaatggaagagatgtgacaggccgcacccaggaggagctggtggccatgctgcggagcaccaagcagggcgagacagccagcctggtgattgcccggcaggagggccacttcctgccccgggagctgaagggggagccagactgctgtgccctgagcctggagaccagcgagcagctgacctttgagatccccctgaatgacagcggcagcgctggcctgggcgtgtccctgaagggcaacaagagccgggagactggaacagacctgggcatcttcatcaagagcatcatccacggcggggccgccttcaaggatggccgcctgaggatgaatgaccagctgattgctgtgaatggagagagcctgctgggcaagagcaaccacgaggccatggagaccctgcggcgctccatgtccatggagggcaacatccggggcatgatccagctggtgatcctgcggcggcctgagcggcccatggaggaccctgcagaatgtggggccttcagcaagccctgctttgagaactgccagaatgctgtgaccaccagcagaagaaatgacaacagcatcctgcaccccctgggcacctgcagcccccaggacaagcagaagggcctgctgctgcccaatgatggctgggccgagagcgaggtgccccccagccccaccccccacagcgccctgggcctgggcctggaggactacagccacagcagcggcgtggacagcgctgtgtacttcccagaccagcacatcaacttccgctctgtgaccccagcccggcagcctgagagcatcaacctgaaggccagcaagtccatggacctggtgcctgatgagagcaaggtgcacagcctggccggccagaagagtgatggcctgagtgacaagagcagccacagcggccagggcgccctgaactgtgagagcgccccccagggcaacagcgagctggaggacatggagaacaaggccaggaaggtgaagaagaccaaggagaaggagaagaagaaggagaagggcaagctgaaggtgaaggagaagaagaggaaggaggagaatgaagatcctgagaggaagatcaagaagaagggctttggagccatgctgcgctttgggaagaagaaggaggacaagggcggcaaggccgagcagaagggcaccctgaagcacggcggcctgcgggaggaggagctggagaagatgaaggaggagcgggagcgcatcggggccaagcaccaggagctgcgggagaagcaggcccggggcctgctggactatgccaccggggccatcggctctgtgtatgacatggatgatgatgagatggaccccaactatgcccgggtgaaccacttccgggagccctgcaccagcgccaacgtgttccgcagccccagccccccccgggccggccccttcggctaccccagagatggccaccccctgagccctgagcgggaccacctggagggcctgtatgccaaggtgaacaagccctaccaccccctggtgcctgctgacagcggccggcccaccggcggcagcacagaccgcatccagaagctgaggaaggagtactaccaggcccggcgggagggcttccccctgtatgaagatgatgagggccgggcccggcccagtgaatatgacctgctgtgggtgcccggccggggcccagatggaaatgcccacaacctgcgctttgagggcatggagcggcagtatgccagcctgccccggggcggccctgctgaccctgtggactacctgcctgctgccccccggggcctgtacaaggagcgggagctgccctactacccaggggcccaccccatgcacccccccaagggcagctacccccggcccacagagctgcgggtggccgacctgcgctacccccagcactacccacctcctccagccccccagcacaagggccccttccggcaggatgtgccccccagccccccccagcaccagaggatgcctgcctaccaggagaccggccggcccggcccccggggcggcagcccagaccagtacccctaccgcacccaggacagccggcagaagaaccccatgacagctgctgtgtag

SEQ ID NO: 230740 - DNA, 3411 bp, Artificial Sequence
  derived and/or modified sequence
atgaaggtgaccgtgtgcttcggccggaccggcatcgtggtgccctgtaaggagggtcagctcagggtgggggagttgacccagcaggctctccagcgctaccttaaaacgcgggagaaggggccagggtactgggttaagatccatcatctggagtacacggatggaggaatactggatccggatgacgtgttagcggacgtggtcgaagacaaggacaagctcatcgctgtctttgaggagcaagaacctcttcataagatcgaaagtccctcagggaatccagctgatcgtcaaagcccggacgcgtttgaaacagaagtggccgcacaactggctgcgtttaagcctattgggggcgagattgaagtgactccttctgctttaaaactgggtacacctctgctggtaaggaggagctctgatcctgtcccagggcccccagccgatacacagccaagtgcctcacaccctggaggacagtctttaaagttggtggtccccgactcaacacagaatttggaagatcgagaggtattgaatggcgtgcaaacagagctgctgaccagccctcgcaccaaggataccctctccgatatgacgagaacggtcgaaatcagtggcgagggcgggcctctaggcattcacgtggtgcctttcttttcctctctgtccggacggatcttgggtctattcattagaggtattgaagacaactcccgtagcaagcgcgagggtttgtttcatgagaatgagtgcatcgtgaagataaacaacgttgacctggtcgataagaccttcgctcaggcacaggacgttttcagacaggctatgaaatcccccagcgtgttgctgcatgtgttgcctcctcagaaccgggaacagtacgagaaatccgtgattggttcgctgaacattttcggcaataacgatggggtgctcaaaactaaagtgccaccccccgtgcacgggaagtcggggctcaaaacggctaacttgacaggaaccgacagtcccgagaccgatgcatcagcctcccttcaacagaataagagcccacgcgtgccccgcctcggcgggaaacccagctcaccatccctgtcgccgctaatgggattcggctccaataagaatgcgaaaaagatcaagatcgacttgaaaaagggacccgaggggctcgggtttactgtggtgacccgggactcatccatccatggcccaggtcctattttcgtgaaaaatatcctgccgaaaggagccgccattaaagacggtagactgcagtctggtgaccgcattcttgaggtgaacggaagagacgtcaccggaagaacgcaagaagagctggttgccatgttgcgctctacaaaacagggtgagactgctagcctagttattgctagacaggagggccacttccttccacgagagctcaaaggagagcctgattgctgtgctttaagcctggagacatctgaacaactgacgttcgagatccctctgaacgattcaggatccgctgggttgggggtgtctttaaaaggcaataagtctagagagactggtaccgatcttggcatcttcatcaaaagcatcatccacggaggggccgcgttcaaagatggtaggctgcggatgaacgaccagttaattgccgttaatggtgagagcctcttgggaaagtcaaaccatgaggcaatggaaacactgaggcggagcatgtccatggaaggtaacattagagggatgatccagctggtcattctacgccggccggagcgcccaatggaggaccccgctgagtgcggagcctttagcaagccttgttttgagaactgtcagaacgccgtaacaaccagcaggcggaacgacaattccatactccaccccctcggtacttgctccccacaagacaaacagaagggacttctgctgcctaatgatggctgggcggaaagcgaagtgcctccaagccctacaccacactccgccctcggtctcggactcgaagattactcgcattcctcaggagtcgatagcgccgtgtactttcccgaccagcacatcaattttcggagcgtgacaccggctcggcaaccagagagcatcaacctaaaggcttctaaaagcatggatctcgtccccgacgagtccaaggtacacagcctggctggccagaaaagcgacgggctgagcgataaaagctcccactcgggtcaaggggctctcaattgtgagagcgcacctcagggtaattccgaactggaggatatggaaaacaaagctcgaaaggttaaaaaaacaaaggagaaggagaaaaagaaagagaaaggcaaactgaaagtgaaagagaagaaacggaaagaagaaaacgaggaccctgagcggaagattaaaaagaaagggtttggcgcaatgctcagattcggcaagaaaaaggaggacaaaggagggaaggccgagcagaaaggaactcttaaacacggaggattgcgcgaggaggagctggaaaaaatgaaggaggaaagagagaggatcggagcaaaacatcaagagcttcgagaaaaacaagctcgcggactcctagattacgccacaggagccattggctctgtgtacgatatggatgatgacgagatggatcccaactatgcccgggtcaaccacttcagggagccttgtacctcagctaacgttttccgttctccgtctccacctagagctggccctttcggttacccaagagatggacaccctctctcccccgagcgcgaccatctcgaaggcctgtatgctaaggtgaacaaaccttaccatccgctcgttccagccgactctggacggcctactgggggaagtaccgaccgtatccagaagctgaggaaggaatactatcaggctagacgggaaggcttccccctttacgaggacgatgagggaagagctcggccctctgagtacgacctcctgtgggtgcccggacgtgggccagacggaaacgcacataacctcaggttcgagggcatggaacgacagtatgcaagtctgccaaggggcggccctgccgaccccgtggactatttgccggccgcccctcgggggctgtataaagagcgagaattaccatattatccaggggcccacccaatgcaccctcccaaggggagttacccaaggcctactgaattgcgggttgctgacttgagatatccccagcattacccgcccccaccagcccctcagcacaagggtccctttcgccaggatgtacccccctcgcccccacagcaccagcggatgccagcctatcaggagactggaagacccggaccacggggcggcagccctgaccagtacccctaccggactcaggacagcaggcagaagaatcccatgaccgcagcagtgtag

SEQ ID NO: 230741 - DNA, 3411 bp, Artificial Sequence
  derived and/or modified sequence
atgaaagtgaccgtgtgcttcggcaggacgggcatcgtggtgccctgcaaggagggccagctgcgcgtcggcgagctcacccagcaggcgctgcagcggtacctgaagacccgggagaagggtcctggttactgggtgaagattcatcacttagaatatacagatggaggaatcctggatccagatgatgtcttggcagatgttgttgaagataaagacaagctgattgctgtgtttgaagaacaagaaccactccacaagattgagagccccagtggaaaccctgcagatcggcagagcccagatgcttttgagacagaagtggccgcccaactggccgcatttaagccaattggtggggagattgaagtaaccccttctgctctaaaactaggcactccactgctggtgaggagaagcagtgacccagtgccaggcccacctgctgatacccagccaagcgcttcacaccctggtggccagagtctgaaactggttgttccagattccacgcagaacttggaagacagagaagttttgaatggtgtacagacagaactactaacttcgccaagaactaaggacacattgagtgatatgacaagaacagtggagatttctggggaaggaggcccattgggaatacatgtagtgcccttcttttcatctctgagtggaaggattctaggactcttcatccgaggcattgaagacaacagcaggtccaagcgggagggactatttcacgaaaatgaatgtattgtaaaaatcaacaatgtggatctcgtagacaaaacctttgctcaggctcaagatgtcttccgccaggcaatgaaatctccaagtgtgctcctccacgtgcttcctccacaaaaccgtgaacagtatgaaaagtcagtcattggctctcttaacatttttggtaataatgatggcgttttgaaaaccaaagtgccgcctcctgtccatggaaaatcgggactaaagacagcaaatctcacaggaaccgatagtcctgaaacagatgcatcagcttccctgcaacaaaacaagagtccccgagtaccaaggctgggaggaaaaccatcctctccctcactctcgcctctcatgggatttggcagcaataaaaatgcaaagaaaattaagattgacctaaagaaaggccctgaaggacttggtttcactgtggttaccagagactcttccatacatggtcccggtcccatttttgtaaaaaacattttaccaaagggagcagcaataaaagatggccgcctacaatcaggggacagaattttggaggtaaatgggagagatgtcaccggacgaacccaggaagagcttgtggccatgctcaggagcaccaagcagggggagacagcatcgctggtcattgcccgccaagaaggacattttctgccccgagagttgaaaggagaacctgactgctgtgcactctctctggagacaagcgagcagctcacctttgagatccccctgaatgattcaggttctgctggcctcggggtgagcttaaaagggaacaaatccagagaaactggaacagacttggggatttttatcaaatccatcattcatggaggcgctgcttttaaggatggtcgtctgcgaatgaatgaccagctgattgcagttaatggggaatctcttttgggaaagtccaaccacgaagctatggaaacacttaggcggtcaatgtccatggagggaaacatccgagggatgatccagttggtgattctgaggaggccagagagaccaatggaggatcctgcagagtgtggggcattttccaagccatgctttgagaactgtcaaaatgctgtaaccacctctaggcgaaatgataatagtatcctgcatccacttggcacttgcagtccacaagacaaacagaaaggtctattgctgcccaatgacggatgggccgagagtgaagttccaccttctccaacaccacattctgctctgggattgggcctcgaagattacagccacagctctggggtggattcagcagtatattttccagatcagcacatcaacttcagatctgtgacaccggccaggcagcctgaatcaattaatttgaaagcctcgaagagcatggaccttgtgccagatgaaagcaaggttcactcattggctggacaaaaatcggacggtctgtctgataagagctctcactctggccaaggagctctgaattgtgagtctgcccctcaggggaattcggagctagaggacatggaaaataaagccaggaaagtcaaaaaaacgaaagagaaggagaagaaaaaggaaaagggcaaattgaaagtcaaggagaaaaagcgcaaagaggagaatgaagatccagaaaggaaaataaagaagaagggcttcggcgccatgctgagatttggaaagaagaaagaggataagggtggaaaggctgagcagaaaggtactctgaaacatggtggcctgagagaagaagagctggagaaaatgaaagaagagcgtgaaaggattggagcaaaacatcaggagctaagggaaaagcaggcaagaggtcttcttgattatgctactggtgcaattggatcagtgtatgatatggatgatgatgaaatggaccccaattatgccagagtgaaccactttcgggaaccatgcacatcagcaaatgtctttagatctccatctccccctcgagctggaccatttggttaccctcgggatggccatccactgtctccagaaagagaccacttagagggtctctatgccaaggtcaacaagccataccatccactggttccagctgacagtggccgtcctacgggtggaagcactgaccgtatccagaagttgcggaaagagtattatcaggctcggagggaaggtttccctttatatgaagacgacgaaggaagagcaaggccatctgagtatgacctactctgggtgcctggaaggggtccagatgggaatgcacacaacctccgctttgaagggatggagaggcagtacgcatccttacccaggggaggacccgcagatcctgtagactatctgccagcagcacctcgggggctctacaaggaaagggagcttccctattatccaggggctcatcctatgcaccctcccaaagggagctatccccgccccacagagctcagggtggcagatctccggtatcctcagcactacccacccccgccagctccccagcacaaaggaccctttcgacaagacgttccgccttcccctccccagcaccaaagaatgccagcctatcaggaaacaggcagaccagggccccgtgggggcagcccagaccagtacccttaccgaacccaggattcccggcagaagaaccccatgactgcagccgtatag

SEQ ID NO: 230742 - DNA, 3411 bp, Artificial Sequence
  derived and/or modified sequence
atgaaggtcactgtgtgctttggtagaaccggaattgttgttccctgcaaagaaggccagctacgggtgggcgagttgacgcaacaggccttgcagagatacctcaagacccgcgaaaaaggccctggatactgggttaaaatccaccacctggagtacaccgacggcggtattctggacccagacgacgttctggcagatgtagtggaagacaaggataagttgatcgcagtgttcgaagagcaggaaccgctgcataaaattgagagtccaagcggtaatcctgccgaccggcaatcaccagacgcctttgagactgaggtggccgctcaactcgccgcatttaagccaatagggggagagatcgaggtcactccgagcgccctcaagctgggaaccccccttctagttcggagatcctcggaccctgtgcccggaccaccagctgacacacaaccttccgcaagtcacccaggcggacagtcgctgaagcttgttgtccccgatagcacccagaacttggaggacagagaggtgctaaacggggtacagacagagctgctgacctcgccccgtaccaaagacacattgtcagacatgacacgcaccgtggaaatctcaggtgaaggtggccctctggggatccatgttgtgccattcttcagcagcctgtcaggtaggatcttgggcctttttatccgcggtatcgaagacaactctagaagtaagagagaggggttatttcacgaaaatgagtgtattgtgaagattaataatgtggacctggtcgacaagacatttgcacaggcccaggacgtgtttcgtcaggccatgaaatcaccttcggttctcctgcacgtgctacctccacagaaccgggagcaatacgaaaaatccgtgataggttcactgaatatattcggtaataacgatggagtgttgaagactaaggtaccgcctcctgtgcacgggaaaagtggcctcaaaactgcgaaccttaccggaacagattcaccagaaacagatgcatccgccagtttacagcagaataagagtcccagggtacctaggctaggcggaaaaccaagcagtccctccctctccccattgatgggattcgggagcaacaaaaacgctaagaaaatcaagatcgatctcaagaaagggcctgaaggactcggcttcaccgttgtcacccgggactctagcattcacggtccaggccctatttttgtcaagaacatactgccaaagggtgccgctattaaagatgggcgacttcaatccggcgatagaatattagaagttaatgggagggacgttacgggacgtacccaggaggagctggtagccatgttacgctcaactaagcaaggcgaaactgcaagcctggtgatcgccagacaagaaggccactttctgcctcgcgaactgaaaggagaaccggactgctgtgcccttagcctggaaacctcagaacagctcacatttgaaattccacttaacgacagcggaagtgccggactgggtgtaagtctgaagggcaataagagcagagagaccgggaccgatcttggcatctttatcaagagtatcattcacggcggagcagcttttaaggacgggagattgagaatgaacgatcagctcatcgccgttaacggagaaagtcttctcggcaaatctaaccatgaggcaatggagaccctccggaggtcgatgtcgatggagggtaatattaggggcatgatccagcttgtgatactgagacgaccagagagacctatggaagacccagcagagtgtggcgctttctccaaaccctgttttgaaaattgtcagaacgccgtgactacctctcgacggaacgacaactcaatccttcatcctttaggtacatgttcccctcaagataaacagaagggcctccttcttccgaatgatggctgggcagagtccgaggtcccgccttcacctacaccccatagtgctctggggctgggcctggaggattattcacactccagcggggtggactcagccgtctactttcccgaccagcacattaattttcgcagcgtcactccagctcggcagccagagtccatcaacctgaaagctagcaagtccatggacctcgtcccggatgagagcaaggtgcattcgctcgctggccagaaatctgacggattgtcagacaaaagctcccactccggtcagggtgctttgaattgcgagtctgcccctcagggcaactccgagctggaagatatggaaaataaggcaagaaaggtcaaaaaaacaaaagagaaagaaaaaaagaaggaaaaagggaagctcaaagttaaggagaaaaagcggaaggaggagaacgaagacccggagagaaaaatcaaaaaaaaaggctttggggctatgctcagatttggtaaaaaaaaggaagacaaagggggtaaggctgaacagaagggaacgctgaagcacggaggcctacgtgaggaagaactagagaaaatgaaggaagagcgggagcgtataggagcgaagcaccaggaactgagagagaagcaagcccgtggtttactggactacgcgactggtgcgatcggaagcgtgtacgacatggatgatgatgaaatggaccctaattacgcaagagtaaaccatttccgcgagccttgcacgtcagccaacgtgtttagaagcccttcccctccacgtgccggaccgtttggctatcctagggacgggcaccctctctcaccagaacgcgatcatcttgagggcctatatgcaaaggtaaacaaaccgtatcaccccctggtgcctgccgatagtgggaggcccacagggggaagcaccgacaggatccagaaactccggaaagaatattatcaggctagacgcgaggggtttcctttatatgaagacgacgagggacgggctcggccatccgaatatgacctgttgtgggtgccgggtcgaggtccagatggaaacgcccacaatctgcggttcgagggaatggaacggcagtacgccagtttacccaggggaggaccagcggaccccgtagactatctgcccgctgcaccacgcggactttacaaagagcgagaactgccatattacccaggcgcacatcctatgcaccctccaaagggcagctatccaagacctacggagctgagagtggccgatctgcgttacccacaacattacccacctccacccgctccgcagcacaaaggccctttccgacaggatgttccaccgtcaccgcctcaacatcagcgcatgcccgcatatcaggagacgggaaggcctggccctcgtggaggaagcccggaccaatacccctaccgcacgcaggactccaggcagaagaatccaatgactgccgctgtctag

SEQ ID NO: 230743 - protein, 404 aa, Artificial Sequence
  derived and/or modified sequence
MSRRSSRLQAKQQPQPSQTESPQEAQIIQAKKRKTTQDVKKRREEVTKKHQYEIRNCWPPVLSGGISPCIIIETPHKEIGTSDFSRFTNYRFKNLFINPSPLPDLSWGCSKEVWLNMLKKESRYVHDKHFEVLHSDLEPQMRSILLDWLLEVCEVYTLHRETFYLAQDFFDRFMLTQKDINKNMLQLIGITSLFIASKLEEIYAPKLQEFAYVTDGACSEEDILRMELIILKALKWELCPVTIISWLNLFLQVDALKDAPKVLLPQYSQETFIQIAQLLDLCILAIDSLEFQYRILTAAALCHFTSIEVVKKASGLEWDSISECVDWMVPFVNVVKSTSPVKLKTFKKIPMEDRHNIQTHTNYLAMLEEVNYINTFRKGGQLSPVCNGGIMTPPKSTEKPPGKH

SEQ ID NO: 230744 - protein, 374 aa, Artificial Sequence
  derived and/or modified sequence
MSRRSSRLQAKQQPQPSQTESPQEAQIIQAKKRKTTQDVKKRREEVTKKHQYEIRNCWPPVLSGGISPCIIIETPHKEIGTSDFSRFTNYRFKNLFINPSPLPDLSWGCSKEVWLNMLKKESRYVHDKHFEVLHSDLEPQMRSILLDWLLEVCEVYTLHRETFYLAQDFFDRFMLTQKDINKNMLQLIGITSLFIASKLEEIYAPKLQEFAYVTDGACSEEDILRMELIILKALKWELCPVTIISWLNLFLQVDALKDAPKVLLPQYSQETFIQIAQLLDLCILAIDSLEFQYRILTAAALCHFTSIEVVKKASGLEWDSISECVDWMVPFVNVVKSTSPVKLKTFKKIPMEDRHNIQTHTNYLAMLCMISSHV

SEQ ID NO: 230745 - protein, 296 aa, Artificial Sequence
  derived and/or modified sequence
MSKEVWLNMLKKESRYVHDKHFEVLHSDLEPQMRSILLDWLLEVCEVYTLHRETFYLAQDFFDRFMLTQKDINKNMLQLIGITSLFIASKLEEIYAPKLQEFAYVTDGACSEEDILRMELIILKALKWELCPVTIISWLNLFLQVDALKDAPKVLLPQYSQETFIQIAQLLDLCILAIDSLEFQYRILTAAALCHFTSIEVVKKASGLEWDSISECVDWMVPFVNVVKSTSPVKLKTFKKIPMEDRHNIQTHTNYLAMLEEVNYINTFRKGGQLSPVCNGGIMTPPKSTEKPPGKH

SEQ ID NO: 230746 - DNA, 1215 bp, Artificial Sequence
  derived and/or modified sequence
atgagcagaagaagcagcagactgcaggccaagcagcagccccagcccagccagaccgagagcccccaggaggcccagatcatccaggccaagaagagaaagaccacccaggacgtgaagaagagaagagaggaggtgaccaagaagcaccagtacgagatcagaaactgctggccccccgtgctgagcggcggcatcagcccctgcatcatcatcgagaccccccacaaggagatcggcaccagcgacttcagcagattcaccaactacagattcaagaacctgttcatcaaccccagccccctgcccgacctgagctggggctgcagcaaggaggtgtggctgaacatgctgaagaaggagagcagatacgtgcacgacaagcacttcgaggtgctgcacagcgacctggagccccagatgagaagcatcctgctggactggctgctggaggtgtgcgaggtgtacaccctgcacagagagaccttctacctggcccaggacttcttcgacagattcatgctgacccagaaggacatcaacaagaacatgctgcagctgatcggcatcaccagcctgttcatcgccagcaagctggaggagatctacgcccccaagctgcaggagttcgcctacgtgaccgacggcgcctgcagcgaggaggacatcctgagaatggagctgatcatcctgaaggccctgaagtgggagctgtgccccgtgaccatcatcagctggctgaacctgttcctgcaggtggacgccctgaaggacgcccccaaggtgctgctgccccagtacagccaggagaccttcatccagatcgcccagctgctggacctgtgcatcctggccatcgacagcctggagttccagtacagaatcctgaccgccgccgccctgtgccacttcaccagcatcgaggtggtgaagaaggccagcggcctggagtgggacagcatcagcgagtgcgtggactggatggtgcccttcgtgaacgtggtgaagagcaccagccccgtgaagctgaagaccttcaagaagatccccatggaggacagacacaacatccagacccacaccaactacctggccatgctggaggaggtgaactacatcaacaccttcagaaagggcggccagctgagccccgtgtgcaacggcggcatcatgaccccccccaagagcaccgagaagccccccggcaagcactag

SEQ ID NO: 230747 - DNA, 1125 bp, Artificial Sequence
  derived and/or modified sequence
atgagcagaagaagcagcagactgcaggccaagcagcagccccagcccagccagaccgagagcccccaggaggcccagatcatccaggccaagaagagaaagaccacccaggacgtgaagaagagaagagaggaggtgaccaagaagcaccagtacgagatcagaaactgctggccccccgtgctgagcggcggcatcagcccctgcatcatcatcgagaccccccacaaggagatcggcaccagcgacttcagcagattcaccaactacagattcaagaacctgttcatcaaccccagccccctgcccgacctgagctggggctgcagcaaggaggtgtggctgaacatgctgaagaaggagagcagatacgtgcacgacaagcacttcgaggtgctgcacagcgacctggagccccagatgagaagcatcctgctggactggctgctggaggtgtgcgaggtgtacaccctgcacagagagaccttctacctggcccaggacttcttcgacagattcatgctgacccagaaggacatcaacaagaacatgctgcagctgatcggcatcaccagcctgttcatcgccagcaagctggaggagatctacgcccccaagctgcaggagttcgcctacgtgaccgacggcgcctgcagcgaggaggacatcctgagaatggagctgatcatcctgaaggccctgaagtgggagctgtgccccgtgaccatcatcagctggctgaacctgttcctgcaggtggacgccctgaaggacgcccccaaggtgctgctgccccagtacagccaggagaccttcatccagatcgcccagctgctggacctgtgcatcctggccatcgacagcctggagttccagtacagaatcctgaccgccgccgccctgtgccacttcaccagcatcgaggtggtgaagaaggccagcggcctggagtgggacagcatcagcgagtgcgtggactggatggtgcccttcgtgaacgtggtgaagagcaccagccccgtgaagctgaagaccttcaagaagatccccatggaggacagacacaacatccagacccacaccaactacctggccatgctgtgcatgatcagcagccacgtgtag

SEQ ID NO: 230748 - DNA, 1215 bp, Artificial Sequence
  derived and/or modified sequence
atgagcaggagaagtagccgcttacaggctaagcagcagcctcagccctcccaaaccgaatctccgcaggaggcccagataattcaggcaaaaaagaggaagaccacgcaggacgtgaagaagcggcgggaggaagtgaccaaaaaacaccagtacgagatccgtaattgttggcctcctgttctctcgggaggcatctccccctgtattattatagaaacccctcacaaggaaatcggcacaagcgatttctctcgttttaccaattataggtttaagaacctcttcattaatcctagccctttacctgatctgtcgtgggggtgtagcaaggaggtgtggctcaacatgctgaagaaggaatcaaggtacgtgcatgacaaacacttcgaagtgctccactccgacttggagccccaaatgcgctcaatacttcttgattggcttcttgaggtgtgtgaagtttacacgttgcacagagaaactttttacctcgcgcaggacttttttgatcgcttcatgcttacacagaaagacatcaataagaacatgctgcagctgattggtatcacatcactgttcatcgccagtaaactggaggaaatctatgctccaaaactacaagaattcgcttacgtaaccgatggagcatgctccgaggaagacattcttaggatggagctgatcattctgaaggccctgaagtgggaactttgtccagtgacaatcatcagctggctgaacttgttcctgcaagtggatgctctgaaggatgccccaaaggtgctgctgccacagtactcccaggaaacgtttattcagattgctcaactattggatctttgcattctggccatagactctctcgagttccaataccgtatactcacagccgctgccctctgccatttcacaagcattgaggttgtgaaaaaggcgtcggggcttgaatgggatagtatctccgaatgtgtggactggatggtgccattcgttaatgtcgtgaagtcaaccagtccagtcaaattgaagaccttcaaaaagatccccatggaagaccggcacaacatacagacgcatacaaactacctggccatgctggaagaagtgaattacattaacaccttccgaaagggaggacagctctccccggtatgtaacggcggaattatgacaccccccaaatcgaccgagaaacctccaggtaagcattag

SEQ ID NO: 230749 - DNA, 1125 bp, Artificial Sequence
  derived and/or modified sequence
atgagcagaagaagctcccgcttgcaggcaaagcagcagccccaaccgtcacaaaccgagtctccacaggaagcccagatcatccaggccaagaagagaaaaaccacgcaagatgtgaaaaagcggagggaagaggtcacaaaaaagcatcagtatgaaatcaggaactgctggccaccagttctgagcgggggcatttcaccctgcattattatcgaaaccccccacaaagagataggcacatctgacttcagccgatttaccaactaccgatttaagaacctctttatcaacccttcgcccctccccgacctatcctggggctgctctaaagaggtctggttaaacatgctgaagaaagagtctcgttatgtgcatgataaacacttcgaagtgctccactctgatttagagccacagatgagatcaatactgcttgactggttgcttgaggtgtgtgaggtgtatacattgcaccgggagacgttttacctcgctcaggacttttttgaccggtttatgcttactcagaaggacatcaataaaaacatgctccagttgatcggcattacatccctgttcatcgcctcgaaacttgaagaaatatacgctcctaagctgcaagaatttgcttatgtgaccgatggagcgtgtagcgaagaagacatactcagaatggaactgattatcctgaaagcattgaagtgggagctatgcccggtaacaataataagttggctaaatctgtttctccaggttgacgcgcttaaagacgcgccgaaagtcttactaccccagtatagccaggagaccttcatccagattgcccagctcctcgacctgtgcatcctggccatcgactcccttgagtttcaataccggatactcaccgcagccgccctttgccattttactagcattgaggtggtcaaaaaggcctctggactcgaatgggatagcatctctgagtgtgttgactggatggtgccttttgtcaatgtggtgaaatctactagcccggtcaagttgaagacatttaaaaaaattccaatggaagatagacacaacattcagacccacacaaattatctcgctatgctctgtatgatttcgagccatgtttag

SEQ ID NO: 230750 - DNA, 1215 bp, Artificial Sequence
  derived and/or modified sequence
atgtctcgcagaagtagccgcctgcaggcaaaacaacagccgcagcctagccagacagagagcccccaggaggcccagatcatccaggctaaaaagcggaagactacgcaggacgtaaaaaaaagaagggaagaagtcacaaagaaacatcagtatgagatccggaattgttggcctcctgtgctgtctgggggaatctccccttgtataattattgaaaccccccacaaggaaattggcaccagtgacttcagtaggtttacaaattacagatttaagaatctgttcataaacccgagccctcttcccgatctgagttgggggtgttccaaggaagtgtggcttaacatgctgaagaaggagagtcgctacgtccacgacaagcattttgaggtcctccacagcgaccttgaacctcagatgcgcagcatcctgttggattggctgctggaggtctgcgaagtgtacacccttcaccgcgagacgttttaccttgctcaggatttttttgatagatttatgttaactcagaaagatattaataaaaacatgcttcagctgataggaattacaagccttttcatcgcttccaaactcgaagagatttatgctcctaaactgcaggaattcgcctatgtcacagatggcgcatgcagcgaggaggatattcttcggatggaactcattatcctgaaagcactgaagtgggagctgtgcccagtgactatcattagttggctcaatctgttcctgcaggtcgacgccctgaaagacgctccaaaggtattgcttcctcagtacagccaggagacattcatacagatcgcccagcttctggatctatgtattctcgccatcgacagccttgagtttcagtaccggatcctcaccgcagctgccctttgccattttacttctatcgaagtcgttaaaaaagccagcgggctggaatgggactccattagtgagtgtgtcgattggatggttccatttgttaatgttgtcaagagcacaagcccagtgaagttaaaaacattcaagaaaatccccatggaagaccgccataatattcagactcacactaactatctggcaatgctcgaggaggttaactatatcaacacttttaggaagggaggacagttatcgccggtgtgcaacggcgggataatgacaccacccaagagtaccgaaaaacccccaggaaagcactag

SEQ ID NO: 230751 - DNA, 1215 bp, Artificial Sequence
  derived and/or modified sequence
atgagcagaagaagcagccggctgcaggccaagcagcagccccagcccagccagacagagagcccccaggaggcccagatcatccaggccaagaagaggaagaccacccaggatgtgaagaagaggcgggaggaggtgaccaagaagcaccagtatgagatccggaactgctggccccctgtgctgagcggcggcatcagcccctgcatcatcatcgagaccccccacaaggagatcggcaccagtgacttcagccgcttcaccaactaccgcttcaagaacctcttcatcaaccccagccccctgcctgacctgtcctggggctgcagcaaggaggtgtggctgaacatgctgaagaaggagagccgctacgtgcatgacaagcactttgaggtgctgcacagcgacctggagccccagatgaggagcatcctgctggactggctgctggaggtgtgtgaggtgtacaccctgcaccgggagaccttctacctggcccaggacttctttgaccgcttcatgctgacccagaaggacatcaacaagaacatgctgcagctgattggcatcaccagcctcttcatcgccagcaagctggaggagatctatgcccccaagctgcaggagtttgcctacgtgacagatggagcctgcagcgaggaggacatcctgaggatggagctgatcatcctgaaggccctgaagtgggagctgtgccctgtgaccatcatctcctggctgaacctcttcctgcaggtggatgccctgaaggatgcccccaaggtgctgctgccccagtacagccaggagaccttcatccagatcgcccagctgctggacctgtgcatcctggccatcgacagcctggagttccagtaccgcatcctgacagctgctgccctgtgccacttcaccagcattgaggtggtgaagaaggccagcggcctggagtgggacagcatcagtgaatgtgtggactggatggtgccctttgtgaatgtggtgaagagcaccagccctgtgaagctgaagaccttcaagaagatccccatggaggacagacacaacatccagacccacaccaactacctggccatgctggaggaggtgaactacatcaacaccttcaggaagggcggccagctgagccctgtgtgcaatggaggcatcatgaccccacccaagagcacagagaagcccccaggcaagcactag

SEQ ID NO: 230752 - DNA, 1125 bp, Artificial Sequence
  derived and/or modified sequence
atgagcagaagaagcagccggctgcaggccaagcagcagccccagcccagccagacagagagcccccaggaggcccagatcatccaggccaagaagaggaagaccacccaggatgtgaagaagaggcgggaggaggtgaccaagaagcaccagtatgagatccggaactgctggccccctgtgctgagcggcggcatcagcccctgcatcatcatcgagaccccccacaaggagatcggcaccagtgacttcagccgcttcaccaactaccgcttcaagaacctcttcatcaaccccagccccctgcctgacctgtcctggggctgcagcaaggaggtgtggctgaacatgctgaagaaggagagccgctacgtgcatgacaagcactttgaggtgctgcacagcgacctggagccccagatgaggagcatcctgctggactggctgctggaggtgtgtgaggtgtacaccctgcaccgggagaccttctacctggcccaggacttctttgaccgcttcatgctgacccagaaggacatcaacaagaacatgctgcagctgattggcatcaccagcctcttcatcgccagcaagctggaggagatctatgcccccaagctgcaggagtttgcctacgtgacagatggagcctgcagcgaggaggacatcctgaggatggagctgatcatcctgaaggccctgaagtgggagctgtgccctgtgaccatcatctcctggctgaacctcttcctgcaggtggatgccctgaaggatgcccccaaggtgctgctgccccagtacagccaggagaccttcatccagatcgcccagctgctggacctgtgcatcctggccatcgacagcctggagttccagtaccgcatcctgacagctgctgccctgtgccacttcaccagcattgaggtggtgaagaaggccagcggcctggagtgggacagcatcagtgaatgtgtggactggatggtgccctttgtgaatgtggtgaagagcaccagccctgtgaagctgaagaccttcaagaagatccccatggaggacagacacaacatccagacccacaccaactacctggccatgctgtgcatgatcagcagccacgtgtag

SEQ ID NO: 230753 - DNA, 1215 bp, Artificial Sequence
  derived and/or modified sequence
atgagccggcggagcagccggctgcaggccaagcagcagccccagccatcccagacagagagtcctcaggaggctcagataatacaggccaagaaaaggaagacgactcaggacgttaagaaaaggcgagaggaggtgacaaagaaacatcaatatgagatccgaaattgctggcctccagttttaagtggcgggataagtccctgtatcattattgaaacaccacataaagaaatcgggactagcgactttagccgctttactaactatcgcttcaagaacctttttattaatccctccccactccccgatctctcttgggggtgcagcaaagaggtgtggttgaacatgcttaaaaaagagtcccgatacgtgcacgataaacacttcgaggtccttcattctgatctcgaaccacagatgaggtctatcctcctcgattggttactcgaagtgtgcgaagtgtacacattgcaccgggaaacattttacctggctcaggacttcttcgatcgttttatgttaacacagaaagatatcaataaaaacatgctccagctgatcggcataacttcgctgttcattgccagtaaactagaagaaatttatgcaccgaaattgcaggaattcgcatatgtgactgatggagcctgctcagaagaagatatacttcgcatggagttgattatcctgaaagctcttaagtgggagctgtgtcccgtcacaattatttcgtggctgaacttattcttacaggttgatgctctgaaggacgctcctaaggttttacttcctcagtactcgcaagaaacattcattcagatcgcccagctcttggacctgtgtattttggccatcgattctctggagtttcaataccgaatattgacagccgccgcactctgtcatttcacatctattgaagtggtgaagaaggcctctggcctggagtgggactcaataagcgaatgtgtcgattggatggtgccgtttgtcaacgtcgttaaaagcacatcaccggttaagctcaagacatttaagaaaatcccaatggaggacagacacaatatacagactcacacaaattacctcgccatgctggaggaggtgaactatatcaacacgttcagaaagggggggcagctgtcccccgtatgtaatgggggtatcatgacacctccaaaaagcacagagaagcctcccggaaagcactag

SEQ ID NO: 230754 - DNA, 1125 bp, Artificial Sequence
  derived and/or modified sequence
atgagccggcggagcagccggctgcaggccaagcagcagccccagccatctcagacagagagcccccaggaggcccaaattattcaggctaagaagcgaaagacaacccaagacgtaaagaaacggcgcgaggaagtcacaaaaaagcaccagtatgaaattcgaaattgttggcctcctgtcctttcaggaggcatcagcccatgtatcattatagaaacccctcataaagagattggtacaagtgattttagcaggtttaccaactatcgctttaagaacctcttcatcaatccgtccccgctgcctgacttaagctggggctgctcgaaagaggtctggttaaatatgcttaaaaaggagtctcgctacgtgcatgacaagcatttcgaggtcttgcatagtgatctcgaaccccagatgcgctctattctgttagactggttgctcgaggtgtgcgaagtgtataccttgcatcgagaaacgttctacctagctcaagatttttttgaccggttcatgctcacacagaaggatattaacaagaatatgttacagttgattggaattaccagcctgttcattgctagcaaactggaggagatatacgcacctaagctgcaagaattcgcgtacgtgactgacggcgcatgtagcgaagaggacatcctgaggatggagctgataatcttaaaggcccttaaatgggaactgtgcccagtgactattataagctggctgaatctgtttctccaggtggacgccctcaaggatgcaccaaaggttttactgccccaatacagccaggagactttcatccaaatcgcccaactgttggacctatgtatattggccatcgatagcctggaattccaataccgcatcctgacggccgctgccttgtgccactttaccagcattgaagtagtcaaaaaggcatcaggattagagtgggactctatctccgaatgcgtggactggatggtaccgtttgtgaatgtcgtcaagagcaccagtccagtgaagctgaagacttttaaaaagatacccatggaagaccgacacaatatccagacacacaccaactaccttgcgatgctgtgtatgatctcttcccatgtgtag

SEQ ID NO: 230755 - DNA, 1215 bp, Artificial Sequence
  derived and/or modified sequence
atgagccggcggagcagccggctgcaggccaagcagcagccccagcctagccagactgagtctccccaggaggcacaaatcatccaggcaaagaaacgaaagaccacacaggatgtaaagaagcgcagagaggaggtaaccaagaaacaccagtacgagattcgtaactgctggcctcccgttctgtcaggaggtatctccccctgtatcatcattgagaccccacacaaggaaatcggaacctctgacttttctcggtttacgaattatagattcaagaatctgttcatcaacccttccccactgcctgacctcagttggggctgttccaaggaggtatggctgaatatgctcaagaaagaatcaagatacgttcacgataaacacttcgaggtcctgcactcagatcttgaacctcagatgcggtccatcctgctggactggttgttggaggtgtgcgaggtgtacacgctgcaccgcgaaacattctacttggcccaagacttcttcgaccgctttatgctgactcagaaggatatcaataagaacatgctgcagcttataggaattacaagcctgtttatagcctccaagctggaggaaatatatgcaccaaagttgcaggaatttgcgtatgttactgacggcgcttgctctgaggaggatatactccgcatggagttaatcatcctcaaggccctgaaatgggaactctgccctgtcacgattatcagttggcttaacctctttctgcaggtggatgctcttaaagatgctccgaaagtgctccttccccaatattcccaggagactttcattcagatcgcccagttactggatctctgtatcttagcaatcgacagtctggaatttcagtataggatcctcaccgccgctgcactgtgtcatttcacttccatcgaggtcgtgaagaaggcctctggtttggaatgggatagtatatctgaatgcgtggactggatggtcccatttgtaaatgttgttaaatccacaagccccgtgaaactgaaaactttcaagaagattccaatggaggaccggcacaatattcagacgcacactaattacctcgcgatgcttgaggaagtgaattatatcaacactttccgcaagggggggcagctgagccccgtgtgcaacggggggataatgacgcctcccaagagtaccgaaaagccacccggcaaacactag

SEQ ID NO: 230756 - DNA, 1215 bp, Artificial Sequence
  derived and/or modified sequence
atgtctagaaggtcctcccgtttgcaagccaagcagcagcctcagccttctcaaaccgaaagccctcaggaagcccaaattatccaggccaagaaaaggaagacaacgcaggatgtaaagaagcgtcgagaagaagtaactaagaaacatcagtacgagataaggaattgctggccccctgtcctttctggcggaatcagcccatgtatcattattgagacgcctcacaaggagatcggaacctccgattttagtcgttttacaaactatcggttcaaaaatctgtttattaatccttccccattgcccgatttgagttggggctgctctaaagaggtgtggctcaacatgctaaagaaggagtcaagatacgtgcacgacaaacattttgaggtgctgcattccgacctcgaaccacagatgcgatccatcttattagattggctcctggaagtgtgtgaagtatacacactacacagagagaccttctacttagcccaggatttctttgaccgatttatgttgactcaaaaagatattaacaaaaacatgttgcagctgatagggattacttccctgttcattgcctctaaactagaagagatctacgcacccaagctgcaggagttcgcctacgtaactgacggagcctgcagtgaagaagatattcttcggatggagcttatcattttgaaggcactgaaatgggaactgtgtccagtgaccatcatctcctggctcaatctgtttctccaggttgatgctctgaaggacgcaccaaaagtcttactgccacaatattctcaagagacatttatccagatcgcccagctcctggacttatgcatactggccatcgacagcttggagtttcagtacaggattctcacagccgcagcgctgtgccacttcacgtctattgaagtggttaagaaggcatcaggtttggaatgggactccatttctgagtgcgtggactggatggtgccctttgtaaatgtagtcaaatccacttcacccgtcaaactgaaaacgttcaaaaagatcccgatggaggacagacataatattcagactcatactaattatctcgccatgttggaggaggtgaattacatcaacacattcaggaagggcggtcagttgtcgcctgtttgtaacggtgggattatgactcctcccaaaagtaccgagaaaccccctgggaaacattag

SEQ ID NO: 230757 - DNA, 1125 bp, Artificial Sequence
  derived and/or modified sequence
atgtcgcggcgttctagtcgccttcaggctaaacagcagccccagccctctcaaacagagtctcctcaggaggcacagataattcaggcaaagaaaagaaaaactacacaagatgtaaagaagcgccgtgaagaagttacgaagaaacaccagtacgagatccgcaattgctggcctcccgttctcagcggtggaattagcccctgtataatcattgagactccccacaaagagattgggacatctgacttctcgaggttcacaaactatcgcttcaaaaacctgtttattaacccgagtcccctccccgacctgtcatggggatgctctaaggaggtttggctgaatatgctcaaaaaagaaagcagatacgtgcatgacaagcatttcgaggtgctccacagcgacctggaaccccagatgaggagtatcctcctggactggttgcttgaggtgtgcgaagtgtacacactgcatagagaaaccttttacttagcccaggatttcttcgatcggttcatgctgacccagaaggatataaataaaaatatgctgcaactcattggcatcacaagtctcttcatagcatcgaaactggaggagatctacgcccctaaactgcaggagttcgcttacgttaccgatggggcttgtagtgaagaggacattctgcgcatggagctgatcattctcaaggctcttaagtgggagctgtgccccgttacgattatcagttggctcaatctgtttctccaagtggacgcactcaaggatgcgccaaaggtcttactcccacagtacagtcaggaaactttcatccaaatcgcccagctcctcgatctttgcattctggccatcgactctttagaatttcagtaccgcattctgaccgcagcagcactgtgccatttcacaagcatcgaggtcgtaaaaaaggcctccggcttggaatgggacagcatatctgaatgcgttgactggatggtcccttttgtaaacgttgtaaaaagtacctctccagtgaagctcaaaacatttaaaaagatcccaatggaagaccggcacaacattcagacccacacaaactacttggctatgttgtgcatgatttcctctcacgtttag

SEQ ID NO: 230758 - DNA, 1215 bp, Artificial Sequence
  derived and/or modified sequence
atgagccgcaggtcctcccggctgcaggccaagcagcagccccagccaagccagaccgagtctcctcaggaggcgcaaataatccaggccaagaaacggaaaaccacacaagatgtgaaaaagcgaagagaggaggtcacaaaaaagcaccaatacgaaattagaaactgttggccccctgtattgtcaggcggaatttctccttgcatcatcattgaaactccccacaaggagataggcacttctgacttctcccgtttcacaaactataggtttaagaacctgtttattaatccttcccctctgcctgatctgtcctgggggtgttcaaaggaagtgtggttgaatatgctaaagaaagagtctagatacgtccatgacaaacatttcgaagttctgcatagtgacttagagccgcagatgcggagcattcttctggattggttactggaggtctgtgaggtctacacattgcaccgggagactttttatttggcccaagattttttcgatcgattcatgctaacccaaaaggatatcaataaaaatatgttgcagcttatcgggatcacaagtctcttcattgcctcaaagctggaagagatttacgctcctaagcttcaggagttcgcttatgtcaccgacggtgcctgtagcgaagaagacatcctcagaatggagctaatcatcctgaaggccctgaagtgggagctgtgcccagttaccataatctcttggttaaatttgtttcttcaggtggacgctctgaaggatgccccaaaagttctcttaccccagtactcccaggagacattcattcagattgctcagctactggacctctgtatcctcgcaattgattcactcgaatttcagtatcggattcttaccgccgctgcgttatgtcactttactagtatcgaggtggtcaagaaagcctctggcttggagtgggactcaatttccgaatgtgtagattggatggtccctttcgtgaatgttgtgaagagcactagcccagtgaagctgaagactttcaagaagatacctatggaggacagacataatattcaaacacacacaaattaccttgccatgttagaggaggtgaactatatcaataccttcagaaaaggcggacaactcagtccagtctgtaatgggggaatcatgaccccccctaagagcacggaaaagccgccagggaagcactag

SEQ ID NO: 230759 - protein, 2044 aa, Artificial Sequence
  derived and/or modified sequence
MCPVDFHGIFQLDERRRDAVIALGIFLIESDLQHKDCVVPYLLRLLKGLPKVYWVEESTARKGRGALPVAESFSFCLVTLLSDVAYRDPSLRDEILEVLLQVLHVLLGMCQALEIQDKEYLCKYAIPCLIGISRAFGRYSNMEESLLSKLFPKIPPHSLRVLEELEGVRRRSFNDFRSILPSNLLTVCQEGTLKRKTSSVSSISQVSPERGMPPPSSPGGSAFHYFEASCLPDGTALEPEYYFSTISSSFSVSPLFNGVTYKEFNIPLEMLRELLNLVKKIVEEAVLKSLDAIVASVMEANPSADLYYTSFSDPLYLTMFKMLRDTLYYMKDLPTSFVKEIHDFVLEQFNTSQGELQKILHDADRIHNELSPLKLRCQANAACVDLMVWAVKDEQGAENLCIKLSEKLQSKTSSKVIIAHLPLLICCLQGLGRLCERFPVVVHSVTPSLRDFLVIPSPVLVKLYKYHSQYHTVAGNDIKISVTNEHSESTLNVMSGKKSQPSMYEQLRDIAIDNICRCLKAGLTVDPVIVEAFLASLSNRLYISQESDKDAHLIPDHTIRALGHIAVALRDTPKVMEPILQILQQKFCQPPSPLDVLIIDQLGCLVITGNQYIYQEVWNLFQQISVKASSVVYSATKDYKDHGYRHCSLAVINALANIAANIQDEHLVDELLMNLLELFVQLGLEGKRASERASEKGPALKASSSAGNLGVLIPVIAVLTRRLPPIKEAKPRLQKLFRDFWLYSVLMGFAVEGSGLWPEEWYEGVCEIATKSPLLTFPSKEPLRSVLQYNSAMKNDTVTPAELSELRSTIINLLDPPPEVSALINKLDFAMSTYLLSVYRLEYMRVLRSTDPDRFQVMFCYFEDKAIQKDKSGMMQCVIAVADKVFDAFLNMMADKAKTKENEEELERHAQFLLVNFNHIHKRIRRVADKYLSGLVDKFPHLLWSGTVLKTMLDILQTLSLSLSADIHKDQPYYDIPDAPYRITVPDTYEARESIVKDFAARCGMILQEAMKWAPTVTKSHLQEYLNKHQNWVSGLSQHTGLAMATESILHFAGYNKQNTTLGATQLSERPACVKKDYSNFMASLNLRNRYAGEVYGMIRFSGTTGQMSDLNKMMVQDLHSALDRSHPQHYTQAMFKLTAMLISSKDCDPQLLHHLCWGPLRMFNEHGMETALACWEWLLAGKDGVEVPFMREMAGAWHMTVEQKFGLFSAEIKEADPLAASEASQPKPCPPEVTPHYIWIDFLVQRFEIAKYCSSDQVEIFSSLLQRSMSLNIGGAKGSMNRHVAAIGPRFKLLTLGLSLLHADVVPNATIRNVLREKIYSTAFDYFSCPPKFPTQGEKRLREDISIMIKFWTAMFSDKKYLTASQLVPPDNQDTRSNLDITVGSRQQATQGWINTYPLSSGMSTISKKSGMSKKTNRGSQLHKYYMKRRTLLLSLLATEIERLITWYNPLSAPELELDQAGENSVANWRSKYISLSEKQWKDNVNLAWSISPYLAVQLPARFKNTEAIGNEVTRLVRLDPGAVSDVPEAIKFLVTWHTIDADAPELSHVLCWAPTDPPTGLSYFSSMYPPHPLTAQYGVKVLRSFPPDAILFYIPQIVQALRYDKMGYVREYILWAASKSQLLAHQFIWNMKTNIYLDEEGHQKDPDIGDLLDQLVEEITGSLSGPAKDFYQREFDFFNKITNVSAIIKPYPKGDERKKACLSALSEVKVQPGCYLPSNPEAIVLDIDYKSGTPMQSAAKAPYLAKFKVKRCGVSELEKEGLRCRSDSEDECSTQEADGQKISWQAAIFKVGDDCRQDMLALQIIDLFKNIFQLVGLDLFVFPYRVVATAPGCGVIECIPDCTSRDQLGRQTDFGMYDYFTRQYGDESTLAFQQARYNFIRSMAAYSLLLFLLQIKDRHNGNIMLDKKGHIIHIDFGFMFESSPGGNLGWEPDIKLTDEMVMIMGGKMEATPFKWFMEMCVRGYLAVRPYMDAVVSLVTLMLDTGLPCFRGQTIKLLKHRFSPNMTEREAANFIMKVIQSCFLSNRSRTYDMIQYYQNDIPY

SEQ ID NO: 230760 - protein, 87 aa, Artificial Sequence
  derived and/or modified sequence
MCPVDFHGIFQLDERRRDAVIALGIFLIESDLQHKDCVVPYLLRLLKGLPKVYWVEESTARKGRGALPVAESFSFCLVTLLSDVAYR

SEQ ID NO: 230761 - DNA, 6135 bp, Artificial Sequence
  derived and/or modified sequence
atgtgtccagtggattttcacggtatcttccagctagacgagaggcgtcgggatgcagtgattgccctcggtatcttcctcatcgagtccgacctccagcataaggattgtgtggtcccatacttgttacggctcttgaaggggcttcccaaggtctactgggtggaagaatccaccgcacgcaaagggcggggcgctttaccggtagccgagtcattcagtttctgtctggtcaccctgctctctgatgttgcttatagagatccctctcttcgagacgaaattctagaagtgctcctccaggtgctccatgttctcctggggatgtgtcaggctttggaaatccaggacaaggagtacctttgcaaatatgctataccatgtctcattggcatcagtcgagcgttcgggaggtactccaacatggaagagtccctcctatctaagttattcccaaaaattcctccccatagcttaagggtgctggaggagctggaaggcgtccggaggcgctcatttaacgactttagaagcatcttgccctcaaatttgctcactgtctgccaagagggcaccctgaaaagaaagacgagttcggtgtccagtataagtcaggtttctccagagagaggcatgcctcctccctcttccccaggcgggagtgcctttcactactttgaagcttcttgtctacccgacggcaccgcgttagagccagagtattattttagtacaatctcatcctccttcagcgtgtctccattgttcaatggagtaacttataaggaattcaacatcccactagaaatgctgagagagctcctgaacctggtgaagaaaatcgtggaggaagcagttctgaagtccttagacgctatcgttgcatccgtcatggaggccaacccgtcagccgacttgtactatacatctttttcggatccgctgtatctcacaatgttcaaaatgttaagggacaccctctattacatgaaagacttaccgacttccttcgtgaaggaaatccatgactttgttctggaacagtttaatacgtcccagggcgagctacagaaaatcctgcacgacgctgaccgcatccataacgagttgagcccattgaagttgagatgtcaggccaacgctgcctgcgttgacttgatggtgtgggctgtgaaagatgaacagggggccgaaaatctgtgtatcaagttaagtgaaaagttacagtctaagacatcctccaaagttatcatagcacatctaccactgttaatatgctgcttacaagggttagggagattgtgtgagagattccctgtggtggtgcactccgtgactccttccctgagagacttcctcgtcatcccgtcacctgtgctggtgaagctctacaagtatcacagccagtatcatacggttgccgggaatgacattaaaattagcgtcactaacgagcacagcgagtctaccttgaatgttatgtcaggtaaaaagtcacagccctccatgtatgagcagctgcgcgatattgccatcgataatatctgtcgctgcctgaaggctggtctcactgtggaccccgttattgtggaagcattcctggcctcactctccaaccgcctgtatattagccaagagtctgataaagatgcacatcttataccagatcatacaattagggcacttggccatatagcagtggcactccgcgatacaccgaaagtgatggagcctatcctacaaatactgcagcagaagttctgtcagccccccagcccgctggacgtgctgataatcgaccaactcgggtgtcttgttattaccgggaatcaatatatctaccaggaagtgtggaatctgtttcagcagattagtgtcaaagccagcagcgtagtgtattcggccaccaaggattataaggatcatggctatcgacactgcagcttagctgtaattaatgctctggccaatattgcagccaacattcaggacgagcatttggttgatgaacttctcatgaaccttctggagctttttgtgcaactcggtctcgagggcaaaagggcctccgagcgggcctccgagaagggccccgcgctaaaggccagctcttcagctggcaacctaggcgtgctcatccccgtgattgctgttctaacccggaggttgccacctatcaaggaggctaaacctaggcttcagaagctctttagagatttttggctatactcagtcttgatgggcttcgcagtcgagggtagtgggctgtggcccgaggagtggtatgaaggagtctgcgagattgctaccaaaagccccctactcactttcccctctaaggagcctctccggtccgtcctccagtataatagcgccatgaaaaatgacacagtgacacccgcagagcttagcgagctgcggagtaccatcatcaatctactggatccacctccagaggtctcggcactaattaataagctcgatttcgccatgtccacttatctgctctccgtgtaccgtttggaatacatgcgggtcctccgctctaccgatcctgatcgcttccaggtcatgttctgctattttgaagacaaagcaatacagaaagataagtctggtatgatgcagtgcgtgatcgccgtcgccgacaaggtgtttgatgcctttctaaatatgatggctgacaaggctaagacaaaggagaacgaagaggaacttgagaggcacgcacagttccttcttgtcaatttcaaccacatccataaaagaatcagaagggtagccgataaatatctctccggactcgtagacaaattcccccacctgctctggtccggcaccgtgctgaagaccatgttagacatcctgcagactttgtcacttagcctaagcgctgacattcataaggaccaaccttattatgatattccagacgcaccctatagaattacagtccccgatacatacgaggcccgcgaaagcattgtgaaagactttgcagctcgatgtggaatgatcctgcaggaagctatgaaatgggctcccacagtcactaaatctcacctgcaggaatacctgaataaacaccagaattgggtgagtggcttgagtcaacacaccgggttagcaatggcaactgagtccatactccatttcgcaggatacaataagcaaaacacaaccctgggcgctacccagctgtctgagaggccagcctgtgtgaagaaagattattccaattttatggcgagcttgaatctgcgtaatcggtacgctggtgaggtttatggaatgatccgttttagtggcacaactgggcagatgtctgaccttaacaaaatgatggtccaagatcttcacagtgccctggatcgttcccacccccaacactatacacaagctatgttcaaactgaccgctatgctcatcagcagtaaagactgtgaccctcaactcctgcaccacctgtgctggggacccctgagaatgttcaatgagcacggcatggagacagccttggcttgctgggagtggcttctggcaggaaaggacggagtggaagtgccgttcatgcgggagatggctggcgcctggcatatgacggtggagcagaaattcggcctgttttccgcagaaataaaggaagccgaccccctggctgcctccgaggccagtcagcccaaaccatgcccacctgaagttacgccccactatatctggattgattttctggtgcagagatttgagatagccaagtactgtagcagcgaccaggtggaaatcttcagtagtctgctacagagaagcatgagccttaatatcggaggggctaaaggctcaatgaaccggcatgtggctgcaataggccccaggttcaaattgctaaccctagggctgagccttttgcacgccgatgtcgttcccaatgccaccattaggaatgtgcttagagagaagatctatagtacagcctttgactacttctcgtgtccaccaaagttccccacgcagggggaaaagagactccgcgaagacatcagtataatgattaaattctggaccgccatgttttccgataaaaagtatctcacggccagccagctggttcctccagacaatcaggataccagaagtaacctggatattactgtggggtccaggcagcaagccacccagggctggattaacacataccctctctcttcagggatgtctacaatatcgaagaagtctgggatgagcaaaaaaacaaacaggggctcgcagctccataagtattacatgaagaggcgcaccctgctattgtctctgctggccacagaaatcgagcgtctgattacctggtataatccgctgtccgcgcccgaactggaattggaccaggcaggcgaaaactccgtggccaattggcggtcgaaatatatctccttgtcagaaaagcagtggaaggacaacgtaaatctcgcgtggagtatttcaccatatctcgcggtgcaactgcccgcacggtttaagaacaccgaggccattggcaatgaagtgacaagactggtcagacttgaccctggcgctgtgagcgacgtgccagaggctatcaaattcttagtgacctggcacaccattgatgcggatgccccggagctgtcacacgtcctatgctgggccccgactgatccgcctaccggtctctcatacttttcctcaatgtaccccccccacccactcaccgcccagtacggcgtgaaagttctgcggagtttcccacctgatgctattcttttctatattccacagatcgtgcaggccttgaggtacgataagatgggatatgtccgtgagtatatcctgtgggccgcctcgaagtctcagttactggcgcatcagttcatctggaacatgaaaaccaatatttatctggacgaagagggccatcagaaggatcctgacatcggcgacttattggaccagctggttgaagaaatcacaggctccttatcaggtcccgcgaaagacttctatcagagagagttcgatttttttaacaagattaccaacgtgagtgccattattaaaccttaccccaagggtgatgagaggaagaaagcctgtctgtccgcactgtctgaggtcaaagtccagcccgggtgttatctgccaagcaaccccgaggccatcgttttggatattgattacaaaagcggcactcccatgcagagcgccgcaaaggctccatatctcgccaaattcaaagtgaagcgctgcggggtcagcgagcttgagaaagagggccttagatgtaggtcggacagcgaggatgagtgttccacgcaagaagctgacggccaaaagatctcctggcaggcggctatctttaaagtgggagatgattgcaggcaggatatgctggcactccagattattgacctttttaaaaatatttttcagttggtggggctggatctgttcgttttcccatatagagtggttgcgacagctcctggctgcggggtgatcgagtgcattccagattgcacttctagagatcagctcggtagacagacagatttcgggatgtacgactattttacccggcagtatggagacgaatcaacgctcgcgtttcaacaagccaggtataatttcattcgttctatggctgcgtattccttactcctgttcctgttacaaatcaaggatcgccataacggaaatatcatgctggacaagaagggccacataatccacatagatttcgggtttatgtttgaaagctcccccggtgggaacctcggctgggaaccagacattaagctgacagacgaaatggtgatgatcatgggcggcaagatggaagccactcccttcaaatggttcatggagatgtgcgtgcgcgggtatctggctgtccgaccgtacatggacgccgtggtctccttggtcactctcatgctggacacagggctgccatgcttcagaggtcagaccatcaagctgctaaagcacagattcagcccgaacatgaccgaaagagaggccgccaactttatcatgaaagtaattcaaagctgttttctgtccaaccgaagccgaacctacgatatgatccaatactaccagaacgatataccatattag

SEQ ID NO: 230762 - DNA, 6135 bp, Artificial Sequence
  derived and/or modified sequence
atgtgtcctgtggacttccacggcattttccagctggacgagaggaggcgtgatgccgttatcgccctcggcatcttcttgatcgagtcggatttacaacataaagactgtgttgttccatatctgcttcgtctgctcaagggacttcccaaggtttattgggtcgaggagagtacggctcggaaaggtcggggcgcactcccggtggccgagagcttcagtttttgcctggtgaccctgctcagtgacgtggcctatagggacccctccctccgagatgagattctggaagtcctacttcaggtgcttcatgtgttacttgggatgtgccaggccctggagatccaagataaagaatatctttgcaagtatgccataccgtgcctgataggtatttcaagagcgttcggacggtattccaatatggaggaatcattactgtccaaactttttcctaaaatacccccacatagcctgcgcgtcctcgaagaacttgagggagttagaaggcggtccttcaatgatttcaggagcattctccccagcaacctccttacggtttgccaggagggaacgctcaaaagaaagacctctagtgtaagttcaatatcgcaggtgtcaccggaaaggggtatgccgcctccatcttctcctgggggcagcgctttccattattttgaggcttcgtgcctgccagatggaactgctctggagccagagtactatttctctacaatcagtagtagcttctccgtgagtccgttgtttaacggggtcacctacaaggagttcaatatccccctcgagatgctgagagagcttctgaatctggtcaagaagatcgtggaggaggctgtcctgaagtcactcgatgcaattgtcgcatcagttatggaagccaatccttcggcagatctgtattatacatcttttagcgatcctctgtacctgaccatgtttaagatgctgcgagacacactatactacatgaaagatctgcctacctccttcgtgaaggagatccatgactttgtgctcgagcaatttaataccagccagggagaactgcagaaaatcctgcacgatgcggatagaattcataacgagctcagccccctgaagttgagatgccaggccaatgccgcctgtgtagaccttatggtctgggcagtcaaggatgaacagggagccgagaacttgtgcatcaagctgagtgaaaaacttcagtccaaaacttccagcaaggtaatcattgctcacctcccactgctcatctgttgccttcagggactagggcgcctgtgcgagcgctttcctgtggtggtgcactccgtgacacctagcttacgtgatttcttagttatcccatcaccggttttagtcaaactgtataagtaccactcacagtaccacacggtagcggggaacgatataaagatctctgtgaccaacgaacattcagagagcacgctgaatgtgatgagtggcaagaagagtcaacctagcatgtacgagcagctaagagatatagcaatagataacatttgcaggtgtttaaaagcaggcttaactgtggaccccgtgatcgttgaggccttccttgccagtctttctaaccggctctatattagccaggaatccgacaaagacgcacacttgataccagatcataccatcagggctctaggtcacatcgccgtagcacttcgggatacacctaaggtgatggaacccatcctgcagattctccagcagaaattctgtcagcctcctagccctctggatgttttaatcatcgaccagttgggctgtctggtgataactgggaatcagtacatttatcaggaagtatggaatctgtttcagcagataagcgtgaaggcatccagcgtggtttactccgcaaccaaagattataaagaccatggctacaggcactgttctctcgccgtgataaatgctctggcaaacattgccgcaaacatccaagatgaacacctcgtagatgagctgctgatgaacctgcttgagctgtttgtgcagcttgggttagaaggtaagagagccagcgagcgggcctctgagaagggccccgcccttaaagcttcttccagtgctggcaacctcggagttttgatacccgttatcgctgttctgactcggagactaccgcctataaaggaggcgaagcctagactccaaaagctgttcagagatttctggctgtattcagtccttatgggcttcgctgtcgaagggtctgggctttggccagaggaatggtatgagggcgtctgtgagatcgccaccaagtctcctttgctgacctttcctagtaaagagcctctgcgctcggtcctgcagtataacagcgcaatgaagaacgacaccgtgacacccgcggagttgtcggagctgcggtctaccattattaatttattagaccccccacccgaggtctccgcacttatcaataaacttgactttgccatgagtacatatctcctgtcggtttaccgtttggagtacatgcgagtcctgagatccacagaccctgatcgctttcaggtgatgttttgctatttcgaagataaagcaatccagaaagataagtcaggcatgatgcagtgtgtgatcgccgtggccgacaaagtattcgacgccttcttaaacatgatggccgacaaagccaagaccaaagagaacgaggaagagttagaaaggcatgcccaatttttgctggtaaatttcaaccacatccacaagaggattcgtagagtggccgacaaatacctttctgggctcgtcgataagttccctcaccttctgtggagtggtaccgtgctgaaaaccatgctcgacatcctccaaacattgtcactgagtctctcggccgatatacataaagatcagccatactatgacattcccgacgcaccctatcgaatcacagtgcccgacacatatgaggcccgggaatcaatcgttaaggacttcgctgctaggtgcggcatgattttacaggaagcaatgaagtgggcaccaacggtgacaaagtcccatctccaggagtacctgaacaagcatcagaactgggtgtctggactgagccagcacacaggcctcgccatggcaaccgagagcatacttcacttcgctggctataacaaacagaacacaactctaggagccacccaattgtcggaacggcccgcctgtgtgaagaaagactatagcaactttatggcctccctgaacctccgcaaccggtacgcaggagaggtgtatggaatgatcagatttagtggcacaacggggcagatgtccgacctaaataaaatgatggtgcaggacctgcacagcgctttggatagatctcatccccagcattacacccaagcgatgtttaagttgacagccatgctgataagctctaaagattgtgatcctcagctgctgcatcatctctgctggggtcctctacgcatgtttaatgaacacgggatggaaaccgccttggcatgctgggagtggcttctagccgggaaggacggcgtggaagttccattcatgcgtgagatggcaggggcctggcatatgacagtggagcagaaatttggcttattttcggccgagattaaggaggccgatcccctggctgccagcgaggcaagtcagcccaagccctgtccacctgaagttacaccacattacatatggatcgacttcctggtacagcgtttcgaaattgccaagtactgctccagcgaccaggtagaaattttctccagtcttttacaacggtctatgtccttgaacataggcggcgcgaagggctcgatgaataggcacgtggccgccatcggccctagatttaagctattaaccctcggcctcagcctcctgcacgcagatgtggtccctaacgccaccattcggaacgtgctcagagagaagatctactccactgcatttgactactttagctgtccaccaaagttccccacccagggggaaaagagactaagagaagacatcagcattatgattaagttctggacggccatgttctcagacaagaagtacctgacggcctcccagctagttcctccggacaaccaggatacccgatcgaatcttgacattaccgtcggctctaggcagcaggctacccaggggtggattaacacataccctctgtcttcagggatgtcaacaatatccaaaaagtcaggaatgagcaagaagacaaaccggggctcacagttgcacaagtactatatgaagcgtcggaccctgctcttgagtctgctggccactgaaatcgagcgactaataacatggtataaccctctgtcagccccggagcttgagctggatcaagctggagaaaacagtgtagcaaattggcggtccaaatatatcagtttaagcgaaaagcaatggaaggataatgtgaacctcgcatggtctatcagcccgtatctggctgtccagttaccagcccggttcaagaacactgaggccattggcaatgaggtaacccgcctggtgcgtctggatcccggagccgtctccgacgtcccggaagccatcaaatttcttgtcacatggcacacaatagacgccgacgctccggaacttagtcatgtgctttgttgggccccaacggacccacccactggactttcgtacttctcgagcatgtatccacctcatcctctgacggctcagtatggcgtcaaagtgctcagaagctttcctccagacgccattttattctacataccacagatagtacaggcactcagatatgataaaatgggttatgtgcgcgagtatatcctgtgggctgcctctaaaagccaattgctggcacaccagtttatatggaacatgaagacgaacatttacctggatgaggagggccaccaaaaggaccccgatatcggtgatttactggatcagcttgtggaggagatcactggatctctgtctggccctgctaaagatttctatcagcgcgagtttgacttctttaacaaaataaccaatgtctccgctattatcaagccctatccgaagggagacgagcgcaaaaaagcctgtctatctgcactttcggaggtcaaggtccagccgggatgttacctgccatccaacccagaagcgatagtgctcgacattgattataagtccggcacacccatgcagtccgccgccaaggctccctacctcgcgaaatttaaagtgaagcggtgtggcgtgagtgaattggagaaagagggcctgagatgcagatctgattctgaagacgaatgtagtacccaggaggctgatgggcagaagatcagctggcaggctgccatcttcaaagttggtgacgactgcaggcaagacatgctcgctctgcagatcatcgatctctttaagaatatcttccagctggttggcctggacctgtttgttttcccctatcgcgtggttgcaactgcacctggctgcggggtgatagagtgtatccccgattgcacgagccgtgatcagctcggcagacagactgatttcggtatgtacgactacttcactcgccagtatggcgacgagagtaccctggcttttcaacaggccaggtataacttcattagatcaatggccgcttattcactactgctttttctgctgcagatcaaagataggcataatggaaatattatgttggataagaagggccatattatccacatcgattttggctttatgttcgaaagctctccaggtggaaatctgggttgggagccagacataaagcttacagatgagatggtgatgattatggggggcaaaatggaagctacccctttcaaatggtttatggaaatgtgcgttcgcggttatctcgcagtgcggccctatatggacgctgtggtgagcctcgttaccttgatgctggataccgggctgccatgctttcgcggacagacgattaagttactgaaacacaggttttcaccaaacatgaccgaaagggaggccgccaatttcatcatgaaggtcatccagagctgctttttaagtaatagatcgaggacttacgatatgatccagtactaccagaacgatatcccatattag

SEQ ID NO: 230763 - DNA, 2565 bp, Artificial Sequence
  derived and/or modified sequence
atgcgtgagatggctggggcgtggcatatgacggtcgagcagaaatttgggctattctccgccgaaattaaagaggcagatcccctggctgcaagtgaagcgagccagcccaagccctgtcctcccgaggtaactccacactacatttggatcgacttcttggtgcaacgtttcgagatagccaagtactgtagttcagaccaggtggagatattcagcagcttgttgcaacgaagcatgtcattgaacatcggaggagccaaggggtccatgaacaggcacgtcgctgccatcgggccaaggtttaagctcctgacactcggcctgagtctgctccatgccgacgttgtgccaaacgctaccatccggaatgtactccgagagaagatttacagcacggcctttgactacttttcctgtccacccaaattccctacacaaggcgagaaaagactaagagaagatatcagcattatgattaaattctggacagccatgttttctgacaagaaatacttgacagcttcacagctcgtccctcctgacaaccaggatacgaggagtaacttggatatcacagtgggaagcaggcagcaggcaactcaggggtggatcaatacttaccccttgtccagtgggatgtcgaccatatccaaaaaatcaggcatgtccaagaagacaaatcgggggtctcaactccataagtactacatgaagcggcgtaccctcttgcttagccttctggccactgagattgagcgtttgataacttggtacaatcccctatctgctccagagttggaactggaccaagctggagaaaatagtgttgcaaactggcgctccaagtatatctcattgagcgagaaacaatggaaggacaacgtgaacctggcgtggtcaatctccccatacttggccgtccagctgcccgctcggtttaaaaataccgaagccatcggaaacgaagtaacccgcctggtgcgacttgatcctggagcggtgagcgatgtgccagaggccattaagttcttagtgacttggcataccatcgacgctgatgcgcccgaactttcccacgtcctatgttgggcccctactgatccccctacaggtctcagctatttttcatccatgtaccccccgcatcccctgaccgcacagtacggggtcaaggttctgcgctcatttccaccagacgccattctcttttacatcccccaaattgtccaggccctgcggtatgataaaatgggatacgttcgagagtacatcttgtgggccgcttccaaatcccaactgctggcccatcagttcatctggaatatgaagaccaatatttacctcgatgaagaggggcaccagaaggatccggatatcggcgatctgctcgaccagctagtcgaagaaatcacaggtagcctgtcaggaccagcgaaagatttctatcaacgagaattcgatttctttaacaaaatcaccaatgtgtcggcaataattaaaccatacccaaagggggacgagcgaaaaaaagcatgtctgtcagccctcagtgaggtgaaagtccagcccggctgttatcttcccagcaatcccgaggcaatagtgcttgatatcgactacaagagtgggaccccaatgcagagtgcagccaaggcgccatacctagcaaaatttaaggtgaagcgttgtggggtctccgaactggagaaggaaggtctgcggtgccgctccgactccgaagacgaatgtagtacccaggaagctgacggacagaagatatcatggcaggctgccatatttaaggtcggtgacgattgtcgtcaggacatgttagcgctccaaatcatagacctcttcaagaatatcttccagctggttggactggatctctttgtgtttccctaccgagtggtcgctacggcccctggctgcggcgtaattgagtgcattcccgactgtacaagccgcgaccagctgggaaggcagacagatttcggaatgtacgactacttcacacggcagtatggagacgagtccacgttggcctttcaacaagctcgatacaattttataagatcaatggcagcttactctctcttactattcttactgcagattaaggatcgacataacggtaatatcatgttggacaagaagggacacatcatccacatcgacttcggatttatgtttgaatcctctcctggagggaacttaggctgggagccggatatcaaactgactgatgagatggtgatgataatgggtggcaagatggaggctacaccttttaaatggttcatggagatgtgtgtgaggggctatctcgccgtgcggccctatatggacgctgttgtgtcactggtaacactgatgctggatactggactcccctgcttccgggggcagacaatcaaattacttaagcataggtttagccctaacatgaccgagcgcgaagcagccaacttcataatgaaggtgatccagtcatgctttctgtcgaaccggtctaggacctacgacatgatccagtattatcagaacgacatcccatactag

SEQ ID NO: 230764 - DNA, 264 bp, Artificial Sequence
  derived and/or modified sequence
atgtgccccgtggattttcacggcatcttccaattggatgaacgcagacgggatgcagtgattgctctcggcatatttttgatagagtccgatttgcagcacaaagactgcgtggtgccttatctcctgaggctgcttaaggggctgcccaaagtctactgggtagaggaatcaacagcacgaaagggccggggtgccctccccgtggcagagagttttagcttctgcctcgtcacgctcctttccgatgtggcatacagatag

SEQ ID NO: 230765 - DNA, 6135 bp, Artificial Sequence
  derived and/or modified sequence
atgtgccctgtggacttccacggcatcttccagctggatgaaagaagaagagatgctgtgattgccctgggcatcttcctgattgaaagtgacctgcagcacaaggactgtgtggtgccctacctgctgcggctgctgaagggcctgcccaaggtgtactgggtggaggagagcacagccaggaagggccgcggggccctgcctgtggccgagagcttctccttctgcctggtgaccctgctgagtgatgtggcctacagagaccccagcctgagagatgagatcctggaggtgctgctgcaggtgctgcacgtgctgctgggcatgtgccaggccctggagatccaggacaaggagtacctgtgcaagtatgccatcccctgcctgattggcatcagccgggccttcggccgctacagcaacatggaggagagcctgctgagcaagctgttccccaagatccccccccacagcctgcgggtgctggaggagctggagggcgtgagaagaagaagcttcaatgacttccgcagcatcctgcccagcaacctgctgactgtgtgccaggagggcaccctgaagaggaagaccagctctgtgagcagcatcagccaggtgtccccagagcggggcatgcccccacccagcagccctgggggcagcgccttccactactttgaggccagctgcctgcctgatggaacagccctggagcctgagtactacttcagcaccatcagcagcagcttctctgtgagccccctcttcaatggagtgacctacaaggagttcaacatccccctggagatgctgcgggagctgctgaacctggtgaagaagatcgtggaggaggccgtgctgaagagcctggatgccatcgtggcctctgtgatggaggccaaccccagcgctgacctgtactacaccagcttcagtgaccccctgtacctgaccatgttcaagatgctgcgggacaccctgtactacatgaaggacctgcccaccagctttgtgaaggagatccatgactttgtgctggagcagttcaacaccagccagggcgagctgcagaagatcctgcatgatgctgaccgcatccacaatgagctgagccccctgaagctgcgctgccaggccaatgctgcctgtgtggacctgatggtgtgggccgtgaaggatgagcagggcgctgagaacctgtgcatcaagctgtctgagaagctgcagagcaagaccagcagcaaggtgatcatcgcccacctgcccctgctgatctgctgcctgcagggcctgggccgcctgtgtgagcgcttccctgtggtggtgcacagcgtgacccccagcctgcgggacttcctggtgatccccagccctgtgctggtgaagctgtacaagtaccacagccagtaccacacagtggccggaaatgacatcaagatctctgtgaccaatgagcacagcgagagcaccctgaatgtgatgtctgggaagaagagccagcccagcatgtatgagcagctgcgggacatcgccatcgacaacatctgccgctgcctgaaggccggcctgactgtggaccctgtgattgtggaggccttcctggccagcctgagcaacagactctacatcagccaggagagtgacaaggatgcccacctgatcccagaccacaccatccgggccctgggccacatcgctgtggccctgcgggacacccccaaggtgatggagcccatcctgcagatcctgcagcagaagttctgccagccccccagccccctggatgtgctgatcatcgaccagctgggctgcctggtgatcaccggcaaccagtacatctaccaggaggtgtggaacctcttccagcagatctctgtgaaggccagctctgtggtgtacagcgccaccaaggactacaaggaccacggctaccgccactgcagcctggccgtcatcaatgccctggccaacattgctgccaacatccaggatgagcacctggtggatgagctgctgatgaacctgctggagctgtttgtgcagctgggcctggagggcaagagggccagcgagcgggccagcgagaagggccctgccctgaaggccagcagcagcgctggcaacctgggcgtgctgatccctgtgattgctgtgctgacccggcggctgccccccatcaaggaggccaagccccggctgcagaagctgttccgggacttctggctgtacagcgtgctgatgggctttgctgtggagggcagcggcctgtggccagaggagtggtatgagggcgtgtgtgagatcgccaccaagagccccctgctgaccttccccagcaaggagcccctgcggtctgtgctgcagtacaacagcgccatgaagaatgacacagtgaccccagctgagctgtctgagctgcggagcaccatcatcaacctgctggaccccccacctgaggtgtctgccctgatcaacaagctggactttgccatgagcacctacctgctgtctgtgtaccgcctggagtacatgagggtgctgcggagcacagatcctgaccgcttccaggtgatgttctgctactttgaggacaaggccatccagaaggacaagagcggcatgatgcagtgtgtgattgctgtggccgacaaggtgtttgatgccttcctgaacatgatggctgacaaggccaagaccaaggaaaatgaggaggagctggagagacatgcccagttcctgctggtgaacttcaaccacatccacaagaggatcagaagagtggccgacaagtacctgagcggcctggtggacaagttcccccacctgctgtggagcggcaccgtgctgaagaccatgctggacatcctgcagaccctgagcctgagcctgtctgctgacatccacaaggaccagccctactatgacatcccagatgccccctaccgcatcaccgtgcctgacacctatgaggcccgggagagcatcgtgaaggactttgctgcccgctgtggcatgatcctgcaggaggccatgaagtgggcccccaccgtgaccaagagccacctgcaggagtacctgaacaagcaccagaactgggtgtctggcctgagccagcacacaggcctggccatggccacagagagcatcctgcactttgctggctacaacaagcagaacaccaccctgggcgccacccagctgtctgagaggcctgcctgtgtgaagaaggactacagcaacttcatggccagcctgaacctgaggaacagatatgctggggaggtgtatggcatgatccgcttcagcggcaccaccggccagatgtctgacctgaacaagatgatggtgcaggacctgcacagcgccctggacaggagccacccccagcactacacccaggccatgttcaagctgacagccatgctgatcagcagcaaggactgtgacccccagctgctgcaccacctgtgctggggccccctgaggatgtttaatgaacatggcatggagacagccctggcctgctgggagtggctgctggccggcaaggatggagtggaggtgcccttcatgagggagatggccggggcctggcacatgacagtggagcagaagtttggcctcttctctgctgagatcaaggaggccgaccccctggccgccagcgaggccagccagcccaagccctgccccccagaggtgaccccccactacatctggattgacttcctggtgcagagatttgagatcgccaagtactgcagcagtgaccaggtggagatcttcagcagcctgctgcagaggtccatgagcctgaacatcggcggggccaagggctccatgaacagacatgtggccgccatcggcccccgcttcaagctgctgaccctgggcctgagcctgctgcacgcagatgtggtgcccaatgccaccatcagaaatgtgctgcgggagaagatctacagcacagcctttgactacttcagctgcccccccaagttccccacccagggcgagaagaggctgcgggaggacatcagcatcatgatcaagttctggacagccatgttcagtgacaagaagtacctgacagccagccagctggtgcccccagacaaccaggacaccaggagcaacctggacatcaccgtgggcagccggcagcaggccacccagggctggatcaacacctaccccctgagcagcggcatgagcaccatcagcaagaagagcggcatgagcaagaagaccaacagaggcagccagctgcacaagtactacatgaagaggaggaccctgctgctgagcctgctggccacagaaattgaaagactcatcacctggtacaaccccctgagcgcccctgagctggagctggaccaggccggggagaacagcgtggccaactggaggagcaagtacatcagcctgtctgagaagcagtggaaggacaacgtgaacctggcctggagcatcagcccctacctggccgtgcagctgcctgcccgcttcaagaacacagaggccatcggaaatgaggtgacccggctggtgcggctggaccccggggctgtgtctgatgtgcctgaggccatcaagttcctggtgacctggcacaccattgatgctgatgcccctgagctgagccacgtgctgtgctgggcccccacagatcctcccaccggcctgagctacttcagctccatgtacccaccccaccccctgacagcccagtatggagtgaaggtgctgcggagcttccccccagatgccatcctcttctacatcccccagatcgtgcaggccctgcgctatgacaagatgggctacgtgcgggagtacatcctgtgggccgccagcaagagccagctgctggcccaccagttcatctggaacatgaagaccaacatctacctggatgaggagggccaccagaaggaccctgacatcggggacctgctggaccagctggtggaggagatcaccggcagcctgagcggccctgccaaggacttctaccagcgggagtttgacttcttcaacaagatcaccaacgtgtctgccatcatcaagccctaccccaagggagatgagaggaagaaggcctgcctgagcgccctgtctgaggtgaaggtgcagcccggctgctacctgcccagcaaccctgaggccatcgtgctggacatcgactacaagagcggcacccccatgcagagcgctgccaaggccccctacctggccaagttcaaggtgaagagatgtggggtgtctgagctggagaaggagggcctgcgctgccgcagtgacagtgaagatgaatgttccacccaggaggctgatggccagaagatctcctggcaggccgccatcttcaaggtgggagatgactgccggcaggacatgctggccctgcagatcatcgacctcttcaagaacatcttccagctggtgggcctggacctgtttgtgttcccctacagagtggtggccacagcccctggctgtggggtgattgagtgcatcccagactgcaccagccgggaccagctgggccggcagacagactttggcatgtatgactacttcacccggcagtatggagatgagagcaccctggccttccagcaggcccgctacaacttcatccgctccatggccgcctacagcctgctgctcttcctgctgcagatcaaggacagacacaacggcaacatcatgctggacaagaagggccacatcatccacatcgactttggcttcatgtttgagagcagccctgggggcaacctgggctgggagccagacatcaagctgacagatgagatggtgatgatcatgggcggcaagatggaggccacccccttcaagtggttcatggagatgtgtgtgcggggctacctggccgtgcggccctacatggatgctgtggtgtccctggtgaccctgatgctggacaccggcctgccctgcttccggggccagaccatcaagctgctgaagcaccgcttcagccccaacatgacagagcgggaggccgccaacttcatcatgaaggtgatccagagctgcttcctgagcaacagaagcaggacctatgacatgatccagtactaccagaatgacatcccctactag

SEQ ID NO: 230766 - DNA, 2565 bp, Artificial Sequence
  derived and/or modified sequence
atgagggagatggccggggcctggcacatgacagtggagcagaagtttggcctcttctctgctgagatcaaggaggccgaccccctggccgccagcgaggccagccagcccaagccctgccccccagaggtgaccccccactacatctggattgacttcctggtgcagagatttgagatcgccaagtactgcagcagtgaccaggtggagatcttcagcagcctgctgcagaggtccatgagcctgaacatcggcggggccaagggctccatgaacagacatgtggccgccatcggcccccgcttcaagctgctgaccctgggcctgagcctgctgcacgcagatgtggtgcccaatgccaccatcagaaatgtgctgcgggagaagatctacagcacagcctttgactacttcagctgcccccccaagttccccacccagggcgagaagaggctgcgggaggacatcagcatcatgatcaagttctggacagccatgttcagtgacaagaagtacctgacagccagccagctggtgcccccagacaaccaggacaccaggagcaacctggacatcaccgtgggcagccggcagcaggccacccagggctggatcaacacctaccccctgagcagcggcatgagcaccatcagcaagaagagcggcatgagcaagaagaccaacagaggcagccagctgcacaagtactacatgaagaggaggaccctgctgctgagcctgctggccacagaaattgaaagactcatcacctggtacaaccccctgagcgcccctgagctggagctggaccaggccggggagaacagcgtggccaactggaggagcaagtacatcagcctgtctgagaagcagtggaaggacaacgtgaacctggcctggagcatcagcccctacctggccgtgcagctgcctgcccgcttcaagaacacagaggccatcggaaatgaggtgacccggctggtgcggctggaccccggggctgtgtctgatgtgcctgaggccatcaagttcctggtgacctggcacaccattgatgctgatgcccctgagctgagccacgtgctgtgctgggcccccacagatcctcccaccggcctgagctacttcagctccatgtacccaccccaccccctgacagcccagtatggagtgaaggtgctgcggagcttccccccagatgccatcctcttctacatcccccagatcgtgcaggccctgcgctatgacaagatgggctacgtgcgggagtacatcctgtgggccgccagcaagagccagctgctggcccaccagttcatctggaacatgaagaccaacatctacctggatgaggagggccaccagaaggaccctgacatcggggacctgctggaccagctggtggaggagatcaccggcagcctgagcggccctgccaaggacttctaccagcgggagtttgacttcttcaacaagatcaccaacgtgtctgccatcatcaagccctaccccaagggagatgagaggaagaaggcctgcctgagcgccctgtctgaggtgaaggtgcagcccggctgctacctgcccagcaaccctgaggccatcgtgctggacatcgactacaagagcggcacccccatgcagagcgctgccaaggccccctacctggccaagttcaaggtgaagagatgtggggtgtctgagctggagaaggagggcctgcgctgccgcagtgacagtgaagatgaatgttccacccaggaggctgatggccagaagatctcctggcaggccgccatcttcaaggtgggagatgactgccggcaggacatgctggccctgcagatcatcgacctcttcaagaacatcttccagctggtgggcctggacctgtttgtgttcccctacagagtggtggccacagcccctggctgtggggtgattgagtgcatcccagactgcaccagccgggaccagctgggccggcagacagactttggcatgtatgactacttcacccggcagtatggagatgagagcaccctggccttccagcaggcccgctacaacttcatccgctccatggccgcctacagcctgctgctcttcctgctgcagatcaaggacagacacaacggcaacatcatgctggacaagaagggccacatcatccacatcgactttggcttcatgtttgagagcagccctgggggcaacctgggctgggagccagacatcaagctgacagatgagatggtgatgatcatgggcggcaagatggaggccacccccttcaagtggttcatggagatgtgtgtgcggggctacctggccgtgcggccctacatggatgctgtggtgtccctggtgaccctgatgctggacaccggcctgccctgcttccggggccagaccatcaagctgctgaagcaccgcttcagccccaacatgacagagcgggaggccgccaacttcatcatgaaggtgatccagagctgcttcctgagcaacagaagcaggacctatgacatgatccagtactaccagaatgacatcccctactag

SEQ ID NO: 230767 - DNA, 264 bp, Artificial Sequence
  derived and/or modified sequence
atgtgccctgtggacttccacggcatcttccagctggatgaaagaagaagagatgctgtgattgccctgggcatcttcctgattgaaagtgacctgcagcacaaggactgtgtggtgccctacctgctgcggctgctgaagggcctgcccaaggtgtactgggtggaggagagcacagccaggaagggccgcggggccctgcctgtggccgagagcttctccttctgcctggtgaccctgctgagtgatgtggcctacagatag

SEQ ID NO: 230768 - DNA, 6135 bp, Artificial Sequence
  derived and/or modified sequence
atgtgccccgtggacttccacggcatcttccagctggacgagcggcgccgcgacgcagtgatcgctctgggaatcttcctgattgagtccgacctgcagcataaggactgcgtggtgccctatctgctgagactcttgaagggtctccctaaggtttactgggtcgaagaaagtaccgccagaaaggggaggggtgcattgcctgtagcggaatcgttcagcttctgtctggtcactcttctgtccgatgttgcataccgggatccctccctcagagacgaaatactagaggtgttgctgcaggtattacatgttttgctaggaatgtgtcaggcgctagagatccaggacaaggaatacttatgcaaatatgccatcccatgcttaattgggatctctcgcgccttcggtcgatattctaacatggaggaatcacttctgagcaagctcttccccaaaattccgcctcacagtttacgtgttttggaggagctggagggtgtgcgtcggagatcgttcaatgattttagatcaatcttgcctagtaatttgcttaccgtgtgccaagagggcacccttaaaagaaagacctctagcgtgtcttctattagccaggtgtctcccgagcggggaatgccccccccgtctagcccagggggatctgccttccactactttgaagcctcctgtttaccagatggcacagcgcttgaacctgaatactacttctctactatatcgagcagcttctcagtctcccctctgttcaacggagtgacttacaaggagttcaacattcctctggaaatgctgcgagagttattaaacctggtgaagaagatcgtcgaggaagccgtcctcaagtcactggatgccatcgtggccagtgtgatggaggccaatccatctgccgacctatactacaccagctttagtgaccccctctacctgaccatgttcaagatgttgagagacaccctctactatatgaaagacctgcccacctccttcgtgaaagagatacatgatttcgtcctagaacagttcaacaccagccagggcgaactccagaaaattctccatgacgccgacagaatccacaacgagttgtcgcctctgaaattgaggtgccaggccaatgcggcttgtgttgatttaatggtttgggccgtcaaggatgaacagggggccgagaatctttgcatcaagttaagtgagaagctccagtccaaaacatccagcaaagtcattatcgcccacttgcccctgcttatctgctgtttgcaaggcctgggtagattgtgcgaaaggttccccgtggtggtgcacagtgtgactccttctctgcgggattttcttgtgattccctccccagtgttggtcaagctatacaaataccactcccagtaccataccgtcgccggaaatgatattaaaattagcgtgacaaacgagcactcagaatccacattgaacgtgatgtccggtaagaaatcacagcccagcatgtatgaacagctcagagatattgctattgacaatatatgtcggtgtctgaaggcagggctcacggtggaccctgtgatcgtggaggcttttcttgcgtcattgtcgaacagactgtatatctcacaggaatccgataaagatgctcatttgattccagatcatactatccgggcgctggggcatatcgcggtagcgttgagggacacacctaaggtgatggaacctatcctccaaatattacagcagaaattttgtcaacccccaagtcccctggatgtcctcataattgatcaactggggtgcctggttataaccggtaaccagtatatctaccaggaggtctggaatctgtttcaacagatctcagtgaaggcctcaagcgtcgtgtattccgctaccaaagattacaaggaccatggatataggcattgctcattggccgttattaatgctctggccaacatcgctgctaacatacaggacgaacatctggtcgacgaactcctgatgaatcttttagagctgtttgtgcagcttggtctggaggggaagagggcctctgaacgtgcctcagagaagggacccgcgctcaaggccagttcatcagctgggaatctgggcgtgttaattccagtcattgccgtcctgacccggaggctccccccgatcaaggaggctaaaccccggctgcagaagttgtttcgagacttctggttgtattccgtactgatgggtttcgccgtcgaaggatccggcctttggcctgaggaatggtatgagggggtgtgtgagatagctacgaagtcacctttgctcacttttccctccaaagaaccgttacggagtgtgctgcaatacaacagcgccatgaaaaacgacaccgttacacctgctgagctgagcgagttaaggtcaaccataattaatctgctcgatcccccccccgaggtgtctgctcttatcaataagcttgattttgctatgtcaacttacttgctttctgtgtatagactggaatacatgagggttctgcgatctacagatcctgaccgattccaggtgatgttctgttacttcgaagacaaagccatacaaaaggacaagtcaggaatgatgcagtgcgtcatagctgtggccgacaaagtgttcgacgcattcctgaacatgatggccgataaagcgaagaccaaggagaacgaggaggagctggaaaggcacgctcaattcctgctggtgaatttcaaccacattcataagaggatacgaagagtcgctgacaagtacctgtcaggcctggtagataagttcccgcatctgctctggagtgggactgtgctcaagacaatgctagacatcctgcaaacgctcagtttaagtctttccgcagacatacataaggaccagccttattacgatattcccgatgcaccataccgcattacagtgccagacacctatgaagctcgcgaaagtatcgtcaaagacttcgctgcacggtgcggcatgatccttcaggaggctatgaagtgggcccctacagtgaccaaatctcatctgcaagagtatttgaacaagcaccagaactgggtcagcggcttgtcacagcacacaggcctggccatggctaccgagtcaattttgcacttcgcaggatataacaaacagaacaccacccttggcgccacccagttgtcggaacgacccgcctgcgtaaaaaaggactattctaattttatggcaagcctcaacttgcggaataggtatgctggcgaagtctatggtatgatccgcttttcgggaacaaccgggcagatgtccgacctaaataagatgatggtacaagatctccactccgctctcgacagaagccaccctcaacactacactcaggccatgtttaaattgacagctatgctgatcagtagcaaggactgcgatccccagctgctccatcatttgtgctggggacccctgcggatgttcaacgagcacggcatggaaacagcattggcttgttgggagtggctcttggctggtaaagatggtgtggaggtgccctttatgagagagatggccggtgcttggcacatgaccgtcgagcaaaaattcggtctcttttcggccgagatcaaggaggccgaccccctggctgctagcgaggccagccagccaaaaccctgtcccccagaagtgactcctcactatatctggattgacttccttgtgcagcggttcgagatagcgaaatattgttctagcgatcaggtggaaatattttctagcctcttgcagcggagcatgagcctgaacatcggcggtgcaaagggcagtatgaaccgacacgtggctgccataggtcccagattcaagctgcttaccttaggcttgtctctgctgcacgctgatgtagttcctaatgctaccatacgaaacgtgttgcgagaaaagatatactcaactgcattcgactattttagctgcccccctaagttccctacacagggagagaagcgtctgcgtgaagacatttctattatgattaagttttggactgctatgttcagtgataaaaaatacttaacagcctctcagctcgtgccccccgacaaccaggataccagatctaatctggatatcaccgtgggtagccggcagcaggctacccaaggctggatcaacacataccccctctcttccgggatgtcaaccatctcaaagaaaagtgggatgagtaagaagacgaacagggggagtcagttacacaagtactacatgaagagacgcactctcctgctgtccctgctcgctacagaaatcgagcgcttgataacttggtacaaccctctgagtgctccagaattggagcttgatcaggccggagagaattccgtggctaactggcgctccaaatatataagcctgtccgaaaaacagtggaaggacaacgtgaatttagcctggagcatctctccctaccttgcagtgcaactgccagctcgcttcaaaaacaccgaggccattggcaacgaagtgactaggctcgtgcggctggaccctggggcagtgagcgacgtgccagaggccatcaagttcttggtgacatggcacaccattgatgcggacgcccccgagctttcccatgtgctgtgctgggcacctacagacccgcccactggtcttagttacttcagcagcatgtacccgccacaccccttgacagcacagtatggagtcaaagtactgcggtcatttccccctgatgccattctattttacattcctcaaattgtacaggctctcagatacgacaaaatggggtatgtgcgagagtacattctgtgggcggcttctaaatcccagctgctcgctcaccagtttatatggaacatgaaaactaatatttatttagacgaggaaggccatcagaaggatcctgacataggcgacctcctggatcaattagtcgaggagataacaggcagcttgagcggtccagcaaaggatttctaccaacgcgaatttgacttctttaataagattacgaacgttagtgcaatcattaagccatacccaaagggtgacgagcgcaagaaagcctgtctgtccgccctgtccgaagtcaaggtacagcccggctgctacttaccaagcaaccccgaggcgatagtattggatatcgattacaaatcggggacaccaatgcagagcgcagcgaaagccccatatttagcgaagtttaaggtcaaaaggtgtggcgtttctgaactggaaaaggagggccttcgctgtcggtctgacagcgaggacgagtgctctacacaagaggcagacgggcagaaaatcagttggcaagccgccatctttaaggtgggtgatgactgcagacaagatatgctggccttgcagatcattgaccttttcaaaaatattttccaactggttggacttgatttgttcgtcttcccttatcgtgttgtggccacagccccagggtgtggggtgattgagtgcataccggattgcacctcacgagatcagctgggtcgccagaccgacttcggtatgtatgattactttacaaggcagtacggagacgagtcaactctcgcgttccagcaggctcggtataacttcatccggtctatggccgcatacagcttgctgctgttcttactgcagattaaggacagacacaatggaaacattatgctcgacaaaaaagggcatataatacacatagacttcgggttcatgtttgaatcttccccagggggcaatctgggctgggagcccgacatcaagctaactgatgagatggtcatgattatgggtggtaagatggaggccacaccctttaaatggttcatggaaatgtgtgtgagggggtacttggcagttaggccttacatggacgccgttgtgtcccttgtgacactcatgttggacaccggcttgccctgtttcaggggtcagactatcaagctattgaagcatcggttcagtcctaacatgactgaacgtgaggccgctaattttataatgaaagtgatacaatcatgtttcctgagcaaccggagcaggacctacgacatgatccagtattatcagaacgatataccttactag

SEQ ID NO: 230769 - DNA, 6135 bp, Artificial Sequence
  derived and/or modified sequence
atgtgccccgtggacttccacggcatcttccagctggacgagcggagaagagatgctgttatagctctgggaatattcttaattgaatccgacctgcagcacaaggattgcgtggttccctatctgttgaggctgcttaaaggcttgcctaaagtctactgggtcgaagaatccactgcccgtaaggggcggggtgccttgcctgtggcagagtcgttcagcttctgtctggtaaccctgctcagtgacgtggcttaccgggatccttcactccgcgatgaaatcctggaagtactgctgcaggtgctccatgtgcttcttggcatgtgccaggcactagagattcaggataaagaatacctctgtaaatatgccatcccatgtttgattgggatcagtagggcatttggtcgatacagtaatatggaggagagcctgctctctaaactgttcccgaaaataccaccccactccctccgcgtcctggaagaattggaaggtgtgcgcagacggtcctttaatgactttagatccatcctgcccagcaacctccttacggtctgccaggagggaacgcttaagaggaagacctctagcgtttccagtatttcccaggtgtctcccgaacgcggcatgcccccaccatctagccctgggggcagcgcctttcactattttgaagcttcatgcttgcccgacggcaccgccctggagccagaatattacttctctaccatcagcagctctttctctgtgagccccctcttcaatggtgtgacatataaggaattcaacatacccctcgaaatgctaagagagcttctgaacctggtgaagaaaattgttgaagaagctgtgctgaagagcctggatgcgattgtcgctagcgttatggaagccaatcctagcgccgacctttattatacaagcttctcagacccgctgtatctcacaatgtttaagatgctgagggacactttatattacatgaaggatttacctacatcattcgtcaaagagatacacgacttcgttttggaacagttcaacaccagtcagggagaactccaaaaaattttacacgatgctgatcgtattcataacgagctgtccccactgaaactcagatgccaagctaacgcagcctgcgtcgacctgatggtgtgggccgtcaaggatgaacagggggctgaaaatctatgcattaagctgtcagaaaaattgcagagcaaaaccagcagcaaggtaattattgcgcatctacccctgctgatctgctgcctgcaggggttaggccgcctttgcgaacgattccccgtggtcgtgcatagcgtgaccccaagcctgagggatttcttggtgatcccttcccctgtgttagtcaagttatacaaataccacagccagtatcacactgttgccgggaacgatataaaaatctccgtcacaaacgaacactccgaatcaacactcaatgtcatgtcaggtaagaaatcccagccttcgatgtacgagcagctgcgagacatagccatcgataatatttgccggtgcctcaaggccggacttaccgttgatccagttattgtggaggccttcctggcctccctgagcaacaggctgtacatatctcaggagtccgataaagatgcgcacttgattcctgaccataccatccgtgccttaggtcatatagctgtggccctcagagatacaccgaaagtgatggaacctattctccagatactgcagcagaagttttgccaaccaccttctccacttgacgtccttatcattgatcaattagggtgcctcgtgatcaccggtaaccaatacatctaccaagaagtctggaatctatttcagcagatttctgtgaaagcttcctccgttgtgtatagcgctaccaaggactacaaggaccacgggtatcgccattgcagtctagccgtgattaatgctctggccaatatagccgctaatattcaggatgagcacctagtggatgaacttttaatgaaccttctggagcttttcgttcaactcggcctggaaggaaaacgcgcctcagagcgcgcatcggaaaaaggccctgccctcaaggcaagcagctctgccgggaatctgggagtgctgatcccagtgatcgccgttctgacgcgtcgcctgccccccatcaaggaagcgaagccacgccttcaaaagctcttccgtgatttttggctgtatagcgtgttaatgggcttcgcagtggaaggctccgggctatggccagaagagtggtacgagggcgtctgcgaaatcgcaactaagtcacctttactgactttccccagcaaagaacccttgaggagtgtcctgcagtacaactctgctatgaaaaatgacacggtgacaccggcagaactgagcgaactaaggagtactatcattaatctgctggaccccccgcccgaggttagtgcgttgataaacaagttagattttgcaatgagcacttacttgctcagtgtttatcgtctggagtatatgcgagttctaaggtcaacagatcctgacaggttccaagtgatgttttgttatttcgaagataaggcaatccagaaggacaaatccggcatgatgcagtgtgtaatcgcagtcgccgacaaagtgttcgatgcgttcctcaacatgatggcagataaggccaaaaccaaggagaatgaggaagaattagagcgtcacgcccagttcctgctcgtcaactttaatcacatccacaaacggatcaggagggtggcggacaaatacttgagcggcctggtggataaatttccacacctcctctggtctggtacagtgctgaaaaccatgctggatatcctgcaaaccctgtcactttctttatccgccgacatacataaagatcagccgtactatgacatccccgacgctccctataggatcacggtccctgatacatatgaggctagagaaagcattgtcaaggatttcgcggctcggtgtgggatgattttgcaggaagccatgaaatgggcaccaaccgttacaaagtcacacctgcaagagtaccttaataagcatcagaattgggttagcggtctctcccaacacactgggcttgctatggctactgagtctattcttcattttgccggttataacaaacagaacactacactgggtgctacacagctgtcagagcgtcccgcctgtgtgaagaaggattattctaacttcatggcctcgctcaacctgcgcaatcgctatgccggagaggtgtatggtatgatccgtttttcaggtaccaccggccagatgtctgacctcaataaaatgatggtccaggacctgcacagcgcgctggatcgcagccacccgcagcactacacccaggccatgtttaagttgaccgcaatgctaataagttcaaaagattgcgacccacagttgttacatcacctttgttggggtcctctgaggatgttcaatgagcacggcatggagaccgctctcgcctgctgggagtggctgctggctgggaaggacggggtcgaagttcccttcatgcgggagatggcgggagcttggcacatgacagtggagcaaaaattcggtctattctcagccgagattaaggaggcagacccattggcagcgagtgaagcctcccaacctaagccttgcccacccgaagtgacaccccactacatctggatagatttcctggtccagcggtttgagattgctaagtactgctccagtgatcaagtcgagattttcagcagccttctgcagcgctcaatgtccctcaatatcggcggagctaaggggagtatgaatagacatgttgccgccattggtcctcggtttaaattattgaccctgggtcttagcctgctgcacgctgatgtcgtgcccaacgctaccatccgaaacgttctgagagaaaaaatttactcaaccgcgttcgattacttctcttgccctccaaagtttccaactcagggtgaaaagcgtctccgcgaagacatctccataatgatcaaattttggaccgctatgttttccgacaaaaagtacctgaccgcctcacagctggtcccgcctgataaccaagatacacggtccaaccttgacatcaccgtcggctcgaggcagcaggcaacccagggttggattaacacctacccattgagcagcgggatgagcacaataagcaagaaatctggcatgtcaaagaaaactaatcggggttcccagctgcataagtattacatgaagcgacgcactctgctgctgagtctcctggccaccgaaatcgagcggttaattacgtggtacaatccgctgtcagctcccgaattagagctggaccaggcaggcgagaactcggtagccaattggcgcagtaaatacatcagcctctccgaaaaacagtggaaagataacgtcaacttggcatggtccatttccccatatcttgcagtgcagctgcccgcgagatttaaaaataccgaagcaatcggcaacgaagtgaccaggctggttcgactcgatcccggtgctgttagtgacgtgcctgaagccatcaagtttctagtgacgtggcacactattgatgctgatgctcctgaacttagccacgtcctgtgctgggcacccacggatccacctacagggctgtcgtatttcagctccatgtatcctcctcacccacttacagctcagtatggggtaaaggtgctgcggtctttccctcctgatgctatcctgttttatattccacagattgttcaggcactgagatacgacaaaatgggatacgtccgagagtacatcctgtgggccgcttctaaatcgcagctgctggcccaccagtttatctggaacatgaagacaaatatatatctagacgaggaaggacaccaaaaggatccagatatcggggacctgctggatcagctggtagaagagattactggcagcctttccgggccagctaaggacttttaccagagagagtttgattttttcaataagattacaaatgtctctgcaatcattaagccatacccaaaaggggacgagagaaagaaagcatgcctctcagcactgtccgaggtcaaggttcagcctggctgctatctaccatccaatcccgaggcaatcgtcctggatattgactataagtctgggacgcccatgcagagtgcggctaaggccccatacctggcgaagttcaaagtcaagcgttgcggtgtgtcggagctggagaaggaaggactcagatgccgctctgacagcgaggatgagtgctccactcaggaggccgacggtcagaagattagctggcaggccgctattttcaaagtgggagatgattgccggcaggacatgctcgctctccagatcattgacctgttcaaaaatatattccagctcgttggcctggatctcttcgtctttccttacagggtagtcgcgacagctcctggttgtggtgtgatagaatgcattcccgattgcacgagtcgcgatcagcttgggcgacagacggactttggaatgtacgactattttactcgccaatacggtgacgagtcaacgctggcatttcagcaggcaagatataactttatccggagtatggccgcctatagtcttttactcttcttactccagattaaggatcgccataatgggaatatcatgcttgataagaaaggacacataatccacatcgacttcggctttatgtttgagagttccccgggcggcaatctcgggtgggagccggatataaagcttacagacgagatggtcatgatcatggggggaaagatggaggctactcctttcaagtggtttatggagatgtgcgtcaggggttatctcgcagtacgaccatatatggatgccgtcgtgtctttggtgaccctgatgttggatacgggactcccatgctttcgcggacagacaatcaagctgctgaagcatcgatttagcccaaacatgactgagcgggaagccgctaatttcatcatgaaagtgatacaaagctgcttcctttccaatcgctctcggacatatgatatgatacagtattatcaaaatgatatcccctattag

SEQ ID NO: 230770 - DNA, 2565 bp, Artificial Sequence
  derived and/or modified sequence
atgcgggagatggccggcgcctggcacatgaccgtggagcagaagttcgggctctttagcgccgaaataaaagaggcagaccctcttgccgcatcagaggcttcccagcctaagccctgccctccagaagtgaccccccattacatctggatcgactttttggttcaaagattcgagattgcaaagtactgttcctcagatcaagttgagatcttcagcagtctcttgcagcgttctatgagtctaaatataggtggtgctaagggatcaatgaacaggcacgtggccgcaatcggcccacgctttaagttactgacgctggggctgtccctgctgcacgccgatgtggtgcccaatgccacgatacgcaacgtgctgcgagagaagatctatagcaccgcttttgactacttttcctgccctcctaagtttccaacacaaggcgagaaaagactgagagaggatatcagcatcatgataaagttttggaccgccatgttctcagacaaaaaatatctgactgcctcacagctggtgccacctgacaaccaggatactcggtcaaatctggacataaccgtgggatccaggcagcaggctactcaggggtggattaatacatatcctcttagtagcggtatgagcaccatctctaagaagagcggaatgtccaaaaagacaaaccgcggatcccaactgcacaagtattacatgaagcgacgcacactgctcttgagcctgttagccacggagatcgagcgtctcattacatggtacaacccactgtccgcccctgaactggaactggatcaagccggcgaaaatagcgttgcaaactggcggagtaagtacatttcactgtccgagaagcagtggaaagacaatgtcaatctggcttggagtatttcaccgtatctagccgtgcaactccccgcccgcttcaagaacactgaggccattggcaacgaagtcacgagattggttagactggatcccggggcagtatcagacgttcctgaagccattaaatttctggtgacatggcatactatcgatgccgatgctcctgaattgtcacacgtgctctgttgggcacccaccgatccgcctacaggcctatcctatttctcgtccatgtacccccctcacccactcacggcacagtatggggtgaaggttctgagatcctttcccccggacgccatcctgttttatatcccgcaaatcgtgcaggcattacgatatgacaagatgggatatgtaagggaatatatcctttgggctgcgtctaaatctcagttgctggctcaccagtttatttggaacatgaaaaccaatatctatctagatgaggaaggtcatcagaaggaccctgacatcggggacctgctcgatcaattggtcgaagagataacgggcagtctgagcggtcccgcgaaagacttttatcagagggagttcgacttttttaacaaaatcacaaacgtgtccgcaatcattaagccttaccctaagggcgacgaaaggaaaaaggcttgcctttcggccctatctgaagtgaaggtgcagccaggctgctacttaccaagcaaccccgaggccattgtcctcgatattgattacaagtctggtacgccaatgcagagcgctgccaaagccccctacctggccaagttcaaggtgaaacggtgtggagtatcagaattggagaaagaggggctgagatgtagatccgatagtgaggacgagtgctccacccaggaggctgacggtcagaagatttcgtggcaggccgcaatattcaaggtgggcgatgactgtcgccaagatatgctggctctgcagataattgacttgtttaagaacatctttcagctggtgggattggacctgttcgtgtttccgtacagagtggtggccaccgcgcccggttgtggggtgattgaatgcattcctgattgtacttctcgcgaccagctggggcgacaaaccgactttggaatgtatgactatttcaccaggcaatatggggacgagtccacacttgcattccaacaagctaggtacaattttattcggtcaatggctgcctatagcttgcttctgtttcttctgcagatcaaagacagacacaacggaaacataatgctggataagaagggtcatattatccacattgacttcgggtttatgttcgaaagctcccccgggggcaacctcgggtgggagcccgacattaagctgacagatgagatggtgatgataatgggaggaaaaatggaagccactccctttaaatggttcatggaaatgtgtgtgaggggctacctggcggtccgcccatatatggacgctgtggtgtccctcgtcactctcatgctggataccggcctgccttgctttcgcggccagaccattaagctcctgaagcatcgcttcagtcctaatatgactgaaagggaagcagccaatttcattatgaaggtgatccagtcttgcttcttgagcaataggagccgaacctatgacatgatacagtactatcagaatgatatcccatattag

SEQ ID NO: 230771 - DNA, 264 bp, Artificial Sequence
  derived and/or modified sequence
atgtgccccgtggacttccacggcatcttccagctggacgagcggcgacgcgacgcggtgatcgcgctcgggatcttccttattgagagtgacctgcagcacaaggactgtgtggtgccatatctgctccgactgcttaagggtctgcctaaggtatactgggtcgaggagtcgactgccagaaaaggtcgcggcgcccttccagtagctgagtcattcagtttctgcctggttactttactgtccgatgtggcctaccgctag

SEQ ID NO: 230772 - DNA, 6720 bp, Artificial Sequence
  derived and/or modified sequence
gggcgctcgcgggccaggagcggggagccggcgggcagcgccgcggctcgtgaggtgatggcggcggccccggcccggggaggcggaggcggaggcggaggcggcggcggctgctccggctccggctccagcgcctcgcggggcttctatttcaacacggtcctgtcactggcccgctccctggcggtgcagagaccagcatccttggagaaggtccaaaagcttctttgcatgtgtccagtggatttccatgggatcttccagttagatgaaagacggagagatgcagtgattgcattgggcatttttctgattgaatctgatcttcagcacaaagattgtgtggttccttaccttcttcgacttctcaaaggtcttccaaaagtgtattgggtagaagaaagcacagctcggaaaggcagaggtgccctcccggttgcagagagcttcagcttctgcttggtaactctgctgtctgatgtggcctatagggatccttcacttagggatgagattttagaggtgcttttgcaggttttgcatgtcctcttggggatgtgccaggccttggagattcaagacaaagaatacctttgcaagtatgctatcccatgcctgataggaatctcgcgagcatttgggcgttacagcaacatggaagagtctctcctctcaaagctctttcccaaaatccctcctcattccctccgtgtcctggaagagcttgaaggtgttcgaaggcgttcctttaatgacttccgctccatcctccccagcaatctgctgactgtctgtcaggagggtaccctgaagaggaaaaccagcagtgtgtccagcatctctcaggtcagccctgaacgcggcatgccccctcccagttcccctggaggatctgcctttcactactttgaagcctcctgcttgcccgatgggactgccctagagcctgagtactacttttcaaccatcagctccagcttctcagtctctccccttttcaacggtgtcacatataaggagtttaacattccattggaaatgcttcgggaactcttaaacctggtgaagaagatcgttgaggaggctgttctcaaatctttggatgccattgtagccagtgtgatggaggccaaccccagtgctgatctctactacacttccttcagtgaccctctctacctgaccatgttcaagatgctgcgtgacactctgtactacatgaaggacctcccgacctcttttgtgaaggagatccatgattttgtgctggagcagttcaacacgagccagggggagctccagaagattctacatgacgcagaccggatccacaatgagctgagccccctcaaactgcgctgtcaggcgaatgctgcctgtgtggacctcatggtgtgggctgtgaaggacgagcagggtgcagaaaacctttgcatcaagctatctgagaagctgcagtccaagacgtccagcaaagtcattattgctcacttgcccctgctgatctgctgtctgcagggtttgggccgcctgtgcgagaggttcccggtggtggtgcactctgtgacaccgtccttgcgagacttcctggtcatcccgtccccagttctggtgaagctctacaagtaccacagtcagtaccacacagttgctggcaatgatataaaaatcagtgtgaccaatgagcattccgagtcaaccctgaacgtcatgtcgggtaagaagagccagccctccatgtacgagcagctccgagacatcgctattgacaacatctgcaggtgcctgaaggctggattgacggtggacccagtgattgtggaggcgttcttggccagcctgtccaaccggctctacatctctcaggagagcgacaaggacgctcacttgattcccgaccacacaatccgagccttgggacacattgcggtggccttgagggacaccccgaaggtcatggagcccattctgcagatcctacagcagaaattctgccagccaccctcccccctcgatgtgctgattattgaccagctgggctgcctggttatcaccggaaatcaatacatctatcaggaagtgtggaacctcttccagcagatcagtgtgaaggccagctccgttgtatactcagccaccaaagattacaaggaccacggctataggcattgctccctggcagtgattaatgccctggccaacatcgcggccaacatccaagacgagcacctggtggatgagctgctcatgaacctgttggagttgtttgtgcagctggggctggaggggaagcgagccagcgagagggcaagcgagaagggccctgccctaaaggcttctagcagtgcagggaacttgggagtactcattcctgtaatagctgtgctcacccgacgactgccacccatcaaagaagctaagcctcggttacagaagctcttccgagacttctggctgtattccgttctgatgggattcgctgtggagggctcaggactctggccagaagaatggtacgagggggtctgtgaaatagccactaagtcccccttgctcacctttcccagcaaggagccactgcggtccgtcctccagtataactcagccatgaagaatgacacggtcacccccgctgagctgagtgagctccgcagcactatcatcaacctgctggacccccctcccgaggtgtccgcactcatcaacaagctggacttcgccatgtccacctacctcctctctgtgtaccggctggagtacatgagggtactgcgttcaacagatcctgatcgcttccaggtaatgttctgctactttgaggataaagctattcagaaagacaaatctgggatgatgcagtgtgtgattgcagtcgcggacaaagtattcgatgccttcctgaacatgatggcggataaagccaagaccaaggagaacgaggaggagctggagcggcacgctcagttcctgttggtgaacttcaaccacatccacaagaggataaggagggtggcagacaagtatctatctggtctggtggataagtttccccacttgctctggagcgggactgtgctgaagaccatgctggacatcctgcagaccctgtcactgtcactgagcgctgatattcacaaggatcagccttactatgacatccccgacgccccctaccggatcacggttcctgacacgtacgaagcccgtgagagcattgtgaaggacttcgctgcacgctgtgggatgatcctccaggaggccatgaagtgggcacctaccgtcaccaagtcccacctgcaggaatatctgaacaaacatcagaactgggtatcgggactgtcccagcacacggggctggccatggccactgagagcatccttcactttgctggctacaacaagcagaacacaactcttggggcaactcagctgagcgagcgcccggcctgtgtgaagaaagactactccaacttcatggcatccctgaatctgcgcaaccgctacgcgggcgaggtgtatggaatgattcggttctcaggcaccacaggccagatgtctgacctgaacaaaatgatggtccaggatctacattcagctttagaccgcagtcatcctcagcactacacgcaggccatgttcaagctgaccgcaatgctcattagcagtaaagattgtgacccgcagctccttcatcatctgtgctggggtcccctccggatgttcaatgagcatggcatggagacggccctggcctgctgggagtggctgctggctggcaaggatggagtggaagtgccgttcatgcgggagatggcaggggcctggcacatgacggtggagcagaaatttggcctgttttctgctgagataaaggaagcagaccccctggctgcctcggaagcaagtcaacccaaaccctgtccccccgaagtgaccccccactacatctggatcgacttcctggtgcagcggtttgagatcgccaagtactgcagctctgaccaagtggagatcttctccagcctgctgcagcgctccatgtccctgaacatcggcggggccaaggggagcatgaaccggcacgtggcggccatcgggccccgcttcaagctgctgaccctggggctgtccctcctgcatgccgatgtggttccaaatgcaaccatccgcaatgtgcttcgcgagaagatctactccactgcctttgactacttcagctgtcccccaaagttccctactcaaggagagaagcggctgcgtgaagacataagcatcatgattaaattttggaccgccatgttctcagataagaagtacctgaccgccagccagcttgttcccccagataatcaggacacccggagcaacctggacataactgtcggctctcggcaacaagccacccaaggctggatcaacacataccccctgtccagcggcatgtccaccatctccaagaaatcaggcatgtctaagaaaaccaaccggggctcccagctgcacaaatactacatgaagcgcaggacgctgctgctgtccctgctggccactgagatcgagcgtctcatcacatggtacaacccgctgtcagccccggaactggaactagaccaggccggagagaacagcgtggccaactggagatctaagtacatcagcctgagtgagaagcagtggaaggacaacgtgaacctcgcctggagcatctctccctacctagccgtgcagctgcctgccaggtttaagaacacagaagccattgggaacgaagtgacccgtctcgttcggttggacccgggagccgttagtgatgtgcctgaagcaatcaagttcctggtcacctggcacaccatcgacgccgatgctccagagctcagccatgtgctgtgctgggcgcccacggacccacccacaggcctctcctacttctccagcatgtacccgccgcaccctctcacggcgcagtacggggtgaaagtcctgcggtccttccctccggacgccatcctcttctacatcccccagattgtgcaggccctcaggtacgacaagatgggctatgtgcgggagtatattctgtgggcagcgtctaaatcccagcttctggcacaccagttcatctggaacatgaagactaacatttatctagatgaagagggccaccagaaagaccctgacatcggcgacctcctggatcagttggtagaggagatcacaggctccttgtccggcccagcgaaggacttttaccagcgggagtttgatttctttaacaagatcaccaacgtgtcggctatcatcaagccctaccctaaaggcgacgagagaaagaaggcttgtctgtcggccctgtctgaagtgaaggtgcagccgggctgctacctgcccagcaaccctgaggccattgtgctggacatcgactacaagtctgggaccccgatgcagagtgctgcaaaagccccatatctggccaagttcaaggtgaagcgatgtggagttagtgaacttgaaaaagaaggtctgcggtgccgctcagactccgaggatgagtgcagcacgcaggaggccgacggccagaagatctcctggcaggcagccatcttcaaggtgggagacgactgccggcaggacatgctggccctgcagatcatcgacctcttcaagaacatcttccagctggtcggcctggacctctttgtttttccctaccgcgtggtggccactgcccctgggtgcggggtgatcgagtgcatccccgactgcacctcccgggaccagctgggccgccagacagacttcggcatgtacgactacttcacacgccagtacggggatgagtccactctggccttccagcaggcccgctacaacttcatccgaagcatggccgcctacagcctcctgctgttcctgctgcagatcaaggacagacacaacggcaacattatgctggacaagaagggtcatatcatccacatcgactttggcttcatgtttgaaagctcgccgggcggcaatctcggctgggaacccgacatcaagctgacggatgagatggtgatgatcatggggggcaagatggaggccacacccttcaagtggttcatggagatgtgtgtccgaggctacctggctgtgcggccctacatggacgcggtcgtctccctggtcactctcatgttggacacgggcctgccctgttttcgcggccagacaatcaagctcttgaagcacaggtttagccccaacatgactgagcgcgaggctgcaaatttcatcatgaaggtcatccagagctgcttcctcagcaacaggagccggacctacgacatgatccagtactatcagaatgacatcccctactgaggaggggaccttcgagggcctctgccccatgtgccctcaaagctgtcccacaatcatggagccctgcgacctccctgccctgccgccacatgcagtggaggagaggcctgtggcccaaagaacctggtagcgcctcctggggcagcacgtgggtggcgcagccttggtaacgccatggactgcagcgacaatcaatggatggtgctgtctatgcacaggtgtgagtcctctgtttgcactggacatattccctacctgtcttatttcataggtacatgaagtattgtgtataaaaaaagagataagatttaaccaacatcaacaaaataaaaacccaaaatagtgctgtgttgg

SEQ ID NO: 230773 - DNA, 6752 bp, Artificial Sequence
  derived and/or modified sequence
cggatgcacctacgcctgcgccctgaggtcgggcgctcgcgggccaggagcggggagccggcgggcagcgccgcggctcgtgaggtgatggcggcggccccggcccggggaggcggaggcggaggcggaggcggcggcggctgctccggctccggctccagcgcctcgcggggcttctatttcaacacggtcctgtcactggcccgctccctggcggtgcagagaccagcatccttggagaaggtccaaaagcttctttgcatgtgtccagtggatttccatgggatcttccagttagatgaaagacggagagatgcagtgattgcattgggcatttttctgattgaatctgatcttcagcacaaagattgtgtggttccttaccttcttcgacttctcaaaggtcttccaaaagtgtattgggtagaagaaagcacagctcggaaaggcagaggtgccctcccggttgcagagagcttcagcttctgcttggtaactctgctgtctgatgtggcctatagggatccttcacttagggatgagattttagaggtgcttttgcaggttttgcatgtcctcttggggatgtgccaggccttggagattcaagacaaagaatacctttgcaagtatgctatcccatgcctgataggaatctcgcgagcatttgggcgttacagcaacatggaagagtctctcctctcaaagctctttcccaaaatccctcctcattccctccgtgtcctggaagagcttgaaggtgttcgaaggcgttcctttaatgacttccgctccatcctccccagcaatctgctgactgtctgtcaggagggtaccctgaagaggaaaaccagcagtgtgtccagcatctctcaggtcagccctgaacgcggcatgccccctcccagttcccctggaggatctgcctttcactactttgaagcctcctgcttgcccgatgggactgccctagagcctgagtactacttttcaaccatcagctccagcttctcagtctctccccttttcaacggtgtcacatataaggagtttaacattccattggaaatgcttcgggaactcttaaacctggtgaagaagatcgttgaggaggctgttctcaaatctttggatgccattgtagccagtgtgatggaggccaaccccagtgctgatctctactacacttccttcagtgaccctctctacctgaccatgttcaagatgctgcgtgacactctgtactacatgaaggacctcccgacctcttttgtgaaggagatccatgattttgtgctggagcagttcaacacgagccagggggagctccagaagattctacatgacgcagaccggatccacaatgagctgagccccctcaaactgcgctgtcaggcgaatgctgcctgtgtggacctcatggtgtgggctgtgaaggacgagcagggtgcagaaaacctttgcatcaagctatctgagaagctgcagtccaagacgtccagcaaagtcattattgctcacttgcccctgctgatctgctgtctgcagggtttgggccgcctgtgcgagaggttcccggtggtggtgcactctgtgacaccgtccttgcgagacttcctggtcatcccgtccccagttctggtgaagctctacaagtaccacagtcagtaccacacagttgctggcaatgatataaaaatcagtgtgaccaatgagcattccgagtcaaccctgaacgtcatgtcgggtaagaagagccagccctccatgtacgagcagctccgagacatcgctattgacaacatctgcaggtgcctgaaggctggattgacggtggacccagtgattgtggaggcgttcttggccagcctgtccaaccggctctacatctctcaggagagcgacaaggacgctcacttgattcccgaccacacaatccgagccttgggacacattgcggtggccttgagggacaccccgaaggtcatggagcccattctgcagatcctacagcagaaattctgccagccaccctcccccctcgatgtgctgattattgaccagctgggctgcctggttatcaccggaaatcaatacatctatcaggaagtgtggaacctcttccagcagatcagtgtgaaggccagctccgttgtatactcagccaccaaagattacaaggaccacggctataggcattgctccctggcagtgattaatgccctggccaacatcgcggccaacatccaagacgagcacctggtggatgagctgctcatgaacctgttggagttgtttgtgcagctggggctggaggggaagcgagccagcgagagggcaagcgagaagggccctgccctaaaggcttctagcagtgcagggaacttgggagtactcattcctgtaatagctgtgctcacccgacgactgccacccatcaaagaagctaagcctcggttacagaagctcttccgagacttctggctgtattccgttctgatgggattcgctgtggagggctcaggactctggccagaagaatggtacgagggggtctgtgaaatagccactaagtcccccttgctcacctttcccagcaaggagccactgcggtccgtcctccagtataactcagccatgaagaatgacacggtcacccccgctgagctgagtgagctccgcagcactatcatcaacctgctggacccccctcccgaggtgtccgcactcatcaacaagctggacttcgccatgtccacctacctcctctctgtgtaccggctggagtacatgagggtactgcgttcaacagatcctgatcgcttccaggtaatgttctgctactttgaggataaagctattcagaaagacaaatctgggatgatgcagtgtgtgattgcagtcgcggacaaagtattcgatgccttcctgaacatgatggcggataaagccaagaccaaggagaacgaggaggagctggagcggcacgctcagttcctgttggtgaacttcaaccacatccacaagaggataaggagggtggcagacaagtatctatctggtctggtggataagtttccccacttgctctggagcgggactgtgctgaagaccatgctggacatcctgcagaccctgtcactgtcactgagcgctgatattcacaaggatcagccttactatgacatccccgacgccccctaccggatcacggttcctgacacgtacgaagcccgtgagagcattgtgaaggacttcgctgcacgctgtgggatgatcctccaggaggccatgaagtgggcacctaccgtcaccaagtcccacctgcaggaatatctgaacaaacatcagaactgggtatcgggactgtcccagcacacggggctggccatggccactgagagcatccttcactttgctggctacaacaagcagaacacaactcttggggcaactcagctgagcgagcgcccggcctgtgtgaagaaagactactccaacttcatggcatccctgaatctgcgcaaccgctacgcgggcgaggtgtatggaatgattcggttctcaggcaccacaggccagatgtctgacctgaacaaaatgatggtccaggatctacattcagctttagaccgcagtcatcctcagcactacacgcaggccatgttcaagctgaccgcaatgctcattagcagtaaagattgtgacccgcagctccttcatcatctgtgctggggtcccctccggatgttcaatgagcatggcatggagacggccctggcctgctgggagtggctgctggctggcaaggatggagtggaagtgccgttcatgcgggagatggcaggggcctggcacatgacggtggagcagaaatttggcctgttttctgctgagataaaggaagcagaccccctggctgcctcggaagcaagtcaacccaaaccctgtccccccgaagtgaccccccactacatctggatcgacttcctggtgcagcggtttgagatcgccaagtactgcagctctgaccaagtggagatcttctccagcctgctgcagcgctccatgtccctgaacatcggcggggccaaggggagcatgaaccggcacgtggcggccatcgggccccgcttcaagctgctgaccctggggctgtccctcctgcatgccgatgtggttccaaatgcaaccatccgcaatgtgcttcgcgagaagatctactccactgcctttgactacttcagctgtcccccaaagttccctactcaaggagagaagcggctgcgtgaagacataagcatcatgattaaattttggaccgccatgttctcagataagaagtacctgaccgccagccagcttgttcccccagataatcaggacacccggagcaacctggacataactgtcggctctcggcaacaagccacccaaggctggatcaacacataccccctgtccagcggcatgtccaccatctccaagaaatcaggcatgtctaagaaaaccaaccggggctcccagctgcacaaatactacatgaagcgcaggacgctgctgctgtccctgctggccactgagatcgagcgtctcatcacatggtacaacccgctgtcagccccggaactggaactagaccaggccggagagaacagcgtggccaactggagatctaagtacatcagcctgagtgagaagcagtggaaggacaacgtgaacctcgcctggagcatctctccctacctagccgtgcagctgcctgccaggtttaagaacacagaagccattgggaacgaagtgacccgtctcgttcggttggacccgggagccgttagtgatgtgcctgaagcaatcaagttcctggtcacctggcacaccatcgacgccgatgctccagagctcagccatgtgctgtgctgggcgcccacggacccacccacaggcctctcctacttctccagcatgtacccgccgcaccctctcacggcgcagtacggggtgaaagtcctgcggtccttccctccggacgccatcctcttctacatcccccagattgtgcaggccctcaggtacgacaagatgggctatgtgcgggagtatattctgtgggcagcgtctaaatcccagcttctggcacaccagttcatctggaacatgaagactaacatttatctagatgaagagggccaccagaaagaccctgacatcggcgacctcctggatcagttggtagaggagatcacaggctccttgtccggcccagcgaaggacttttaccagcgggagtttgatttctttaacaagatcaccaacgtgtcggctatcatcaagccctaccctaaaggcgacgagagaaagaaggcttgtctgtcggccctgtctgaagtgaaggtgcagccgggctgctacctgcccagcaaccctgaggccattgtgctggacatcgactacaagtctgggaccccgatgcagagtgctgcaaaagccccatatctggccaagttcaaggtgaagcgatgtggagttagtgaacttgaaaaagaaggtctgcggtgccgctcagactccgaggatgagtgcagcacgcaggaggccgacggccagaagatctcctggcaggcagccatcttcaaggtgggagacgactgccggcaggacatgctggccctgcagatcatcgacctcttcaagaacatcttccagctggtcggcctggacctctttgtttttccctaccgcgtggtggccactgcccctgggtgcggggtgatcgagtgcatccccgactgcacctcccgggaccagctgggccgccagacagacttcggcatgtacgactacttcacacgccagtacggggatgagtccactctggccttccagcaggcccgctacaacttcatccgaagcatggccgcctacagcctcctgctgttcctgctgcagatcaaggacagacacaacggcaacattatgctggacaagaagggtcatatcatccacatcgactttggcttcatgtttgaaagctcgccgggcggcaatctcggctgggaacccgacatcaagctgacggatgagatggtgatgatcatggggggcaagatggaggccacacccttcaagtggttcatggagatgtgtgtccgaggctacctggctgtgcggccctacatggacgcggtcgtctccctggtcactctcatgttggacacgggcctgccctgttttcgcggccagacaatcaagctcttgaagcacaggtttagccccaacatgactgagcgcgaggctgcaaatttcatcatgaaggtcatccagagctgcttcctcagcaacaggagccggacctacgacatgatccagtactatcagaatgacatcccctactgaggaggggaccttcgagggcctctgccccatgtgccctcaaagctgtcccacaatcatggagccctgcgacctccctgccctgccgccacatgcagtggaggagaggcctgtggcccaaagaacctggtagcgcctcctggggcagcacgtgggtggcgcagccttggtaacgccatggactgcagcgacaatcaatggatggtgctgtctatgcacaggtgtgagtcctctgtttgcactggacatattccctacctgtcttatttcataggtacatgaagtattgtgtataaaaaaagagataagatttaaccaacatcaacaaaataaaaacccaaaatagtgctgtgttggaa

SEQ ID NO: 230774 - DNA, 3036 bp, Artificial Sequence
  derived and/or modified sequence
tggtttctaaatcttattcagtgagcacgtgttcctttttttaattagagaaaacttgacagtagcccctttttgtgtttcacagaggagctaacattccttctgtacctgtagttcatgcgggagatggcaggggcctggcacatgacggtggagcagaaatttggcctgttttctgctgagataaaggaagcagaccccctggctgcctcggaagcaagtcaacccaaaccctgtccccccgaagtgaccccccactacatctggatcgacttcctggtgcagcggtttgagatcgccaagtactgcagctctgaccaagtggagatcttctccagcctgctgcagcgctccatgtccctgaacatcggcggggccaaggggagcatgaaccggcacgtggcggccatcgggccccgcttcaagctgctgaccctggggctgtccctcctgcatgccgatgtggttccaaatgcaaccatccgcaatgtgcttcgcgagaagatctactccactgcctttgactacttcagctgtcccccaaagttccctactcaaggagagaagcggctgcgtgaagacataagcatcatgattaaattttggaccgccatgttctcagataagaagtacctgaccgccagccagcttgttcccccagataatcaggacacccggagcaacctggacataactgtcggctctcggcaacaagccacccaaggctggatcaacacataccccctgtccagcggcatgtccaccatctccaagaaatcaggcatgtctaagaaaaccaaccggggctcccagctgcacaaatactacatgaagcgcaggacgctgctgctgtccctgctggccactgagatcgagcgtctcatcacatggtacaacccgctgtcagccccggaactggaactagaccaggccggagagaacagcgtggccaactggagatctaagtacatcagcctgagtgagaagcagtggaaggacaacgtgaacctcgcctggagcatctctccctacctagccgtgcagctgcctgccaggtttaagaacacagaagccattgggaacgaagtgacccgtctcgttcggttggacccgggagccgttagtgatgtgcctgaagcaatcaagttcctggtcacctggcacaccatcgacgccgatgctccagagctcagccatgtgctgtgctgggcgcccacggacccacccacaggcctctcctacttctccagcatgtacccgccgcaccctctcacggcgcagtacggggtgaaagtcctgcggtccttccctccggacgccatcctcttctacatcccccagattgtgcaggccctcaggtacgacaagatgggctatgtgcgggagtatattctgtgggcagcgtctaaatcccagcttctggcacaccagttcatctggaacatgaagactaacatttatctagatgaagagggccaccagaaagaccctgacatcggcgacctcctggatcagttggtagaggagatcacaggctccttgtccggcccagcgaaggacttttaccagcgggagtttgatttctttaacaagatcaccaacgtgtcggctatcatcaagccctaccctaaaggcgacgagagaaagaaggcttgtctgtcggccctgtctgaagtgaaggtgcagccgggctgctacctgcccagcaaccctgaggccattgtgctggacatcgactacaagtctgggaccccgatgcagagtgctgcaaaagccccatatctggccaagttcaaggtgaagcgatgtggagttagtgaacttgaaaaagaaggtctgcggtgccgctcagactccgaggatgagtgcagcacgcaggaggccgacggccagaagatctcctggcaggcagccatcttcaaggtgggagacgactgccggcaggacatgctggccctgcagatcatcgacctcttcaagaacatcttccagctggtcggcctggacctctttgtttttccctaccgcgtggtggccactgcccctgggtgcggggtgatcgagtgcatccccgactgcacctcccgggaccagctgggccgccagacagacttcggcatgtacgactacttcacacgccagtacggggatgagtccactctggccttccagcaggcccgctacaacttcatccgaagcatggccgcctacagcctcctgctgttcctgctgcagatcaaggacagacacaacggcaacattatgctggacaagaagggtcatatcatccacatcgactttggcttcatgtttgaaagctcgccgggcggcaatctcggctgggaacccgacatcaagctgacggatgagatggtgatgatcatggggggcaagatggaggccacacccttcaagtggttcatggagatgtgtgtccgaggctacctggctgtgcggccctacatggacgcggtcgtctccctggtcactctcatgttggacacgggcctgccctgttttcgcggccagacaatcaagctcttgaagcacaggtttagccccaacatgactgagcgcgaggctgcaaatttcatcatgaaggtcatccagagctgcttcctcagcaacaggagccggacctacgacatgatccagtactatcagaatgacatcccctactgaggaggggaccttcgagggcctctgccccatgtgccctcaaagctgtcccacaatcatggagccctgcgacctccctgccctgccgccacatgcagtggaggagaggcctgtggcccaaagaacctggtagcgcctcctggggcagcacgtgggtggcgcagccttggtaacgccatggactgcagcgacaatcaatggatggtgctgtctatgcacaggtgtgagtcctctgtttgcactggacatattccctacctgtcttatttcataggtacatgaagtattgtgtataaaaaaagagataagatttaaccaacatcaacaaaataaaaacccaaaatagtgctgtgttgg

SEQ ID NO: 230775 - DNA, 6134 bp, Artificial Sequence
  derived and/or modified sequence
atgtgtcctgtggactttcacgggattttccaactggacgagcgtagaagagacgcagtgatagctctagggatcttcctgatcgaaagcgacctgcaacataaggactgtgtcgtaccctacctattgcggctattgaagggattaccgaaagtttattgggtggaggagtccactgctcgcaaaggtcgcggagcactcccagtcgctgagagctttagcttctgtttggtgacactactgtctgatgtcgcctacagggatccgtccctccgtgacgaaattctcgaagttctcctgcaagtcctccacgtgctgttaggaatgtgtcaagctctggagatacaagataaagagtacctgtgcaagtatgctataccatgcctgatagggatcagccgagcttttggcaggtacagcaacatggaggagtcacttctatcaaagctcttccctaaaatacccccacactccctccgagtgcttgaagagctggagggcgtgcggaggcgctccttcaatgacttcaggagcatcctcccttccaaccttttgaccgtttgccaggaggggaccctgaagcgcaaaacgtcatctgtttcctctatatcccaggttagccccgagcgtgggatgcctcctccaagctctcctgggggatctgccttccactactttgaggcttcatgcctgcccgatggcactgctcttgagcccgaatactattttagcaccatttcaagctctttctctgtaagtcctctctttaacggtgtaacttacaaggaattcaacatcccactcgaaatgctgcgcgagctcttaaacctcgtgaaaaagatcgtcgaagaagcagtcctgaaatccctggacgccattgtggccagtgtgatggaggctaatcccagcgccgatctgtactatacctctttttccgaccccctgtatctgactatgttcaaaatgctgcgtgacacactgtactacatgaaggatttacctaccagcttcgtgaaagagattcatgactttgttttagaacagttcaatacaagtcagggcgagcttcagaagatactgcacgacgctgatagaatccataacgaattatctccactaaaactgagatgccaggcaaatgcagcttgcgtggatttgatggtttgggctgtgaaggatgaacagggcgctgagaatctctgtatcaagctctctgagaagttacaatcaaagaccagctccaaggttattattgcgcatctgcctctgcttatctgctgtctccagggtctgggcagactttgtgagcgcttccctgtcgttgtacacagcgttacaccgagtcttcgtgattttctggtcattccttccccagtgctcgttaaactgtataagtaccatagccaatatcacaccgtggctggcaacgatattaaaatttccgttacaaatgagcactcagagtccaccctgaatgtcatgtccgggaagaagtcacagccatccatgtacgaacagctcagggatatcgccatcgacaacatctgccgctgtcttaaggccggactgaccgtagatccagtcatcgttgaagcgtttctcgcaagcctctcaaaccgtctctacatctcccaagagtctgacaaggatgcccacctgatacccgatcacacaattcgcgctctgggccatatcgctgtggccctgagagatacccccaaggtcatggaaccgatcctgcagattctacaacagaagttctgccagccacctagtcctctggacgtcctgatcatcgaccagctcggttgtctggtcatcacaggaaaccagtatatataccaagaagtctggaatctgttccagcagatttcagttaaggcaagcagcgtggtgtattcggccacgaaggactacaaagaccatgggtaccgccattgtagcctcgctgtaatcaacgcacttgctaacattgcagccaatatacaggacgagcacctggtagatgagcttctaatgaatctccttgagctattcgtacagctggggctggaaggaaaaagggccagcgagcgggcttctgagaaggggcctgctttaaaagcgagctcctccgcgggaaaccttggagtattgatacctgtaattgctgttctcacccgccgactgccacccatcaaggaagccaagccacgcctgcagaagttgtttagggatttctggctgtactccgtcctcatggggttcgctgtggagggctcaggtctgtggcccgaggaatggtatgagggtgtgtgcgagatcgcaacgaaaagccctcttctgacctttccgtctaaggaaccactgaggtctgttctgcaatataactcagcgatgaaaaacgacacagtaactcctgcagaactgagcgagctgagaagtaccatcattaacctgcttgaccctccccctgaagttagcgctctgattaataaactagattttgctatgagcacctatttactaagcgtgtatagattggagtacatgagggtgcttcgttctaccgaccccgaccgctttcaagtaatgttttgttatttcgaggacaaagctatccagaaggataagtccggcatgatgcaatgcgttatcgctgttgccgacaaggtttttgatgcattcctaaacatgatggctgacaaggctaaaacaaaagagaacgaggaggaattggaacgtcacgcccaatttctccttgtgaatttcaatcacatccataagcggatccgaagggtcgcggataagtacctatctggactcgtcgataagtttccacacttgctctggagtgggaccgtgctgaaaacaatgctggatattctgcagaccctttctttgtcgctctccgccgacattcataaggaccagccatattacgacataccagacgcgccataccgaataaccgttcccgacacatatgaggctcgagagagcatcgtcaaggatttcgccgctaggtgcgggatgattctgcaggaagctatgaaatgggctccaaccgtaacaaagtctcatctacaggaatacctgaacaagcaccagaattgggtttctggccttagccagcacacagggctcgcaatggctacggagagtattttacacttcgccggatataataaacagaacactacgcttggcgcaactcagctctctgaacgaccagcatgtgtcaagaaagattattcaaacttcatggccagtttaaacctgagaaatagatacgcaggagaggtctacggtatgatcaggttctcgggcactacaggtcaaatgagcgacctgaataagatgatggtgcaggacctccattctgcccttgatcggtcccatccacagcactacacgcaagccatgtttaagctcacggcgatgctgatctcctctaaggattgtgacccacagcttctgcaccatttatgttggggcccactgcgcatgtttaacgagcacggaatggaaacagccctggcctgttgggaatggcttttggccggaaaagatggagtcgaggtccctttcatgcgggaaatggccggagcatggcatatgaccgtggagcaaaaatttggactgtttagcgctgagatcaaagaagccgatcccttggcagccagcgaggcatctcagccaaaaccctgtcccccagaagtcactccccactacatctggattgatttcttggtgcaacgttttgaaattgccaaatattgctcatcagatcaggttgagatcttctcaagcctcctgcagcggtcaatgagcctcaatataggcggagccaaggggtcaatgaataggcatgtcgccgcaatcgggcctcgtttcaagctcctaactttaggactgtccctgctccatgccgacgtggtacccaatgcaacgattaggaatgtcttaagggaaaagatttattctaccgcctttgactacttttcatgcccccctaagtttccgactcagggggaaaaacgtctgcgggaggacatttcgattatgattaagttttggactgcgatgttctcagataaaaagtacctgacagcctcacagctggtgccaccagacaaccaagacacacgctcgaacctggacataacagtcggcagcaggcaacaggccacacaaggctggatcaacacatatcccctgagtagcggaatgtctacaatcagtaagaagtctggcatgtcaaaaaagaccaaccggggatcccagctccacaaatactacatgaaacggaggaccctgctgctctcactcctggcaaccgaaattgaacgcctcataacctggtacaaccctctgtctgccccagaattggaactggatcaagcgggagaaaattctgtggctaattggcgctccaagtacatatcactctcagaaaagcagtggaaggataatgttaacctcgcctggagcatttcaccctacctggctgtgcagcttcccgcaagatttaagaacacggaagccatcggcaatgaggtgactagactggttaggctagaccccggagctgtctctgatgttcctgaggccatcaaatttttagtgacctggcacacgattgatgccgatgccccagagctgtctcacgtgctttgttgggctccaactgatcctccaaccggcctgagttacttctcaagcatgtatccaccacatcctctcaccgctcagtatggggtgaaagttttgagatcctttccccctgacgccattctcttctatattcctcaaatagtccaggccctaaggtatgataagatggggtacgtgagggaatatatcctatgggccgcatcaaagagtcagctcttagcacaccagttcatctggaatatgaagaccaacatttacttggacgaagaaggccaccagaaagaccccgatattggggatctgctggatcagttagtggaggaaatcacagggtccctcagcggacctgccaaggacttttatcagcgggagttcgatttcttcaacaaaattacaaatgtgagcgccattatcaaaccttatcccaagggagacgaaagaaagaaggcgtgcctaagcgcactttccgaggtgaaagtgcagcccggttgctacctcccctcaaacccagaggctattgtcctggacattgattacaaatccggcaccccaatgcaaagtgcagcaaaagcgccatacctggctaaatttaaggtgaagagatgcggtgttagcgagctcgagaaggaaggactccgctgccgtagcgactctgaggatgaatgttccacccaggaggccgatggccagaagataagctggcaggcagcaatctttaaagtgggcgacgattgcaggcaggatatgctggccctgcagatcatagacctattcaagaacatttttcagcttgtgggcttggacttgtttgtctttccttaccgcgtggttgctacagctcccggatgtggcgtgatcgagtgcatccctgactgcacaagccgagaccagctgggtaggcagaccgacttcggaatgtatgactactttacccgtcaatacggagatgagagcacactggccttccagcaagcccgatacaatttcattcgcagcatggccgcttatagcctacttcttttcctcttgcagatcaaagacagacataacggaaatattatgctggacaaaaagggacatatcattcatatcgactttggatttatgttcgagagcagcccaggcggaaacctcgggtgggagccagacatcaagcttacggatgagatggtgatgattatgggcggaaagatggaggctacaccctttaaatggtttatggaaatgtgcgtgcgaggctatctcgcagtgaggccctatatggacgcggtcgtttctctcgtgacactcatgctggatacaggcttaccttgcttccgcggacagactatcaagctgctcaaacacaggttctctccaaatatgaccgaacgtgaagccgctaacttcataatgaaggtgatccagagttgcttcctatcaaaccgaagtcgcacctatgacatgatacaatactatcaaaacgatatcccatatta

SEQ ID NO: 230776 - DNA, 6135 bp, Artificial Sequence
  derived and/or modified sequence
atgtgtcccgtggacttccacggtatctttcagctggatgaacgccgaagggacgcggtgattgccctcggcatctttctgattgaatctgatttgcagcacaaggactgcgtggtgccgtatctgctcaggctcctgaagggattacctaaggtgtattgggtggaagaatctaccgctagaaagggacgcggagctctacctgttgctgagagcttttcattttgtcttgtgacacttctctctgacgtggcctaccgggatccgtcattgagggatgaaatcctcgaggtccttctgcaggttctgcatgtattattaggaatgtgtcaagccctagaaattcaagacaaagaatacctgtgcaaatacgccatcccatgtcttattggcatttcacgggcttttgggaggtacagcaatatggaagaaagtctgctgtcaaagttgtttcctaagatccctccacattctttgagagtgctagaagagctggaaggagtgaggaggaggtcttttaacgactttagaagcattctgcctagtaatcttctaaccgtgtgccaggagggcaccctcaagcgcaagacctcatcagtctcatcaattagccaggtcagtcctgaaaggggaatgccccctccttcatcgcctgggggatctgcgtttcactacttcgaagcgtcatgcctaccggatgggacggccctggaacccgagtactactttagcacaatcagcagctcattctcagtgagtcccctgtttaacggcgttacatacaaggagttcaatattccactggagatgctccgggagctgctgaatctagtcaaaaagatagtcgaagaggctgtgctgaaatccctagacgcaatcgtagccagcgttatggaagctaatccaagtgcagatttatactacacatcattctcagacccgctgtaccttacaatgtttaagatgctgcgagacaccctatattatatgaaggacctcccaacctcttttgtgaaggaaattcatgacttcgttctcgagcagtttaatacgtcccagggagaactgcagaaaatcctacacgatgctgaccgaattcataatgagctgagccctctaaaactcaggtgtcaggccaacgctgcttgtgtcgatttaatggtctgggcagtcaaagacgagcaaggagctgagaatctgtgtattaaacttagcgagaagctgcagagtaaaacgagctcgaaggtgatcatcgctcacctgcctctgctcatatgctgcttgcagggtctgggacggttatgtgagaggttccctgtggtcgtgcattcagtgacgccgtcccttcgagatttcctcgtgatcccctccccggtgctggtgaagctttacaaataccacagccaatatcataccgtggccggtaatgatatcaaaataagtgtgacgaacgagcactcagaaagcactttaaacgtgatgtccggcaaaaagagtcagccctcaatgtatgagcagttacgcgacatcgcaatcgacaacatctgccggtgtcttaaggcaggcctgacagttgaccctgttattgtagaggcctttctggcaagtttgagcaataggctgtatattagccaggaatccgacaaggatgctcacctgattcccgaccatactattagagccttaggccacattgcagtcgccctgagggacaccccaaaggttatggagcctatcctgcaaatcttacaacaaaagttttgtcaacccccatcaccgctggacgtgttgattatcgatcaactgggatgccttgtgatcaccggtaatcaatatatctatcaggaagtttggaatctcttccagcagatctcagtgaaagcctcatctgtggtgtattcagctactaaggactacaaagatcacgggtaccggcattgctccctggccgtgattaatgctctggcaaacatcgctgccaatatccaagatgagcacctggtggatgaactgttgatgaacctcctggaattattcgtgcagctcggactcgagggaaagcgagcttccgagcgcgcatcagagaagggaccagcgctgaaggctagtagcagtgcaggtaacctgggagtactgatccctgtgatcgcggtgctcacacggaggctaccgcctataaaagaggccaaaccgaggttacagaagcttttccgggacttctggctctacagcgtcctcatgggctttgctgtcgaggggtcaggactgtggccggaagagtggtacgagggagtgtgtgagattgccactaagagccctttattaacattcccatcgaaggagcctctgcgttccgtgctacaatacaattcagcaatgaagaatgataccgtgacaccggctgagctgagcgagttgcgaagcaccattattaatctcctggacccgccacccgaagtgtctgcgctgatcaataaactcgactttgcgatgagcacctaccttctgtccgtgtataggcttgaatatatgagggttctgcgttctaccgacccagaccgctttcaagtgatgttttgttactttgaggacaaagcaatccagaaggataaaagcgggatgatgcagtgcgtgatagcagtcgcagacaaagtcttcgatgcattcctcaatatgatggccgataaagcaaagacaaaggagaatgaggaagagctggaaagacatgcgcagttcctgctggtgaatttcaaccacattcataaaaggattcggagggtcgccgacaaatacttaagcgggctcgtcgacaaattcccccatttgctgtggtccgggactgtactgaagacaatgctcgatattttacagaccttgtcactgtctctctccgcggacattcataaagatcagccctactacgacatccctgatgccccttataggatcactgttcccgacacatacgaggccagagaaagcatcgtgaaggactttgcagcgaggtgcgggatgatcctgcaggaggcaatgaaatgggccccaactgtgaccaaatcccaccttcaggagtatttgaacaaacaccagaactgggtctctggattaagtcaacacaccggccttgctatggcaaccgaatcaattctacacttcgcgggatacaataaacagaatacgacccttggagccacacagttatctgagaggcctgcgtgcgtaaagaaggactatagtaattttatggcctcccttaatttaagaaatcgatacgcgggtgaggtgtacggtatgatccggttttctgggaccactggccagatgtcagacctaaataagatgatggtgcaggatctgcatagtgcactggatagaagccatccacagcactacacgcaggccatgtttaaacttacagccatgctgattagttctaaggattgcgatcctcagctgcttcaccatctgtgttggggccctctaagaatgtttaatgagcacggtatggagaccgcgctcgcctgttgggagtggcttcttgccggtaaagacggggtcgaggtcccgttcatgcgtgaaatggctggtgcttggcacatgactgttgagcaaaaattcggcttgttctccgctgagataaaggaggccgacccactggcagcatctgaagccagtcaacccaaaccctgtccaccagaggttacaccccactacatctggatagactttctggtgcaaaggtttgaaatcgccaaatactgctcaagtgaccaggtggagattttttctagcttattgcagcgaagcatgagtcttaatatcggcggagctaagggcagtatgaacaggcacgtggccgcaatcgggccaagatttaagctcttgaccctcggtctctcactgctgcatgccgacgtggtaccaaacgcaactatacggaacgtgctgagagaaaaaatttacagcacggcctttgattacttctcctgccctcccaagttccccacgcaaggggaaaagaggctgagggaggacatcagcattatgattaaattctggaccgccatgttctccgataagaaatacttgaccgcctcccagcttgttcctcccgacaaccaggacacaaggagtaatttggacataacggtggggtcacgccaacaggccactcaaggatggattaatacatatcccctttctagcggaatgtcaacgatctccaagaaatctggaatgtctaaaaagacaaatcgcggatcccagctgcataagtactacatgaagagacgaaccctcttgcttagcttgttagccactgagattgagcgcctcatcacatggtacaaccccttgtcagcaccagaacttgaactcgaccaggccggtgaaaacagcgtggcgaattggcgctctaagtatattagcctctccgagaagcagtggaaggataacgtgaacctagcgtggtctatctccccctatcttgctgtgcagttgccagcccgtttcaaaaatacagaagccattggaaacgaggtaactaggctggtgcgcctcgatcccggagcagtatcggatgtccctgaggcaatcaaatttctggtgacatggcatacgatagatgccgatgcccctgagctctcccatgtattgtgttgggcacccaccgacccaccaaccgggctgtcttacttttcatcgatgtacccccctcaccccctgaccgcgcagtatggggtgaaagtgctgcgtagcttcccaccagacgccattctgttttacattccccagatcgtccaggcacttcgttacgataagatggggtatgtcagagaatatattctctgggccgcttctaagtctcagcttctggctcatcagtttatttggaatatgaaaacaaatatctacctggatgaggagggccaccagaaggaccccgatattggggaccttctggatcagttggtggaagagatcacggggtccctgagtggtcccgctaaggacttttatcagcgggaatttgatttttttaataagattaccaatgttagcgcaataatcaaaccgtaccccaagggggatgagcgcaagaaagcctgcctgtctgccttgtcagaggtaaaagtccagcctggctgctacctcccatcaaatccagaagcgatcgtgcttgatatcgattataagagtgggacgccaatgcagtcagcagccaaggcaccctacctggccaaattcaaagtgaaaagatgcggggtttcggagctagaaaaggaggggctgagatgccgaagcgactcagaggacgagtgtagtactcaagaagcagatgggcagaagatatcttggcaggccgctatctttaaggttggggacgactgcagacaggacatgcttgcactgcagattatagatctgttcaagaatatctttcagttggtgggacttgacctttttgtgtttccttatcgcgtcgtcgcaactgcccctgggtgcggggtcattgagtgtatcccggactgcacttccagagaccagctcggccgtcagaccgactttggaatgtatgattatttcaccagacaatatggcgatgagagcactctggccttccagcaggccaggtacaacttcatcaggtccatggccgcatatagcctgttgttatttttactgcagataaaagatagacacaatggaaacatcatgcttgacaagaagggccacattattcatattgattttggtttcatgttcgaaagtagccccggagggaacctagggtgggaacctgacattaaactgaccgacgaaatggtgatgattatgggcggaaaaatggaggccacaccctttaaatggtttatggagatgtgtgtgagagggtatctagctgttcggccttatatggatgccgtggtcagtctggtgacactgatgttagataccggactcccttgctttagggggcagacgattaaactgctaaaacaccgcttttcccctaacatgactgaacgcgaggctgccaatttcattatgaaagtcatacagtcttgctttctgagcaaccgatctcggacctacgacatgattcagtactatcagaatgacatcccatattaa

SEQ ID NO: 230777 - DNA, 2565 bp, Artificial Sequence
  derived and/or modified sequence
atgagagagatggccggagcctggcacatgactgtggagcagaaatttggtctgttctcagctgagattaaggaggccgacccattggccgctagcgaggcgagccagcctaaaccatgtcccccagaggtgaccccacactatatctggatcgatttcctggttcagcgatttgagattgcaaaatactgttcctccgaccaggtggagatctttagcagcctcctgcaacggtctatgtcacttaacattgggggtgcaaaaggctctatgaatcgccatgttgctgcgatcggcccacgttttaagctgcttactcttgggttatccctcctgcacgctgacgtcgtgccgaatgcaactatccgtaacgtgctccgcgaaaagatatacagcaccgcatttgactatttctcatgccccccaaagttccctacccagggagagaaaagactgagggaagatataagtatcatgatcaagttctggaccgccatgttctccgacaagaagtacctgacagcaagccagttggtgcctcccgacaatcaggacacccgatccaatctggatattactgtgggctcccggcaacaggcaactcaaggctggataaacacataccctctttcatctgggatgtctacaatctcaaagaagagtgggatgagtaagaagaccaaccgcggatctcaactccacaaatactacatgaagagacgcactctactgctctccctgctagcaacagaaattgaacggctgatcacctggtacaaccccctgagtgcccctgagctcgagctcgaccaggctggcgaaaactccgtcgccaactggagatctaagtatatctccctgagtgagaagcagtggaaggacaatgtgaacttagcttggtccatttcgccctatctggcagtccagctgccagcaagattcaaaaacactgaggccatcggaaatgaagtaactaggttggtgcgacttgaccctggggctgttagcgacgtccccgaggctatcaagtttctcgtgacctggcataccatagatgcagatgcccctgagctctcccatgtcttgtgctgggccccaaccgaccctcctaccggactgagttatttctcatcaatgtatcccccacacccactaaccgcacagtatggagtaaaggttctgagaagcttcccacctgacgccattttattctatattccacagatcgtgcaagccctgcgctacgataagatgggttatgtgagggagtatatcctgtgggcagcaagcaagagtcagctattggcccaccagttcatatggaacatgaaaaccaatatctacctcgacgaggagggtcaccagaaagatcctgatatcggcgacctgctggaccagctcgtggaggaaattacaggatctctttccggaccagcgaaagatttttaccaacgggagtttgactttttcaataagattaccaatgtgtccgctatcataaaaccatacccaaagggtgatgagcgcaaaaaagcttgcctgtcagccctgtcagaggttaaagtgcagccgggatgctacctcccctccaaccccgaggccattgtgctcgacattgattacaagtctggaacccccatgcagtctgccgcaaaggccccttacctggctaaatttaaggtcaaacgttgcggggtgagcgagttggagaaagaggggttgaggtgccgctcagatagcgaggacgaatgttccacgcaagaggccgacggccagaaaattagttggcaggcagctatcttcaaggtcggagatgactgtagacaagacatgctggccttgcaaattatcgacctgttcaaaaacatctttcaactggtggggttagacctcttcgtgtttccatatcgggttgtggcaacagccccaggatgtggagtaattgagtgcattcccgactgtaccagcagagatcaactgggccgtcagactgattttgggatgtacgattattttactagacagtacggagacgagtctactctggcattccagcaggcaagatacaacttcattcgcagcatggctgcgtattcattgctgttgttccttctgcagatcaaagaccgccacaatggcaatatcatgctcgacaaaaaggggcacatcatccatatcgatttcggatttatgtttgagtcctctcccggagggaatctggggtgggaaccagacattaagttgacggatgaaatggtgatgattatgggaggtaagatggaggccacccctttcaagtggttcatggagatgtgtgttcgaggatacctagctgtgcgaccctacatggatgcagtcgtgagcctggtgacattgatgctggatacggggttgccctgttttagaggacaaactatcaaattactgaagcataggttttcccccaatatgactgagagagaagcagcaaactttatcatgaaggttattcagagctgtttcttgagcaatcgttcacgcacttacgacatgattcaatattaccagaatgatatcccatactag

SEQ ID NO: 230778 - DNA, 264 bp, Artificial Sequence
  derived and/or modified sequence
atgtgtcctgtcgacttccacggcatattccagctggatgaacggcgaagagacgcggtgatagctctgggaatcttcttgatcgaaagtgacttgcaacataaggactgtgtcgtcccctatctgcttagactactcaaaggtttaccaaaggtgtattgggtggaagaatccacagcacgtaagggacgaggagcacttcctgtggccgaatcctttagtttctgcctcgtgacactactcagcgatgttgcctaccgctag

SEQ ID NO: 230779 - DNA, 6135 bp, Artificial Sequence
  derived and/or modified sequence
atgtgccccgtggacttccacggcatcttccagctggacgagagaagaagagacgccgtgatcgccctgggcatcttcctgatcgagagcgacctgcagcacaaggactgcgtggtgccctacctgctgagactgctgaagggcctgcccaaggtgtactgggtggaggagagcaccgccagaaagggcagaggcgccctgcccgtggccgagagcttcagcttctgcctggtgaccctgctgagcgacgtggcctacagagaccccagcctgagagacgagatcctggaggtgctgctgcaggtgctgcacgtgctgctgggcatgtgccaggccctggagatccaggacaaggagtacctgtgcaagtacgccatcccctgcctgatcggcatcagcagagccttcggcagatacagcaacatggaggagagcctgctgagcaagctgttccccaagatccccccccacagcctgagagtgctggaggagctggagggcgtgagaagaagaagcttcaacgacttcagaagcatcctgcccagcaacctgctgaccgtgtgccaggagggcaccctgaagagaaagaccagcagcgtgagcagcatcagccaggtgagccccgagagaggcatgcccccccccagcagccccggcggcagcgccttccactacttcgaggccagctgcctgcccgacggcaccgccctggagcccgagtactacttcagcaccatcagcagcagcttcagcgtgagccccctgttcaacggcgtgacctacaaggagttcaacatccccctggagatgctgagagagctgctgaacctggtgaagaagatcgtggaggaggccgtgctgaagagcctggacgccatcgtggccagcgtgatggaggccaaccccagcgccgacctgtactacaccagcttcagcgaccccctgtacctgaccatgttcaagatgctgagagacaccctgtactacatgaaggacctgcccaccagcttcgtgaaggagatccacgacttcgtgctggagcagttcaacaccagccagggcgagctgcagaagatcctgcacgacgccgacagaatccacaacgagctgagccccctgaagctgagatgccaggccaacgccgcctgcgtggacctgatggtgtgggccgtgaaggacgagcagggcgccgagaacctgtgcatcaagctgagcgagaagctgcagagcaagaccagcagcaaggtgatcatcgcccacctgcccctgctgatctgctgcctgcagggcctgggcagactgtgcgagagattccccgtggtggtgcacagcgtgacccccagcctgagagacttcctggtgatccccagccccgtgctggtgaagctgtacaagtaccacagccagtaccacaccgtggccggcaacgacatcaagatcagcgtgaccaacgagcacagcgagagcaccctgaacgtgatgagcggcaagaagagccagcccagcatgtacgagcagctgagagacatcgccatcgacaacatctgcagatgcctgaaggccggcctgaccgtggaccccgtgatcgtggaggccttcctggccagcctgagcaacagactgtacatcagccaggagagcgacaaggacgcccacctgatccccgaccacaccatcagagccctgggccacatcgccgtggccctgagagacacccccaaggtgatggagcccatcctgcagatcctgcagcagaagttctgccagccccccagccccctggacgtgctgatcatcgaccagctgggctgcctggtgatcaccggcaaccagtacatctaccaggaggtgtggaacctgttccagcagatcagcgtgaaggccagcagcgtggtgtacagcgccaccaaggactacaaggaccacggctacagacactgcagcctggccgtgatcaacgccctggccaacatcgccgccaacatccaggacgagcacctggtggacgagctgctgatgaacctgctggagctgttcgtgcagctgggcctggagggcaagagagccagcgagagagccagcgagaagggccccgccctgaaggccagcagcagcgccggcaacctgggcgtgctgatccccgtgatcgccgtgctgaccagaagactgccccccatcaaggaggccaagcccagactgcagaagctgttcagagacttctggctgtacagcgtgctgatgggcttcgccgtggagggcagcggcctgtggcccgaggagtggtacgagggcgtgtgcgagatcgccaccaagagccccctgctgaccttccccagcaaggagcccctgagaagcgtgctgcagtacaacagcgccatgaagaacgacaccgtgacccccgccgagctgagcgagctgagaagcaccatcatcaacctgctggaccccccccccgaggtgagcgccctgatcaacaagctggacttcgccatgagcacctacctgctgagcgtgtacagactggagtacatgagagtgctgagaagcaccgaccccgacagattccaggtgatgttctgctacttcgaggacaaggccatccagaaggacaagagcggcatgatgcagtgcgtgatcgccgtggccgacaaggtgttcgacgccttcctgaacatgatggccgacaaggccaagaccaaggagaacgaggaggagctggagagacacgcccagttcctgctggtgaacttcaaccacatccacaagagaatcagaagagtggccgacaagtacctgagcggcctggtggacaagttcccccacctgctgtggagcggcaccgtgctgaagaccatgctggacatcctgcagaccctgagcctgagcctgagcgccgacatccacaaggaccagccctactacgacatccccgacgccccctacagaatcaccgtgcccgacacctacgaggccagagagagcatcgtgaaggacttcgccgccagatgcggcatgatcctgcaggaggccatgaagtgggcccccaccgtgaccaagagccacctgcaggagtacctgaacaagcaccagaactgggtgagcggcctgagccagcacaccggcctggccatggccaccgagagcatcctgcacttcgccggctacaacaagcagaacaccaccctgggcgccacccagctgagcgagagacccgcctgcgtgaagaaggactacagcaacttcatggccagcctgaacctgagaaacagatacgccggcgaggtgtacggcatgatcagattcagcggcaccaccggccagatgagcgacctgaacaagatgatggtgcaggacctgcacagcgccctggacagaagccacccccagcactacacccaggccatgttcaagctgaccgccatgctgatcagcagcaaggactgcgacccccagctgctgcaccacctgtgctggggccccctgagaatgttcaacgagcacggcatggagaccgccctggcctgctgggagtggctgctggccggcaaggacggcgtggaggtgcccttcatgagagagatggccggcgcctggcacatgaccgtggagcagaagttcggcctgttcagcgccgagatcaaggaggccgaccccctggccgccagcgaggccagccagcccaagccctgcccccccgaggtgaccccccactacatctggatcgacttcctggtgcagagattcgagatcgccaagtactgcagcagcgaccaggtggagatcttcagcagcctgctgcagagaagcatgagcctgaacatcggcggcgccaagggcagcatgaacagacacgtggccgccatcggccccagattcaagctgctgaccctgggcctgagcctgctgcacgccgacgtggtgcccaacgccaccatcagaaacgtgctgagagagaagatctacagcaccgccttcgactacttcagctgcccccccaagttccccacccagggcgagaagagactgagagaggacatcagcatcatgatcaagttctggaccgccatgttcagcgacaagaagtacctgaccgccagccagctggtgccccccgacaaccaggacaccagaagcaacctggacatcaccgtgggcagcagacagcaggccacccagggctggatcaacacctaccccctgagcagcggcatgagcaccatcagcaagaagagcggcatgagcaagaagaccaacagaggcagccagctgcacaagtactacatgaagagaagaaccctgctgctgagcctgctggccaccgagatcgagagactgatcacctggtacaaccccctgagcgcccccgagctggagctggaccaggccggcgagaacagcgtggccaactggagaagcaagtacatcagcctgagcgagaagcagtggaaggacaacgtgaacctggcctggagcatcagcccctacctggccgtgcagctgcccgccagattcaagaacaccgaggccatcggcaacgaggtgaccagactggtgagactggaccccggcgccgtgagcgacgtgcccgaggccatcaagttcctggtgacctggcacaccatcgacgccgacgcccccgagctgagccacgtgctgtgctgggcccccaccgacccccccaccggcctgagctacttcagcagcatgtaccccccccaccccctgaccgcccagtacggcgtgaaggtgctgagaagcttcccccccgacgccatcctgttctacatcccccagatcgtgcaggccctgagatacgacaagatgggctacgtgagagagtacatcctgtgggccgccagcaagagccagctgctggcccaccagttcatctggaacatgaagaccaacatctacctggacgaggagggccaccagaaggaccccgacatcggcgacctgctggaccagctggtggaggagatcaccggcagcctgagcggccccgccaaggacttctaccagagagagttcgacttcttcaacaagatcaccaacgtgagcgccatcatcaagccctaccccaagggcgacgagagaaagaaggcctgcctgagcgccctgagcgaggtgaaggtgcagcccggctgctacctgcccagcaaccccgaggccatcgtgctggacatcgactacaagagcggcacccccatgcagagcgccgccaaggccccctacctggccaagttcaaggtgaagagatgcggcgtgagcgagctggagaaggagggcctgagatgcagaagcgacagcgaggacgagtgcagcacccaggaggccgacggccagaagatcagctggcaggccgccatcttcaaggtgggcgacgactgcagacaggacatgctggccctgcagatcatcgacctgttcaagaacatcttccagctggtgggcctggacctgttcgtgttcccctacagagtggtggccaccgcccccggctgcggcgtgatcgagtgcatccccgactgcaccagcagagaccagctgggcagacagaccgacttcggcatgtacgactacttcaccagacagtacggcgacgagagcaccctggccttccagcaggccagatacaacttcatcagaagcatggccgcctacagcctgctgctgttcctgctgcagatcaaggacagacacaacggcaacatcatgctggacaagaagggccacatcatccacatcgacttcggcttcatgttcgagagcagccccggcggcaacctgggctgggagcccgacatcaagctgaccgacgagatggtgatgatcatgggcggcaagatggaggccacccccttcaagtggttcatggagatgtgcgtgagaggctacctggccgtgagaccctacatggacgccgtggtgagcctggtgaccctgatgctggacaccggcctgccctgcttcagaggccagaccatcaagctgctgaagcacagattcagccccaacatgaccgagagagaggccgccaacttcatcatgaaggtgatccagagctgcttcctgagcaacagaagcagaacctacgacatgatccagtactaccagaacgacatcccctactag

SEQ ID NO: 230780 - DNA, 2565 bp, Artificial Sequence
  derived and/or modified sequence
atgagagagatggccggcgcctggcacatgaccgtggagcagaagttcggcctgttcagcgccgagatcaaggaggccgaccccctggccgccagcgaggccagccagcccaagccctgcccccccgaggtgaccccccactacatctggatcgacttcctggtgcagagattcgagatcgccaagtactgcagcagcgaccaggtggagatcttcagcagcctgctgcagagaagcatgagcctgaacatcggcggcgccaagggcagcatgaacagacacgtggccgccatcggccccagattcaagctgctgaccctgggcctgagcctgctgcacgccgacgtggtgcccaacgccaccatcagaaacgtgctgagagagaagatctacagcaccgccttcgactacttcagctgcccccccaagttccccacccagggcgagaagagactgagagaggacatcagcatcatgatcaagttctggaccgccatgttcagcgacaagaagtacctgaccgccagccagctggtgccccccgacaaccaggacaccagaagcaacctggacatcaccgtgggcagcagacagcaggccacccagggctggatcaacacctaccccctgagcagcggcatgagcaccatcagcaagaagagcggcatgagcaagaagaccaacagaggcagccagctgcacaagtactacatgaagagaagaaccctgctgctgagcctgctggccaccgagatcgagagactgatcacctggtacaaccccctgagcgcccccgagctggagctggaccaggccggcgagaacagcgtggccaactggagaagcaagtacatcagcctgagcgagaagcagtggaaggacaacgtgaacctggcctggagcatcagcccctacctggccgtgcagctgcccgccagattcaagaacaccgaggccatcggcaacgaggtgaccagactggtgagactggaccccggcgccgtgagcgacgtgcccgaggccatcaagttcctggtgacctggcacaccatcgacgccgacgcccccgagctgagccacgtgctgtgctgggcccccaccgacccccccaccggcctgagctacttcagcagcatgtaccccccccaccccctgaccgcccagtacggcgtgaaggtgctgagaagcttcccccccgacgccatcctgttctacatcccccagatcgtgcaggccctgagatacgacaagatgggctacgtgagagagtacatcctgtgggccgccagcaagagccagctgctggcccaccagttcatctggaacatgaagaccaacatctacctggacgaggagggccaccagaaggaccccgacatcggcgacctgctggaccagctggtggaggagatcaccggcagcctgagcggccccgccaaggacttctaccagagagagttcgacttcttcaacaagatcaccaacgtgagcgccatcatcaagccctaccccaagggcgacgagagaaagaaggcctgcctgagcgccctgagcgaggtgaaggtgcagcccggctgctacctgcccagcaaccccgaggccatcgtgctggacatcgactacaagagcggcacccccatgcagagcgccgccaaggccccctacctggccaagttcaaggtgaagagatgcggcgtgagcgagctggagaaggagggcctgagatgcagaagcgacagcgaggacgagtgcagcacccaggaggccgacggccagaagatcagctggcaggccgccatcttcaaggtgggcgacgactgcagacaggacatgctggccctgcagatcatcgacctgttcaagaacatcttccagctggtgggcctggacctgttcgtgttcccctacagagtggtggccaccgcccccggctgcggcgtgatcgagtgcatccccgactgcaccagcagagaccagctgggcagacagaccgacttcggcatgtacgactacttcaccagacagtacggcgacgagagcaccctggccttccagcaggccagatacaacttcatcagaagcatggccgcctacagcctgctgctgttcctgctgcagatcaaggacagacacaacggcaacatcatgctggacaagaagggccacatcatccacatcgacttcggcttcatgttcgagagcagccccggcggcaacctgggctgggagcccgacatcaagctgaccgacgagatggtgatgatcatgggcggcaagatggaggccacccccttcaagtggttcatggagatgtgcgtgagaggctacctggccgtgagaccctacatggacgccgtggtgagcctggtgaccctgatgctggacaccggcctgccctgcttcagaggccagaccatcaagctgctgaagcacagattcagccccaacatgaccgagagagaggccgccaacttcatcatgaaggtgatccagagctgcttcctgagcaacagaagcagaacctacgacatgatccagtactaccagaacgacatcccctactag

SEQ ID NO: 230781 - DNA, 264 bp, Artificial Sequence
  derived and/or modified sequence
atgtgccccgtggacttccacggcatcttccagctggacgagagaagaagagacgccgtgatcgccctgggcatcttcctgatcgagagcgacctgcagcacaaggactgcgtggtgccctacctgctgagactgctgaagggcctgcccaaggtgtactgggtggaggagagcaccgccagaaagggcagaggcgccctgcccgtggccgagagcttcagcttctgcctggtgaccctgctgagcgacgtggcctacagatag

SEQ ID NO: 230782 - protein, 454 aa, Artificial Sequence
  derived and/or modified sequence
MWPLTVPPPLLLLLCSGLAGQTLFQNPEEGWQLYTSAQAPDGKCICTAVIPAQSTCSRDGRSRELRQLMEKVQNVSQSMEVLELRTYRDLQYVRGMETLMRSLDARLRAADGSLSAKSFQELKDRMTELLPLSSVLEQYKADTRTIVRLREEVRNLSGSLAAIQEEMGAYGYEDLQQRVMALEARLHACAQKLGCGKLTGVSNPITVRAMGSRFGSWMTDTMAPSADSRVWYMDGYYKGRRVLEFRTLGDFIKGQNFIQHLLPQPWAGTGHVVYNGSLFYNKYQSNVVVKYHFRSRSVLVQRSLPGAGYNNTFPYSWGGFSDMDFMVDESGLWAVYTTNQNAGNIVVSRLDPHTLEVMRSWDTGYPKRSAGEAFMICGVLYVTNSHLAGAKVYFAYFTNTSSYEYTDVPFHNQYSHISMLDYNPRERALYTWNNGHQVLYNVTLFHVISTSGDP

SEQ ID NO: 230783 - DNA, 1365 bp, Artificial Sequence
  derived and/or modified sequence
atgtggcccctcactgtgccacctccgcttctacttttgctttgtagcgggctggcaggccagacgctgtttcagaaccctgaggaaggctggcaactgtatacttcggcccaggctccagacgggaaatgtatttgcactgcggtgatccccgctcagtctacttgtagcagggacgggcgatcgcgagagttgagacaacttatggaaaaggttcagaatgtatcccagtctatggaagtgctggagctgagaacatatcgggatttacagtatgtaagaggaatggagacccttatgaggtctctggatgcgaggttgagagctgctgacggcagcttgtcggcgaaatcatttcaggaactgaaagatcgcatgacggagttactccccctctcttcagttcttgagcagtacaaagcggacactcgcactattgtccgcctcagggaagaagtccgtaacctgtccggttcattggctgcgatccaagaggagatgggggcatacgggtacgaagacctccagcagcgcgtcatggccctggaagcacgtctgcacgcctgtgctcaaaagctggggtgcggcaagctcaccggagtcagtaaccctataacggtgagagccatggggagtcggttcggttcctggatgaccgataccatggccccttccgccgacagccgggtgtggtatatggacgggtactacaagggcaggcgcgtcttagagttcaggactctgggtgactttatcaaggggcaaaattttatccaacatttattgccacagccctgggcaggcacaggccatgtggtgtataatgggtccctcttttataataagtaccagtctaacgtggtcgtgaagtaccactttcggagtcgaagtgtccttgtacaaagatctctccctggcgctggatacaacaacacctttccctatagctgggggggtttttctgatatggatttcatggtagacgagtctgggctttgggctgtttacacaaccaatcaaaacgccggaaatatagtggtcagcagattagatccccacactttagaagtcatgagatcttgggataccggttatccgaagcgctctgccggtgaggcattcatgatctgtggggtgctctacgtgactaactcacacctggcaggggctaaggtttacttcgcttattttacaaacacctcctcatacgagtataccgacgtgccctttcataaccagtacagccacatctccatgctggattataatcctcgtgaaagggccctctacacatggaataacgggcatcaagtattatacaatgtcacactattccacgtgatctctaccagcggcgatccctag

SEQ ID NO: 230784 - DNA, 1365 bp, Artificial Sequence
  derived and/or modified sequence
atgtggcccctaaccgttcctccacctctgttgctcctgttgtgttcagggctggccgggcagacactctttcagaatcccgaggaaggttggcagttatacactagtgctcaagcccctgacggcaagtgtatttgtaccgcagttatcccagcccagagcacgtgttcccgagacggcagatccagggagctcagacaactgatggaaaaagtccagaatgtctcccagtcaatggaagtgctggaactgaggacctacagggacctccaatacgtgcggggcatggaaactctcatgcgatccttggatgccaggctgcgagccgcggatggttccctctccgctaaatctttccaggaactgaaagatcgtatgactgaactgctgccactgtcatctgtgctggagcaatataaagcagatacacgaaccatagtgcgcctgcgcgaagaagtacggaatctctctggcagtcttgccgcaatccaggaagagatgggcgcctacggatatgaagacttacagcagagagtcatggcactcgaggctaggctgcatgcttgcgcacaaaagttaggatgtggaaagctgaccggcgtttccaatccgattacagtccgggcaatgggctctcgtttcgggtcttggatgacagataccatggcacctagtgcagactcaagggtgtggtacatggacgggtattacaaagggaggcgggtgctggagttccggaccctgggcgacttcattaaaggacagaacttcatccaacacttgcttcctcaaccctgggccggcaccggacacgtagtgtataacgggagtctgttttacaataagtaccagtccaacgtggtcgtcaaatatcatttccgcagccgatctgttcttgtccaacgaagtttaccaggcgcaggatacaacaatacattcccatactcttggggcggcttcagcgatatggactttatggtggacgaatctggtctctgggcggtttatacaacgaatcagaacgccggtaatatagttgtgtcacgtctggacccccacacgctggaagtaatgagaagttgggacaccggttacccaaaacgaagcgctggagaggcgttcatgatctgcggggtgttgtacgtgacaaattctcatttagccggtgccaaagtttacttcgcctattttaccaatacaagcagttatgaatatacagacgtaccctttcacaaccagtatagccacatctccatgctcgactacaacccaagggaacgtgccctgtacacctggaacaacggccatcaagtgctatataatgtgacactgttccacgtgataagtacttctggcgatccctag

SEQ ID NO: 230785 - DNA, 1365 bp, Artificial Sequence
  derived and/or modified sequence
atgtggccactgacggttccacccccactcctgcttctgttgtgttctgggttagccggccagacgttgttccagaaccctgaggagggatggcaattatacacatccgcgcaggcacccgacggtaaatgcatttgtaccgccgtcattcctgcccagagtacatgttcaagggatgggcgaagcagggagctgagacaattgatggagaaggtgcagaatgtgtcccagtctatggaagtcctagagctaagaacttaccgagaccttcagtatgtgcgaggaatggaaactctgatgcgatccttggatgccaggctgcgagccgcggatggttccctctccgctaaatctttccaggaactgaaagatcgtatgactgaactgctgccactgtcatctgtgctggagcaatataaagcagatacacgaaccatagtgcgcctgcgcgaagaagtacggaatctctctggcagtcttgccgcaatccaggaagagatgggcgcctacggatatgaagacttacagcagagagtcatggcactcgaggctaggctgcatgcttgcgcacaaaagttaggatgtggaaagctgaccggcgtcagtaatcctattacagtgcgagctatgggaagtcgtttcggctcttggatgaccgatactatggctccctctgcagatagtagggtttggtatatggatggatactacaaaggtcggcgcgttcttgaattcaggactttgggagatttcatcaaaggtcagaacttcatacagcaccttttaccccagccttgggcaggaactggtcatgtggtctataatgggagtttattctataacaaataccagtcaaatgtggtcgtcaagtatcattttagaagccgctccgttctggtgcagcggtctctgcctggagcgggttacaacaacacctttccatactcctggggcggcttttccgacatggacttcatggtcgatgagtcagggctctgggcggtctatacaactaatcaaaatgcaggaaacatagtcgtctctaggctggaccctcataccttagaggttatgagatcatgggacactggttacccaaaaagaagtgctggggaagcattcatgatttgcggcgtgctctacgtgaccaattcacatctagctggcgctaaggtatattttgcctacttcacaaatacgagcagctacgaatatacagacgttcccttccacaaccaatactcacatatcagcatgctggactataacccacgcgaacgggccctgtacacatggaacaacggccaccaagtactgtacaatgttaccctgtttcacgtcattagcaccagcggcgatccctag

SEQ ID NO: 230786 - DNA, 1860 bp, Artificial Sequence
  derived and/or modified sequence
ggtcgggacgccgggctaggggcgcgtcatgtggccgctcacggtcccgccgccgctgctgctgctgctgtgctcaggcctggccggacagactctcttccagaacccagaagagggctggcagctgtacacctcagcccaggcccctgacgggaaatgcatctgcacggccgtgatcccagcgcagagtacctgctctcgagatggcaggagtcgggagctgcggcaactgatggagaaggtccagaacgtctcccagtccatggaggtccttgagttgcggacgtatcgcgacctccagtatgtacgcggcatggagaccctcatgcggagcctggatgcgcggctccgggcagctgatgggtccctctcggccaagagcttccaggagctgaaggacaggatgacggaactgttgcccctgagctcggtcctggagcagtacaaggcagacacgcggaccattgtacgcttgcgggaggaggtgaggaatctctccggcagtctggcggccattcaggaggagatgggtgcctacgggtatgaggacctgcagcaacgggtgatggccctggaggcccggctccacgcctgcgcccagaagctgggctgtgggaagctgaccggggtcagtaaccccatcaccgttcgggccatggggtcccgcttcggctcctggatgactgacacgatggcccccagtgcggatagccgggtctggtacatggatggctattacaaaggccgccgggtcctggagttccgtaccctgggagacttcatcaaaggccagaactttatccagcacctgctgccccagccgtgggcgggcacgggccacgtggtgtacaacggctccctgttctataacaagtaccagagcaacgtggtggtcaaataccacttccgctcgcgctctgtgctggtgcagaggagcctcccgggcgccggttacaacaacaccttcccctactcctggggcggcttctccgacatggacttcatggtggacgagagcgggctctgggctgtgtacaccaccaaccagaacgcgggcaacatcgtggtcagccggctggacccgcacaccctcgaggtcatgcggtcctgggacaccggctaccccaagcgcagcgctggcgaggccttcatgatctgcggtgtgctctacgtgaccaactcccacctggctggggccaaggtctacttcgcctattttaccaacacgtccagttacgagtacacggacgtgcccttccacaaccagtattcccacatctcgatgctggattacaacccccgggagcgcgccctctatacctggaacaacggccaccaggtgctctacaatgtcaccctgtttcacgtcatcagcacctctggggacccctgagccaatgctgtggctcgggctgctgcctggggggcctctgggggctgggggcccttttcattctgcctgtgtccctcaagggtgatctctctgtctctgtcacgccctttctccccgcctttttgctgggcttttgttctctgcctatgtatttctgtctattttttcaatttcccctcttctcctttattgatctctgcttttaatacaccacttctttctttctgcctttttatggatgtctttttctttttatggctctggttctccagttctttccgtctctgcctctctctgtctctctctctctgtccttccacccctccctccttgcttcccacccattcctcatccctcactcccacccccacccccacccccaggagttgagtgcatggatctgtttctttttttatttacactttttctttccggtttgccggaataaacaggacctttgacatttg

SEQ ID NO: 230787 - DNA, 1365 bp, Artificial Sequence
  derived and/or modified sequence
atgtggcccctgaccgtgcccccccccctgctgctgctgctgtgcagcggcctggccggccagaccctgttccagaaccccgaggagggctggcagctgtacaccagcgcccaggcccccgacggcaagtgcatctgcaccgccgtgatccccgcccagagcacctgcagcagagacggcagaagcagagagctgagacagctgatggagaaggtgcagaacgtgagccagagcatggaggtgctggagctgagaacctacagagacctgcagtacgtgagaggcatggagaccctgatgagaagcctggacgccagactgagagccgccgacggcagcctgagcgccaagagcttccaggagctgaaggacagaatgaccgagctgctgcccctgagcagcgtgctggagcagtacaaggccgacaccagaaccatcgtgagactgagagaggaggtgagaaacctgagcggcagcctggccgccatccaggaggagatgggcgcctacggctacgaggacctgcagcagagagtgatggccctggaggccagactgcacgcctgcgcccagaagctgggctgcggcaagctgaccggcgtgagcaaccccatcaccgtgagagccatgggcagcagattcggcagctggatgaccgacaccatggcccccagcgccgacagcagagtgtggtacatggacggctactacaagggcagaagagtgctggagttcagaaccctgggcgacttcatcaagggccagaacttcatccagcacctgctgccccagccctgggccggcaccggccacgtggtgtacaacggcagcctgttctacaacaagtaccagagcaacgtggtggtgaagtaccacttcagaagcagaagcgtgctggtgcagagaagcctgcccggcgccggctacaacaacaccttcccctacagctggggcggcttcagcgacatggacttcatggtggacgagagcggcctgtgggccgtgtacaccaccaaccagaacgccggcaacatcgtggtgagcagactggacccccacaccctggaggtgatgagaagctgggacaccggctaccccaagagaagcgccggcgaggccttcatgatctgcggcgtgctgtacgtgaccaacagccacctggccggcgccaaggtgtacttcgcctacttcaccaacaccagcagctacgagtacaccgacgtgcccttccacaaccagtacagccacatcagcatgctggactacaaccccagagagagagccctgtacacctggaacaacggccaccaggtgctgtacaacgtgaccctgttccacgtgatcagcaccagcggcgacccctag

SEQ ID NO: 230788 - DNA, 1365 bp, Artificial Sequence
  derived and/or modified sequence
atgtggcctctgaccgttcccccccccttattactcttgctgtgtagtggtttggctggccaaacactgtttcaaaaccctgaggagggttggcaactctacacctccgcacaggctccagacggtaagtgtatctgtaccgcagtgatcccagcccagagcacttgctctcgggacggacgtagtcgcgaactgaggcagctaatggaaaaggtgcagaacgtgtctcagtctatggaagtcctcgagctgagaacatacagggatctgcaatacgtgcgcgggatggaaacgcttatgcgatcactcgatgctcgacttagagctgccgacggaagcctgagtgctaagtcctttcaagaactgaaggaccggatgacggagctgttgcccctgagtagtgtcctggagcagtataaggcggataccagaaccattgtgcgattgagagaagaagtgcgcaacttgagtggttccctggccgctattcaggaggaaatgggcgcttacgggtatgaggatttacaacagagggtgatggcactcgaggcaaggctgcacgcatgcgcacagaaactgggatgtgggaaactgaccggcgtgagcaaccctattacggttcgggcaatgggctcaaggtttgggtcctggatgacggacaccatggcaccctccgccgactcaagggtttggtatatggatggttactataaagggcgtcgcgtgctggagttccgcacgctgggagacttcattaagggtcagaattttatacaacatcttcttccccaaccatgggcgggcacaggacacgttgtctacaatggtagtcttttctacaacaagtatcagagtaacgtggtggtgaagtaccacttccgctcgcgaagcgtgctcgttcagaggtctttgccgggtgctggatacaacaacacattcccctactcttggggcgggttcagtgacatggattttatggtggacgaatctggcttatgggccgtgtacactaccaaccaaaatgctggaaatattgtggtgagtaggctagacccacatacactggaggtgatgcgctcatgggatacaggctaccctaagcgctccgccggagaggcattcatgatatgtggagtgctgtacgtcacaaatagtcacctggccggggcaaaagtgtactttgcctacttcaccaataccagctcatacgagtacactgacgttccctttcataatcagtactcacatataagcatgctcgattacaacccgagggagcgggcattatatacttggaataacggacaccaggtgttgtacaatgtcacactgtttcatgtgatctcaacaagtggagatccatag

SEQ ID NO: 230789 - DNA, 1365 bp, Artificial Sequence
  derived and/or modified sequence
atgtggcccctgactgtgcccccacccctgctgctgctgctgtgcagcggcctggccggccagaccctcttccagaaccctgaggagggctggcagctgtacaccagcgcccaggccccagatggcaagtgcatctgcacagctgtgatcccagcccagagcacctgcagcagagatggccgcagccgggagctgcggcagctgatggagaaggtgcagaatgtgtcccagagcatggaggtgctggagctgcggacctacagagacctgcagtatgtgcggggcatggagaccctgatgaggagcctggatgcccggctgcgggcagcagatggcagcctgagcgccaagagcttccaggagctgaaggacaggatgacagagctgctgcccctgagctctgtgctggagcagtacaaggctgacaccaggaccatcgtgcggctgcgggaggaggtgaggaacctgagcggcagcctggccgccatccaggaggagatgggcgcctacggctatgaggacctgcagcagagggtgatggccctggaggcccggctgcacgcctgtgcccagaagctgggctgcggcaagctgactggagtgagcaaccccatcaccgtgcgggccatgggcagccgcttcggctcctggatgacagacaccatggcccccagcgctgacagccgggtgtggtacatggatggctactacaagggccggcgggtgctggagttccgcaccctgggggacttcatcaagggccagaacttcatccagcacctgctgccccagccctgggccggcactggacatgtggtgtacaacggcagcctcttctacaacaagtaccagagcaatgtggtggtgaagtaccacttccgcagccgctctgtgctggtgcagaggagcctgcctggagctggctacaacaacaccttcccctacagctggggcggcttcagtgacatggacttcatggtggatgagagcggcctgtgggccgtgtacaccaccaaccagaatgccggcaacatcgtggtgtcccggctggacccccacaccctggaggtgatgaggtcctgggacaccggctaccccaagaggtctgctggggaggccttcatgatctgtggggtgctgtatgtgaccaacagccacctggccggggccaaggtgtactttgcctacttcaccaacaccagcagctatgagtacacagatgtgcccttccacaaccagtacagccacatctccatgctggactacaacccccgggagcgggccctgtacacctggaacaacggccaccaggtgctgtacaacgtgaccctcttccacgtgatcagcaccagcggggacccctag

SEQ ID NO: 230790 - DNA, 1365 bp, Artificial Sequence
  derived and/or modified sequence
atgtggcccctgaccgtgcccccccccctgctgctgctgctgtgctcgggcctggccggccagaccctgtttcagaacccagaggagggctggcaactctacacaagcgcgcaggcaccggatggaaagtgcatatgtaccgcagtgatccctgcacagtccacctgcagccgtgatgggcgaagccgcgagctgcgccagctgatggaaaaagtacagaacgtgtcccaaagcatggaggtcttggagctgagaacatatagggatttgcagtatgtacgaggaatggagactttgatgcggtctttggacgcccgtctgcgagcagccgacggttccctaagcgcaaagtcctttcaggagcttaaagacaggatgaccgaactgctgccactttccagcgtgctggaacaatacaaagccgatacccgcacaatagtgaggctgagagaggaggttcgaaacctgtccggctccttggccgcgatccaggaggagatgggagcctacggctatgaggaccttcagcagcgtgttatggcgttggaagcacgactccatgcctgtgcacagaagctgggctgcggaaagctgaccggtgtcagcaacccaatcacagtccgcgcgatgggaagtagattcggctcctggatgaccgacacgatggcaccaagcgctgattcccgtgtgtggtatatggatggctactacaaagggaggagagtcctggaattcagaaccttaggggattttattaagggacagaactttattcagcacctcttacctcagccatgggccggaaccggccatgtggtatacaacggcagcctgttctacaacaagtaccagtcaaacgtggtggtcaaatatcactttcgctcacgctctgttctggtgcagaggtccctgcccggtgctggctacaacaatacctttccatattcgtggggcggattctcagatatggacttcatggtggacgagtccggcctgtgggctgtgtatacaaccaatcagaacgcgggtaatatcgtagtgtcccggctggatcctcacacactggaagtgatgcggtcatgggacacgggctatcctaaaagaagcgctggggaagcctttatgatctgtggagtcctgtacgtaacaaatagccacctggcaggtgcaaaggtatactttgcctactttactaacacttctagttatgaatacacagacgtgcccttccacaatcaatactctcatatatccatgctcgattacaaccccagagagagagcactgtacacctggaataacggccatcaggtcctctataatgttacactttttcatgtcatatccacatcaggcgacccttag

SEQ ID NO: 230791 - RNA, 1365 nt, Artificial Sequence
  derived and/or modified sequence
auguggccccuaaccguuccuccaccucuguugcuccuguuguguucagggcuggccgggcagacacucuuucagaaucccgaggaagguuggcaguuauacacuagugcucaagccccugacggcaaguguauuuguaccgcaguuaucccagcccagagcacguguucccgagacggcagauccagggagcucagacaacugauggaaaaaguccagaaugucucccagucaauggaagugcuggaacugaggaccuacagggaccuccaauacgugcggggcauggaaacucucaugcgauccuuggaugccaggcugcgagccgcggaugguucccucuccgcuaaaucuuuccaggaacugaaagaucguaugacugaacugcugccacugucaucugugcuggagcaauauaaagcagauacacgaaccauagugcgccugcgcgaagaaguacggaaucucucuggcagucuugccgcaauccaggaagagaugggcgccuacggauaugaagacuuacagcagagagucauggcacucgaggcuaggcugcaugcuugcgcacaaaaguuaggauguggaaagcugaccggcguuuccaauccgauuacaguccgggcaaugggcucucguuucgggucuuggaugacagauaccauggcaccuagugcagacucaagggugugguacauggacggguauuacaaagggaggcgggugcuggaguuccggacccugggcgacuucauuaaaggacagaacuucauccaacacuugcuuccucaacccugggccggcaccggacacguaguguauaacgggagucuguuuuacaauaaguaccaguccaacguggucgucaaauaucauuuccgcagccgaucuguucuuguccaacgaaguuuaccaggcgcaggauacaacaauacauucccauacucuuggggcggcuucagcgauauggacuuuaugguggacgaaucuggucucugggcgguuuauacaacgaaucagaacgccgguaauauaguugugucacgucuggacccccacacgcuggaaguaaugagaaguugggacaccgguuacccaaaacgaagcgcuggagaggcguucaugaucugcgggguguuguacgugacaaauucucauuuagccggugccaaaguuuacuucgccuauuuuaccaauacaagcaguuaugaauauacagacguacccuuucacaaccaguauagccacaucuccaugcucgacuacaacccaagggaacgugcccuguacaccuggaacaacggccaucaagugcuauauaaugugacacuguuccacgugauaaguacuucuggcgaucccuag

SEQ ID NO: 230792 - RNA, 1365 nt, Artificial Sequence
  derived and/or modified sequence
auguggccacugacgguuccacccccacuccugcuucuguuguguucuggguuagccggccagacguuguuccagaacccugaggagggauggcaauuauacacauccgcgcaggcacccgacgguaaaugcauuuguaccgccgucauuccugcccagaguacauguucaagggaugggcgaagcagggagcugagacaauugauggagaaggugcagaaugugucccagucuauggaaguccuagagcuaagaacuuaccgagaccuucaguaugugcgaggaauggaaacucugaugcgauccuuggaugccaggcugcgagccgcggaugguucccucuccgcuaaaucuuuccaggaacugaaagaucguaugacugaacugcugccacugucaucugugcuggagcaauauaaagcagauacacgaaccauagugcgccugcgcgaagaaguacggaaucucucuggcagucuugccgcaauccaggaagagaugggcgccuacggauaugaagacuuacagcagagagucauggcacucgaggcuaggcugcaugcuugcgcacaaaaguuaggauguggaaagcugaccggcgucaguaauccuauuacagugcgagcuaugggaagucguuucggcucuuggaugaccgauacuauggcucccucugcagauaguaggguuugguauauggauggauacuacaaaggucggcgcguucuugaauucaggacuuugggagauuucaucaaaggucagaacuucauacagcaccuuuuaccccagccuugggcaggaacuggucauguggucuauaaugggaguuuauucuauaacaaauaccagucaaauguggucgucaaguaucauuuuagaagccgcuccguucuggugcagcggucucugccuggagcggguuacaacaacaccuuuccauacuccuggggcggcuuuuccgacauggacuucauggucgaugagucagggcucugggcggucuauacaacuaaucaaaaugcaggaaacauagucgucucuaggcuggacccucauaccuuagagguuaugagaucaugggacacugguuacccaaaaagaagugcuggggaagcauucaugauuugcggcgugcucuacgugaccaauucacaucuagcuggcgcuaagguauauuuugccuacuucacaaauacgagcagcuacgaauauacagacguucccuuccacaaccaauacucacauaucagcaugcuggacuauaacccacgcgaacgggcccuguacacauggaacaacggccaccaaguacuguacaauguuacccuguuucacgucauuagcaccagcggcgaucccuag

SEQ ID NO: 230793 - protein, 335 aa, Artificial Sequence
  derived and/or modified sequence
MKVEFAPLNIQLARRLQTVAVLQWVLKYLLLGPMSIGITVMLIIHNYLFLYIPYLMWLYFDWHTPERGGRRSSWIKNWTLWKHFKDYFPIHLIKTQDLDPSHNYIFGFHPHGIMAVGAFGNFSVNYSDFKDLFPGFTSYLHVLPLWFWCPVFREYVMSVGLVSVSKKSVSYMVSKEGGGNISVIVLGGAKESLDAHPGKFTLFIRQRKGFVKIALTHGASLVPVVSFGENELFKQTDNPEGSWIRTVQNKLQKIMGFALPLFHARGVFQYNFGLMTYRKAIHTVVGRPIPVRQTLNPTQEQIEELHQTYMEELRKLFEEHKGKYGIPEHETLVLK

SEQ ID NO: 230794 - DNA, 1008 bp, Artificial Sequence
  derived and/or modified sequence
atgaaggtggagttcgcccccctgaacatccagctggccagaagactgcagaccgtggccgtgctgcagtgggtgctgaagtacctgctgctgggccccatgagcatcggcatcaccgtgatgctgatcatccacaactacctgttcctgtacatcccctacctgatgtggctgtacttcgactggcacacccccgagagaggcggcagaagaagcagctggatcaagaactggaccctgtggaagcacttcaaggactacttccccatccacctgatcaagacccaggacctggaccccagccacaactacatcttcggcttccacccccacggcatcatggccgtgggcgccttcggcaacttcagcgtgaactacagcgacttcaaggacctgttccccggcttcaccagctacctgcacgtgctgcccctgtggttctggtgccccgtgttcagagagtacgtgatgagcgtgggcctggtgagcgtgagcaagaagagcgtgagctacatggtgagcaaggagggcggcggcaacatcagcgtgatcgtgctgggcggcgccaaggagagcctggacgcccaccccggcaagttcaccctgttcatcagacagagaaagggcttcgtgaagatcgccctgacccacggcgccagcctggtgcccgtggtgagcttcggcgagaacgagctgttcaagcagaccgacaaccccgagggcagctggatcagaaccgtgcagaacaagctgcagaagatcatgggcttcgccctgcccctgttccacgccagaggcgtgttccagtacaacttcggcctgatgacctacagaaaggccatccacaccgtggtgggcagacccatccccgtgagacagaccctgaaccccacccaggagcagatcgaggagctgcaccagacctacatggaggagctgagaaagctgttcgaggagcacaagggcaagtacggcatccccgagcacgagaccctggtgctgaagtag

SEQ ID NO: 230795 - DNA, 1008 bp, Artificial Sequence
  derived and/or modified sequence
atgaaggtcgagtttgcacctttaaatatccagctagctcgccgactacaaaccgtggccgtgcttcagtgggttctgaaataccttctgctgggacctatgtctattgggatcacagtgatgctgattatacataactatctctttctgtacataccttatctgatgtggctatacttcgattggcacaccccagagcgcggcgggaggcggagtagctggattaaaaactggaccttgtggaagcacttcaaagactacttccccatccatctgattaaaacacaagatctagatcccagccacaactatatcttcgggttccatcctcatggcattatggccgttggggcatttggcaactttagcgtgaactacagcgacttcaaagatcttttcccaggttttacttcttacctgcatgtgttacctctgtggttttggtgtcccgtgtttagggaatacgtcatgagtgtggggctggtcagtgttagcaaaaaaagcgtgagttatatggttagtaaggaaggcggaggcaacatctccgtcattgtcttggggggcgcaaaggagagtttagacgcgcaccccggaaaatttacattattcatcagacaaaggaaaggctttgttaagatcgccttgacacacggcgcaagcctcgttccggtggtttctttcggggaaaacgagctctttaaacagactgacaatccggagggttcttggatcagaactgtgcagaataagctacagaaaatcatgggttttgctctgccactgttccacgccagaggcgtgtttcagtataattttggacttatgacctatcgcaaggccattcatactgtggtgggcagaccaatccccgtcagacagacactgaaccccacacaggaacagatcgaagagcttcaccagacatatatggaggaactgaggaagctgttcgaagagcacaagggaaaatacggaattcctgagcacgaaaccttagtcctgaaatag

SEQ ID NO: 230796 - DNA, 1008 bp, Artificial Sequence
  derived and/or modified sequence
atgaaggtggagtttgcccccctgaacatccagctggcccggcggctgcagacagtggccgtgctgcagtgggtgctgaagtacctgctgctgggccccatgagcatcggcatcaccgtgatgctgatcatccacaactacctgttcctgtacatcccctacctgatgtggctgtactttgactggcacaccccagagcggggcggccgccgcagctcctggatcaagaactggaccctgtggaagcacttcaaggactacttccccatccacctgatcaagacccaggacctggaccccagccacaactacatcttcggcttccacccccacggcatcatggctgtgggcgcctttggaaacttctctgtgaactacagcgacttcaaggacctcttccctggcttcaccagctacctgcacgtgctgcccctgtggttctggtgccctgtgttccgggagtatgtgatgtctgtgggcctggtgtctgtgtccaagaagtctgtgtcctacatggtgtccaaggagggcggcggcaacatcagcgtcatcgtgctgggcggggccaaggagagcctggatgcccaccctgggaagttcaccctcttcatccggcagaggaagggctttgtgaagatcgccctgacccatggagccagcctggtgcctgtggtgtcctttggagaaaatgagctgttcaagcagacagacaaccctgagggctcctggatcagaacagtgcagaacaagctgcagaagatcatgggctttgccctgcccctcttccacgcccggggcgtcttccagtacaactttggcctgatgacctacaggaaggccatccacacagtggtgggccggcccatccctgtgcggcagaccctgaaccccacccaggagcagatcgaggagctgcaccagacctacatggaggagctgaggaagctgtttgaggagcacaagggcaagtatggcatccctgagcacgagaccctggtgctgaagtag

SEQ ID NO: 230797 - DNA, 1048 bp, Artificial Sequence
  derived and/or modified sequence
atgaaggtagagtttgcaccgctcaacatccagctggcgcggcggctgcagacggtggccgtgctgcagtgggtcctgaaatacctgctgctcgggccgatgtccattggaatcactgtgatgctgatcatacacaactatttgttcctttacatcccttatttgatgtggctttactttgactggcataccccagagcgaggaggcaggagatccagctggatcaaaaattggactctttggaaacactttaaggactattttccaattcatcttatcaaaactcaagatttggatccaagtcacaactatatatttgggtttcacccccatggaataatggcagttggagcctttgggaatttttctgtaaattattctgacttcaaggacctgtttcctggctttacttcatatcttcacgtgctgccactttggttctggtgtcctgtctttcgagaatatgtgatgagtgttgggctggtttcagtttccaagaaaagtgtgtcctacatggtaagcaaggagggaggtggaaacatctctgtcattgtccttgggggtgcaaaagaatcactggatgctcatcctggaaagttcactctgttcatccgccagcggaaaggatttgttaaaattgctttgacccatggcgcctctctggtcccagtggtttcttttggtgaaaatgaactgtttaaacaaactgacaaccctgaaggatcatggattagaactgttcagaataaactgcagaagatcatggggtttgctttgcccctgtttcatgccaggggagtttttcagtacaattttggcctaatgacctataggaaagccatccacactgttgttggccgcccgatccctgttcgtcagactctgaacccgacccaggagcagattgaggagttacatcagacctatatggaggaacttaggaaattgtttgaggaacacaaaggaaagtatggcattccagagcacgagactcttgttttaaaatgacttgactataaaaaaaaattaaaaaataaaaataaatgac

SEQ ID NO: 230798 - DNA, 1008 bp, Artificial Sequence
  derived and/or modified sequence
atgaaggtggagttcgcccccctgaacatccagctggcccggcggctgcaaacagttgcagtgttacaatgggtgcttaaatacttactactggggcccatgagcattggtattactgtcatgctgatcattcataactacctgtttttgtacattccatatctgatgtggctctatttcgattggcacacacccgaaagggggggaagaaggtcatcctggatcaaaaactggactctctggaagcattttaaggactactttccgatccacctgatcaaaacccaagacctggatccatcccacaactacatctttggatttcacccccacggaatcatggccgtgggggccttcggaaacttctcggttaactactccgattttaaagatttgttcccgggttttacatcttacctccacgttctgcctctgtggttttggtgtccagttttcagagagtacgtaatgtcagtgggacttgtgtccgtgtctaaaaagtctgtgagctatatggtttccaaagagggagggggaaacatctccgtgatcgtgctaggcggtgctaaggaatcactagatgcacatccaggaaagttcactctgtttatcagacagcgcaaagggttcgtaaagatcgccctgacccacggcgcctccctcgtccccgtcgtgagctttggtgagaacgagctctttaagcagaccgataacccggagggaagctggatcagaaccgtgcagaacaagctccagaaaattatgggcttcgcacttccactatttcatgccagaggagtgtttcaatacaactttgggctcatgacataccgaaaagccattcacacggtcgtgggaagacctatccctgtgcgccagacacttaatcccactcaggaacagattgaggagttgcaccagacatacatggaagaactgaggaaactttttgaggagcacaaggggaagtacggaatccccgaacatgagacactagttctgaaatag

SEQ ID NO: 230799 - DNA, 1008 bp, Artificial Sequence
  derived and/or modified sequence
atgaaagtggaattcgcccctctcaatatccagctagctaggagattgcaaacagttgccgtgctccaatgggtgctgaaatatttgctgttgggcccaatgtcaatcggcattaccgtgatgcttattattcataactatctgttcctgtacatcccttatctcatgtggctttatttcgattggcacacaccagaacgtggaggaagacggagcagttggatcaaaaactggaccctgtggaaacattttaaagattactttcccatccacctgatcaaaacccaggatctggacccgagccacaactatatctttgggttccatccccacggaatcatggcggtgggtgcatttgggaacttttccgttaactacagtgatttcaaggacctgttccctggattcaccagctatttgcacgtcctcccactgtggttttggtgccctgtattccgtgaatacgtcatgagcgtcggcctggtgtcagtgagcaaaaagagcgtctcttacatggtgagtaaggagggaggcggaaacatctcagtgatcgtcctgggaggggctaaagagtcactcgatgcccatcctggcaaatttaccctgtttatacgccaacgaaaaggcttcgtcaagattgcccttacccatggagcatctctcgtgccagtagtgtcattcggtgagaacgagctgttcaagcagaccgataaccccgaggggtcctggattcgaacagtccaaaacaagttacagaagataatgggctttgcattgccactcttccatgcacgaggggtgttccaatacaacttcggtctcatgacctacaggaaagccatccacactgtagtgggcagaccaattcccgtcaggcagactctcaatcccacacaggagcagattgaggagctgcatcagacatacatggaggagctgcggaagctattcgaggagcataaagggaagtatggcatccccgaacacgaaactctggtccttaagtag

SEQ ID NO: 230800 - protein, 322 aa, Artificial Sequence
  derived and/or modified sequence
MVAERSPARSPGSWLFPGLWLLVLSGPGGLLRAQEQPSCRRAFDLYFVLDKSGSVANNWIEIYNFVQQLAERFVSPEMRLSFIVFSSQATIILPLTGDRGKISKGLEDLKRVSPVGETYIHEGLKLANEQIQKAGGLKTSSIIIALTDGKLDGLVPSYAEKEAKISRSLGASVYCVGVLDFEQAQLERIADSKEQVFPVKGGFQALKGIINSILAQSCTEILELQPSSVCVGEEFQIVLSGRGFMLGSRNGSVLCTYTVNETYTTSVKPVSVQLNSMLCPAPILNKAGEWGLTVTQAGVKWHDLTHCTFGLSGSGDPPTSAS

SEQ ID NO: 230801 - protein, 488 aa, Artificial Sequence
  derived and/or modified sequence
MVAERSPARSPGSWLFPGLWLLVLSGPGGLLRAQEQPSCRRAFDLYFVLDKSGSVANNWIEIYNFVQQLAERFVSPEMRLSFIVFSSQATIILPLTGDRGKISKGLEDLKRVSPVGETYIHEGLKLANEQIQKAGGLKTSSIIIALTDGKLDGLVPSYAEKEAKISRSLGASVYCVGVLDFEQAQLERIADSKEQVFPVKGGFQALKGIINSILAQSCTEILELQPSSVCVGEEFQIVLSGRGFMLGSRNGSVLCTYTVNETYTTSVKPVSVQLNSMLCPAPILNKAGETLDVSVSFNGGKSVISGSLIVTATECSNGIAAIIVILVLLLLLGIGLMWWFWPLCCKVVIKDPPPPPAPAPKEEEEEPLPTKKWPTVDASYYGGRGVGGIKRMEVRWGDKGSTEEGARLEKAKNAVVKIPEETEEPIRPRPPRPKPTHQPPQTKWYTPIKGRLDALWALLRRQYDRVSLMRPQEGDEGRCINFSRVPSQ

SEQ ID NO: 230802 - DNA, 969 bp, Artificial Sequence
  derived and/or modified sequence
atggtcgctgagcggagtcccgctaggtcacccgggagctggctcttccctggactctggctgttggtgctaagcggacccggtggcctattgagggcacaggagcagccatcttgccgtcgggcgtttgacttgtacttcgtgctggataaaagtggaagcgtagcgaataactggatagagatttacaatttcgtacaacagctggcagaacgattcgtgtcccctgaaatgagactgtctttcattgtgttctcgtctcaggctactatcatcctacctcttaccggcgatcggggaaagatctctaaggggcttgaggacctgaaacgcgtgtctcctgtcggcgaaacatatatccacgaggggctgaaattggcaaacgaacagatccagaaagccggcgggctcaaaacaagtagcatcattatcgctcttacggacggcaagcttgacgggctcgtgcccagttacgccgagaaagaagccaagattagccgcagcctgggagctagcgtctattgcgtcggggtgctggacttcgagcaggctcaactggaacgaatcgccgacagcaaagaacaagttttccccgttaaaggagggtttcaagccttgaaaggcatcatcaattcaatcctggctcaaagctgcaccgagatcttagaactgcagccctccagcgtgtgtgtcggcgaagaattccagattgttctgagcgggagaggcttcatgttagggtctcgcaacgggtcagtgctgtgtacatatacagtgaacgagacatacaccacctccgtaaagccagtcagcgtacagctgaatagcatgctctgccccgctcctatcctgaacaaggctggcgagtggggactaactgtaacccaggccggagtgaagtggcatgatcttacacattgtacctttggactgagcggctccggggatcctcctacgtccgccagttag

SEQ ID NO: 230803 - DNA, 1161 bp, Artificial Sequence
  derived and/or modified sequence
atggtagccgagcggagccccgctcgttccccagggagctggctctttcccggcctatggctgctggttttgtccgggcctggaggactgctgagggcacaggagcagccgtcctgtcggagggccttcgatctgtacttcgtgttagataagtcaggcagcgtggccaacaactggatcgagatctataattttgtgcagcagctcgccgaaaggtttgtgagtcccgaaatgcgtctcagcttcatagtgttctcctcccaagcgactattattcttcctctgactggcgatcggggcaaaatctcaaagggcctcgaagacttgaagcgggtgtctccagtcggggagacctatattcacgaaggtctcaagctggcaaacgaacagattcaaaaagccggaggattaaaaacttccagcattatcattgcgctaaccgacggcaaactcgacgggctggttccgtcctacgctgaaaaggaggcgaagatcagcaggtcactgggggcttcagtgtactgtgtcggcgttctggatttcgagcaggctcaacttgaaagaattgccgactccaaagagcaggttttccccgttaaaggcggattccaagcgctgaagggtataattaatagttccaacgggattgccgccatcattgttattttagttttgcttctcctgcttggcattggcctgatgtggtggttttggcctttgtgctgtaaggtggtgatcaaggaccctccgcctcctcccgcaccagcgcccaaggaggaggaggaggaacctttgccaacaaagaaatggcctaccgtcgacgcaagctattacggtgggcgtggcgtaggcggcatcaaaaggatggaggtgcggtggggcgacaagggatccactgaggagggagctagactggagaaggccaagaatgccgttgtgaaaataccagaggagaccgaagaacccatacgaccccggcccccacgtccaaagccaacccaccagccgcctcaaacaaaatggtatacgcccatcaaaggccggctggatgccttgtgggctctactgaggagacagtatgacagagtatccctgatgagacctcaggagggagatgaagtgtgtatatgggaatgtatagaaaaggagctgaccgcttag

SEQ ID NO: 230804 - DNA, 1467 bp, Artificial Sequence
  derived and/or modified sequence
atggttgcagagagaagccctgctaggtcgccaggctcctggctgttccctgggctatggctgttggtcctcagcggaccaggggggctgcttagagcgcaggaacagccttcttgtcgccgcgccttcgatctttacttcgtgctggacaaatcggggtctgtagccaataattggattgaaatctataacttcgtgcaacagcttgcagagagatttgtgtctcctgaaatgcggctctcctttattgtctttagctctcaggcaaccatcatcttacccttaactggcgatcgaggaaagatttccaagggcctcgaagatctcaagagagtgagccctgtgggcgaaacctatatccacgagggcctgaagttggccaatgaacagatacagaaagcaggcggactcaaaacctcttcaatcataattgcgctaacagatggcaagctggacggcctggtgcccagctatgcagagaaagaagcaaagatatctcgctctttgggagcgtccgtgtattgcgtgggcgtattggactttgagcaggcgcagctcgaacggatcgctgactctaaggaacaggtgttcccagtcaaaggagggttccaggccttaaagggcattatcaacagcattctcgctcagtcttgtacggagatcttagaactgcagcctagtagtgtgtgcgtgggcgaagaatttcagatcgttctcagcgggagaggcttcatgttaggctccagaaacggtagcgtgctgtgcacatacaccgtgaacgagacttataccaccagcgtgaaaccagttagcgtgcagctgaattcaatgctctgccctgcccccatccttaacaaggctggcgagacgctggacgtatcggtaagttttaatggcggcaaaagcgtcatcagtggatctttgatagttacggcaacagaatgctctaatggcatcgctgcgatcatcgtgattctcgtcctgctgctcttgcttggaattggactcatgtggtggttttggcccttgtgctgcaaggtggtcatcaaggacccccccccccctccagcccctgctcctaaggaggaagaagaggaaccgctgcccacaaagaaatggccgactgtcgatgcaagctattacgggggtaggggggtgggaggcattaagcgaatggaagttcgctggggggacaaagggtccactgaggagggtgctaggctagagaaggcaaagaatgctgtagttaagattccggaggaaaccgaggagcccatccgacctcgccctccccgacccaagcccacccaccaaccgcctcaaacgaagtggtacacccccattaaggggagacttgatgccttgtgggccttgctacggagacagtacgatcgcgtaagccttatgagacctcaggagggcgatgagggaagatgtataaacttcagtagagtgccctctcagtag

SEQ ID NO: 230805 - DNA, 969 bp, Artificial Sequence
  derived and/or modified sequence
atggtggccgagaggagccctgcccggagccctggctcctggctgtttcctggcctgtggctgctggtgctgagcggccctgggggcctgctgcgggcccaggagcagcccagctgccggcgggcctttgacctgtactttgtgctggacaagagcggctctgtggccaacaactggattgagatctacaactttgtgcagcagctggccgagagatttgtgtccccagagatgaggctgtccttcatcgtgttcagcagccaggccaccatcatcctgcccctgaccggggaccggggcaagatcagcaagggcctggaggacctgaagagggtgtcccctgtgggggagacctacatccacgagggcctgaagctggccaatgagcagatccagaaggccggcggcctgaagaccagcagcatcatcatcgccctgacagatggcaagctggatggcctggtgcccagctatgcagagaaggaggccaagatcagccgcagcctgggcgcctctgtgtactgtgtgggcgtgctggactttgagcaggcccagctggagagaattgctgacagcaaggagcaggtgtttcctgtgaagggcggcttccaggccctgaagggcatcatcaacagcatcctggcccagagctgcacagagatcctggagctgcagcccagctctgtgtgtgtgggggaggagttccagatcgtgctgagcggccggggcttcatgctgggcagcagaaatggatctgtgctgtgcacctacacagtgaatgagacctacaccacctctgtgaagcctgtgtctgtgcagctgaacagcatgctgtgcccagcccccatcctgaacaaggccggggagtggggcctgactgtgacccaggccggcgtgaagtggcatgacctgacccactgcaccttcggcctgagcggcagcggggacccccccaccagcgccagctag

SEQ ID NO: 230806 - DNA, 1161 bp, Artificial Sequence
  derived and/or modified sequence
atggtggccgagaggagccctgcccggagccctggctcctggctgtttcctggcctgtggctgctggtgctgagcggccctgggggcctgctgcgggcccaggagcagcccagctgccggcgggcctttgacctgtactttgtgctggacaagagcggctctgtggccaacaactggattgagatctacaactttgtgcagcagctggccgagagatttgtgtccccagagatgaggctgtccttcatcgtgttcagcagccaggccaccatcatcctgcccctgaccggggaccggggcaagatcagcaagggcctggaggacctgaagagggtgtcccctgtgggggagacctacatccacgagggcctgaagctggccaatgagcagatccagaaggccggcggcctgaagaccagcagcatcatcatcgccctgacagatggcaagctggatggcctggtgcccagctatgcagagaaggaggccaagatcagccgcagcctgggcgcctctgtgtactgtgtgggcgtgctggactttgagcaggcccagctggagagaattgctgacagcaaggagcaggtgtttcctgtgaagggcggcttccaggccctgaagggcatcatcaacagcagcaatggaattgctgccatcatcgtcatcctggtgctgctgctgctgctgggcatcggcctgatgtggtggttctggcccctgtgctgcaaggtggtgatcaaggaccccccacctcctccagccccagcccccaaggaggaggaggaggagcccctgcccaccaagaagtggcccaccgtggatgccagctactacggcggccggggcgtgggcggcatcaagaggatggaggtgcgctggggagacaagggcagcacagaggagggcgcccggctggagaaggccaagaatgctgtggtgaagatccctgaggagacagaggagcccatccggcccaggcctccccggcccaagcccacccaccagcccccccagaccaagtggtacacccccatcaagggccgcctggatgccctgtgggccctgctgcggcggcagtatgacagagtgtccctgatgaggccccaggagggagatgaggtgtgcatctgggagtgcatcgagaaggagctgacagcctag

SEQ ID NO: 230807 - DNA, 1467 bp, Artificial Sequence
  derived and/or modified sequence
atggtggccgagaggagccctgcccggagccctggctcctggctgtttcctggcctgtggctgctggtgctgagcggccctgggggcctgctgcgggcccaggagcagcccagctgccggcgggcctttgacctgtactttgtgctggacaagagcggctctgtggccaacaactggattgagatctacaactttgtgcagcagctggccgagagatttgtgtccccagagatgaggctgtccttcatcgtgttcagcagccaggccaccatcatcctgcccctgaccggggaccggggcaagatcagcaagggcctggaggacctgaagagggtgtcccctgtgggggagacctacatccacgagggcctgaagctggccaatgagcagatccagaaggccggcggcctgaagaccagcagcatcatcatcgccctgacagatggcaagctggatggcctggtgcccagctatgcagagaaggaggccaagatcagccgcagcctgggcgcctctgtgtactgtgtgggcgtgctggactttgagcaggcccagctggagagaattgctgacagcaaggagcaggtgtttcctgtgaagggcggcttccaggccctgaagggcatcatcaacagcatcctggcccagagctgcacagagatcctggagctgcagcccagctctgtgtgtgtgggggaggagttccagatcgtgctgagcggccggggcttcatgctgggcagcagaaatggatctgtgctgtgcacctacacagtgaatgagacctacaccacctctgtgaagcctgtgtctgtgcagctgaacagcatgctgtgcccagcccccatcctgaacaaggccggggagaccctggatgtgtctgtgtccttcaacggcggcaagagcgtcatcagcggcagcctgattgtgacagccacagagtgcagcaatggaattgctgccatcatcgtcatcctggtgctgctgctgctgctgggcatcggcctgatgtggtggttctggcccctgtgctgcaaggtggtgatcaaggaccccccacctcctccagccccagcccccaaggaggaggaggaggagcccctgcccaccaagaagtggcccaccgtggatgccagctactatggaggccggggcgtgggcggcatcaagaggatggaggtgcgctggggagacaagggcagcacagaggagggcgcccggctggagaaggccaagaatgctgtggtgaagatccctgaggagacagaggagcccatccggccccggcccccccggcccaagcccacccaccagcccccccagaccaagtggtacacccccatcaagggccgcctggatgccctgtgggccctgctgcggcggcagtatgacagagtgtccctgatgaggccccaggagggagatgagggccgctgcatcaacttcagccgggtgcccagccagtag

SEQ ID NO: 230808 - DNA, 969 bp, Artificial Sequence
  derived and/or modified sequence
atggtggccgagcggagccccgcccggagccccggcagctggctgttccccggcctatggttgctcgtgctttccgggccgggtggtctactgcgagctcaggaacaaccaagctgccggagggcattcgatctgtacttcgtcctggacaagtcaggctccgtggccaataactggatagagatctacaatttcgttcagcaactggccgagcgctttgtcagccccgaaatgcgcctgtcctttatcgtcttctcatctcaggctacaatcatcctgcctctgaccggagatcggggtaagatcagtaaaggactggaagatctgaagcgcgtttcaccggttggagaaacatacatacatgaaggtttgaagctggcgaacgagcagatccagaaggccggcggcttaaaaacgagcagtatcataatcgccctgacagacggcaagctcgatggcctggtacctagctacgccgaaaaagaggccaagatatctagatcactgggggccagtgtgtattgtgtgggtgtcctcgacttcgagcaggcccagcttgagcgcatcgctgacagcaaagagcaggtgtttccagtgaaaggggggtttcaggctcttaagggaatcattaattccatacttgcccagagctgcaccgaaatcctggaactgcagccgagcagcgtctgtgtgggagaggagtttcagattgtactgtctggccggggatttatgttgggatcacggaatggatccgtcctctgcacttacaccgtcaacgagacatacacgacatcagtcaaaccggtctcagtgcagcttaactctatgctgtgccctgctcccatactgaacaaggctggtgagtggggacttacagttacacaggcaggagttaagtggcacgacctcacgcactgcacttttggtctatcaggtagcggtgacccccccacctctgcatcatag

SEQ ID NO: 230809 - DNA, 1161 bp, Artificial Sequence
  derived and/or modified sequence
atggtggccgagcggagccccgcccggagccccggcagctggctgttccctggcctctggttgctcgttctcagtggtccaggtggattactcagagcacaggaacagccaagttgcagaagggcctttgacctatacttcgtgttggataaatcaggctccgtggccaacaactggatcgagatttacaactttgtgcagcagctggcagagcgctttgtttcgcctgaaatgaggctgtcatttattgttttctcctcacaggccaccattatattgccccttactggggatagaggtaagatctcgaaagggctggaggacctgaagcgcgtgtcgcctgtgggcgaaacctacattcacgagggcctcaagctggcgaatgagcaaatacagaaagcggggggcctgaaaacaagttctattatcattgcactcactgacggcaagctggacggcttggtgccaagttacgccgaaaaagaagccaaaatctcgaggtccttgggggcgagcgtctactgcgtcggtgtcctggattttgagcaggcacagctggaaaggattgcagactccaaggagcaagtgttccccgtgaaagggggatttcaggctttaaaaggaattatcaactcatccaatggcatcgccgcaattattgttattctcgtcctcttgctgctgctaggaatcggactaatgtggtggttttggcccctgtgctgtaaagttgtgataaaggaccctccgcccccccccgcgcctgcccctaaagaggaggaggaggagccgctacccactaagaaatggcccacagtcgatgcaagctactacggaggccggggggttggcggaattaagagaatggaggtccgatggggggataaaggctcaaccgaagaaggagccaggctcgagaaggccaagaatgctgtcgttaagatcccagaggaaactgaggagcctattagacctcgacccccaagacccaagcccacccaccagccaccgcaaacaaaatggtatacacccataaaaggacggcttgacgccttatgggctttactgaggaggcaatatgatcgcgtgtcccttatgcgaccccaggagggagacgaggtgtgtatttgggagtgcatcgagaaagagctcaccgcatag

SEQ ID NO: 230810 - DNA, 1467 bp, Artificial Sequence
  derived and/or modified sequence
atggtggccgagcggagccccgcccggagccccggcagctggctgtttccaggcctgtggcttctagtgctgtctggcccaggtggcttgttacgcgcacaggaacagccatcatgtcgccgggcctttgatctttactttgtgttggataagagtgggagtgtagcgaacaattggatcgagatctacaattttgtacaacaattagcggaaagattcgtctctcctgagatgaggttgtcctttattgtgttttcaagtcaggctaccattatactgcctctaaccggggatcgtggcaagataagcaaagggttagaagatctaaaacgggtgtcacccgttggtgagacatatattcacgaaggcctaaaactagccaatgagcaaattcagaaggctggtggactgaaaacttcttcaatcatcattgcgctgaccgacggcaagctggacggcctggtgccgtcctacgccgaaaaggaagctaagatatcccgctcactaggagcttccgtttactgtgtgggagtcctggactttgagcaggcccagctcgagagaattgccgactccaaggagcaggtgttccctgtgaagggcggctttcaggctttgaaaggcatcatcaactccattctggcgcagagttgcacggagattctggaactgcagccttcgagcgtatgcgttggtgaggagttccagatcgtactgtccggcagaggcttcatgctgggaagccggaatggtagcgtcttgtgcacttataccgtgaatgaaacctacacaacctccgtgaaaccggtgagtgttcagctaaattccatgctctgccccgcgccaattctgaacaaggcaggcgaaacactggatgtgtccgtcagttttaacgggggcaagagcgttatttccggttcactgatcgttaccgcaacggaatgttcaaacggcattgctgcaattatcgttatcctggtgctgctgctgctcctgggcattggactgatgtggtggttttggcctctctgttgcaaggttgtgatcaaggacccaccgcccccgccagcaccggcccccaaagaggaggaggaggaaccactgccaacaaagaaatggcccactgtcgatgcgtcatactatggtggccgcggcgtgggcggaattaaacgtatggaggtgcgctggggcgacaaggggtctacagaagaaggtgcaagattggagaaggccaagaacgcggtggtcaaaatccccgaggagaccgaagaaccaattcgaccacggccaccaaggcctaagcccacccatcaaccccctcaaacgaaatggtacacgccaatcaagggacgcctagatgcactctgggcccttctccgtagacaatatgacagagtttcactaatgcgaccacaggagggggatgagggccggtgcatcaacttttcgcgggttccatcacagtag

SEQ ID NO: 230811 - DNA, 969 bp, Artificial Sequence
  derived and/or modified sequence
atggtggcagagcgctcgcccgcacggagtcccggttcatggctctttccaggcctctggttactggtgctgagtggtcctggagggctgctgcgtgcacaggagcagccttcatgtaggcgtgcatttgatctatacttcgttctggacaaaagtggcagtgtggccaacaattggatcgaaatctataattttgtccagcaactagcagaaagattcgtgagtccagagatgcgtctgtcattcattgtgttttcctctcaggccacaattattcttcccttgacaggcgaccgaggaaagatttccaaaggactcgaggacttgaagcgagttagcccggtcggagagacatacatacatgagggcctcaaattggccaacgaacagatccagaaggctggcggactgaaaaccagcagcataattatagcattgaccgacgggaaattagatggcctcgtacctagctatgcagaaaaggaggctaaaatctctcggtcccttggagcaagcgtatactgcgtgggagttctggacttcgaacaggctcaactcgagcggatcgccgatagtaaagagcaagtgttccctgtgaagggaggatttcaggctctcaaaggtataattaacagcattctggcccagagttgtacggaaatcctggaattacaaccgtccagcgtgtgcgtcggggaagagttccagatcgtgctcagtgggagagggttcatgctaggatcacgcaacggtagtgttctctgcacctacaccgtaaacgagacctacaccactagcgtgaagcctgttagcgttcagctgaatagtatgctgtgccccgctccaatcttgaataaggccggtgaatggggactcacagttacccaggctggggtgaaatggcacgatctgacccactgtactttcggacttagcggttcaggcgatcctcctacgagcgcctcctag

SEQ ID NO: 230812 - DNA, 1161 bp, Artificial Sequence
  derived and/or modified sequence
atggtggcagagcggagcccagcccgaagccccggatcttggctatttccaggcctttggctgctggtactctcagggcctggaggcctgctgcgagcccaggagcaaccttcctgcaggagggcttttgatttgtatttcgtcctggacaagtctggtagtgtggccaataattggatcgaaatatacaattttgtgcagcaattggccgaacgtttcgtaagtccagagatgcggcttagcttcatcgtattcagttctcaagccaccatcatactgccccttaccggggatcggggaaaaatctccaaaggtctggaagatttgaaacgggttagtcctgtcggggagacgtacattcacgaaggattgaagctcgctaacgagcaaattcaaaaggcagggggtttgaagacgtcttcaatcattatcgcactgactgacggtaaacttgatggactagttccgtcttacgccgaaaaggaagccaagatttcgagatctctgggcgcatcagtatattgtgtcggggtgttggattttgaacaggctcagctagagcggatcgccgacagtaaggagcaagtgtttccagttaaagggggtttccaggcactgaagggtataatcaatagctccaacggaatcgccgcaatcatcgtgatcctcgtgctcttattgctgctgggcattggtctgatgtggtggttttggccactgtgttgcaaggtggtgattaaagaccctccacctccgcctgccccagcacccaaggaagaagaggaagaacctttaccaacaaagaagtggcccacagtggacgccagctactatggtggacgaggagtcggcggaattaagaggatggaggtgcgctggggggacaagggttctacagaagaaggagctcggttagagaaggctaagaatgcagtggtcaagatcccagaagagacggaggaacctatacgcccacgaccaccgcgtcctaagccaacccatcagccaccgcagactaaatggtacacgccaataaaagggaggttggacgctctgtgggccttattaaggaggcaatacgatcgcgtttcactcatgagaccacaggaaggcgatgaagtctgtatctgggagtgcattgagaaggaactgaccgcgtag

SEQ ID NO: 230813 - DNA, 1467 bp, Artificial Sequence
  derived and/or modified sequence
atggtcgcggagagaagccccgctagatctcccggatcttggctatttccaggtctgtggcttctggtgctgtctggcccaggaggcctgctgcgtgcgcaggaacagccttcgtgtcgtcgtgccttcgatctttactttgtactagataagagcggatccgtggccaacaactggattgaaatctataattttgtacagcagctggcagaacgctttgttagcccagaaatgaggttgagttttatcgtgttcagcagtcaggcaaccattattctgccactgacaggagatagaggcaagattagtaaaggcttagaagatctgaaaagggtctctccggtgggtgaaacttatatccacgaaggtttaaagctggccaacgaacaaattcagaaagccggagggctgaagaccagttctattattattgccttgacggacgggaagctggacgggttggtgccctcttacgccgaaaaggaggccaagatttctcggtccctcggggctagtgtgtactgcgttggggtccttgactttgagcaggctcagcttgaacgcattgctgattccaaggagcaggtattcccggtcaaaggtggtttccaggccctcaagggaattattaatagtatcctggctcagtcttgcaccgaaatactagagcttcagccttcatccgtctgcgtgggagaggagttccaaatcgtgctctccggacgaggcttcatgctcggatcaaggaacggatccgttctttgtacatacacggttaatgagacctatactacaagcgtgaaacctgtgagtgtgcaactgaactcaatgctgtgccccgctccgattctaaataaggccggagaaaccctggatgtttctgtctcttttaatgggggaaagtctgtaatctccgggagtctcatagtgaccgccacagagtgtagtaatgggatagccgcaatcatcgtaatcctggtgctgctgctgctgctggggattgggctaatgtggtggttctggcccctatgttgcaaggtggtaatcaaggatccccctcctccccctgcaccagctcccaaggaagaggaagaagaacccctacccacaaagaaatggcccacagtggacgcatcctattatggaggacgtggtgtggggggaataaaacggatggaagtgcgctggggggataaggggtcaacagaagagggcgcacggctggagaaagccaaaaatgccgtggttaagatcccggaagagacggaggagcccatccgcccacggcctccgagaccaaagcctactcaccagccgcctcagaccaagtggtatacacctattaagggcagactagacgcactgtgggcccttttgagacggcagtacgaccgcgtgagcctcatgcgacctcaggagggcgatgaaggcagatgtattaatttcagcagagttcctagccagtag

SEQ ID NO: 230814 - DNA, 1732 bp, Artificial Sequence
  derived and/or modified sequence
agtcatcttcaactcggcaggaacccacaagtgtgcatgtgtggctcggaggcttcagctggggccccgccctcgtccccaggcgcacactgacacacgcagcccagacccggcccgagcgggctcctgccctcggcgtggcttctctccagccgggagtcccagggccagctagcctcctcccctaaaggggacggcctgtcagcgcagtgccagagtccagcaccgggaggaaagtttcggagtgcggagggagttggggccgccggaggagaagagtctccactcctagtttgttctgccgtcgccgcgtcccagggaccccttgtcccgaagcgcacggcagcgggggggacttcagccctccaggcggggtgggttccaggtccgggtccgaggcgggcgctggaggctcggccccaggccggagaggaactcctttcgcgagctgtcgccgtgggcccgcattgtctgcaggaactctccggaatcgggagggggaggactggatcgcgcttccactgggattcgtcaagagttccggcggcagctgcggcggtggcggagactccctttgtcctctcaggacctccctctctccctccctgtcagctggtgggtcccgctgccgcaggcgccggcgtctcagctgctcgccgccccccaccccagagtgcgtgccgggtgactcccgccacctttgcgaccctcctgagcttaggggactgcgagcgggagggagtctcaggcccccggccgcaggatggtggcggagcggtccccggcccgcagccccgggagctggctgttccccgggctgtggctgttggtgctcagcggtcccggggggctgctgcgcgcccaggagcagccctcctgcagaagagcctttgatctctacttcgtcctggacaagtctgggagtgtggcaaataactggattgaaatttataatttcgtacagcaacttgcggagagatttgtgagccctgaaatgagattatctttcattgtgttttcttctcaagcaactattattttgccattaactggagacagaggcaaaatcagtaaaggcttggaggatttaaaacgtgttagtccagtaggagagacatatatccatgaaggactaaagctagcgaatgaacaaattcagaaagcaggaggcttgaaaacctccagtatcataattgctctgacagatggcaagttggacggtctggtgccatcatatgcagagaaagaggcaaagatatccaggtcacttggggctagtgtttattgtgttggtgtccttgattttgaacaagcacagcttgaaagaattgctgattccaaggagcaagttttccctgtcaaaggtggatttcaggctcttaaaggaataattaattctatactagctcagtcatgtactgaaatcctagaattgcagccctcaagtgtctgtgtgggggaggaatttcagattgtcttaagtggaagaggattcatgctgggcagtcggaatggcagtgttctctgcacttacactgtaaatgaaacatatacaacgagtgtaaaaccagtaagtgtacagcttaattctatgctttgtcctgcacctatcctgaataaagctggagagtggggtctcactgtcacccaggctggagtgaagtggcatgatctgactcactgtacttttggcctttctggctcaggtgatcctcctacttcagcctcctga

SEQ ID NO: 230815 - DNA, 1343 bp, Artificial Sequence
  derived and/or modified sequence
cgctgccgcaggcgccggcgtctcagctgctcgccgccccccaccccagagtgcgtgccgggtgactcccgccacctttgcgaccctcctgagcttaggggactgcgagcgggagggagtctcaggcccccggccgcaggatggtggcggagcggtccccggcccgcagccccgggagctggctgttccccgggctgtggctgttggtgctcagcggtcccggggggctgctgcgcgcccaggagcagccctcctgcagaagagcctttgatctctacttcgtcctggacaagtctgggagtgtggcaaataactggattgaaatttataatttcgtacagcaacttgcggagagatttgtgagccctgaaatgagattatctttcattgtgttttcttctcaagcaactattattttgccattaactggagacagaggcaaaatcagtaaaggcttggaggatttaaaacgtgttagtccagtaggagagacatatatccatgaaggactaaagctagcgaatgaacaaattcagaaagcaggaggcttgaaaacctccagtatcataattgctctgacagatggcaagttggacggtctggtgccatcatatgcagagaaagaggcaaagatatccaggtcacttggggctagtgtttattgtgttggtgtccttgattttgaacaagcacagcttgaaagaattgctgattccaaggagcaagttttccctgtcaaaggtggatttcaggctcttaaaggaataattaattcttctaacgggatcgcagccatcattgttattttggtgttactgctactcctggggatcggtttgatgtggtggttttggcccctttgctgcaaagtggttattaaggatcctccaccaccacccgcccctgcaccaaaagaggaggaagaagaacctttgcctactaaaaagtggccaactgtggatgcttcctattatggtggtcgaggggttggaggaattaaaagaatggaggttcgttggggtgataaaggatctactgaggaaggtgcaaggctagagaaagccaaaaatgctgtggtgaagattcctgaagaaacagaggaacccatcaggcctagaccacctcgacccaaacccacacaccagcctcctcagacaaaatggtacaccccaattaagggtcgtcttgatgctctctgggctttgttgaggcggcagtatgaccgggtttctttgatgcgacctcaggaaggagatgaggtttgtatatgggaatgtattgagaaagagctaactgcttgagtcagtataatggaggcagggaaatagtaataaaaaatgatt

SEQ ID NO: 230816 - DNA, 8273 bp, Artificial Sequence
  derived and/or modified sequence
tttcggagtgcggagggagttggggccgccggaggagaagagtctccactcctagtttgttctgccgtcgccgcgtcccagggaccccttgtcccgaagcgcacggcagcgggggggacttcagccctccaggcggggtgggttccaggtccgggtccgaggcgggcgctggaggctcggccccaggccggagaggaactcctttcgcgagctgtcgccgtgggcccgcattgtctgcaggaactctccggaatcgggagggggaggactggatcgcgcttccactgggattcgtcaagagttccggcggcagctgcggcggtggcggagactccctttgtcctctcaggacctccctctctccctccctgtcagctggtgggtcccgctgccgcaggcgccggcgtctcagctgctcgccgccccccaccccagagtgcgtgccgggtgactcccgccacctttgcgaccctcctgagcttaggggactgcgagcgggagggagtctcaggcccccggccgcaggatggtggcggagcggtccccggcccgcagccccgggagctggctgttccccgggctgtggctgttggtgctcagcggtcccggggggctgctgcgcgcccaggagcagccctcctgcagaagagcctttgatctctacttcgtcctggacaagtctgggagtgtggcaaataactggattgaaatttataatttcgtacagcaacttgcggagagatttgtgagccctgaaatgagattatctttcattgtgttttcttctcaagcaactattattttgccattaactggagacagaggcaaaatcagtaaaggcttggaggatttaaaacgtgttagtccagtaggagagacatatatccatgaaggactaaagctagcgaatgaacaaattcagaaagcaggaggcttgaaaacctccagtatcataattgctctgacagatggcaagttggacggtctggtgccatcatatgcagagaaagaggcaaagatatccaggtcacttggggctagtgtttattgtgttggtgtccttgattttgaacaagcacagcttgaaagaattgctgattccaaggagcaagttttccctgtcaaaggtggatttcaggctcttaaaggaataattaattctatactagctcagtcatgtactgaaatcctagaattgcagccctcaagtgtctgtgtgggggaggaatttcagattgtcttaagtggaagaggattcatgctgggcagtcggaatggcagtgttctctgcacttacactgtaaatgaaacatatacaacgagtgtaaaaccagtaagtgtacagcttaattctatgctttgtcctgcacctatcctgaataaagctggagaaactcttgatgtttcagtgagctttaatggaggaaaatctgtcatttcaggatcattaattgtcacagccacagaatgttctaacgggatcgcagccatcattgttattttggtgttactgctactcctggggatcggtttgatgtggtggttttggcccctttgctgcaaagtggttattaaggatcctccaccaccacccgcccctgcaccaaaagaggaggaagaagaacctttgcctactaaaaagtggccaactgtggatgcttcctattatggtggtcgaggggttggaggaattaaaagaatggaggttcgttggggtgataaaggatctactgaggaaggtgcaaggctagagaaagccaaaaatgctgtggtgaagattcctgaagaaacagaggaacccatcaggcctagaccacctcgacccaaacccacacaccagcctcctcagacaaaatggtacaccccaattaagggtcgtcttgatgctctctgggctttgttgaggcggcagtatgaccgggtttctttgatgcgacctcaggaaggagatgagggccggtgcataaacttctcccgagttccatctcagtaaaagggaagcaggaagaccaagaaggtacgaagatggcacattttcacatagctgattttcaaccaaatgaaaaaaatcaagtgcatttcagaagcttttggaagagcagcttaattcctctcagtcgggaaatgttttctctgccttctgctttgcttgcaccaaacatttctaaacacttgttctgccatctacatgggaggtgatgaaactcagtggtaactcatgatttatgacattgaaaataaagaggaacattgacctgcagactatggtttgtacaagaaagtttgtttgaatgtgtagaagaggaaaaagcaacaacagcaacaacacgaagatgataccaaaacaaggaccacaaaacaactagccatgatgggagacaggagttttttacatggaaacatggcacttgtgtttttatgtggcaagatctttatccataggcagagtatgaaatttcccaccaggctaagcaaataaagaagtccattgccttatagctatgtcagatcacagaatccttccaagtgctctatcacagtgtgccttatgggaagtttctgactggaaaatcttgtcattctaacactgaaaagtgcacacgcatgacaaaatgtagacaagatgcctcaaggtattggtagcaagcaagattttgccctttagttttcgaagacacctttctttcattatgcactcgggacaagaaaattaatagagcgttattccacagaaggcctctagccagagatcttgagtgtagtgcaagggactcattttttgcgaacttgtccctgtgactagtagattcccccttttcctgtgtttaggatttagtagtgcataaagcattaatatccataaacatacctagaagtttgttttgcttttaatttaaaggaagcagtaaccacaaagcttccgctcagggttttttctttcttcaagtctccaagggctcttcagcgtcacaagccagcaactctctttgcattaaaatttcaaagtttaattaatataattaaaagcaacagcaagcagcagcctgtgaagattttgctcatcttttttatgccttttgacattgaatgacctattactgtatgcgcattacttggattttgaggggcactctaccttggttatgattcagtagaggaaaaagaccacctttcttcaatttacaaattaaatcttctggagggtcgctatcacaaaacattgacgatgtatgtattataattttttagaaaaaccaccatcgtgtcacgtcgacgatgccaaattatgttagcgtgagcagaaacaccgtgggggaggaaggcagcagctgaagaaaaaagctcaaatgatctagtcactttcgatactgtacttcagatgcgaaatggatattcgagtggaaacctgacaaagtgcgcctgctttgatgtgaactggtatagacaatgaccagtggctgggtcagtgggatgtctctctgtgagcacaaaggcttatcaaatgacactaaaaataagttcaacaaccatcacattggaagggagaaggcgaacatttcatgtttggcgggcatgtgagtgcacaagatggaaagagcgattggagcatcctggtataattacccccattgtgctcttaatggaaatttcaaaggacgggagtattctgttggttggtgtccaggtttgtggcactgttccaagaggccttacacacacacacaaatatataattttctatacatatatatcctctagcttgaaacttttgctcaagtttatttatgtcactggctggctggatccaaagtcatgtgtccacacattcataaataaaaattttacctatgcctgtgctaccatttctttaagcccacataaagctaatgccttcttgggttgaatatgcagttgttatgcttagtttcagggatggaattctattcagttccaaaatgtccctcatgttcacagatgatactattggcagtagctgcatatgcaagtgtaacttggaagcctgatatagtatacccaaccctttctgcaatgagttattgtatccctttgttctgcatttgcatctggaacaagacctaatgtggcttccttaaatgggcacttcatttctgatgagtgcacaccaattattgctattttaatatcattgagaatactacagaagctaaggctatgtttctttggtaactacttcaaatttctctagaattatgtagcatacttacattttgctgcatgaacaatgaaaattaacctctgcctttaaatggaaaaataactttctgtagattgttatacagctactatgaagagctcttaatgaagaggaagtggcagtggtctatatgtagactgaaaaaatatcattaataaagttcaaagactgatggaatttcattgcccttaaagatatgaaccagatctgttttatgcttttctccaattatactaactagcagttgaaaagaatttgttttgaagagtgttattttcttaccaaaagaccagatcaaaaatccctatacttttccaccaaaaaaagattaaaatgaagccatttctataaatttaatggcactttatattttatatagagaaatagcttctgtttgattttctggacaccatgtcagtcaagatctactttctgtgtaaaaatgaataagtcttgcacataatccattcgtgttgcataaggttgcaaaaacaattaagtgggaaatgactcctaacttatgtgtctactctgcctagaaagaaagttttgaaggcatctatatatatttcataacaatgtctgttctttatggatttgatccataaatatttatctatctgaaaactttgatacttggaatgttttccttagagcatttggtgctccaagaaaaaacatttggtgctaagagttgcagcactgatgcctttccctaagttaattctattttaaaaatttatatttccttcccaatgagatgcagagtaaaatttgagaccctccattgactagggagcagcatctgtcatctatggttaattactattttgacaaaaatatagaaggtttaaacccccatgtatttcagattgttagagaaagaagtagtttgcttatatttcccttgaactttattctaaccatttaaataataaattattcaatatttgttataataaatccttactagatacaagatttgggtgtttctgtgaagttaactttattatctaaatatcactaaccattgtttactgctcagaggcagatacatttgtttagtttaaagttgaaacaaattctatattgtggataattaggtgtttaaaacattttgatagaccagcttatatatgttatttttgaaatttaagaaggcagaatgtaattaggtcacatttacaagtagaaggaattataacttcctactccatgcatatattgtatattggttagcttttactagcattttctagcatcacattactttagaaagtttttgagagtttcattactactggaaaagtttggtgggtatatgtacacaggaaagaaatatatgcatcatttcaatatgaaaggaaatacataatctagaaacatagaataactcttggtacatctgttacatagttaaggaaagaaacaggcaggtgaggctggagaatgttgtctatttgtaggaaataaagtcagtgcagacgcatattctagtttagagttagattaatattgtgcttagtgaatttctatgacatatttctgagaacactttaatatatttccacacctactggaatctaattcagtcgatcggataaaagaaagacttttttgttgttgtttttgaaaatccataatgtagcaggttctgcgctggttttttaatgtattttatttttgtgctctcctgccaaaagaaaaggctgataagtaagtacacagtacaacatgtaaatttgtataaaaatatgcttgtttagattgctctacaataactatattaaggtaaattgtgtgtgtgtgtgtgagagagagagagagagagagaaacagagggagaattgactcaatgtgttttctatgaagagtcttagcttaggaatcaggtaacagagaggtcctagaccatagacccagccatcaactagcttgctgatgttgaacagatcaactctcaaccatagactgaagatggaatgaagatatcaaaagttccttttagcactgactagattttttttcttttttttgaaacagagtctcactctgtcacccaggctggagttcaatggcatggtctgggctgactgtaacctcctcttcctgggttcaagtgattctcatccctcagcctcctgagtagctgggattacaggcacataacaccacacccagctaactcttgtatttttgtagaaatggggtttcgctatgttgctcagactggtctcaaacacctggcctcaagtgatcctcctgcctcagtctcccaaatgctgtgattacaggcacaagctactgcaccaggcctctgactacatttctattaatatggttaggttggaggttttagtatttttgtatctcatatttgtatcaatatgactggcttctttgtctgtagtgtgtggtaatattagttctgtaaactgtcagttgcaaaaaaaaaaaataccttgaactatagtatatgttgataattagccataataatttcttagttaatttcttataattaaatttgtcaaagaggaaacttacagtttatatctgatgaaatctctaaaaagatgggtaaaacattgggaaatgtatgcatgtacttcactctggtttcatagggttagcaagtgtcttaaaaacatatataaagaagcacagagattgttaggagatatttatgctcccagttttaataattgggatactttgtataccacagaaagaaaaattactaaactcctctttttttagtcaaaattggaaaaaaagtcttaattgacagttactatgcctgtgctacccatagcaagtattcagtggaaaatactttactaagtaagtaatttgaacacagcttaaaatccatagtatgttacaattgctagcctttcacaaagtttgcattgtcttaatgtagaaggatactgtgatctaagaattcacaattttaaaaagtggaacctaaatagggtttcctaattgccatgaagttatttgtatcttagatgaattatatttacaacattgtaaatgtcagtgggtgatccaaaataaattgttaaagttattaaaatgtacatttaagtaggtttcagtttgactagaaataattggcaagaaggcaagaactagtcttctagagcagggatcccatcccccaggtcatggactggtactggtccatggcctgttagaaaccaggccacacagcaggagatgagtggaaagcaagtgaaacttcatgggtatttacagcaattccccgtcgctcgcattaccacctgagctgtgtctcctgtgagatcagcagcagcattagattctcaaggagcacaaacccttttggaactgtgtgtgagggatctaagttgcgcatttcttatgagaatctaatacctgatgatctgttgttgtctcccaccacccccagatgggaccatctagttgcaggaaaacaagctcaggctcccactgattctacattatagtgagttgtgtaattatttcattatatataacaatgtaataataatagaaataaagtacataataaatgtaatccacttgaattatcctgaaaccatccccaccccccaccccccggtctgtggaaaaattggcttccacgaaactggtccgtggtgccaaaaatattgggtatggttgttctagggtgtagactatgaaaaagatatgcattgtctccatgaactaaaaggcaaggtgattttaaacaatttagatgccaaacaaagaaaccaaaagcttccaaagtaataaatgatagagaaaggaaattgttacatcatgtgccaaattagaagcaaatctaaacttcttatcatgtactccaccatctgatttgtataagtaattggggaaagaaaaactcacaatataaaacaagattgactagttctagcagatgacacctgtaaatagaatttttactagttgaaattctgatgtgaaatgaagccattattattatcacaataaagtgttctttttagttctttttttaata

SEQ ID NO: 230817 - DNA, 969 bp, Artificial Sequence
  derived and/or modified sequence
atggtggccgagagaagccccgccagaagccccggcagctggctgttccccggcctgtggctgctggtgctgagcggccccggcggcctgctgagagcccaggagcagcccagctgcagaagagccttcgacctgtacttcgtgctggacaagagcggcagcgtggccaacaactggatcgagatctacaacttcgtgcagcagctggccgagagattcgtgagccccgagatgagactgagcttcatcgtgttcagcagccaggccaccatcatcctgcccctgaccggcgacagaggcaagatcagcaagggcctggaggacctgaagagagtgagccccgtgggcgagacctacatccacgagggcctgaagctggccaacgagcagatccagaaggccggcggcctgaagaccagcagcatcatcatcgccctgaccgacggcaagctggacggcctggtgcccagctacgccgagaaggaggccaagatcagcagaagcctgggcgccagcgtgtactgcgtgggcgtgctggacttcgagcaggcccagctggagagaatcgccgacagcaaggagcaggtgttccccgtgaagggcggcttccaggccctgaagggcatcatcaacagcatcctggcccagagctgcaccgagatcctggagctgcagcccagcagcgtgtgcgtgggcgaggagttccagatcgtgctgagcggcagaggcttcatgctgggcagcagaaacggcagcgtgctgtgcacctacaccgtgaacgagacctacaccaccagcgtgaagcccgtgagcgtgcagctgaacagcatgctgtgccccgcccccatcctgaacaaggccggcgagtggggcctgaccgtgacccaggccggcgtgaagtggcacgacctgacccactgcaccttcggcctgagcggcagcggcgacccccccaccagcgccagctag

SEQ ID NO: 230818 - DNA, 1161 bp, Artificial Sequence
  derived and/or modified sequence
atggtggccgagagaagccccgccagaagccccggcagctggctgttccccggcctgtggctgctggtgctgagcggccccggcggcctgctgagagcccaggagcagcccagctgcagaagagccttcgacctgtacttcgtgctggacaagagcggcagcgtggccaacaactggatcgagatctacaacttcgtgcagcagctggccgagagattcgtgagccccgagatgagactgagcttcatcgtgttcagcagccaggccaccatcatcctgcccctgaccggcgacagaggcaagatcagcaagggcctggaggacctgaagagagtgagccccgtgggcgagacctacatccacgagggcctgaagctggccaacgagcagatccagaaggccggcggcctgaagaccagcagcatcatcatcgccctgaccgacggcaagctggacggcctggtgcccagctacgccgagaaggaggccaagatcagcagaagcctgggcgccagcgtgtactgcgtgggcgtgctggacttcgagcaggcccagctggagagaatcgccgacagcaaggagcaggtgttccccgtgaagggcggcttccaggccctgaagggcatcatcaacagcagcaacggcatcgccgccatcatcgtgatcctggtgctgctgctgctgctgggcatcggcctgatgtggtggttctggcccctgtgctgcaaggtggtgatcaaggaccccccccccccccccgcccccgcccccaaggaggaggaggaggagcccctgcccaccaagaagtggcccaccgtggacgccagctactacggcggcagaggcgtgggcggcatcaagagaatggaggtgagatggggcgacaagggcagcaccgaggagggcgccagactggagaaggccaagaacgccgtggtgaagatccccgaggagaccgaggagcccatcagacccagaccccccagacccaagcccacccaccagcccccccagaccaagtggtacacccccatcaagggcagactggacgccctgtgggccctgctgagaagacagtacgacagagtgagcctgatgagaccccaggagggcgacgaggtgtgcatctgggagtgcatcgagaaggagctgaccgcctag

SEQ ID NO: 230819 - DNA, 1467 bp, Artificial Sequence
  derived and/or modified sequence
atggtggccgagagaagccccgccagaagccccggcagctggctgttccccggcctgtggctgctggtgctgagcggccccggcggcctgctgagagcccaggagcagcccagctgcagaagagccttcgacctgtacttcgtgctggacaagagcggcagcgtggccaacaactggatcgagatctacaacttcgtgcagcagctggccgagagattcgtgagccccgagatgagactgagcttcatcgtgttcagcagccaggccaccatcatcctgcccctgaccggcgacagaggcaagatcagcaagggcctggaggacctgaagagagtgagccccgtgggcgagacctacatccacgagggcctgaagctggccaacgagcagatccagaaggccggcggcctgaagaccagcagcatcatcatcgccctgaccgacggcaagctggacggcctggtgcccagctacgccgagaaggaggccaagatcagcagaagcctgggcgccagcgtgtactgcgtgggcgtgctggacttcgagcaggcccagctggagagaatcgccgacagcaaggagcaggtgttccccgtgaagggcggcttccaggccctgaagggcatcatcaacagcatcctggcccagagctgcaccgagatcctggagctgcagcccagcagcgtgtgcgtgggcgaggagttccagatcgtgctgagcggcagaggcttcatgctgggcagcagaaacggcagcgtgctgtgcacctacaccgtgaacgagacctacaccaccagcgtgaagcccgtgagcgtgcagctgaacagcatgctgtgccccgcccccatcctgaacaaggccggcgagaccctggacgtgagcgtgagcttcaacggcggcaagagcgtgatcagcggcagcctgatcgtgaccgccaccgagtgcagcaacggcatcgccgccatcatcgtgatcctggtgctgctgctgctgctgggcatcggcctgatgtggtggttctggcccctgtgctgcaaggtggtgatcaaggaccccccccccccccccgcccccgcccccaaggaggaggaggaggagcccctgcccaccaagaagtggcccaccgtggacgccagctactacggcggcagaggcgtgggcggcatcaagagaatggaggtgagatggggcgacaagggcagcaccgaggagggcgccagactggagaaggccaagaacgccgtggtgaagatccccgaggagaccgaggagcccatcagacccagaccccccagacccaagcccacccaccagcccccccagaccaagtggtacacccccatcaagggcagactggacgccctgtgggccctgctgagaagacagtacgacagagtgagcctgatgagaccccaggagggcgacgagggcagatgcatcaacttcagcagagtgcccagccagtag

SEQ ID NO: 230820 - protein, 918 aa, Artificial Sequence
  derived and/or modified sequence
MLQGTCSVLLLWGILGAIQAQQQEVISPDTTERNNNCPEKTDCPIHVYFVLDTSESVTMQSPTDILLFHMKQFVPQFISQLQNEFYLDQVALSWRYGGLHFSDQVEVFSPPGSDRASFIKNLQGISSFRRGTFTDCALANMTEQIRQDRSKGTVHFAVVITDGHVTGSPCGGIKLQAERAREEGIRLFAVAPNQNLKEQGLRDIASTPHELYRNDYATMLPDSTEIDQDTINRIIKVMKHEAYGECYKVSCLEIPGPSGPKGYRGQKGAKGNMGEPGEPGQKGRQGDPGIEGPIGFPGPKGVPGFKGEKGEFGADGRKGAPGLAGKNGTDGQKGKLGRIGPPGCKGDPGNRGPDGYPGEAGSPGERGDQGGKGDPGRPGRRGPPGEIGAKGSKGYQGNSGAPGSPGVKGAKGGPGPRGPKGEPGRRGDPGTKGSPGSDGPKGEKGDPGPEGPRGLAGEVGNKGAKGDRGLPGPRGPQGALGEPGKQGSRGDPGDAGPRGDSGQPGPKGDPGRPGFSYPGPRGAPGEKGEPGPRGPEGGRGDFGLKGEPGRKGEKGEPADPGPPGEPGPRGPRGVPGPEGEPGPPGDPGLTECDVMTYVRETCGCCDCEKRCGALDVVFVIDSSESIGYTNFTLEKNFVINVVNRLGAIAKDPKSETGTRVGVVQYSHEGTFEAIQLDDERIDSLSSFKEAVKNLEWIAGGTWTPSALKFAYDRLIKESRRQKTRVFAVVITDGRHDPRDDDLNLRALCDRDVTVTAIGIGDMFHEKHESENLYSIACDKPQQVRNMTLFSDLVAEKFIDDMEDVLCPDPQIVCPDLPCQTDAPWPGGEPPVTFLRTEEGPDATFPRTIPLIQQLLNATELTQDPAAYSQLVAVLVYTAERAKFATGVERQDWMELFIDTFKLVHRDIVGDPETALALC

SEQ ID NO: 230821 - DNA, 2757 bp, Artificial Sequence
  derived and/or modified sequence
atgctccaaggcacctgtagtgtgctgctgttgtggggtattcttggagccatccaggcgcagcagcaggaagttatatcccctgataccacagagcgcaataataactgtcctgaaaaaaccgactgtcccatacacgtctattttgttcttgacacaagcgaatctgtgactatgcagtcccccactgacatcctcctgttccacatgaagcaattcgttccccagtttatctcacagctgcaaaacgaattttatctcgatcaggtggcccttagttggagatacggaggcttgcatttcagcgatcaggtggaagtgttctcccctccaggaagcgacagggctagctttataaaaaatttgcagggaatctcctccttcagacgaggcacattcaccgactgcgccttagccaacatgaccgaacagatcagacaagaccgcagcaagggtaccgtgcacttcgccgtggtgataaccgatggacacgtcactggctctccttgcgggggcatcaaactgcaagctgaacgagcccgggaagaagggattagactgttcgcggttgcacctaaccagaatctcaaagaacaaggattgcgagatatcgcctccacacctcacgaactgtaccgcaacgattatgcgacaatgttgccagactccacagaaattgatcaggatactatcaaccggataatcaaagttatgaagcatgaagcatacggggagtgttacaaagtctcctgcctagaaatccccggtccatcaggtccaaagggctacaggggccaaaaaggagccaagggtaacatgggagaacccggcgagccaggccagaaaggtcggcagggagaccccggaatcgaagggcccatcggcttccccgggccgaagggagttccaggttttaaaggagaaaagggggagttcggagctgacggtcgaaagggcgcccctggactggccggaaaaaacgggaccgatgggcagaaggggaaactgggccggatcggcccaccaggctgcaagggggatcccggtaacagaggccctgacggctatcccggcgaagccggatcacctggcgaacgaggagaccagggggggaaaggggacccaggtcggcccggaagacgcggtccaccaggcgagattggggccaaagggtccaagggttatcagggaaactccggcgctccaggctcccccggggtaaaaggggccaaagggggtcccggtccacgcggtcctaaaggagagccaggccggaggggcgaccccgggactaagggttcccccgggtccgatggacccaagggagaaaaaggtgacccagggcccgaaggccccagagggcttgccggggaggtgggtaataagggcgccaagggcgataggggtctgcctggaccccggggaccccagggggccttgggcgagccaggcaagcaagggtccagaggcgaccccggtgacgcaggccccagaggagactctggacagcctgggcccaagggcgaccccggtcggccaggattcagctaccccggtcctcgcggggccccaggagaaaaaggcgaaccagggcctcgagggcccgaaggagggcgaggtgattttggcctgaaaggagaaccagggcgcaaaggagaaaagggggagcctgctgatcccggaccccccggggagcccggaccaagaggacccaggggcgttcctgggcccgagggagagcccggacccccgggcgaccccggcttgactgaatgtgacgtgatgacctatgttcgcgagacgtgtgggtgctgcgactgcgaaaaaaggtgtggcgcacttgacgtggtgtttgtgatcgatagctctgaaagcattggttataccaattttacgttagaaaagaactttgtgataaatgtcgtgaatcgtctgggcgccatcgctaaggatccaaagagcgagaccggtacccgggtcggggttgtgcagtactcacatgagggaacctttgaagctattcagctcgacgacgagcggatcgactcactgagtagcttcaaggaggctgtaaaaaacctggaatggatcgccggaggaacctggacaccatccgctctaaagtttgcgtatgaccgacttataaaagagagcagacgacagaaaacccgtgtgttcgcagtggtcataacagatgggaggcacgaccctcgggatgatgatcttaatctccgagccttatgtgatagggacgttacggtcacggctattggcatcggagatatgttccatgaaaagcacgagagtgaaaacctatacagcatagcatgtgacaaaccccaacaggtgcgcaacatgacgctcttttctgacctggtggcagaaaagttcatagacgatatggaggatgttctgtgccccgatccgcaaattgtatgtcctgacctgccatgccagacggacgccccttggcccggaggtgagcctccagttactttccttagaacagaagagggacctgatgctacatttcccagaacaattcctttaattcagcagcttttgaacgcaaccgaactgacacaagatcccgcagcttactcacagctggtggcagtcttggtttatacagccgagcgcgcgaaattcgcaaccggagtggagaggcaggattggatggaactattcatagacacttttaaattagtgcatcgggatatagttggtgatcccgagacagctctcgctctgtgctag

SEQ ID NO: 230822 - DNA, 2757 bp, Artificial Sequence
  derived and/or modified sequence
atgctgcagggtacctgtagcgtgctcctgctttggggcattctcggggccattcaggcacagcagcaggaggtgatctctcctgataccaccgaaaggaataacaactgccctgaaaagacggactgtcctatacacgtgtattttgtactcgacaccagtgaaagtgtcactatgcaaagtccgactgatatcctccttttccacatgaagcagtttgtgccacaattcattagccaattgcaaaacgagttctatctggaccaggttgctctctcatggcggtacgggggcttacatttttcagaccaggtcgaggtgtttagccctccagggagcgatagggcttccttcattaagaatctgcagggaatctcatcattccggagaggaaccttcacggattgcgcgctcgccaacatgaccgagcagattcgacaggacaggtcaaaggggacggtgcacttcgccgtagtgataacagacggccacgtgaccggctctccctgcggcggcataaagctgcaggctgaacgggcccgagaagaaggaattcgccttttcgccgtggccccaaatcagaacctgaaggagcagggcttaagagacatcgcatcaacaccccatgagctctaccggaatgactacgcaacaatgttgccagacagcaccgaaatcgaccaggataccattaacaggataatcaaggttatgaagcacgaggcctacggggaatgttacaaggtctcctgtttggaaatcccgggcccaagtggccctaagggctaccgggggcaaaaaggtgcaaagggcaacatgggcgaacccggcgagcccggtcagaagggtcgtcagggcgatcctgggatcgagggcccaattggcttcccgggaccaaaaggggtgcccggctttaagggcgagaagggggagtttggagctgatgggcgaaagggcgcccccggattggcaggcaaaaacggtaccgacggtcagaaggggaagctaggcaggattggcccacctggctgcaagggggatccgggaaaccgaggacccgatggctatccgggtgaggccggctctcccggggaaaggggcgaccagggcgggaagggcgatcccggtcggcccggtcggcgtggaccacctggagagattggcgccaagggcagcaaaggttaccaagggaacagtggtgccccagggtcccctggcgtgaaaggagctaagggcggccccggacccagagggcctaagggggaaccaggcagacgaggcgaccctggaaccaaaggatctccggggagcgatgggcccaaaggtgagaagggggatcctggccccgaagggccaaggggactggctggtgaagtgggaaacaaaggcgccaagggcgaccggggcttgccgggaccccgcggaccacaaggagcactaggggagcccgggaagcagggctctagaggggacccaggggatgcagggccacgcggggacagcgggcagccaggacccaaaggagatccagggaggcctggattctcttaccctggacctcggggggctcctggcgagaagggcgaacccggaccacggggtccagagggcggaagaggtgattttggtttaaagggtgagcctgggaggaagggagaaaagggcgaaccagcagaccccgggcccccaggggagccggggccaagaggcccgcgcggtgtcccaggacccgagggcgaacccgggcctcctggcgaccctgggctgactgagtgtgatgtcatgacatacgtgcgagaaacctgcgggtgctgcgactgtgagaagcgatgtggtgcacttgacgtggtgtttgtcattgactcttccgagtccattgggtacacaaacttcacattggagaaaaattttgtcatcaatgtcgtgaatcggcttggcgccatagcaaaagaccccaagtccgaaaccggcactagggtcggtgtcgtgcagtatagtcacgaaggaacctttgaggcaatccaactcgatgatgagcgcattgattccttatctagctttaaagaggccgtgaagaatctggaatggattgctggcggtacatggacccccagcgctctgaagttcgcgtatgaccgcttgatcaaggagagcaggagacaaaaaactcgcgtattcgccgtcgtcatcacggatggtcgacacgacccacgcgacgacgatcttaacctgagagctctttgtgaccgagacgtgacggtgactgctataggcattggagacatgtttcacgagaaacacgagtctgaaaacctgtacagcattgcctgcgacaaaccccagcaggtcagaaacatgacccttttctcggatctcgtagctgagaagttcatcgatgatatggaggacgtcttatgtcccgacccgcagatcgtttgcccagatcttccctgtcaaacagatgccccatggcctggaggagagccaccagtcacatttctgcgaaccgaggaggggccagacgctacattccccagaaccatccctctgatacagcagctgctgaatgctaccgaactgacacaggaccccgctgcctactctcagctagttgccgttctcgtgtatacagcagagcgggccaagtttgctacaggtgtagagcgccaggactggatggaactgttcatcgacacttttaaactggtacatagagatatcgttggggacccggagacagctctggcactgtgctag

SEQ ID NO: 230823 - DNA, 2757 bp, Artificial Sequence
  derived and/or modified sequence
atgctgcagggcacctgcagcgtgctgctgctgtggggcatcctgggcgccatccaggcccagcagcaggaggtgatcagcccagacaccacagaaagaaacaacaactgcccagagaagacagactgccccatccacgtgtactttgtgctggacaccagcgagagcgtgaccatgcagagccccacagacatcctgctcttccacatgaagcagtttgtgccccagttcatcagccagctgcagaatgagttctacctggaccaggtggccctgtcctggaggtatggaggcctgcacttcagtgaccaggtggaggtgttcagccccccaggcagtgaccgggccagcttcatcaagaacctgcagggcatcagcagcttcagaagaggcaccttcacagactgtgccctggccaacatgacagagcagatccggcaggacaggagcaaaggaacagtgcactttgctgtggtgatcacagatggccacgtgacaggcagcccctgtggcggcatcaagctgcaggccgagcgggcccgggaggagggcatccggctgtttgctgtggcccccaaccagaacctgaaggagcagggcctgcgggacatcgccagcacccctcatgagctgtacagaaatgactatgccaccatgctgcctgacagcacagaaattgaccaggacaccatcaaccgcatcatcaaggtgatgaagcatgaggcctatggagagtgctacaaggtgtcctgcctggagatccctggccccagcggccccaagggctaccggggccagaagggggccaagggcaacatgggagagcccggggagcccggccagaagggccggcagggcgaccccggcatcgagggccccatcggcttccctggccccaagggcgtgcccggcttcaagggggagaagggggagtttggagcagatggcaggaagggggcccctggcctggccggcaagaatggaacagatggccagaagggcaagctgggcagaattggccccccaggctgcaagggggaccccggcaacagaggaccagatggctacccaggagaggccggcagccctggagagcggggggaccagggcggcaagggggaccccggccggcccggccggcggggccccccaggagaaattggagccaagggcagcaagggctaccagggcaacagcggggcccctggcagccctggggtgaagggggccaagggcggccctggcccccggggccccaagggggagcctggaagaagaggagaccccggcaccaagggcagccctggcagtgatggccccaagggggagaagggggaccccggccctgagggcccccggggcctggccggggaggtgggcaacaagggggccaagggggaccggggcctgcccggcccccggggcccccagggcgccctgggggagcccgggaagcagggcagcagaggagaccctggagatgctggccccaggggggacagcggccagcccggccccaagggggaccccggccggcccggcttctcctacccaggccccaggggggcccctggagagaagggggagcccggcccccggggccctgagggcggccgcggggactttggcctgaagggggagcccggcaggaaaggagagaagggggagcctgctgaccccggccccccaggagagcccggcccccggggcccccggggcgtgcccggccctgagggggagcccggccccccaggggaccccggcctgacagaatgtgatgtgatgacctacgtgcgggagacctgtggctgctgtgactgtgagaagagatgtggggccctggatgtggtgtttgtgattgacagcagcgagagcatcggctacaccaacttcaccctggagaagaactttgtgatcaacgtggtgaaccggctgggcgccatcgccaaggaccccaagtctgagaccggcaccagggtgggcgtggtgcagtacagccatgagggcacctttgaggccatccagctggatgatgaaagaattgacagcctgagcagcttcaaggaggccgtgaagaacctggagtggattgctgggggcacctggaccccatctgccctgaagtttgcctatgacaggctcatcaaggagagccggcggcagaagaccagggtgtttgctgtggtgatcacagatggaagacatgaccccagagatgatgacctgaacctgcgggccctgtgtgacagagatgtgacagtgacagccatcggcattggagacatgttccacgagaagcatgaaagtgagaacctgtacagcatcgcctgtgacaagccccagcaggtgaggaacatgaccctcttcagtgacctggtggccgagaagttcattgatgacatggaggatgtgctgtgcccagacccccagatcgtgtgcccagacctgccctgccagacagatgccccctggccaggaggagagccccctgtgaccttcctgaggacagaggagggcccagatgccaccttccccaggaccatccccctcatccagcagctgctgaatgccacagagctgacccaggaccctgctgcctacagccagctggtggccgtgctggtgtacacagctgagcgggccaagtttgccactggagtggagcggcaggactggatggagctgttcatcgacaccttcaagctggtgcaccgggacatcgtgggggaccctgagacagccctggccctgtgctag

SEQ ID NO: 230824 - DNA, 2757 bp, Artificial Sequence
  derived and/or modified sequence
atgctgcagggcacctgcagcgtgctgctgctgtggggcatcctgggggccattcaagctcaacaacaggaggttatttcacccgatactacagaacggaacaacaactgtcccgagaaaacagattgcccaattcatgtgtatttcgtcctggacacatctgagtcagtgaccatgcaatcaccgactgatattcttttgtttcatatgaagcagtttgtgccacagttcatctcccagctgcaaaacgagttttacctggatcaagtggcactctcttggcgctatggggggctgcactttagtgatcaggtggaagtcttttccccccccgggtctgaccgagcatcatttatcaaaaatttgcaggggatcagctcctttcggagaggcactttcaccgattgcgccctggcaaatatgacagaacagatccgacaggatcggagtaaagggacagtgcacttcgccgtggtcatcacagatggccacgtcaccggtagcccatgcgggggtattaaactgcaggctgagagggcgagagaggagggtatcagactctttgctgtggcacccaatcagaacctgaaggaacagggacttagagatattgctagcacccctcacgagttgtacagaaacgattacgcaacaatgcttcctgactcgacagagattgatcaggacactatcaacagaatcataaaggtgatgaaacacgaagcctacggcgagtgctataaagtgtcatgcttagaaatacctggccccagcgggccaaaaggctatagaggacaaaagggggcaaaagggaatatgggagagcctggagagccaggccagaagggtagacagggcgatccaggcattgaagggcccatcggctttcccggcccaaaaggtgtgcctggttttaaaggggaaaagggggagtttggcgcagacgggcgcaagggcgctcccggcctcgcgggcaagaacgggaccgatggccagaagggcaagttgggtcgtatcggaccgccaggctgcaaaggtgatcctggcaatcggggtcccgacggctatcctggcgaggcaggctctcccggcgagcggggcgaccagggtggaaagggggatccaggtcgtccaggccggcggggcccgccaggcgaaatcggcgcgaaagggtctaagggctatcagggaaactctggtgccccaggctcccccggagtgaagggagctaaaggggggccgggcccgcgcgggcccaagggggagcccggtaggagaggcgatcctgggactaaaggtagtccggggagcgacggtcccaagggcgaaaaaggcgacccagggcctgaaggaccaaggggtctcgccggtgaggtgggaaataaaggagctaaaggcgaccgcggcctgcccggacctaggggcccgcagggagcattaggggaacctgggaagcagggcagcaggggagaccccggtgatgcggggcctcgcggggatagcggccaacctggccccaagggagaccctggacggccaggcttcagctatccagggcctaggggcgcgcccggggaaaagggcgagccaggccccaggggcccagaaggcggaaggggcgacttcggcttaaagggcgagccaggcagaaaaggcgagaagggcgaaccggccgatcccgggccacccggtgagcccgggccacgtggacccaggggcgtcccaggccctgaaggggagcctgggccacctggggatcccgggctaacagagtgcgatgtcatgacgtatgtgagagagacttgcggatgttgcgactgtgaaaaaaggtgcggcgccctcgacgtggtgttcgtgatcgacagtagcgagtccatcggatacaccaattttaccctcgaaaagaatttcgtgatcaacgtcgtgaataggctgggagcaatcgctaaagaccccaagagcgagaccgggactagagtcggtgtcgtgcagtacagtcatgagggcacattcgaggcaattcagctggacgacgagaggattgacagtctgtcttcctttaaagaggccgtgaagaacctcgagtggatcgccgggggcacatggacccctagtgcattgaagttcgcttatgatcgactcatcaaggagtcacgtcgtcagaagaccagagtcttcgccgttgtgattacggacgggcgccacgatccacgtgacgacgacctcaacctgagggcactgtgcgatcgagacgtgaccgtgactgccataggtatcggcgacatgttccatgagaagcacgagagtgaaaatctttacagcatcgcttgtgataagcctcagcaggtgagaaatatgaccctattctctgatctggtggctgagaaattcatcgatgacatggaggatgtgctgtgcccagatccacagattgtatgcccagacttgccgtgtcagactgatgccccctggccagggggcgagccgccggtgaccttcctgagaacagaggagggaccggacgcaacgttcccccgtaccatcccgctaatccaacagctcctcaacgccacggaattgacccaggaccccgccgcatattcccagctggtcgcggttctagtctatacagctgagagagccaaatttgctacaggcgttgagaggcaagattggatggaattgtttattgacaccttcaaactggtccatagggatatagttggagaccctgaaacagccctggctttgtgctag

SEQ ID NO: 230825 - DNA, 2757 bp, Artificial Sequence
  derived and/or modified sequence
atgctgcagggcacctgcagcgtgctgctgctgtggggcatcctgggcgcaatccaagctcagcaacaggaggtgatcagcccagatactacggagcgaaataataactgtcccgaaaagacagactgcccgatccacgtctatttcgtccttgatacgagtgaatccgtgacaatgcagagccccacggatatcctccttttccacatgaagcagttcgtgccacagttcatctcccagcttcagaacgagttctatctggaccaggtcgcactatcgtggcgatacgggggtctgcatttcagtgatcaggtggaggttttttcccctccaggttctgaccgggcatcttttatcaagaacctgcagggaatcagtagcttccgacggggtacgtttacagattgtgcgctggcgaacatgaccgaacaaataaggcaagacaggagcaaaggtaccgtccactttgctgtggttatcactgacggccacgttaccggctcaccctgcggcggcatcaaactccaggctgagcgcgctcgggaagaagggattaggctgttcgcagtcgccccaaaccagaatctcaaggaacaaggactgcgagatatcgcaagtaccccacacgagctgtatagaaacgactacgcgactatgcttcccgactccacagagatcgaccaggacactattaataggatcatcaaggtgatgaagcacgaagcatacggtgagtgctataaggtttcctgtctggagatcccaggcccctcgggccccaaaggttatcgtggccagaaaggggctaaaggcaatatgggcgagcccggggaaccaggccagaaggggcgccagggcgatcccggtattgaaggacctattggattccctggccctaaaggggtgccaggattcaagggcgaaaagggagaatttggagctgatgggcgcaaaggagctcctgggcttgccggaaagaatggcacagatggacagaaaggcaagcttggccggatcgggcccccaggatgcaaaggcgaccccggcaatagagggcccgacggctaccctggagaagccgggtctccaggagagagaggggaccagggcggaaagggggatccggggaggcctggccgaagaggccccccaggagagattggggccaagggctccaagggataccagggaaatagcggggcaccggggtccccaggagttaagggcgcaaagggagggcccgggcctaggggtcccaaaggagagccaggacggagaggtgaccctgggacaaaagggagccctgggagcgatggcccaaaaggggagaaaggagaccctggacctgagggtccacgaggcctcgccggtgaggtggggaataaaggggcaaagggcgaccgaggtcttccgggacctcgtgggcctcagggcgcattaggggaaccagggaagcaaggaagcaggggcgaccctggtgacgcaggtccaaggggcgattcgggacagcccgggccaaagggcgatcccgggaggcccggtttcagttatccgggccccaggggagcccctggcgagaaaggagagcccggacccaggggaccagaggggggccgaggcgacttcgggttgaagggcgaacctggacgaaagggcgagaagggcgaaccagctgatcccggaccaccaggcgagcccggacctcggggcccccgaggcgtgccaggacccgaaggcgaaccgggccctcctggggacccaggcttaacggagtgcgacgtgatgacttacgtaagggagacatgtggatgctgcgactgtgaaaagcgctgcggagctcttgacgttgtcttcgtgattgactcctcggaatcaatcgggtatacgaattttaccttggaaaaaaacttcgtgatcaacgtggttaacagactgggcgccatcgccaaggatcccaaaagcgagacgggcacccgggtgggggttgtgcagtattcccacgagggcacctttgaggctattcagctggatgatgagcgcattgattcactgtcttcctttaaggaagctgtcaaaaatctggagtggatcgccggcggcacctggactccaagcgctcttaagtttgcgtacgatcgactaattaaagaaagccgccgtcagaagacacgggtcttcgccgttgttatcactgacgggcggcacgatccgagggacgacgatctcaatctcagagccctttgtgacagggacgtcacagtgaccgccataggaataggggacatgttccatgaaaaacacgaaagtgaaaatctctacagcattgcctgcgataaaccacagcaggtacgtaacatgacactctttagtgaccttgtggctgaaaagttcatcgacgacatggaagatgtgctttgtccagatccacagatcgtatgtccagatctcccatgccagacagacgccccctggccgggtggagagccacccgtaaccttcctcagaaccgaggaaggcccggacgccacatttccgagaacaatcccactaatccaacagttattaaatgcaacagaacttactcaggatcctgctgcgtattcgcagctcgtcgccgtccttgtgtataccgctgaaagagccaaatttgcaaccggagtcgaacggcaggactggatggagctgttcatcgatacttttaagcttgtccacagggatattgtaggggaccccgagacagccctggctttatgctag

SEQ ID NO: 230826 - DNA, 2757 bp, Artificial Sequence
  derived and/or modified sequence
atgctgcaagggacttgcagcgtgcttctgttgtggggaattctcggcgctattcaagcccagcagcaagaggtgatttctcctgatactacagagagaaataacaactgtccagagaaaacagactgccccatccacgtctattttgtgcttgacaccagcgagtccgtgactatgcagtccccaacagacatcctgctcttccacatgaaacagttcgttccgcagtttatctcccagttgcagaatgagttttatctggaccaggtggcgttgagctggaggtacggcggactgcactttagcgatcaggtagaagtgtttagcccccctggatccgatagagctagcttcatcaaaaatcttcagggaatctcgagctttaggcgtggcaccttcactgattgcgccctcgccaatatgacagaacagatcagacaggacaggagcaagggcaccgtccacttcgcggtggtgattaccgatgggcacgtcacaggatctccatgtgggggaatcaaattacaggcagaacgtgctagggaggaaggaattcggctttttgcggtcgccccaaaccagaacctgaaggagcaaggtctgagagacatcgcttctaccccccatgaactgtatcggaatgactacgccacaatgctcccagacagcacggaaatagaccaagacacaatcaatcggatcatcaaggtgatgaagcacgaggcttacggcgagtgctataaggtttcttgccttgaaatccccggacccagcgggccaaaaggataccggggacagaaaggtgctaagggaaacatgggcgagcctggcgagcctggacagaagggccgacaaggggatccgggaatcgaaggcccaattggctttcccggaccaaaaggtgtgccaggcttcaagggggagaagggcgaatttggcgcagatggacgcaaaggggctcccggactcgcaggcaagaatggcactgacgggcagaagggcaagctgggaaggatcggtcccccaggctgcaaaggcgacccaggcaataggggcccagacgggtaccccggagaggccggaagcccaggggaaaggggggaccagggaggcaaaggtgaccctggcagacccggtcggagaggtcccccaggagagatcggagccaagggctctaagggttaccaggggaatagtggcgctccaggctctcccggtgtgaagggagctaagggagggccagggccaaggggcccaaagggcgagccaggtcggcgtggcgacccaggcacaaaggggtcccctggcagtgatggacccaagggggaaaagggagaccccggtccagaagggcctagaggattggccggagaggttggcaataaaggcgctaaaggcgatcggggactgcccggacccagggggcctcagggcgctctgggcgagccaggtaaacagggctctaggggcgaccccggtgacgcaggccctagaggggattctggacagcccggtcccaagggggatccaggaaggcctggcttcagctacccaggccctcgaggcgctcctggtgagaaaggtgagcctggccctcgcggtccagagggtggcagaggcgactttggcctcaagggagagcctggacggaaaggcgaaaagggggagcccgctgacccaggccctcccggagagcccggtcccagaggccctagaggcgtgcctggaccggagggagaacccggacctccgggagaccctggtctgacggaatgtgatgtaatgacatatgtccgagagacatgtggctgctgcgattgcgagaaacgttgtggtgcattggatgtggtgtttgtgattgacagttccgagagcataggctacaccaattttactcttgagaagaatttcgtgatcaatgtcgttaacagattgggcgctattgctaaagatccaaaatccgaaactggcacaagagtgggcgttgtgcaatactcacacgaggggacctttgaagcgatccaactggatgacgagaggattgacagcttgagctcatttaaggaggccgtgaagaacttggaatggattgcaggcggtacatggaccccatcagccctaaagttcgcctatgatcgtctgattaaagagtctcggagacagaagactcgggtatttgccgtagtgatcaccgacgggaggcacgaccctagggacgacgacctgaatctacgggcattatgtgatagagatgtgaccgtcacagcaatagggattggagacatgttccacgagaaacacgaatcagaaaatctttattccatagcctgcgacaagccacagcaagtacggaacatgaccctcttctctgatctggttgcagaaaaattcatagacgacatggaagacgtgctgtgtcccgatcctcagatcgtttgcccggatctcccttgccaaactgatgctccatggccaggaggtgaacctccagtcacattcttacggacagaagaggggcctgacgccaccttccctcgtacaattcctcttatccagcagttacttaacgccaccgaacttacccaggatcctgcagcctattctcagctggttgccgttctggtatatacggcagaacgggctaagtttgctacaggagtcgaaagacaagattggatggagttattcatcgacacgttcaagttggtgcaccgagatatcgtgggggaccccgagaccgccttagctttatgctag

SEQ ID NO: 230827 - DNA, 2757 bp, Artificial Sequence
  derived and/or modified sequence
atgttacagggtacctgtagcgtgctgctgctgtggggtattcttggtgcaatccaggcccagcagcaggaggtaattagtccggacacaacagaacgcaataataattgcccagagaagactgattgtccaatccatgtatacttcgttctggacacaagcgagtccgttactatgcagagccctacagacatcttactttttcatatgaagcagttcgtgccccagtttatctctcagctgcagaatgagttttatttagaccaagtggcactgagctggaggtacggcggacttcatttttcagatcaggttgaagtcttttctcccccaggctccgaccgggcaagcttcattaagaatttacaaggtatttcctccttccgcagggggactttcaccgattgtgccctggctaatatgacagaacaaattaggcaggaccgctccaaaggaacggtgcacttcgcagtggttattacagatggccacgtgactgggtctccttgcggtgggatcaagctccaggcagagcgcgctcgcgaggagggcataagattgtttgccgtggctcccaaccagaacctcaaagagcaaggcctgagagatatcgcctccacgccgcatgaattgtaccgaaatgactacgctacaatgttacctgatagcacagagatcgatcaggacactatcaatagaatcatcaaggtcatgaagcatgaggcctatggcgaatgctataaggtatcttgtttagagatcccaggaccctccgggcctaagggctatcggggacagaagggggctaagggcaatatgggcgaacctggagagcccggacagaagggtcgtcagggagatccgggaattgagggccctatcggctttcctggaccaaaaggggtacctggcttcaagggcgaaaagggggaatttggggcagacggccgaaagggagcccctggtctcgcgggtaaaaacggaactgacggtcagaagggcaagctcggtcgtattggacctcccggatgcaagggcgaccccggaaatcggggacccgatgggtatcctggcgaagctggctcaccaggcgaaagaggcgatcagggaggcaagggggacccaggcaggccagggagaaggggtcccccaggtgaaattggcgctaaaggttctaaagggtatcaggggaacagcggggctcctggttcccccggtgttaaaggagctaagggcggacccggtccgaggggccctaaaggagagcctgggaggcggggagatcctgggactaaggggtccccgggatccgatggccctaagggtgagaagggtgacccaggaccggaagggcctcgcggactggctggagaagtcggaaataagggcgctaaaggcgatagggggctgcctggacctcgcggtccccagggggcactgggtgaacccggtaagcagggctcgaggggcgacccaggcgatgccggtccccgaggagattcaggacagcccggtcccaagggcgatcctgggagacccggattttcctaccccggacccagaggcgctccaggcgagaagggggaaccaggccctagagggccagaagggggacgcggagactttggcctgaaaggggagcccggtaggaaaggcgaaaaaggcgagcccgcagatcccggaccccctggggagccaggaccccgagggccaagaggtgtccccggacctgagggggagcctggaccccctggggaccctggcctcaccgagtgtgacgtaatgacatacgtcagggagacttgcggatgctgtgactgcgagaaaaggtgtggtgctctggacgtggtgtttgttattgactctagtgagtcaatcgggtataccaactttacactggagaagaactttgtgattaacgtggtcaacaggcttggtgcgattgcaaaagaccctaagtcggagacaggaaccagagtaggggttgtgcagtattcccacgagggcacttttgaagcaattcagttggacgacgagcggatcgattccctctccagttttaaagaggccgttaaaaatcttgaatggattgccggagggacatggacaccgtcagcgttgaagttcgcctatgaccgcctaataaaagagtcacgcaggcagaagacaagagtgtttgctgtggtgatcaccgatggtcgacacgaccctagagacgacgatcttaacttaagggccctctgtgaccgcgatgtaaccgtgaccgctattggtataggcgatatgttccacgagaagcacgagagtgagaatctttacagcatagcctgtgacaagccgcaacaagtgcgaaacatgacgctctttagcgacctggtagccgagaagtttatcgacgacatggaggacgtcctgtgcccagatccacagattgtgtgtcccgatctcccgtgtcaaacggacgccccatggcccggaggggaaccaccagtgaccttcctgaggactgaagaagggcctgatgccacgttcccacgcacaatcccactaatccagcagttgctaaatgcaacggagttgacccaggatcctgcagcctacagtcagctggtggctgtgctggtgtataccgctgaaagggccaagttcgccactggggtggagcgccaggattggatggagctgtttatcgacacgttcaaattagttcacagagatatcgtgggtgatcccgaaacagcactggcactatgttag

SEQ ID NO: 230828 - DNA, 3153 bp, Artificial Sequence
  derived and/or modified sequence
gcttactcggcgcccgcgcctcgggccgtcgggagcggagcctcctcgggaccaggacttcagggccacaggtgctgccaagatgctccagggcacctgctccgtgctcctgctctggggaatcctgggggccatccaggcccagcagcaggaggtcatctcgccggacactaccgagagaaacaacaactgcccagagaagaccgactgccccatccacgtgtacttcgtgctggacacctcggagagcgtcaccatgcagtcccccacggacatcctgctcttccacatgaagcagttcgtgccgcagttcatcagccagctgcagaacgagttctacctggaccaggtggcgctgagctggcgctacggcggcctgcacttctctgaccaggtggaggtgttcagcccaccgggcagcgaccgggcctccttcatcaagaacctgcagggcatcagctccttccgccgcggcaccttcaccgactgcgcgctggccaacatgacggagcagatccggcaggaccgcagcaagggcaccgtccacttcgccgtggtcatcaccgacggccacgtcaccggcagcccctgcgggggcatcaagctgcaggccgagcgggcccgcgaggagggcatccggctcttcgccgtggcccccaaccagaacctgaaggagcagggcctgcgggacatcgccagcacgccgcacgagctctaccgcaacgactacgccaccatgctgcccgactccaccgagatcgaccaggacaccatcaaccgcatcatcaaggtcatgaaacacgaagcctacggagagtgctacaaggtgagctgcctggaaatccctgggccctctggccccaagggctaccgtggacagaagggtgccaagggcaacatgggtgagccgggagagcctggccagaagggaagacagggagacccgggcatcgaaggccccattggattcccaggacccaagggcgttcctggcttcaaaggagagaagggtgaatttggagccgacggtcgcaagggggcccctggcctggctggcaagaacgggaccgatggacagaagggcaagctggggcgcatcggacctcctggctgcaagggagaccctggaaaccggggccccgacggttacccgggggaagcagggagtccaggggagcgaggagaccaaggcggcaagggggaccctggccgcccaggacgcagagggcccccgggagaaatcggggccaagggaagcaaggggtatcaaggcaacagtggagccccaggaagtcctggtgtgaaaggagccaagggcgggcctgggccccgcggacccaaaggcgagccggggcgcaggggagaccccggcaccaagggcagcccaggcagcgatggccccaagggggagaagggggaccctggccctgaggggccccgcggcctggctggagaggttggcaacaaaggagccaagggagaccgaggcttgcctggacccagaggcccccagggagctcttggggagcccggaaagcagggatctcggggagaccccggtgatgcaggaccccgtggagactcaggacagccaggccccaagggagaccccggcaggcctggattcagctacccaggaccccgaggagcacccggagaaaaaggcgagcccggcccacgcggccccgagggaggccgaggcgactttggcttgaaaggagaacctgggaggaaaggagagaaaggagagcctgcggatcctggtccccctggtgagccaggccctcgggggccaagaggagtcccaggacccgagggtgagcccggcccccctggagaccccggtctcacggagtgtgacgtcatgacctacgtgagggagacctgcgggtgctgcgactgtgagaagcgctgtggcgccctggacgtggtcttcgtcatcgacagctccgagagcattgggtacaccaacttcacactggagaagaacttcgtcatcaacgtggtcaacaggctgggtgccatcgctaaggaccccaagtccgagacagggacgcgtgtgggcgtggtgcagtacagccacgagggcacctttgaggccatccagctggacgacgaacgtatcgactccctgtcgagcttcaaggaggctgtcaagaacctcgagtggattgcgggcggcacctggacaccctcagccctcaagtttgcctacgaccgcctcatcaaggagagccggcgccagaagacacgtgtgtttgcggtggtcatcacggacgggcgccacgaccctcgggacgatgacctcaacttgcgggcgctgtgcgaccgcgacgtcacagtgacggccatcggcatcggggacatgttccacgagaagcacgagagtgaaaacctctactccatcgcctgcgacaagccacagcaggtgcgcaacatgacgctgttctccgacctggtcgctgagaagttcatcgatgacatggaggacgtcctctgcccggaccctcagatcgtgtgcccagaccttccctgccaaacagatgcaccgtggcctggcggcgagcccccggtcaccttcctccgcacggaagaggggccggacgccaccttccccaggaccattcccctgatccaacagttgctaaacgccacggagctcacgcaggacccggccgcctactcccagctggtggccgtgctggtctacaccgccgagcgggccaagttcgccaccggggtagagcggcaggactggatggagctgttcattgacacctttaagctggtgcacagggacatcgtgggggaccccgagaccgcgctggccctctgctaaagcccgggcacccgcccagccgggctgggccctccctgccacactagcttcccagggctgcccccgacaggctggctctcagtggaggccagagatctggaatcggggtcagcggggctacagtccttccaggggctctggggcagctcccagcctcttcccatgctggtggccaccgtgtcccttgctgcggctgcatcttccagtctctcctccgtcttcctgtggccgctctctttataagaaccctggtcattgaatttaaggcccaccccaagtccagaatgacctcgcaagacccttaactcactccc

SEQ ID NO: 230829 - DNA, 3101 bp, Artificial Sequence
  derived and/or modified sequence
gacttcagggccacaggtgctgccaagatgctccagggcacctgctccgtgctcctgctctggggaatcctgggggccatccaggcccagcagcaggaggtcatctcgccggacactaccgagagaaacaacaactgcccagagaagaccgactgccccatccacgtgtacttcgtgctggacacctcggagagcgtcaccatgcagtcccccacggacatcctgctcttccacatgaagcagttcgtgccgcagttcatcagccagctgcagaacgagttctacctggaccaggtggcgctgagctggcgctacggcggcctgcacttctctgaccaggtggaggtgttcagcccaccgggcagcgaccgggcctccttcatcaagaacctgcagggcatcagctccttccgccgcggcaccttcaccgactgcgcgctggccaacatgacggagcagatccggcaggaccgcagcaagggcaccgtccacttcgccgtggtcatcaccgacggccacgtcaccggcagcccctgcgggggcatcaagctgcaggccgagcgggcccgcgaggagggcatccggctcttcgccgtggcccccaaccagaacctgaaggagcagggcctgcgggacatcgccagcacgccgcacgagctctaccgcaacgactacgccaccatgctgcccgactccaccgagatcgaccaggacaccatcaaccgcatcatcaaggtcatgaaacacgaagcctacggagagtgctacaaggtgagctgcctggaaatccctgggccctctggccccaagggctaccgtggacagaagggtgccaagggcaacatgggtgagccgggagagcctggccagaagggaagacagggagacccgggcatcgaaggccccattggattcccaggacccaagggcgttcctggcttcaaaggagagaagggtgaatttggagccgacggtcgcaagggggcccctggcctggctggcaagaacgggaccgatggacagaagggcaagctggggcgcatcggacctcctggctgcaagggagaccctggaaaccggggccccgacggttacccgggggaagcagggagtccaggggagcgaggagaccaaggcggcaagggggaccctggccgcccaggacgcagagggcccccgggagaaatcggggccaagggaagcaaggggtatcaaggcaacagtggagccccaggaagtcctggtgtgaaaggagccaagggcgggcctgggccccgcggacccaaaggcgagccggggcgcaggggagaccccggcaccaagggcagcccaggcagcgatggccccaagggggagaagggggaccctggccctgaggggccccgcggcctggctggagaggttggcaacaaaggagccaagggagaccgaggcttgcctggacccagaggcccccagggagctcttggggagcccggaaagcagggatctcggggagaccccggtgatgcaggaccccgtggagactcaggacagccaggccccaagggagaccccggcaggcctggattcagctacccaggaccccgaggagcacccggagaaaaaggcgagcccggcccacgcggccccgagggaggccgaggcgactttggcttgaaaggagaacctgggaggaaaggagagaaaggagagcctgcggatcctggtccccctggtgagccaggccctcgggggccaagaggagtcccaggacccgagggtgagcccggcccccctggagaccccggtctcacggagtgtgacgtcatgacctacgtgagggagacctgcgggtgctgcgactgtgagaagcgctgtggcgccctggacgtggtcttcgtcatcgacagctccgagagcattgggtacaccaacttcacactggagaagaacttcgtcatcaacgtggtcaacaggctgggtgccatcgctaaggaccccaagtccgagacagggacgcgtgtgggcgtggtgcagtacagccacgagggcacctttgaggccatccagctggacgacgaacgtatcgactccctgtcgagcttcaaggaggctgtcaagaacctcgagtggattgcgggcggcacctggacaccctcagccctcaagtttgcctacgaccgcctcatcaaggagagccggcgccagaagacacgtgtgtttgcggtggtcatcacggacgggcgccacgaccctcgggacgatgacctcaacttgcgggcgctgtgcgaccgcgacgtcacagtgacggccatcggcatcggggacatgttccacgagaagcacgagagtgaaaacctctactccatcgcctgcgacaagccacagcaggtgcgcaacatgacgctgttctccgacctggtcgctgagaagttcatcgatgacatggaggacgtcctctgcccggaccctcagatcgtgtgcccagaccttccctgccaaacagatgcaccgtggcctggcggcgagcccccggtcaccttcctccgcacggaagaggggccggacgccaccttccccaggaccattcccctgatccaacagttgctaaacgccacggagctcacgcaggacccggccgcctactcccagctggtggccgtgctggtctacaccgccgagcgggccaagttcgccaccggggtagagcggcaggactggatggagctgttcattgacacctttaagctggtgcacagggacatcgtgggggaccccgagaccgcgctggccctctgctaaagcccgggcacccgcccagccgggctgggccctccctgccacactagcttcccagggctgcccccgacaggctggctctcagtggaggccagagatctggaatcggggtcagcggggctacagtccttccaggggctctggggcagctcccagcctcttcccatgctggtggccaccgtgtcccttgctgcggctgcatcttccagtctctcctccgtcttcctgtggccgctctctttataagaaccctggtcattgaatttaaggcccaccccaagtccagaatgacctcgcaagacccttaactcactcccgtc

SEQ ID NO: 230830 - DNA, 2757 bp, Artificial Sequence
  derived and/or modified sequence
atgctgcagggcacctgcagcgtgctgctgctgtggggcatcctgggcgccatccaggcccagcagcaggaggtgatcagccccgacaccaccgagagaaacaacaactgccccgagaagaccgactgccccatccacgtgtacttcgtgctggacaccagcgagagcgtgaccatgcagagccccaccgacatcctgctgttccacatgaagcagttcgtgccccagttcatcagccagctgcagaacgagttctacctggaccaggtggccctgagctggagatacggcggcctgcacttcagcgaccaggtggaggtgttcagcccccccggcagcgacagagccagcttcatcaagaacctgcagggcatcagcagcttcagaagaggcaccttcaccgactgcgccctggccaacatgaccgagcagatcagacaggacagaagcaagggcaccgtgcacttcgccgtggtgatcaccgacggccacgtgaccggcagcccctgcggcggcatcaagctgcaggccgagagagccagagaggagggcatcagactgttcgccgtggcccccaaccagaacctgaaggagcagggcctgagagacatcgccagcaccccccacgagctgtacagaaacgactacgccaccatgctgcccgacagcaccgagatcgaccaggacaccatcaacagaatcatcaaggtgatgaagcacgaggcctacggcgagtgctacaaggtgagctgcctggagatccccggccccagcggccccaagggctacagaggccagaagggcgccaagggcaacatgggcgagcccggcgagcccggccagaagggcagacagggcgaccccggcatcgagggccccatcggcttccccggccccaagggcgtgcccggcttcaagggcgagaagggcgagttcggcgccgacggcagaaagggcgcccccggcctggccggcaagaacggcaccgacggccagaagggcaagctgggcagaatcggcccccccggctgcaagggcgaccccggcaacagaggccccgacggctaccccggcgaggccggcagccccggcgagagaggcgaccagggcggcaagggcgaccccggcagacccggcagaagaggcccccccggcgagatcggcgccaagggcagcaagggctaccagggcaacagcggcgcccccggcagccccggcgtgaagggcgccaagggcggccccggccccagaggccccaagggcgagcccggcagaagaggcgaccccggcaccaagggcagccccggcagcgacggccccaagggcgagaagggcgaccccggccccgagggccccagaggcctggccggcgaggtgggcaacaagggcgccaagggcgacagaggcctgcccggccccagaggcccccagggcgccctgggcgagcccggcaagcagggcagcagaggcgaccccggcgacgccggccccagaggcgacagcggccagcccggccccaagggcgaccccggcagacccggcttcagctaccccggccccagaggcgcccccggcgagaagggcgagcccggccccagaggccccgagggcggcagaggcgacttcggcctgaagggcgagcccggcagaaagggcgagaagggcgagcccgccgaccccggcccccccggcgagcccggccccagaggccccagaggcgtgcccggccccgagggcgagcccggcccccccggcgaccccggcctgaccgagtgcgacgtgatgacctacgtgagagagacctgcggctgctgcgactgcgagaagagatgcggcgccctggacgtggtgttcgtgatcgacagcagcgagagcatcggctacaccaacttcaccctggagaagaacttcgtgatcaacgtggtgaacagactgggcgccatcgccaaggaccccaagagcgagaccggcaccagagtgggcgtggtgcagtacagccacgagggcaccttcgaggccatccagctggacgacgagagaatcgacagcctgagcagcttcaaggaggccgtgaagaacctggagtggatcgccggcggcacctggacccccagcgccctgaagttcgcctacgacagactgatcaaggagagcagaagacagaagaccagagtgttcgccgtggtgatcaccgacggcagacacgaccccagagacgacgacctgaacctgagagccctgtgcgacagagacgtgaccgtgaccgccatcggcatcggcgacatgttccacgagaagcacgagagcgagaacctgtacagcatcgcctgcgacaagccccagcaggtgagaaacatgaccctgttcagcgacctggtggccgagaagttcatcgacgacatggaggacgtgctgtgccccgacccccagatcgtgtgccccgacctgccctgccagaccgacgccccctggcccggcggcgagccccccgtgaccttcctgagaaccgaggagggccccgacgccaccttccccagaaccatccccctgatccagcagctgctgaacgccaccgagctgacccaggaccccgccgcctacagccagctggtggccgtgctggtgtacaccgccgagagagccaagttcgccaccggcgtggagagacaggactggatggagctgttcatcgacaccttcaagctggtgcacagagacatcgtgggcgaccccgagaccgccctggccctgtgctag

SEQ ID NO: 230831 - protein, 828 aa, Artificial Sequence
  derived and/or modified sequence
MLQGTCSVLLLWGILGAIQAQQQEVISPDTTERNNNCPEKTDCPIHVYFVLDTSESVTMQSPTDILLFHMKQFVPQFISQLQNEFYLDQVALSWRYGGLHFSDQVEVFSPPGSDRASFIKNLQGISSFRRGTFTDCALANMTEQIRQDRSKGTVHFAVVITDGHVTGSPCGGIKLQAERAREEGIRLFAVAPNQNLKEQGLRDIASTPHELYRNDYATMLPDSTEIDQDTINRIIKVMKHEAYGECYKVSCLEIPGPSGPKGYRGQKGAKGNMGEPGEPGQKGRQGDPGIEGPIGFPGPKGVPGFKGEKGEFGADGRKGAPGLAGKNGTDGQKGKLGRIGPPGCKGDPGNRGPDGYPGEAGSPGERGDQGGKGDPGRPGRRGPPGEIGAKGSKGYQGNSGAPGSPGVKGAKGGPGPRGPKGEPGRRGDPGTKGSPGSDGPKGEKGDPGPEGPRGLAGEVGNKGAKGDRGLPGPRGPQGALGEPGKQGSRGDPGDAGPRGDSGQPGPKGDPGRPGFSYPGPRGAPGEKGEPGPRGPEGGRGDFGLKGEPGRKGEKGEPADPGPPGEPGPRGPRGVPGPEGEPGPPGDPGLTECDVMTYVRETCGCCDCEKRCGALDVVFVIDSSESIGYTNFTLEKNFVINVVNRLGAIAKDPKSETGTRVGVVQYSHEGTFEAIQLDDERIDSLSSFKEAVKNLEWIAGGTWTPSALKFAYDRLIKESRRQKTRVFAVVITDGRHDPRDDDLNLRALCDRDVTVTAIGIGDMFHEKHESENLYSIACDKPQQVRNMTLFSDLVAEKFIDDMEDVLCPDPQIVCPDLPCQTGLDGAVLC

SEQ ID NO: 230832 - protein, 180 aa, Artificial Sequence
  derived and/or modified sequence
MLQGTCSVLLLWGILGAIQAQQQEVISPDTTERNNNCPEKTDCPIHVYFVLDTSESVTMQSPTDILLFHMKQFVPQFISQLQNEFYLDQVALSWRYGGLHFSDQVEVFSPPGSDRASFIKNLQGISSFRRGTFTDCALANMTEQIRQDRSKGTVHFAVVITDGHVTGSPCGGIKLQAERA

SEQ ID NO: 230833 - DNA, 2487 bp, Artificial Sequence
  derived and/or modified sequence
atgctgcaagggacctgttcagtgctgctactctggggcatactgggggccattcaggcccaacaacaagaagtaatctccccggatacaaccgagcggaacaacaactgcccagaaaaaaccgactgcccgattcacgtctactttgtgcttgacacaagtgagtccgtcaccatgcaatctccgactgatattctcctttttcatatgaagcaattcgtcccacagtttatctcacaactccagaacgaattctatctagaccaggtcgctcttagttggcgatacggcggcctgcactttagtgaccaggttgaggtgttttcccctcctggttctgatagagccagcttcattaaaaaccttcagggaatcagttcttttcggcggggtacttttacagattgtgccctggccaatatgaccgagcagatacggcaagatcgctcgaaagggacagttcactttgcagtggtcataacagatgggcatgttaccggctcgccttgcggaggaatcaagcttcaggccgagcgggccagggaagagggcataagactattcgccgtcgccccaaatcagaacctgaaagagcaagggctcagggatatcgcatcaactcctcatgaactgtaccgcaatgattacgcaacaatgctgcccgattcaacggagatcgaccaggataccattaacagaataatcaaggttatgaagcacgaagcctatggggagtgctataaggtctcgtgcctcgagataccaggcccaagtggccctaagggctataggggccaaaaaggcgcgaagggcaacatgggggaacctggtgagcccggccaaaaaggaaggcagggggatcctggaattgaggggccaatagggttccctggccctaagggagtgcccgggttcaagggagagaagggagagttcggcgctgatggtcgtaaaggtgcgcctggcctagccggtaagaatggaaccgacggccagaaggggaagctgggcaggattggcccccccggctgcaaaggagaccctggaaaccgggggccagatgggtaccctggcgaggccggttcccctggggaaagaggtgaccaggggggcaaaggggaccctggccggccaggccggcggggtccacccggcgaaatcggcgcgaaggggtccaaagggtatcagggcaactctggggcacctggatctccaggtgttaagggagcgaagggaggtccaggtccgcgcggccctaagggggagcccggcaggaggggcgatcccggaactaagggttcaccagggtccgacggaccaaagggagagaaaggcgaccccggaccggagggcccccggggcttagccggggaagttggcaacaaaggtgccaagggcgatagagggctgccgggaccgcgcggccctcaaggcgctcttggggaacccggtaagcaggggagtcggggggaccctggggatgcggggccccggggcgactcaggacagcctggccctaaaggcgatcccggtcgtcctggtttttcatatccaggtccgcgtggagcccctggcgaaaagggcgaaccgggccccagaggccccgaggggggccggggggattttggcttaaagggtgagccgggaaggaagggggagaaaggggagccagcagatcccggcccgcccggtgagcctggaccaaggggtcctaggggtgtgcccgggcctgaaggagaacccggtcctcccggcgatcccggattaactgagtgcgacgtgatgacctatgtcagggagacttgtggatgctgcgactgtgaaaagagatgtggagcactagacgtagtgtttgtgatagattcttcagaaagcattggttatactaacttcacgctcgaaaagaattttgtcattaacgtcgtcaatcgccttggagcaatcgctaaggaccccaaatccgaaacagggacacgggtaggcgtggtgcagtattcgcacgagggcacattcgaagccattcagttagatgatgagcgaatcgacagcctgagtagtttcaaggaagccgtgaagaacctggaatggatcgccggcggcacgtggacaccgtctgcactgaaattcgcctacgaccggctcatcaaggaatcaaggaggcagaagaccagagtgttcgctgtggtgattaccgacggcagacacgaccccagagatgacgacttaaacttgagagccctgtgcgatcgcgatgtgaccgttaccgccataggcattggagatatgttccatgagaagcatgagtcggagaacctctattctattgcctgtgataagccacagcaagtccgtaacatgacattattctcagatcttgtggcagagaagtttatcgatgatatggaagacgttttgtgcccagaccctcagatcgtctgtccagacctgccttgtcaaacagggttggacggcgcagtactgtgttag

SEQ ID NO: 230834 - DNA, 2487 bp, Artificial Sequence
  derived and/or modified sequence
atgttgcaaggaacctgctccgtgctccttctatgggggatcctgggagctattcaggcccagcagcaggaggtcatctcgcccgatacgaccgagaggaacaataactgccccgagaagacagattgtccaatccatgtctacttcgttcttgacacctctgaaagcgtaaccatgcagtctcccactgatattctccttttccatatgaagcaattcgtccctcagttcataagccagttgcaaaatgagttttaccttgaccaggtcgcactatcctggcggtatggtggacttcacttttccgatcaggtggaggtgttcagtcctccaggcagtgaccgtgctagctttataaaaaatctgcagggaatcagcagttttagacgaggcacctttactgactgtgccctcgccaacatgactgaacagattcggcaggacaggtctaagggaaccgtgcacttcgccgtggttattaccgacggccacgttaccggatcaccttgcggcggaattaagctccaggcagaacgcgctagggaggagggtatcaggctgttcgccgtggctccaaaccaaaacctgaaagaacaggggctgcgagatatcgcaagtacaccccacgagctgtatcggaatgactatgctactatgttgcccgacagtaccgaaatcgaccaggatactattaatagaataattaaggtgatgaagcacgaagcctacggtgaatgttataaggtttcttgcctcgaaatcccaggtccgtcaggcccaaaagggtaccgtggccagaagggagcaaaagggaatatgggtgagcccggggagccaggccagaagggtcgccaaggtgaccccggcatcgaaggcccaatcggatttccgggcccaaagggggtgccaggattcaagggcgagaagggggagttcggagcagatggccgaaaaggagctcccgggctggccggcaagaacggtaccgacgggcagaagggtaaactgggccgaattggcccgccaggctgcaagggcgacccgggaaaccgaggtcccgacggttatcccggggaggccgggtccccaggtgagagaggcgaccagggagggaagggagacccagggcgtccaggtcggcgcggacctcctggggaaatcggcgccaagggttcgaaaggataccagggcaatagcggggcccctgggtctcctggagttaagggtgctaaaggcgggcccggaccccggggcccaaagggtgagcccggcaggcgtggtgaccctgggacaaaagggtccccgggctctgatggccctaagggtgagaaaggtgatccaggcccagagggtccaagagggctggctggggaggtggggaacaagggggctaagggtgaccggggcctcccagggccacgcggtccacagggggcattaggcgagcccggcaaacaagggtcccggggcgaccccggggacgccgggcccagaggggatagcgggcagcctggacctaagggcgaccccggtcgacccggcttttcgtatcccgggcctcgcggcgctcccggagagaagggggaaccagggccaaggggccccgaggggggccggggggactttggcttgaaaggcgaacctggcagaaagggtgagaagggcgagccagcagaccccggtcccccaggagaaccgggcccaagaggtccacgcggagtcccaggacccgagggggagcctggcccccccggcgatccagggcttaccgagtgtgacgtcatgacatatgtgagagaaacttgtggttgctgtgactgtgagaaaaggtgtggggcactggatgtggtgttcgtgatagattcatctgagtccatcgggtatacaaacttcacattggagaagaacttcgtaatcaacgtggtcaaccgcctgggagcgattgcaaaggaccccaaaagtgaaacagggacccgggttggcgtggtgcagtactcccatgaggggacttttgaggccattcaacttgacgatgaaaggattgactccctatcgtcttttaaggaggctgtgaagaatctcgagtggatcgccggtggtacctggaccccatccgcactgaagtttgcttacgaccgcttaatcaaagagagtagaagacagaaaacaagagtgtttgcagtcgttattaccgacggcaggcacgacccaagggacgatgacctgaaccttagagctttgtgtgatagggacgtgactgttacagccatcgggatcggagatatgttccatgaaaagcatgagtccgaaaacctctatagcattgcctgcgataaaccacagcaggttcgcaacatgaccctcttcagcgatttagtcgcagagaaatttatagatgatatggaggatgtcctttgtcccgaccctcaaatcgtctgtcctgacttaccttgccagaccggccttgacggtgcagtattgtgctag

SEQ ID NO: 230835 - DNA, 543 bp, Artificial Sequence
  derived and/or modified sequence
atgcttcaggggacatgttccgtgctgctgctctgggggatcttgggagctatccaggcccaacagcaggaggtgatcagccctgataccacagagcgtaataacaattgcccagaaaagacagactgcccgattcatgtgtatttcgtactggacactagtgagtctgtaacaatgcagagtcctactgatatcttactcttccacatgaaacaattcgtgccacagttcatctcccagcttcaaaatgagttctacctggatcaggttgctctgagctggcgctatggtgggctgcacttttcagaccaggtggaagtttttagcccaccagggtccgatagggccagtttcataaagaatctccagggaatatctagcttccgtcgtggcacctttacagactgcgctctcgccaacatgactgaacagatccgacaagatcgctcaaaagggacagttcattttgctgttgtgattacagatgggcacgtgacaggaagcccatgcggaggcatcaaattacaggctgaacgggcatag

SEQ ID NO: 230836 - DNA, 2487 bp, Artificial Sequence
  derived and/or modified sequence
atgctgcagggcacctgcagcgtgctgctgctgtggggcatcctgggcgccatccaggcccagcagcaggaggtgatcagcccagacaccacagaaagaaacaacaactgcccagagaagacagactgccccatccacgtgtactttgtgctggacaccagcgagagcgtgaccatgcagagccccacagacatcctgctcttccacatgaagcagtttgtgccccagttcatcagccagctgcagaatgagttctacctggaccaggtggccctgtcctggaggtatggaggcctgcacttcagtgaccaggtggaggtgttcagccccccaggcagtgaccgggccagcttcatcaagaacctgcagggcatcagcagcttcagaagaggcaccttcacagactgtgccctggccaacatgacagagcagatccggcaggacaggagcaaaggaacagtgcactttgctgtggtgatcacagatggccacgtgacaggcagcccctgtggcggcatcaagctgcaggccgagcgggcccgggaggagggcatccggctgtttgctgtggcccccaaccagaacctgaaggagcagggcctgcgggacatcgccagcacccctcatgagctgtacagaaatgactatgccaccatgctgcctgacagcacagaaattgaccaggacaccatcaaccgcatcatcaaggtgatgaagcatgaggcctatggagagtgctacaaggtgtcctgcctggagatccctggccccagcggccccaagggctaccggggccagaagggggccaagggcaacatgggagagcccggggagcccggccagaagggccggcagggcgaccccggcatcgagggccccatcggcttccctggccccaagggcgtgcccggcttcaagggggagaagggggagtttggagcagatggcaggaagggggcccctggcctggccggcaagaatggaacagatggccagaagggcaagctgggcagaattggccccccaggctgcaagggggaccccggcaacagaggaccagatggctacccaggagaggccggcagccctggagagcggggggaccagggcggcaagggggaccccggccggcccggccggcggggccccccaggagaaattggagccaagggcagcaagggctaccagggcaacagcggggcccctggcagccctggggtgaagggggccaagggcggccctggcccccggggccccaagggggagcctggaagaagaggagaccccggcaccaagggcagccctggcagtgatggccccaagggggagaagggggaccccggccctgagggcccccggggcctggccggggaggtgggcaacaagggggccaagggggaccggggcctgcccggcccccggggcccccagggcgccctgggggagcccgggaagcagggcagcagaggagaccctggagatgctggccccaggggggacagcggccagcccggccccaagggggaccccggccggcccggcttctcctacccaggccccaggggggcccctggagagaagggggagcccggcccccggggccctgagggcggccgcggggactttggcctgaagggggagcccggcaggaaaggagagaagggggagcctgctgaccccggccccccaggagagcccggcccccggggcccccggggcgtgcccggccctgagggggagcccggccccccaggggaccccggcctgacagaatgtgatgtgatgacctacgtgcgggagacctgtggctgctgtgactgtgagaagagatgtggggccctggatgtggtgtttgtgattgacagcagcgagagcatcggctacaccaacttcaccctggagaagaactttgtgatcaacgtggtgaaccggctgggcgccatcgccaaggaccccaagtctgagaccggcaccagggtgggcgtggtgcagtacagccatgagggcacctttgaggccatccagctggatgatgaaagaattgacagcctgagcagcttcaaggaggccgtgaagaacctggagtggattgctgggggcacctggaccccatctgccctgaagtttgcctatgacaggctcatcaaggagagccggcggcagaagaccagggtgtttgctgtggtgatcacagatggaagacatgaccccagagatgatgacctgaacctgcgggccctgtgtgacagagatgtgacagtgacagccatcggcattggagacatgttccacgagaagcatgaaagtgagaacctgtacagcatcgcctgtgacaagccccagcaggtgaggaacatgaccctcttcagtgacctggtggccgagaagttcattgatgacatggaggatgtgctgtgcccagacccccagatcgtgtgcccagacctgccctgccagacaggcctggatggagctgtgctgtgctag

SEQ ID NO: 230837 - DNA, 543 bp, Artificial Sequence
  derived and/or modified sequence
atgctgcagggcacctgcagcgtgctgctgctgtggggcatcctgggcgccatccaggcccagcagcaggaggtgatcagcccagacaccacagaaagaaacaacaactgcccagagaagacagactgccccatccacgtgtactttgtgctggacaccagcgagagcgtgaccatgcagagccccacagacatcctgctcttccacatgaagcagtttgtgccccagttcatcagccagctgcagaatgagttctacctggaccaggtggccctgtcctggaggtatggaggcctgcacttcagtgaccaggtggaggtgttcagccccccaggcagtgaccgggccagcttcatcaagaacctgcagggcatcagcagcttcagaagaggcaccttcacagactgtgccctggccaacatgacagagcagatccggcaggacaggagcaaaggaacagtgcactttgctgtggtgatcacagatggccacgtgacaggcagcccctgtggcggcatcaagctgcaggccgagcgggcctag

SEQ ID NO: 230838 - DNA, 2487 bp, Artificial Sequence
  derived and/or modified sequence
atgctgcagggcacctgcagcgtgctgctgctgtggggcatcctgggagcaatccaggcgcagcagcaagaagtaatttctccagatacgacagagcgaaataataactgccctgagaaaaccgattgcccaatccacgtttactttgtgctggatacatctgagtccgtgaccatgcagagccccactgatattctcctcttccacatgaaacaattcgtgccccagttcatcagccagctgcagaatgagttctatctagaccaggtcgctctgagttggcgatatggaggactccacttctcagaccaggttgaggtgtttagcccacctggctccgatcgggccagcttcattaaaaatctacaggggattagctcatttaggcgggggactttcactgattgcgcacttgcaaacatgaccgaacaaatacgccaggatcgctccaaaggtacagtacactttgccgtggtaatcacggatggccatgtgacgggttcgccctgtggcggcattaagttgcaggccgagcgggccagggaagaagggattaggcttttcgcggtcgcgcccaatcagaacctcaaggagcaaggcttgagggatattgcttctactccccatgaactttatagaaacgactatgctaccatgcttccagattctaccgagatcgatcaggataccatcaaccggatcattaaagtgatgaagcatgaggcatatggcgagtgctataaggtcagttgtctggaaatccccggccccagcggcccaaagggatatcgcggccaaaagggtgccaagggaaatatgggcgagccgggggagcccggccaaaagggacggcagggcgacccaggtatcgagggccctatcggctttcccggccccaagggcgtgcccggtttcaaaggggaaaagggagaatttggcgccgacggccgcaagggtgctccaggtttggccggtaaaaatggaactgacgggcaaaaggggaagttaggccgaattggcccgcctggctgcaaaggggatccaggcaatagagggcctgacggctaccccggcgaggctgggagcccaggggagcggggtgatcagggtggcaaaggagatcccgggagacctgggcggcgcggcccacccggggagattggggccaagggatcaaagggataccaaggcaactctggggccccagggtcccctggcgtgaagggagcaaagggtggaccaggccccagaggtcctaagggggaaccagggcggcgcggtgatcctggaacaaagggatccccaggatctgatggtcccaagggagaaaagggggacccaggcccagaaggaccacgcggcctcgccggcgaagttggcaacaagggtgccaaaggggaccgaggtctcccaggcccccggggcccacaaggcgcactgggggaacctggcaagcaaggatcccgaggtgatcccggcgacgccggccctaggggggactccggccaaccaggtccaaaaggggaccctggccgtcccgggttctcctatcctggacctaggggtgctcctggcgaaaaaggcgagccgggcccaaggggtccagaaggcgggcgcggcgactttggactcaagggagagccagggaggaaaggtgagaagggggagcccgccgaccccgggccaccgggtgaacccgggccccgtgggcccaggggcgtcccgggtcccgaaggtgaaccaggcccacccggcgacccaggactgacggagtgcgacgtgatgacctatgtccgcgaaacatgtggatgttgcgactgtgaaaagcggtgtggtgcgctcgatgtggttttcgttattgattcctcagaaagtattggatacactaattttactctggagaagaatttcgtaatcaatgttgtgaatagactcggcgccatcgcaaaagacccgaaaagcgagacgggcactcgggtcggcgttgtgcagtattctcatgaaggaacctttgaggccattcagctcgacgatgagagaatcgactctctgtccagctttaaagaggcggtgaagaatctggagtggatcgccgggggaacatggacaccctccgcactcaaatttgcatacgatcggcttatcaaggaaagtcgacgacagaagactagggtgttcgccgttgtgatcacagatggccgacatgacccccgcgacgacgatctcaatctgcgggcactctgtgaccgagacgtgacggtgaccgccattggcatcggcgatatgtttcatgagaagcacgagtccgaaaatctttattctatcgcatgtgacaagcctcaacaagtgcggaacatgactttgtttagtgacttggtggcggagaaattcatagatgacatggaagacgtgctctgccctgatccgcaaattgtgtgtcctgatctgccgtgccaaacgggactggatggcgccgtgttatgttag

SEQ ID NO: 230839 - DNA, 2487 bp, Artificial Sequence
  derived and/or modified sequence
atgctgcagggcacctgcagcgtgctgctgctgtggggcatcctgggcgccatccaggctcagcagcaggaagttatcagtcccgacacaactgaacgaaataacaactgtcccgagaagaccgactgtcctatccacgtctactttgttttggacacctccgagagcgtaaccatgcagtcccctacagatattctcctgttccatatgaaacagttcgtgccgcaatttataagtcaactccaaaatgagttctacctagaccaggtggcactgagctggcggtatgggggcctgcatttctccgatcaggttgaggtcttctcccccccaggttctgacagagcgtctttcattaagaatctgcaaggaattagttcatttcgcaggggcacctttaccgactgtgctcttgccaatatgactgaacaaatcaggcaggacaggtccaagggaacagtccacttcgccgtagttatcactgatggccacgtgaccgggtccccctgcgggggtatcaagcttcaagctgagcgcgctagggaggagggcattcgtctcttcgccgtggctccaaatcagaacctgaaagagcagggcttgcgggatatagcctccaccccacacgagctctatcggaacgattacgcgaccatgctccccgattccacagaaatcgaccaggatactatcaatagaatcatcaaggttatgaagcatgaagcctacggtgaatgttacaaggtgagttgcctagaaataccgggcccaagcgggccaaaggggtatcggggtcagaaaggcgctaagggcaacatgggggagcccggcgagcccggccaaaaggggcggcaaggtgaccctgggattgagggcccaatcggattccccggtccgaagggggtgccagggttcaaaggggagaagggggagttcggggcggacggcagaaagggggctcctgggctcgccggcaagaatggaactgacggccagaaaggcaagctgggcaggatcgggccacccggctgcaagggagatccaggaaaccgagggcctgacggttacccaggagaagcgggttcgcctggtgagagaggcgatcagggaggaaagggagacccaggaagacctggccggcggggtcctccaggcgagattggagccaaaggctcaaaggggtatcagggcaacagcggggccccaggatctccaggtgtcaaaggcgctaaaggcggacctggtccccgaggacccaaaggcgaaccaggcagacgaggagaccccggcaccaagggctctcccggaagcgacggtcctaaaggcgagaagggggacccaggccccgagggccctcgcggattggctggtgaggtaggtaacaagggcgccaagggcgacaggggacttccaggaccccggggaccacaaggcgctctgggcgagccagggaagcaggggtcccgaggagacccaggagacgcaggcccgagaggcgactctgggcagcccggccctaaaggggacccaggccgccccggtttctcatatccaggcccaaggggtgctccaggcgagaagggcgagcccggtcccagaggaccagaaggaggccggggagactttgggttgaagggagagccaggaaggaaaggcgagaaaggggagcccgctgatccaggacctccaggcgagcctggccctaggggcccaaggggggttcccggaccagagggcgagccaggcccccccggcgatcctggactcacagaatgcgacgtaatgacctacgtcagagaaacctgtggctgctgtgattgcgagaagagatgcggagctttggacgtggttttcgtgattgacagctccgagtccattggctacactaatttcactctggagaagaacttcgtcataaacgtggtgaacaggctgggcgccattgctaaggatccaaaatccgagacagggacccgcgtgggggtggtgcagtattcacacgagggcactttcgaggctattcagctcgacgacgaacgcattgatagcttgagctccttcaaggaggccgtgaaaaacttagagtggatcgccggcgggacctggacaccttcagcccttaaatttgcgtacgatcggctgattaaagagagtagacgtcagaaaacccgcgtgttcgccgtcgtcattacagatggtcgccacgatcctcgcgatgatgatctcaatttgcgggccttgtgcgaccgcgacgttaccgtgaccgccattgggatcggagacatgtttcacgagaaacacgagtctgagaatctgtactctattgcgtgcgataagccgcagcaagtccggaacatgactctcttctcagatttggttgcagagaaattcatcgacgatatggaggacgtcctgtgtccagacccccaaattgtctgccccgatctgccatgtcaaaccggactcgacggcgcggtgctgtgttag

SEQ ID NO: 230840 - DNA, 543 bp, Artificial Sequence
  derived and/or modified sequence
atgctgcagggcacctgcagcgtgctgctgctgtggggcatcctgggagccatccaggcgcaacaacaggaggttatttccccggatacgaccgaacggaacaataattgtccagaaaagaccgactgtccaattcacgtgtatttcgtgttggatacttcagagagcgtgacgatgcagagtcccaccgatattcttctgttccatatgaaacagtttgttcctcagtttataagccagctgcaaaacgagttctatttggaccaggtggccctgtcttggcgctacgggggtctccattttagcgatcaggtcgaggtgtttagcccacccgggagcgatcgcgcctccttcataaaaaatctgcaggggataagtagttttaggcgcggaactttcaccgattgtgccctagcaaacatgacggagcaaattcgtcaggaccggtctaagggaactgtacacttcgctgtggtcattaccgacggacatgtgactggctcaccatgtggaggcataaaattacaagcggaacgggcctag

SEQ ID NO: 230841 - DNA, 2487 bp, Artificial Sequence
  derived and/or modified sequence
atgcttcaggggacctgcagtgtgttgctgctttggggcatattaggtgccattcaggcccagcagcaagaggtgatctcaccagacaccaccgagcgtaataataattgccctgagaagactgattgcccgatccatgtctactttgtgctcgacacctctgagagcgttactatgcaaagccctacagacattctactcttccacatgaagcagttcgtgccccagttcatcagtcaactgcagaatgaattctatctggaccaggtagccctgtcctggcgatacgggggactgcatttcagcgaccaggtggaggtcttttcgccaccgggatcggaccgcgcttcctttatcaagaaccttcaggggatatcaagctttagacgaggaacctttaccgactgcgccctagcgaacatgactgagcaaatcagacaggatcgatcgaagggaaccgtccactttgccgtggtgatcactgacgggcacgtcacaggcagtccgtgcggcggtatcaagctacaagccgaacgggcacgggaggaaggcattcgactctttgctgtagctcccaatcaaaacttgaaggagcagggcctgcgggacattgcatccacaccccacgaactttaccggaacgattatgcgaccatgttaccggacagcacagaaatcgaccaagacactatcaaccggatcataaaggtgatgaagcacgaggcatacggcgagtgttacaaggtctcttgcctagagatacccggaccgagtgggccaaaggggtaccgaggtcagaagggtgccaaaggcaatatgggtgagccaggagagccaggtcaaaagggacgccagggggatcctgggatcgagggaccgatcgggttccccggacccaaaggtgtgcctggcttcaaaggagaaaaaggcgaatttggcgctgacggtcgcaaaggcgcacctggactcgccggaaagaacggaacagacggacagaaaggaaaattgggccgaattgggcctcccggatgcaagggtgatcctggcaaccgcggacctgatggctatccgggagaagccggaagtccaggagaacggggtgaccaaggcggtaaaggcgacccagggcgtcccggaaggcgcggacccccaggagagatcggtgcaaagggctctaaagggtatcaggggaacagcggcgcacctgggtcacctggggtgaaaggcgctaagggagggccaggtccgagggggccaaagggggagccaggcaggcgcggtgacccgggtaccaaagggtcccctggtagtgatggtccaaaaggcgaaaagggcgatcctgggccagaggggcctaggggtttagcaggcgaggtcgggaacaaaggtgcaaagggagacaggggtctgccaggccctcggggtcctcagggcgctttgggcgaaccgggaaagcaaggaagcaggggagacccgggtgatgcgggtccacgcggagactcaggccagccgggacctaagggagacccaggaagacctggattctcatatcctggtcccagaggcgctccaggcgagaagggggagcccggtccgaggggacctgagggaggaagaggagattttggactgaagggggagccagggagaaagggcgaaaaaggagagcccgcagaccctggccctcctggggagcctgggccacgtggtccccgaggagtccctggccctgagggtgagcctggccctcctggagatccagggttgaccgagtgtgatgttatgacttatgtgcgcgaaacctgtgggtgctgtgactgtgagaagagatgcggtgccctggacgtggtcttcgtgatcgatagctcagagagtatcggttataccaattttactctggagaaaaacttcgtgatcaacgtggtgaacaggctgggggcaatcgcgaaggatcctaaatctgagactgggacacgagtgggagtcgttcaatactcccatgagggtacttttgaggccatccagctggatgacgagaggatcgacagtctctccagttttaaggaggccgtgaaaaacctggaatggatcgccggtgggacctggaccccctcagcgctgaagtttgcctatgacagactgattaaggagtcgcggcgacaaaaaactagagtgttcgctgtggtaataaccgacggtcgacatgatcctcgcgacgatgaccttaaccttagagcactctgtgatcgggacgtgacagttaccgcgataggcataggcgacatgtttcatgaaaagcacgagagcgaaaatctgtattccatcgcgtgtgataagccacagcaggtcaggaacatgacactgttcagcgatctcgtagcagagaagtttatagacgatatggaagacgtgctgtgcccggatccgcagatcgtgtgtcctgatctgccttgccaaactggtctggatggcgctgtgctttgttag

SEQ ID NO: 230842 - DNA, 2487 bp, Artificial Sequence
  derived and/or modified sequence
atgcttcaggggacgtgtagtgtattacttttatggggtatactaggcgcaattcaggctcagcagcaggaggttatcagtcctgatacaacagaacgcaataataactgcccagaaaaaacagactgcccaatacacgtgtatttcgtcctagacacttcagagtctgtgactatgcagtccccaacagacatcttactgttccatatgaagcagtttgtcccccaattcatcagtcaactccagaacgagttttacctcgatcaggtcgctttatcctggaggtacggtgggctccacttcagtgatcaagtcgaggtgttctcgcctcccggaagtgaccgcgcaagcttcattaagaatctgcaggggatcagtagttttagacggggaacttttaccgattgcgcgctggcaaatatgactgagcaaatccgccaggaccgaagcaagggcactgtgcactttgctgtcgtgatcacagatgggcacgtcaccggctcaccttgtggtggaatcaagctgcaagcagaaagggcaagagaggagggaatccggctatttgccgtagctccaaaccagaatctgaaagagcagggtctgcgtgacatcgcatctactccacacgagctgtatagaaacgactatgctacgatgctgcccgattcaacagagatcgatcaggacaccattaaccggattatcaaagtcatgaagcatgaagcatacggcgaatgttacaaagtgtcctgtcttgaaatacccggaccatctgggccaaaaggctatagaggccagaagggagctaaaggtaacatgggagaaccaggagaacctggccagaagggtagacagggagatcctgggatagagggccctatcgggttccccggtccaaagggagttcctggattcaaaggagaaaaaggcgagttcggggctgatggcagaaagggagctccgggactggccggaaagaacggcaccgacggccaaaaaggaaaacttggacggatcgggccacctggctgcaagggcgaccctggcaatcggggtccagatggttacccaggcgaagccggatcacctggtgagagaggtgaccagggagggaagggcgaccctggcagacccggacgaagagggcctccaggcgaaatcggagctaaggggtctaaagggtaccaggggaactccggggcaccaggctcacccggagtcaaaggtgccaaggggggtcccggtccacggggacccaaaggcgaacccggacgtaggggggaccctggtactaaggggagcccaggaagcgacgggccaaaaggggagaaaggggatcctggtcccgagggccctcggggtctggccggtgaagtggggaataagggtgccaagggcgacagaggcttgccaggacctcggggtccgcagggagctctaggggagccgggaaaacaaggaagtcggggagatccaggggatgcagggcctcgcggagattccggacagcctgggcctaaaggagaccctgggaggcctgggttctcctacccagggccacgtggtgccccaggggagaagggggagccaggtcccaggggccctgaagggggtcgaggagatttcggactcaagggggagccgggtagaaagggggaaaagggggagcccgctgacccgggtccacctggagagccaggccctagaggcccaaggggggttcccggtccagaaggggaacctggcccacccggtgatcctgggctgaccgagtgcgacgtgatgacatatgtccgagagacttgcggttgctgcgattgcgagaaacggtgcggcgctctggatgtcgtgttcgttatagattcctccgaatctatcggttatacaaacttcaccctcgagaagaatttcgtgatcaacgtcgtcaaccggcttggagctattgcgaaagatcccaagagtgaaactggaactagagtgggagtggtccagtattctcatgaaggaacattcgaagcgattcagctggacgacgaacgaatcgactccctgtcttcatttaaagaggcagtcaagaacctggagtggatcgccggaggcacgtggacgcctagtgcattgaaatttgcctacgatcgactgatcaaggagagccgtaggcaaaagacaagagtgttcgccgttgtgattaccgacggcagacatgacccaagggacgatgacctcaatctgcgcgcattgtgtgatcgagacgtcacagttacagctattggaatcggagatatgtttcacgagaaacacgaatccgaaaacctgtacagcatcgcatgcgacaagcctcagcaagtaagaaacatgacgttattctcagatctcgtagcagagaaatttattgacgatatggaagacgtgttgtgtcctgacccgcaaatcgtttgtccagatcttccctgccagaccggcctggatggagccgtcttgtgttag

SEQ ID NO: 230843 - DNA, 543 bp, Artificial Sequence
  derived and/or modified sequence
atgctgcagggaacttgctctgtgcttctcctctggggtatcctcggagccatccaggcgcaacaacaagaagtcattagcccggacacaaccgagcggaacaataattgtccagagaaaactgattgtccaatccatgtctactttgttctggatacttccgagtctgtcacgatgcaatcgcctacagatatcctccttttccacatgaaacaatttgtaccacaattcattagccagctgcagaatgaattttatttagatcaggtggccctctcctggcgatatggagggttgcatttcagtgatcaagtggaggttttttctccacccggttcagatcgggcatctttcattaaaaatctccaaggtatctcatccttccggcgtggcacgtttacagactgcgctctggcaaatatgactgagcagatccgtcaggaccgatcaaagggcactgtgcatttcgcggtggtgattacggatggtcatgtaactgggagcccatgtggaggtatcaaactccaagccgaacgcgcttag

SEQ ID NO: 230844 - DNA, 3446 bp, Artificial Sequence
  derived and/or modified sequence
gcttactcggcgcccgcgcctcgggccgtcgggagcggagcctcctcgggaccaggacttcagggccacaggtgctgccaagatgctccagggcacctgctccgtgctcctgctctggggaatcctgggggccatccaggcccagcagcaggaggtcatctcgccggacactaccgagagaaacaacaactgcccagagaagaccgactgccccatccacgtgtacttcgtgctggacacctcggagagcgtcaccatgcagtcccccacggacatcctgctcttccacatgaagcagttcgtgccgcagttcatcagccagctgcagaacgagttctacctggaccaggtggcgctgagctggcgctacggcggcctgcacttctctgaccaggtggaggtgttcagcccaccgggcagcgaccgggcctccttcatcaagaacctgcagggcatcagctccttccgccgcggcaccttcaccgactgcgcgctggccaacatgacggagcagatccggcaggaccgcagcaagggcaccgtccacttcgccgtggtcatcaccgacggccacgtcaccggcagcccctgcgggggcatcaagctgcaggccgagcgggcccgcgaggagggcatccggctcttcgccgtggcccccaaccagaacctgaaggagcagggcctgcgggacatcgccagcacgccgcacgagctctaccgcaacgactacgccaccatgctgcccgactccaccgagatcgaccaggacaccatcaaccgcatcatcaaggtcatgaaacacgaagcctacggagagtgctacaaggtgagctgcctggaaatccctgggccctctggccccaagggctaccgtggacagaagggtgccaagggcaacatgggtgagccgggagagcctggccagaagggaagacagggagacccgggcatcgaaggccccattggattcccaggacccaagggcgttcctggcttcaaaggagagaagggtgaatttggagccgacggtcgcaagggggcccctggcctggctggcaagaacgggaccgatggacagaagggcaagctggggcgcatcggacctcctggctgcaagggagaccctggaaaccggggccccgacggttacccgggggaagcagggagtccaggggagcgaggagaccaaggcggcaagggggaccctggccgcccaggacgcagagggcccccgggagaaatcggggccaagggaagcaaggggtatcaaggcaacagtggagccccaggaagtcctggtgtgaaaggagccaagggcgggcctgggccccgcggacccaaaggcgagccggggcgcaggggagaccccggcaccaagggcagcccaggcagcgatggccccaagggggagaagggggaccctggccctgaggggccccgcggcctggctggagaggttggcaacaaaggagccaagggagaccgaggcttgcctggacccagaggcccccagggagctcttggggagcccggaaagcagggatctcggggagaccccggtgatgcaggaccccgtggagactcaggacagccaggccccaagggagaccccggcaggcctggattcagctacccaggaccccgaggagcacccggagaaaaaggcgagcccggcccacgcggccccgagggaggccgaggcgactttggcttgaaaggagaacctgggaggaaaggagagaaaggagagcctgcggatcctggtccccctggtgagccaggccctcgggggccaagaggagtcccaggacccgagggtgagcccggcccccctggagaccccggtctcacggagtgtgacgtcatgacctacgtgagggagacctgcgggtgctgcgactgtgagaagcgctgtggcgccctggacgtggtcttcgtcatcgacagctccgagagcattgggtacaccaacttcacactggagaagaacttcgtcatcaacgtggtcaacaggctgggtgccatcgctaaggaccccaagtccgagacagggacgcgtgtgggcgtggtgcagtacagccacgagggcacctttgaggccatccagctggacgacgaacgtatcgactccctgtcgagcttcaaggaggctgtcaagaacctcgagtggattgcgggcggcacctggacaccctcagccctcaagtttgcctacgaccgcctcatcaaggagagccggcgccagaagacacgtgtgtttgcggtggtcatcacggacgggcgccacgaccctcgggacgatgacctcaacttgcgggcgctgtgcgaccgcgacgtcacagtgacggccatcggcatcggggacatgttccacgagaagcacgagagtgaaaacctctactccatcgcctgcgacaagccacagcaggtgcgcaacatgacgctgttctccgacctggtcgctgagaagttcatcgatgacatggaggacgtcctctgcccggaccctcagatcgtgtgcccagaccttccctgccaaacaggtttggacggagctgttttgtgctgaaaggttttctcggggtccgtggtgtcccccaaaggtgccaccgtgcgggtctcctagctccctgccagcttcctgtccctgtgctcactgcccccacgcctcctgccaaggccgagccacacacccgctccacctgcatttcctctaccgactcgccagcccaaatgccgctcttcactctggcctcgctgagcggctgcccgaggaggagctctaggccgacgcccaccgcaggccttacagtcttctctggacgctcccttgcagatgcaccgtggcctggcggcgagcccccggtcaccttcctccgcacggaagaggggccggacgccaccttccccaggaccattcccctgatccaacagttgctaaacgccacggagctcacgcaggacccggccgcctactcccagctggtggccgtgctggtctacaccgccgagcgggccaagttcgccaccggggtagagcggcaggactggatggagctgttcattgacacctttaagctggtgcacagggacatcgtgggggaccccgagaccgcgctggccctctgctaaagcccgggcacccgcccagccgggctgggccctccctgccacactagcttcccagggctgcccccgacaggctggctctcagtggaggccagagatctggaatcggggtcagcggggctacagtccttccaggggctctggggcagctcccagcctcttcccatgctggtggccaccgtgtcccttgctgcggctgcatcttccagtctctcctccgtcttcctgtggccgctctctttataagaaccctggtcattgaatttaaggcccaccccaagtccagaatgacctcgcaagacccttaactcactccc

SEQ ID NO: 230845 - DNA, 3430 bp, Artificial Sequence
  derived and/or modified sequence
ctgggggtgtctgagcgacccccacccctgttgcaggacttcagggccacaggtgctgccaagatgctccagggcacctgctccgtgctcctgctctggggaatcctgggggccatccaggcccagcagcaggaggtcatctcgccggacactaccgagagaaacaacaactgcccagagaagaccgactgccccatccacgtgtacttcgtgctggacacctcggagagcgtcaccatgcagtcccccacggacatcctgctcttccacatgaagcagttcgtgccgcagttcatcagccagctgcagaacgagttctacctggaccaggtggcgctgagctggcgctacggcggcctgcacttctctgaccaggtggaggtgttcagcccaccgggcagcgaccgggcctccttcatcaagaacctgcagggcatcagctccttccgccgcggcaccttcaccgactgcgcgctggccaacatgacggagcagatccggcaggaccgcagcaagggcaccgtccacttcgccgtggtcatcaccgacggccacgtcaccggcagcccctgcgggggcatcaagctgcaggccgagcgggcccgcgaggagggcatccggctcttcgccgtggcccccaaccagaacctgaaggagcagggcctgcgggacatcgccagcacgccgcacgagctctaccgcaacgactacgccaccatgctgcccgactccaccgagatcgaccaggacaccatcaaccgcatcatcaaggtcatgaaacacgaagcctacggagagtgctacaaggtgagctgcctggaaatccctgggccctctggccccaagggctaccgtggacagaagggtgccaagggcaacatgggtgagccgggagagcctggccagaagggaagacagggagacccgggcatcgaaggccccattggattcccaggacccaagggcgttcctggcttcaaaggagagaagggtgaatttggagccgacggtcgcaagggggcccctggcctggctggcaagaacgggaccgatggacagaagggcaagctggggcgcatcggacctcctggctgcaagggagaccctggaaaccggggccccgacggttacccgggggaagcagggagtccaggggagcgaggagaccaaggcggcaagggggaccctggccgcccaggacgcagagggcccccgggagaaatcggggccaagggaagcaaggggtatcaaggcaacagtggagccccaggaagtcctggtgtgaaaggagccaagggcgggcctgggccccgcggacccaaaggcgagccggggcgcaggggagaccccggcaccaagggcagcccaggcagcgatggccccaagggggagaagggggaccctggccctgaggggccccgcggcctggctggagaggttggcaacaaaggagccaagggagaccgaggcttgcctggacccagaggcccccagggagctcttggggagcccggaaagcagggatctcggggagaccccggtgatgcaggaccccgtggagactcaggacagccaggccccaagggagaccccggcaggcctggattcagctacccaggaccccgaggagcacccggagaaaaaggcgagcccggcccacgcggccccgagggaggccgaggcgactttggcttgaaaggagaacctgggaggaaaggagagaaaggagagcctgcggatcctggtccccctggtgagccaggccctcgggggccaagaggagtcccaggacccgagggtgagcccggcccccctggagaccccggtctcacggagtgtgacgtcatgacctacgtgagggagacctgcgggtgctgcgactgtgagaagcgctgtggcgccctggacgtggtcttcgtcatcgacagctccgagagcattgggtacaccaacttcacactggagaagaacttcgtcatcaacgtggtcaacaggctgggtgccatcgctaaggaccccaagtccgagacagggacgcgtgtgggcgtggtgcagtacagccacgagggcacctttgaggccatccagctggacgacgaacgtatcgactccctgtcgagcttcaaggaggctgtcaagaacctcgagtggattgcgggcggcacctggacaccctcagccctcaagtttgcctacgaccgcctcatcaaggagagccggcgccagaagacacgtgtgtttgcggtggtcatcacggacgggcgccacgaccctcgggacgatgacctcaacttgcgggcgctgtgcgaccgcgacgtcacagtgacggccatcggcatcggggacatgttccacgagaagcacgagagtgaaaacctctactccatcgcctgcgacaagccacagcaggtgcgcaacatgacgctgttctccgacctggtcgctgagaagttcatcgatgacatggaggacgtcctctgcccggaccctcagatcgtgtgcccagaccttccctgccaaacaggtttggacggagctgttttgtgctgaaaggttttctcggggtccgtggtgtcccccaaaggtgccaccgtgcgggtctcctagctccctgccagcttcctgtccctgtgctcactgcccccacgcctcctgccaaggccgagccacacacccgctccacctgcatttcctctaccgactcgccagcccaaatgccgctcttcactctggcctcgctgagcggctgcccgaggaggagctctaggccgacgcccaccgcaggccttacagtcttctctggacgctcccttgcagatgcaccgtggcctggcggcgagcccccggtcaccttcctccgcacggaagaggggccggacgccaccttccccaggaccattcccctgatccaacagttgctaaacgccacggagctcacgcaggacccggccgcctactcccagctggtggccgtgctggtctacaccgccgagcgggccaagttcgccaccggggtagagcggcaggactggatggagctgttcattgacacctttaagctggtgcacagggacatcgtgggggaccccgagaccgcgctggccctctgctaaagcccgggcacccgcccagccgggctgggccctccctgccacactagcttcccagggctgcccccgacaggctggctctcagtggaggccagagatctggaatcggggtcagcggggctacagtccttccaggggctctggggcagctcccagcctcttcccatgctggtggccaccgtgtcccttgctgcggctgcatcttccagtctctcctccgtcttcctgtggccgctctctttataagaaccctggtcattgaatttaaggcccaccccaagtccagaatgacctcgcaagacccttaactcactcccgtc

SEQ ID NO: 230846 - DNA, 919 bp, Artificial Sequence
  derived and/or modified sequence
ggcggctccccagggcggcgggacccgggctgacagcgacccgcagcccctgccgggccgcccacacccgccctgggactccgccggggcgctggtggaaccgctgggcctgggtctccactgctggcaaccgaacggatcggccctctgtggagccgcaggtgtgcgggcgagcggcgcccatccgggctgtgccagcagaaccccggtgcccgcgcctaggacgcccctggagaagggaccttccctttggggtcggaacccagaaaggaggggcctgcgatccgcggagctccttgttcttgggataacacagctctggcttggaggcccccttgcacttcgactctggacttcagggccacaggtgctgccaagatgctccagggcacctgctccgtgctcctgctctggggaatcctgggggccatccaggcccagcagcaggaggtcatctcgccggacactaccgagagaaacaacaactgcccagagaagaccgactgccccatccacgtgtacttcgtgctggacacctcggagagcgtcaccatgcagtcccccacggacatcctgctcttccacatgaagcagttcgtgccgcagttcatcagccagctgcagaacgagttctacctggaccaggtggcgctgagctggcgctacggcggcctgcacttctctgaccaggtggaggtgttcagcccaccgggcagcgaccgggcctccttcatcaagaacctgcagggcatcagctccttccgccgcggcaccttcaccgactgcgcgctggccaacatgacggagcagatccggcaggaccgcagcaagggcaccgtccacttcgccgtggtcatcaccgacggccacgtcaccggcagcccctgcgggggcatcaagctgcaggccgagcgggccc

SEQ ID NO: 230847 - DNA, 2487 bp, Artificial Sequence
  derived and/or modified sequence
atgctgcagggcacctgcagcgtgctgctgctgtggggcatcctgggcgccatccaggcccagcagcaggaggtgatcagccccgacaccaccgagagaaacaacaactgccccgagaagaccgactgccccatccacgtgtacttcgtgctggacaccagcgagagcgtgaccatgcagagccccaccgacatcctgctgttccacatgaagcagttcgtgccccagttcatcagccagctgcagaacgagttctacctggaccaggtggccctgagctggagatacggcggcctgcacttcagcgaccaggtggaggtgttcagcccccccggcagcgacagagccagcttcatcaagaacctgcagggcatcagcagcttcagaagaggcaccttcaccgactgcgccctggccaacatgaccgagcagatcagacaggacagaagcaagggcaccgtgcacttcgccgtggtgatcaccgacggccacgtgaccggcagcccctgcggcggcatcaagctgcaggccgagagagccagagaggagggcatcagactgttcgccgtggcccccaaccagaacctgaaggagcagggcctgagagacatcgccagcaccccccacgagctgtacagaaacgactacgccaccatgctgcccgacagcaccgagatcgaccaggacaccatcaacagaatcatcaaggtgatgaagcacgaggcctacggcgagtgctacaaggtgagctgcctggagatccccggccccagcggccccaagggctacagaggccagaagggcgccaagggcaacatgggcgagcccggcgagcccggccagaagggcagacagggcgaccccggcatcgagggccccatcggcttccccggccccaagggcgtgcccggcttcaagggcgagaagggcgagttcggcgccgacggcagaaagggcgcccccggcctggccggcaagaacggcaccgacggccagaagggcaagctgggcagaatcggcccccccggctgcaagggcgaccccggcaacagaggccccgacggctaccccggcgaggccggcagccccggcgagagaggcgaccagggcggcaagggcgaccccggcagacccggcagaagaggcccccccggcgagatcggcgccaagggcagcaagggctaccagggcaacagcggcgcccccggcagccccggcgtgaagggcgccaagggcggccccggccccagaggccccaagggcgagcccggcagaagaggcgaccccggcaccaagggcagccccggcagcgacggccccaagggcgagaagggcgaccccggccccgagggccccagaggcctggccggcgaggtgggcaacaagggcgccaagggcgacagaggcctgcccggccccagaggcccccagggcgccctgggcgagcccggcaagcagggcagcagaggcgaccccggcgacgccggccccagaggcgacagcggccagcccggccccaagggcgaccccggcagacccggcttcagctaccccggccccagaggcgcccccggcgagaagggcgagcccggccccagaggccccgagggcggcagaggcgacttcggcctgaagggcgagcccggcagaaagggcgagaagggcgagcccgccgaccccggcccccccggcgagcccggccccagaggccccagaggcgtgcccggccccgagggcgagcccggcccccccggcgaccccggcctgaccgagtgcgacgtgatgacctacgtgagagagacctgcggctgctgcgactgcgagaagagatgcggcgccctggacgtggtgttcgtgatcgacagcagcgagagcatcggctacaccaacttcaccctggagaagaacttcgtgatcaacgtggtgaacagactgggcgccatcgccaaggaccccaagagcgagaccggcaccagagtgggcgtggtgcagtacagccacgagggcaccttcgaggccatccagctggacgacgagagaatcgacagcctgagcagcttcaaggaggccgtgaagaacctggagtggatcgccggcggcacctggacccccagcgccctgaagttcgcctacgacagactgatcaaggagagcagaagacagaagaccagagtgttcgccgtggtgatcaccgacggcagacacgaccccagagacgacgacctgaacctgagagccctgtgcgacagagacgtgaccgtgaccgccatcggcatcggcgacatgttccacgagaagcacgagagcgagaacctgtacagcatcgcctgcgacaagccccagcaggtgagaaacatgaccctgttcagcgacctggtggccgagaagttcatcgacgacatggaggacgtgctgtgccccgacccccagatcgtgtgccccgacctgccctgccagaccggcctggacggcgccgtgctgtgctag

SEQ ID NO: 230848 - DNA, 543 bp, Artificial Sequence
  derived and/or modified sequence
atgctgcagggcacctgcagcgtgctgctgctgtggggcatcctgggcgccatccaggcccagcagcaggaggtgatcagccccgacaccaccgagagaaacaacaactgccccgagaagaccgactgccccatccacgtgtacttcgtgctggacaccagcgagagcgtgaccatgcagagccccaccgacatcctgctgttccacatgaagcagttcgtgccccagttcatcagccagctgcagaacgagttctacctggaccaggtggccctgagctggagatacggcggcctgcacttcagcgaccaggtggaggtgttcagcccccccggcagcgacagagccagcttcatcaagaacctgcagggcatcagcagcttcagaagaggcaccttcaccgactgcgccctggccaacatgaccgagcagatcagacaggacagaagcaagggcaccgtgcacttcgccgtggtgatcaccgacggccacgtgaccggcagcccctgcggcggcatcaagctgcaggccgagagagcctag

SEQ ID NO: 230849 - protein, 1011 aa, Artificial Sequence
  derived and/or modified sequence
MHSMISSVDVKSEVPVGLEPISPLDLRTDLRMMMPVVDPVVREKQLQQELLLIQQQQQIQKQLLIAEFQKQHENLTRQHQAQLQEHIKELLAIKQQQELLEKEQKLEQQRQEQEVERHRREQQLPPLRGKDRGRERAVASTEVKQKLQEFLLSKSATKDTPTNGKNHSVSRHPKLWYTAAHHTSLDQSSPPLSGTSPSYKYTLPGAQDAKDDFPLRKTASEPNLKVRSRLKQKVAERRSSPLLRRKDGNVVTSFKKRMFEVTESSVSSSSPGSGPSSPNNGPTGSVTENETSVLPPTPHAEQMVSQQRILIHEDSMNLLSLYTSPSLPNITLGLPAVPSQLNASNSLKEKQKCETQTLRQGVPLPGQYGGSIPASSSHPHVTLEGKPPNSSHQALLQHLLLKEQMRQQKLLVAGGVPLHPQSPLATKERISPGIRGTHKLPRHRPLNRTQSAPLPQSTLAQLVIQQQHQQFLEKQKQYQQQIHMNKLLSKSIEQLKQPGSHLEEAEEELQGDQAMQEDRAPSSGNSTRSDSSACVDDTLGQVGAVKVKEEPVDSDEDAQIQEMESGEQAAFMQQPFLEPTHTRALSVRQAPLAAVGMDGLEKHRLVSRTHSSPAASVLPHPAMDRPLQPGSATGIAYDPLMLKHQCVCGNSTTHPEHAGRIQSIWSRLQETGLLNKCERIQGRKASLEEIQLVHSEHHSLLYGTNPLDGQKLDPRILLGDDSQKFFSSLPCGGLGVDSDTIWNELHSSGAARMAVGCVIELASKVASGELKNGFAVVRPPGHHAEESTAMGFCFFNSVAITAKYLRDQLNISKILIVDLDVHHGNGTQQAFYADPSILYISLHRYDEGNFFPGSGAPNEVGTGLGEGYNINIAWTGGLDPPMGDVEYLEAFRTIVKPVAKEFDPDMVLVSAGFDALEGHTPPLGGYKVTAKCFGHLTKQLMTLADGRVVLALEGGHDLTAICDASEACVNALLGNELEPLAEDILHQSPNMNAVISLQKIIEIQSMSLKFS

SEQ ID NO: 230850 - DNA, 2772 bp, Artificial Sequence
  derived and/or modified sequence
ctgcacaagctctctagtcttgttgacgtgaagagcgaagtgcccgtcgggctggagcctatatcacccctggacttgcgcaccgacctccggatgatgatgccagtcgtggatcctgtggtccgggaaaagcagctccagcaggaacttttgctgattcagcagcagcaacaaatccagaaacagctgctgatcgcagagtttcaaaaacaacacgaaaatctcaccagacaacatcaggcccagctgcaggagcacatcaaagagctgctggcaattaagcagcagcaagaattgctagagaaagaacaaaagctggaacaacagcgccaagaacaagaagtggagcgtcacaggcgggaacagcagctaccaccgctccgggggaaggacagaggcagggagcgtgccgttgcgagcacggaggtaaagcagaagctgcaggagttcctactctctaaatccgccactaaggacacccccacgaatggtaaaaaccactctgtgagccggcatcctaaactctggtataccgccgcccatcatactagtctcgaccaatcttcgccgcctctgtcaggtacttctcctagctataagtacacccttcctggagcccaggatgccaaagacgactttcctttgagaaagaccgcaagcgagccaaatctaaaggtccgctcccgactaaaacaaaaagttgccgaacgacgatcatctcctctcctaaggcggaaggatgggaatgtggtgacatcttttaagaaacgcatgtttgaggtgacagaatcgagcgtgtcatcatctagtccaggcagtgggcccagcagcccaaacaatggacccacaggaagcgtaacagagaatgagacctcagtgttgcctcccacaccacacgccgaacagatggtgtctcagcaaagaatcttaatccacgaagatagcatgaatctgctatcactgtacacatcaccaagtctccctaacatcaccctgggactcccagccgtgcccagtcaactgaacgcatcaaactcactgaaagagaagcagaagtgcgagacccaaacacttcgccaaggggtgccactaccagggcagtatggaggcagcattcctgcatcctcaagtcatccacacgtaactcttgaaggcaagccacctaatagcagtcaccaagcactattgcaacacctgctgcttaaggaacagatgaggcaacagaagttgctggtcgcgggcggcgtgccactgcaccctcaatcccctcttgctactaaggagagaatctctccgggaattcgtggtacacacaaactccctcggcatcgccccctaaatcgcacccagagcgcaccgcttccacagtctactctcgctcagctggttattcagcagcagcaccagcaatttcttgaaaagcagaagcaataccagcaacaaatccacatgaacaagccctttctggagccgactcacacgcgggcgctctcggtccgacaggccccactagccgcagtggggatggacggactggaaaagcaccgactggttagtcggacccactctagtccggccgcatccgtgctgcctcaccctgctatggaccgaccactgcagccaggctcagcaaccgggatcgcctacgatcctctgatgttaaagcaccaatgcgtctgcggaaattccactacccatcctgagcatgcaggccggattcagagcatttggtcgcggttacaggagacaggactgctcaataagtgcgaacgaattcagggacggaaagccagtctagaggaaatccagcttgttcattctgaacatcattctcttctctacgggacaaatcccctggacggccaaaagctagaccctcgcattctgctgggggacgattcccaaaaattctttagtagtttaccttgcggcggcctcggggtggattcagacaccatatggaacgagctgcacagctccggggccgcacggatggccgtgggttgtgtgattgagttggcatccaaagtggctagcggcgagctcaagaacgggtttgctgttgtaagacctccaggccaccatgctgaagagagcacggcaatgggcttctgttttttcaactcagtcgccattacagccaaatacctcagggaccaactgaatataagcaagattcttatagtggacctggacgttcatcatgggaatggcacccagcaggctttttacgctgatcctagtatcctttatataagcctgcaccgctacgatgaaggtaacttctttccagggtccggtgctcccaacgaggtggggaccggtctgggggaaggttacaacattaacatagcttggacggggggactagacccccccatgggcgacgtggaatatttggaagctttcaggaccattgtgaaaccagtcgcaaaggaattcgatccagatatggttcttgttagcgctggatttgatgccctcgagggccatactccaccacttggcggctataaagttacggccaaatgcttcggccacctcacgaaacagttgatgaccctcgctgacggcagggtggtgttagccttggagggggggcatgatctgaccgcgatttgtgacgcatcggaggcttgtgttaatgccttattgggaaatgaattagaacctctcgcggaagacatcctccatcagagtcccaatatgaatgctgtcatatctctacagaaaataatcgagattcagtctatgtcgctgaagttttcatag

SEQ ID NO: 230851 - DNA, 3036 bp, Artificial Sequence
  derived and/or modified sequence
atgcattctatgataagctcagtggacgtgaagtctgaggtcccagtgggactcgaaccgatttccccattagatctcagaacagaccttagaatgatgatgcccgtcgtggatcccgtcgtacgtgagaagcagctgcagcaggagctgttgctgatccagcaacagcagcagatccagaagcagctgcttatagcagagtttcaaaagcagcatgagaaccttactagacagcaccaggctcaactgcaggagcatataaaggagctgttggccattaagcaacaacaggaattactggagaaagagcagaagctggagcagcagagacaggagcaagaggtcgagagacatcggagggagcagcagcttccacctcttcgaggcaaggaccgtggcagggagcgggccgtggctagtaccgaggtgaaacagaagctgcaggagttcttactgtcaaagagtgccactaaggacacaccgacaaatgggaaaaaccatagtgtgtcccgtcatcccaagctgtggtacacagccgcacatcatacatctctcgatcaatccagtccaccactgagcgggacatcccccagttacaaatataccctgcccggagcgcaggatgctaaggacgacttcccactgaggaagactgcttccgagccgaacctaaaggtcaggtctcgccttaagcagaaagtggccgaacgccgatcttcaccactgctacggcggaaggacggtaacgtagtcacatccttcaagaagcgaatgtttgaggtcactgagagcagcgtgtcttcctcatctcctggttctggccctagttcgccaaataacgggcccacagggtcagtcacagagaacgaaacctctgttctacctcctacacctcacgccgaacaaatggtttcgcagcagcgtattctcatccacgaggatagcatgaacctactgagcttatatacatcacccagcctaccaaatatcacactgggcctacccgcagtgccttctcagcttaatgcatctaactcgttgaaggaaaagcaaaagtgcgagactcagactcttagacagggcgtgcccttgccaggacagtatggaggcagcatcccggcatccagcagccacccccatgtgacactcgagggaaaaccgcccaattccagtcaccaggcattacttcagcatctgcttttaaaagagcagatgcggcagcaaaagcttctagttgcagggggtgtgcccctgcatcctcagagcccactggcgactaaagaacgtatttcacccggcattaggggtacccacaagctgcctcgccatcgtcccctgaataggacgcaaagtgcgcctcttcctcagtcaaccctggcccagttggtcatccaacaacagcatcagcagtttcttgaaaagcagaagcagtaccagcagcaaatccacatgaataagctcctgagtaaatctatcgagcaactgaaacagccgggatcccacttggaagaggcggaagaggaactccaaggggatcaagcaatgcaggaggatagggctccctcctctggaaactctactcgctcagattcaagcgcctgtgtcgacgatacactggggcaggtcggggcggttaaggtcaaggaagagcccgtcgattcagacgaggatgcccagatccaggagatggagtcaggcgagcaagctgccttcatgcaacaaccattccttgagcctacccatactcgcgcactctctgtgcggcaggcccccttagccgccgtggggatggacgggctcgaaaaacaccgacttgtatcccgaactcactcctccccagccgcgtcggtgctgccgcaccccgctatggataggccactgcagccgggctcagcgacgggcattgcttacgatcctcttatgctgaagcatcagtgtgtgtgcggaaactccacaacccaccccgaacacgcaggccggatacaaagcatttggtctagattacaggaaaccggtctgcttaataaatgtgaacgcatccagggtaggaaggcgagcctggaagagatccagctcgtgcactcagagcatcactccttgttgtatggtaccaaccctctcgatgggcagaaactggatccaagaattctactcggtgacgactcccagaaattcttctctagcctgccgtgcggaggactcggggtcgactccgacactatctggaacgaattacattcttctggggcagcccgcatggctgtgggatgcgtaattgagttggcatccaaggtggcctctggggaattgaaaaatggtttcgcggtggtgcgccccccaggtcatcatgccgaggaatcaactgctatgggattttgcttcttcaattccgtagcaatcacagccaagtatctgcgggaccagttgaacatatcaaaaattctgattgttgaccttgatgtgcaccatggcaacggaacccagcaagccttctatgccgaccccagcattctatacatttccctccacaggtatgacgaaggcaatttttttcccggatccggagcacccaacgaggtgggaaccggactgggggagggctataacataaacattgcctggacaggcggtctggaccctcctatgggcgacgtggaatatctcgaggcgttccgcacgatcgtcaagcctgtcgcgaaggagttcgacccggacatggtgctggtgagtgcgggttttgacgctcttgagggacacacaccgcctctcgggggatacaaggtgacagctaagtgttttggccatctgactaaacagttaatgacactcgccgatggccgtgtggttctggccctggaaggtggccacgatctcaccgctatttgcgatgcaagcgaggcatgtgtcaacgcacttttaggcaacgaattggagcccctagccgaggacattctccatcagagcccgaatatgaatgccgtgatatcccttcagaaaatcatagaaatccagtctatgtccctgaagttttcgtag

SEQ ID NO: 230852 - DNA, 2834 bp, Artificial Sequence
  derived and/or modified sequence
ctccacaaactgagttctttagtggatgtgaagtcagaagttcctgtgggcctggagcccatctcacctttagacctaaggacagacctcaggatgatgatgcccgtggtggaccctgttgtccgtgagaagcaattgcagcaggaattacttcttatccagcagcagcaacaaatccagaagcagcttctgatagcagagtttcagaaacagcatgagaacttgacacggcagcaccaggctcagcttcaggagcatatcaaggaacttctagccataaaacagcaacaagaactcctagaaaaggagcagaaactggagcagcagaggcaagaacaggaagtagagaggcatcgcagagaacagcagcttcctcctctcagaggcaaagatagaggacgagaaagggcagtggcaagtacagaagtaaagcagaagcttcaagagttcctactgagtaaatcagcaacgaaagacactccaactaatggaaaaaatcattccgtgagccgccatcccaagctctggtacacggctgcccaccacacatcattggatcaaagctctccaccccttagtggaacatctccatcctacaagtacacattaccaggagcacaagatgcaaaggatgatttcccccttcgaaaaactgcctctgagcccaacttgaaggtgcggtccaggttaaaacagaaagtggcagagaggagaagcagccccttactcaggcggaaggatggaaatgttgtcacttcattcaagaagcgaatgtttgaggtgacagaatcctcagtcagtagcagttctccaggctctggtcccagttcaccaaacaatgggccaactggaagtgttactgaaaatgagacttcggttttgccccctacccctcatgccgagcaaatggtttcacagcaacgcattctaattcatgaagattccatgaacctgctaagtctttatacctctccttctttgcccaacattaccttggggcttcccgcagtgccatcccagctcaatgcttcgaattcactcaaagaaaagcagaagtgtgagacgcagacgcttaggcaaggtgttcctctgcctgggcagtatggaggcagcatcccggcatcttccagccaccctcatgttactttagagggaaagccacccaacagcagccaccaggctctcctgcagcatttattattgaaagaacaaatgcgacagcaaaagcttcttgtagctggtggagttcccttacatcctcagtctcccttggcaacaaaagagagaatttcacctggcattagaggtacccacaaattgccccgtcacagacccctgaaccgaacccagtctgcacctttgcctcagagcacgttggctcagctggtcattcaacagcaacaccagcaattcttggagaagcagaagcaataccagcagcagatccacatgaacaaacctttcctggaacccacgcacacacgtgcgctctctgtgcgccaagctccgctggctgcggttggcatggatggattagagaaacaccgtctcgtctccaggactcactcttcccctgctgcctctgttttacctcacccagcaatggaccgccccctccagcctggctctgcaactggaattgcctatgaccccttgatgctgaaacaccagtgcgtttgtggcaattccaccacccaccctgagcatgctggacgaatacagagtatctggtcacgactgcaagaaactgggctgctaaataaatgtgagcgaattcaaggtcgaaaagccagcctggaggaaatacagcttgttcattctgaacatcactcactgttgtatggcaccaaccccctggacggacagaagctggaccccaggatactcctaggtgatgactctcaaaagtttttttcctcattaccttgtggtggacttggggtggacagtgacaccatttggaatgagctacactcgtccggtgctgcacgcatggctgttggctgtgtcatcgagctggcttccaaagtggcctcaggagagctgaagaatgggtttgctgttgtgaggccccctggccatcacgctgaagaatccacagccatggggttctgcttttttaattcagttgcaattaccgccaaatacttgagagaccaactaaatataagcaagatattgattgtagatctggatgttcaccatggaaacggtacccagcaggccttttatgctgaccccagcatcctgtacatttcactccatcgctatgatgaagggaactttttccctggcagtggagccccaaatgaggttggaacaggccttggagaagggtacaatataaatattgcctggacaggtggccttgatcctcccatgggagatgttgagtaccttgaagcattcaggaccatcgtgaagcctgtggccaaagagtttgatccagacatggtcttagtatctgctggatttgatgcattggaaggccacacccctcctctaggagggtacaaagtgacggcaaaatgttttggtcatttgacgaagcaattgatgacattggctgatggacgtgtggtgttggctctagaaggaggacatgatctcacagccatctgtgatgcatcagaagcctgtgtaaatgcccttctaggaaatgagctggagccacttgcagaagatattctccaccaaagcccgaatatgaatgctgttatttctttacagaagatcattgaaattcaaagtatgtctttaaagttctcttaaaaattctaagcaggtaaaactaactaaaattatattgaaaattatagtacaaagaaacattt

SEQ ID NO: 230853 - DNA, 3099 bp, Artificial Sequence
  derived and/or modified sequence
atgcacagtatgatcagctcagtggatgtgaagtcagaagttcctgtgggcctggagcccatctcacctttagacctaaggacagacctcaggatgatgatgcccgtggtggaccctgttgtccgtgagaagcaattgcagcaggaattacttcttatccagcagcagcaacaaatccagaagcagcttctgatagcagagtttcagaaacagcatgagaacttgacacggcagcaccaggctcagcttcaggagcatatcaaggaacttctagccataaaacagcaacaagaactcctagaaaaggagcagaaactggagcagcagaggcaagaacaggaagtagagaggcatcgcagagaacagcagcttcctcctctcagaggcaaagatagaggacgagaaagggcagtggcaagtacagaagtaaagcagaagcttcaagagttcctactgagtaaatcagcaacgaaagacactccaactaatggaaaaaatcattccgtgagccgccatcccaagctctggtacacggctgcccaccacacatcattggatcaaagctctccaccccttagtggaacatctccatcctacaagtacacattaccaggagcacaagatgcaaaggatgatttcccccttcgaaaaactgcctctgagcccaacttgaaggtgcggtccaggttaaaacagaaagtggcagagaggagaagcagccccttactcaggcggaaggatggaaatgttgtcacttcattcaagaagcgaatgtttgaggtgacagaatcctcagtcagtagcagttctccaggctctggtcccagttcaccaaacaatgggccaactggaagtgttactgaaaatgagacttcggttttgccccctacccctcatgccgagcaaatggtttcacagcaacgcattctaattcatgaagattccatgaacctgctaagtctttatacctctccttctttgcccaacattaccttggggcttcccgcagtgccatcccagctcaatgcttcgaattcactcaaagaaaagcagaagtgtgagacgcagacgcttaggcaaggtgttcctctgcctgggcagtatggaggcagcatcccggcatcttccagccaccctcatgttactttagagggaaagccacccaacagcagccaccaggctctcctgcagcatttattattgaaagaacaaatgcgacagcaaaagcttcttgtagctggtggagttcccttacatcctcagtctcccttggcaacaaaagagagaatttcacctggcattagaggtacccacaaattgccccgtcacagacccctgaaccgaacccagtctgcacctttgcctcagagcacgttggctcagctggtcattcaacagcaacaccagcaattcttggagaagcagaagcaataccagcagcagatccacatgaacaaactgctttcgaaatctattgaacaactgaagcaaccaggcagtcaccttgaggaagcagaggaagagcttcagggggaccaggcgatgcaggaagacagagcgccctctagtggcaacagcactaggagcgacagcagtgcttgtgtggatgacacactgggacaagttggggctgtgaaggtcaaggaggaaccagtggacagtgatgaagatgctcagatccaggaaatggaatctggggagcaggctgcttttatgcaacagcctttcctggaacccacgcacacacgtgcgctctctgtgcgccaagctccgctggctgcggttggcatggatggattagagaaacaccgtctcgtctccaggactcactcttcccctgctgcctctgttttacctcacccagcaatggaccgccccctccagcctggctctgcaactggaattgcctatgaccccttgatgctgaaacaccagtgcgtttgtggcaattccaccacccaccctgagcatgctggacgaatacagagtatctggtcacgactgcaagaaactgggctgctaaataaatgtgagcgaattcaaggtcgaaaagccagcctggaggaaatacagcttgttcattctgaacatcactcactgttgtatggcaccaaccccctggacggacagaagctggaccccaggatactcctaggtgatgactctcaaaagtttttttcctcattaccttgtggtggacttggggtggacagtgacaccatttggaatgagctacactcgtccggtgctgcacgcatggctgttggctgtgtcatcgagctggcttccaaagtggcctcaggagagctgaagaatgggtttgctgttgtgaggccccctggccatcacgctgaagaatccacagccatggggttctgcttttttaattcagttgcaattaccgccaaatacttgagagaccaactaaatataagcaagatattgattgtagatctggatgttcaccatggaaacggtacccagcaggccttttatgctgaccccagcatcctgtacatttcactccatcgctatgatgaagggaactttttccctggcagtggagccccaaatgaggttggaacaggccttggagaagggtacaatataaatattgcctggacaggtggccttgatcctcccatgggagatgttgagtaccttgaagcattcaggaccatcgtgaagcctgtggccaaagagtttgatccagacatggtcttagtatctgctggatttgatgcattggaaggccacacccctcctctaggagggtacaaagtgacggcaaaatgttttggtcatttgacgaagcaattgatgacattggctgatggacgtgtggtgttggctctagaaggaggacatgatctcacagccatctgtgatgcatcagaagcctgtgtaaatgcccttctaggaaatgagctggagccacttgcagaagatattctccaccaaagcccgaatatgaatgctgttatttctttacagaagatcattgaaattcaaagtatgtctttaaagttctcttaaaaattctaagcaggtaaaactaactaaaattatattgaaaattatagtacaaagaaacattta

SEQ ID NO: 230854 - DNA, 2772 bp, Artificial Sequence
  derived and/or modified sequence
ctgcacaagctgagcagcctggtggatgtgaagtctgaggtgcctgtgggcctggagcccatcagccccctggacctgaggacagacctgaggatgatgatgcctgtggtggaccctgtggtgcgggagaagcagctgcagcaggagctgctgctgatccagcagcagcagcagatccagaagcagctgctgattgctgagttccagaagcagcacgagaacctgacccggcagcaccaggcccagctgcaggagcacatcaaggagctgctggccatcaagcagcagcaggagctgctggagaaggagcagaagctggagcagcagaggcaggagcaggaggtggagcggcacagaagagagcagcagctgccccccctgcggggcaaggaccggggccgggagagagctgtggccagcacagaggtgaagcagaagctgcaggagttcctgctgagcaagagcgccaccaaggacacccccaccaacgggaagaaccacagcgtgagccgccaccccaagctgtggtacacagctgcccaccacaccagcctggaccagagcagcccccccctgagcggcaccagccccagctacaagtacaccctgcccggggcccaggatgccaaggatgacttccccctgaggaagacagccagcgagcccaacctgaaggtgcgcagccggctgaagcagaaggtggccgagaggaggagcagccccctgctgcggaggaaggatggaaatgtggtgaccagcttcaagaagaggatgtttgaggtgacagagagctctgtgagcagcagcagccctggcagcggccccagcagccccaacaacggccccactggatctgtgacagaaaatgagacctctgtgctgccccccacccctcatgctgagcagatggtgtcccagcagaggatcctgattcatgaagattccatgaacctgctgagcctgtacaccagccccagcctgcccaacatcaccctgggcctgcctgctgtgcccagccagctgaatgccagcaacagcctgaaggagaagcagaagtgtgagacccagaccctgcggcagggcgtgcccctgcccggccagtatggaggcagcatcccagccagcagcagccacccccacgtgaccctggagggcaagccacccaacagcagccaccaggccctgctgcagcacctgctgctgaaggagcagatgaggcagcagaagctgctggtggccggcggcgtgcccctgcacccccagagccccctggccaccaaggagcgcatcagccctggcatccggggcacccacaagctgcccaggcaccggcccctgaacagaacccagagcgcccccctgccccagagcaccctggcccagctggtgatccagcagcagcaccagcagttcctggagaagcagaagcagtaccagcagcagatccacatgaacaagcccttcctggagcccacccacacccgggccctgtctgtgcggcaggcccccctggccgctgtgggcatggatggcctggagaagcaccggctggtgtccaggacccacagcagccctgctgcctctgtgctgccccacccagccatggaccggcccctgcagcccggcagcgccactggaattgcctatgaccccctgatgctgaagcaccagtgtgtgtgtggcaacagcaccacccaccctgagcacgccggccgcatccagagcatctggagccggctgcaggagaccggcctgctgaacaagtgtgagcgcatccagggcaggaaggccagcctggaggagatccagctggtgcacagcgagcaccacagcctgctgtatggcaccaaccccctggatggccagaagctggacccccgcatcctgctgggagatgacagccagaagttcttcagcagcctgccctgtggcggcctgggcgtggacagcgacaccatctggaatgagctgcacagcagcggggccgccaggatggctgtgggctgtgtgattgagctggccagcaaggtggccagcggggagctgaagaatggatttgctgtggtgcggcccccaggccaccacgccgaggagagcacagccatgggcttctgcttcttcaacagcgtggccatcacagccaagtacctgcgggaccagctgaacatcagcaagatcctgattgtggacctggatgtgcaccacggcaatggcacccagcaggccttctatgctgaccccagcatcctgtacatcagcctgcacagatatgatgagggcaacttcttccctggcagcggggccccaaatgaggtgggcaccggcctgggggagggctacaacatcaacatcgcctggacaggaggcctggacccccccatgggagatgtggagtacctggaggccttccgcaccatcgtgaagcctgtggccaaggagtttgatcctgacatggtgctggtgtctgctggctttgatgccctggagggccacaccccacccctgggcggctacaaggtgacagccaagtgcttcggccacctgaccaagcagctgatgaccctggctgatggccgggtggtgctggccctggagggcggccatgacctgacagccatctgtgatgccagcgaggcctgtgtgaatgccctgctgggcaatgagctggagcccctggccgaggacatcctgcaccagagccccaacatgaatgctgtgatcagcctgcagaagatcatcgagatccagagcatgagcctgaagttctcctag

SEQ ID NO: 230855 - DNA, 3036 bp, Artificial Sequence
  derived and/or modified sequence
atgcacagcatgatcagctctgtggatgtgaagtctgaggtgcctgtgggcctggagcccatcagccccctggacctgaggacagacctgaggatgatgatgcctgtggtggaccctgtggtgcgggagaagcagctgcagcaggagctgctgctgatccagcagcagcagcagatccagaagcagctgctgattgctgagttccagaagcagcacgagaacctgacccggcagcaccaggcccagctgcaggagcacatcaaggagctgctggccatcaagcagcagcaggagctgctggagaaggagcagaagctggagcagcagaggcaggagcaggaggtggagcggcacagaagagagcagcagctgccccccctgcggggcaaggaccggggccgggagagagctgtggccagcacagaggtgaagcagaagctgcaggagttcctgctgagcaagagcgccaccaaggacacccccaccaacgggaagaaccacagcgtgagccgccaccccaagctgtggtacacagctgcccaccacaccagcctggaccagagcagcccccccctgagcggcaccagccccagctacaagtacaccctgcccggggcccaggatgccaaggatgacttccccctgaggaagacagccagcgagcccaacctgaaggtgcgcagccggctgaagcagaaggtggccgagaggaggagcagccccctgctgcggaggaaggatggaaatgtggtgaccagcttcaagaagaggatgtttgaggtgacagagagctctgtgagcagcagcagccctggcagcggccccagcagccccaacaacggccccactggatctgtgacagaaaatgagacctctgtgctgccccccacccctcatgctgagcagatggtgtcccagcagaggatcctgattcatgaagattccatgaacctgctgagcctgtacaccagccccagcctgcccaacatcaccctgggcctgcctgctgtgcccagccagctgaatgccagcaacagcctgaaggagaagcagaagtgtgagacccagaccctgcggcagggcgtgcccctgcccggccagtatggaggcagcatcccagccagcagcagccacccccacgtgaccctggagggcaagccacccaacagcagccaccaggccctgctgcagcacctgctgctgaaggagcagatgaggcagcagaagctgctggtggccggcggcgtgcccctgcacccccagagccccctggccaccaaggagcgcatcagccctggcatccggggcacccacaagctgcccaggcaccggcccctgaacagaacccagagcgcccccctgccccagagcaccctggcccagctggtgatccagcagcagcaccagcagttcctggagaagcagaagcagtaccagcagcagatccacatgaacaagctgctgagcaagagcattgagcagctgaagcagcccggcagccacctggaggaggccgaggaggagctgcagggcgaccaggccatgcaggaggaccgggcccccagcagcggcaacagcaccaggagtgacagcagcgcctgtgtggatgacaccctgggccaggtgggcgctgtgaaggtgaaggaggagcctgtggacagtgatgaagatgcccagatccaggagatggagagcggggagcaggccgccttcatgcagcagcccttcctggagcccacccacacccgggccctgtctgtgcggcaggcccccctggccgctgtgggcatggatggcctggagaagcaccggctggtgtccaggacccacagcagccctgctgcctctgtgctgccccacccagccatggaccggcccctgcagcccggcagcgccactggaattgcctatgaccccctgatgctgaagcaccagtgtgtgtgtggcaacagcaccacccaccctgagcacgccggccgcatccagagcatctggagccggctgcaggagaccggcctgctgaacaagtgtgagcgcatccagggcaggaaggccagcctggaggagatccagctggtgcacagcgagcaccacagcctgctgtatggcaccaaccccctggatggccagaagctggacccccgcatcctgctgggagatgacagccagaagttcttcagcagcctgccctgtggcggcctgggcgtggacagcgacaccatctggaatgagctgcacagcagcggggccgccaggatggctgtgggctgtgtgattgagctggccagcaaggtggccagcggggagctgaagaatggatttgctgtggtgcggcccccaggccaccacgccgaggagagcacagccatgggcttctgcttcttcaacagcgtggccatcacagccaagtacctgcgggaccagctgaacatcagcaagatcctgattgtggacctggatgtgcaccacggcaatggcacccagcaggccttctatgctgaccccagcatcctgtacatcagcctgcacagatatgatgagggcaacttcttccctggcagcggggccccaaatgaggtgggcaccggcctgggggagggctacaacatcaacatcgcctggacaggaggcctggacccccccatgggagatgtggagtacctggaggccttccgcaccatcgtgaagcctgtggccaaggagtttgatcctgacatggtgctggtgtctgctggctttgatgccctggagggccacaccccacccctgggcggctacaaggtgacagccaagtgcttcggccacctgaccaagcagctgatgaccctggctgatggccgggtggtgctggccctggagggcggccatgacctgacagccatctgtgatgccagcgaggcctgtgtgaatgccctgctgggcaatgagctggagcccctggccgaggacatcctgcaccagagccccaacatgaatgctgtgatcagcctgcagaagatcatcgagatccagagcatgagcctgaagttctcctag

SEQ ID NO: 230856 - DNA, 2772 bp, Artificial Sequence
  derived and/or modified sequence
ctgcacaagctgagcagcctggtggacgtgaagagcgaggtgcccgtgggcttggaacctatttctcccctggacctgagaacggatctaagaatgatgatgccagtggtggatcctgtcgtccgagagaaacagctgcagcaagaacttctgctgatccaacagcagcagcagattcaaaaacaattactcatagctgaattccagaagcagcatgagaacctaacaagacagcatcaggcccagctccaggagcatatcaaagaacttctcgcgatcaagcagcagcaagagctgcttgagaaggagcagaaactagaacagcagcgtcaagaacaggaggtcgaaagacacaggagagagcaacagctccctccattacgaggcaaagatcgcggaagggaacgggcggtggcgtccactgaagttaaacagaagctacaggagtttctcctcagcaaaagcgctactaaagatacgcccactaacggtaaaaaccactctgtgtcaaggcaccccaagctgtggtatacagcggcacaccacacctctctggatcaatctagcccgccactctccggaacatccccgagttacaagtacacactgccgggggcccaggacgccaaggatgactttcccctcagaaagaccgcctctgaaccaaatttgaaggttcggtcacgccttaaacagaaggtcgccgagaggagatccagcccactcctgagaaggaaagatggcaacgtggtaacttcattcaaaaagagaatgtttgaggtaacggagtcatcagtctctagctctagtcccggcagtggcccatctagccccaacaatggtcccacagggtcagtgactgagaatgagacctccgtcctgccccccacccctcacgccgaacagatggttagccaacagcgcatcttaatccatgaagacagtatgaatttgcttagtctctacacttctccgagcctccctaacattaccctcgggttacccgcagtgccctctcagttgaacgcatctaacagcctgaaggaaaagcaaaaatgtgagacacagactctgaggcagggagtgcctctccctggccagtatgggggctccattccagcctctagctcccacccacatgtcacactcgaagggaagccccctaacagtagccaccaggccttgctgcagcacctgctgctgaaggaacaaatgagacagcagaagttgctggttgcaggaggagtgcccttgcacccacagagccccctggccacaaaagagcgcatctctcctggaatccgtggcacacacaagctgccacggcaccgtcccctcaaccgcactcagtccgctccactcccccaatcaactctcgcccaactcgttattcagcagcagcaccagcaattcctggaaaagcagaagcagtatcagcagcagattcatatgaacaagccctttctagagcctacgcacacaagagccctctctgtgagacaggcccctctagccgccgtcggcatggatggcttggaaaagcataggcttgtgtccaggacccactcaagtcccgctgcttccgttcttccccacccagctatggatcggcccctgcagcctggcagcgctacaggaatcgcctacgatccactgatgctgaagcatcaatgtgtatgcggaaatagtacaacacatcctgaacacgccggacgtatacaatctatttggagccggctgcaagaaacaggactccttaataaatgtgaacggatccagggccgaaaggcttccctggaggaaatccaactcgttcacagcgaacaccactccctactctatggaacaaaccctttggatggccagaagctagaccctcggatccttctcggagatgattctcagaagtttttttctagcctaccttgtgggggattgggggtggattccgatacaatctggaacgagctgcattccagcggggctgcgcggatggctgttggatgtgtgatagaactggctagtaaagtcgcaagcggtgaactgaagaacggattcgccgtggtgagaccccccgggcaccacgctgaagagagcaccgcaatgggtttctgcttctttaatagtgtggcaatcaccgccaaatacctgagggatcagcttaacatctccaaaattctgatagtggacctcgatgtgcaccacggtaacgggacccagcaggctttttatgcggatccatccatcctctacatcagcctccacagatacgacgagggcaactttttccctgggtcaggcgccccaaacgaggtaggtaccggcctaggagaggggtataacatcaatatcgcttggaccggaggcctggacccacccatgggtgatgtcgaatatctggaggcctttcgcactattgtgaagcccgtggcaaaggaattcgacccagacatggtgctcgtcagtgctgggttcgatgctctcgagggccataccccccctcttggcggctacaaagtgactgctaagtgtttcggccatctcaccaagcaactgatgacgttggccgatggcagggtcgtgctggccctggaggggggtcacgatctgacggcaatatgcgacgcatcagaggcctgcgtgaatgcccttctgggaaacgagctggagcccttggccgaggacattctgcaccagtctcccaatatgaacgccgttattagccttcagaagatcattgagatccagagtatgtcactaaagtttagttag

SEQ ID NO: 230857 - DNA, 3036 bp, Artificial Sequence
  derived and/or modified sequence
atgcacagcatgatcagcagcgtggacgtgaagagcgaggtgcccgtggggttggagccaatatcccctctagacttacgaactgatttaagaatgatgatgcctgtggtggaccctgtagtgagggaaaagcagctgcaacaggagctgttactgattcagcagcaacagcagatccagaaacagctgttgatcgccgaattccagaaacagcatgagaacctcacgaggcaacaccaggcgcagctccaggaacacatcaaggagctcctcgctattaagcagcagcaggagcttttggaaaaagaacagaagctggagcagcagcgacaagagcaggaggtggagcgccacaggcgtgaacagcagctcccccctttaagaggcaaagataggggccgggaacgggccgtggcttccactgaggtgaagcaaaagctgcaggagttcctcttatcaaagtcggccacgaaagacaccccaacgaacggcaagaaccactccgtatctcgacacccaaaactctggtacactgcagcccatcacacctcccttgaccaatcctcccctcccctgagtggcacatctcccagctataagtacaccctgcccggagcccaggatgcgaaggatgacttcccactgaggaaaacagctagcgagcccaacctaaaagttcgctcccgcctaaagcagaaggtggcagaaagacgttcctcccccttgttaagacgcaaggacgggaacgtggttacttccttcaagaaaagaatgttcgaagtgactgaaagttccgtgtcctcctcgtccccaggatccggaccctccagccctaacaatggccctacgggcagcgtgaccgaaaatgaaacatccgtcctgccaccaactccccatgccgagcagatggtatcacagcagcggatactgatacacgaagacagtatgaacctcctatccttatatactagcccaagcctgccaaatatcactcttggcctccccgccgtaccttctcagctcaatgccagcaatagtcttaaggagaagcagaaatgtgaaacacagacgttacgccagggagttccattgcccggacagtatgggggatccattcctgcctccagcagtcacccacatgtgactcttgaggggaagccacccaattctagccaccaggcactgctacagcatctgctgctaaaagagcaaatgcggcagcagaagcttcttgtcgcaggaggggttcctctccatccacagtctcctcttgccacaaaggagcgaatttccccaggtatacgaggcacacacaagctccctcgccaccgtccgcttaataggacacagtctgccccgctccctcagagcacactcgcccagctggttatacagcagcaacaccagcagttcctggaaaagcagaaacaataccagcaacagatccatatgaacaagctgctgagcaagagcatcgagcagttgaagcagccgggctcccacctggaggaagcagaagaagagctacagggagaccaggctatgcaggaggacagggctccaagctcagggaattccacccggtcggattcgagtgcctgcgtggacgacacattggggcaggtgggtgccgtcaaggtgaaggaggagccagttgacagtgacgaggacgctcagatccaagaaatggagtccggggagcaggccgcatttatgcagcagccattccttgaacccacccatactagagccctgagtgtccggcaggcccccttagccgccgtaggtatggacggccttgagaagcaccggctggtgagtcgcactcattcctcccctgcggctagcgtgctccctcatcctgcgatggaccggccgctacagcctggaagcgcaaccgggattgcatacgatccattgatgctgaaacatcagtgcgtgtgtggtaatagtacaacccatccggagcacgcagggagaattcagtcaatctggtcgcgcctgcaggagacaggtctgctcaataaatgtgaaaggatacaaggaaggaaggcctctctggaggagatccagttggtgcacagcgaacatcacagcttgctgtatggaacaaaccccctggatggtcagaagctggatccccgcatcctcctcggcgatgactcacagaagtttttttcctctctcccctgtggcgggctcggggtcgactccgatacgatctggaacgaacttcattcttcaggcgccgcacggatggctgttggctgtgtcatcgaactggcctctaaagttgcttccggggagctgaagaacggatttgcggtggttcgcccaccagggcaccatgcggaggagagtacagcaatggggttttgcttttttaactccgtcgctataacagcaaagtatctgagagaccagctgaatattagcaagatcttaatcgttgacctcgatgtgcaccatggtaacgggacccaacaggctttctacgcagatccctccatcttatacatctcactgcacaggtatgatgaggggaacttttttcccggttctggcgctccaaacgaagtgggcactggcctcggcgagggatataacataaatatcgcgtggacaggaggcctagatccgcctatgggtgatgtagaatatctggaagctttcaggacaattgtgaaacctgttgccaaagagtttgaccctgatatggtgcttgtttccgctggttttgacgcactcgaaggccacacgccccctctcggcggatataaagttaccgcaaaatgctttggtcatttgactaaacagctgatgacactggcggatggtcgggtggtgctggccctggagggcggccacgacctgaccgctatttgtgatgcctccgaagcttgcgtaaacgcgctcctcggaaatgagctggagcccctcgccgaggacatcctccaccaaagccctaacatgaacgcagtcatcagcctgcagaagatcatcgagatccagagcatgtctctgaagttcagttag

SEQ ID NO: 230858 - DNA, 2772 bp, Artificial Sequence
  derived and/or modified sequence
ctgcataagctgtcaagtctggtggacgtgaagtctgaggtccccgtcggtctggagccaatcagccctctggacttgcgcacggatctccggatgatgatgcctgtcgtcgatcctgtggtgcgtgagaagcaattgcagcaggaattgctgttgatccagcagcaacaacaaatccagaagcagcttcttatagccgagttccagaagcagcatgagaacctcactcgccagcaccaggctcaacttcaggaacacattaaagagttactggccattaaacagcagcaggaacttctggaaaaagagcaaaaacttgaacagcagcgccaggagcaggaggtcgaaagacaccggcgagagcaacagctgcccccacttcgagggaaggatagaggtcgggaaagggcagtggctagcacagaggtgaaacaaaaactgcaagaatttctactgtccaaatctgctacaaaggacacccccactaatgggaaaaatcatagtgtgtcacggcatcctaaactttggtacaccgcagctcatcacacctctctagaccagtcttctcctccattgagcggaaccagcccgtcttacaagtatacactgcccggagcacaggatgcaaaagacgacttcccactccgcaaaaccgcgagtgagcctaatctgaaggtgagatctcgcctcaaacagaaggttgccgagcggcgatcttctcctctactccggcgtaaggacggaaacgttgtaacatcgtttaagaagagaatgttcgaagttaccgaatcaagtgtaagcagctcgtcgccgggaagcgggcctagcagtccgaacaacggtcccaccgggtctgtgaccgaaaacgagactagcgtccttccacctaccccccacgccgagcagatggtgtcacagcaacgcattctcatccacgaagatagcatgaacctcctgagcctctacacctctccaagcctccccaacatcaccctgggtctgccagctgtgccctctcagcttaacgccagtaacagcctgaaggaaaaacagaagtgtgagactcagactctacggcagggggtgcctctacctggccaatatggaggtagcatccccgcttcaagcagccacccccatgtgacgctcgaaggcaaaccaccaaactcctctcatcaagcactgctacagcacctgctgttgaaagaacagatgcgacagcagaagctcctcgtggcaggtggtgtgccactgcatccgcagtctcctttggctactaaagagcgcatatcccccggaatccgcggaacccataagctcccgagacacagacccctaaaccgcacccaaagtgcacccctgcctcagtctacactggctcaactggtcatccagcaacagcaccaacagttcctcgagaaacagaaacaataccagcagcagattcacatgaacaaaccattcttggaaccgacccatactcgggctctatcagtgaggcaggcaccacttgcagcggtgggaatggacgggctggaaaagcacagactggtcagtcgcactcacagttcgcccgctgcctcagtgttgcctcatcctgctatggatagacccctccagcccggatccgctactggtatcgcttacgaccccttaatgctgaaacaccagtgcgtctgcggtaactccactacccatcccgagcacgctggccgaattcagagcatctggtctagacttcaggaaaccggcctcctcaacaaatgcgaaaggatccaggggaggaaagcttctctcgaagaaattcaactggtccacagtgagcaccactccctcctctacggaacgaatccacttgatggccagaagttggacccacgcattctgcttggagacgacagtcagaagttcttctcttccctcccttgcgggggactgggcgtcgatagtgacacaatctggaatgaacttcactctagcggagccgcacgtatggccgtcggctgtgtgatagaattagcctccaaagtcgcctccggggaactgaaaaacggatttgcggtggtgaggcctcccggtcatcatgcagaagagtccaccgcaatgggtttctgtttcttcaacagcgtggccatcactgctaagtaccttagagatcagctcaatatatccaagatcttgattgtcgatctcgacgtgcatcatggcaatgggacccagcaagccttttacgctgatccaagtattctgtacatttctctccaccggtacgatgaggggaatttcttccccggatccggggctcctaacgaggtggggaccggactgggagaggggtacaatattaatattgcctggacaggcggtcttgatccaccaatgggagacgtcgagtacctcgaagcctttcgtaccatcgtcaaacctgttgccaaagaatttgatcccgatatggtgttagtctcagctggatttgacgctctggaaggccacaccccacctctgggtggctacaaggtgacggcgaagtgttttggacaccttactaagcaactaatgacattggcagacggcagagtcgtcttggctctcgagggaggccacgatctcactgcgatttgcgatgcatctgaggcctgtgtgaacgcgctcctcggcaacgagcttgagcctctggcagaggatatcctgcaccagtcccccaatatgaatgcggtcatatccctccagaagattatcgagatccagtctatgagtttaaagttttcatag

SEQ ID NO: 230859 - DNA, 3036 bp, Artificial Sequence
  derived and/or modified sequence
atgcattccatgatatccagcgtggacgtaaaatcagaggtgcctgtcggactggaacccatctcacccttggacctccgcacagacctaaggatgatgatgccagttgtagatcccgtggtcagggaaaagcagttacaacaggagctgttattaattcagcagcaacagcagatccagaaacagctgcttatcgccgagtttcagaagcagcacgagaacctgacacgacagcaccaggcgcagcttcaagaacatattaaagagctgctagccattaagcagcaacaagagctgctggagaaggaacagaagctggaacaacagagacaggagcaagaagtcgaacgtcaccggagagagcaacagctgccccctctccggggaaaggatcgaggtcgggaacgggcagtggcttccactgaggtaaaacagaaactccaggagtttctactgtcaaagagtgctactaaggacacacccaccaacgggaagaatcactccgtatctcgccaccccaaactatggtatacggcagcgcaccatacgtctctagatcagtcttcaccccctttgagcggaacttccccatcctataagtatacattgcccggtgcccaagacgccaaggacgatttccctttgagaaagacagcatctgaaccaaacctgaaggtgagatccagactcaagcagaaagtggccgagcgcaggtccagcccactccttcggaggaaggatggaaatgttgtgacatctttcaaaaagagaatgttcgaggttactgagtcttccgtgtccagtagtagtcccggatccggcccatcaagtccgaataatggcccaaccggctcagtcacagagaacgagacctctgtcctacctccaacaccacatgcagaacagatggtaagccagcaacggatccttattcacgaggactctatgaatctcctgtcattatacacttcgccatccctgcccaacatcaccctcggtttaccagcagtgcctagtcagcttaacgcctctaactcacttaaggagaagcagaagtgcgaaacgcagactcttagacagggggtccccctgccgggacaatacggtgggtccatccctgcatcatctagtcacccccacgtgacactagaagggaaaccccctaactcttcccaccaagcgctgcttcagcatctcttactcaaagagcagatgcggcagcaaaagttgctggttgccggaggggttcctctgcacccacagtcccctctggccactaaggaacgtatctctccagggatcaggggcacacacaagttgcctcggcatcgaccacttaacagaacacagtccgcgccactcccccagtctaccctcgcccagcttgttattcagcagcagcatcagcagttccttgagaagcagaagcagtaccaacagcagatccacatgaacaagttactctccaagtcaatcgagcagctcaagcagcccggatcccaccttgaagaggcagaagaagaattgcagggcgaccaggcaatgcaagaggatcgcgcaccgtccagtggaaattctactaggtcagacagtagcgcttgtgtggacgacacactgggccaggtaggagccgtaaaagtaaaggaagagcccgtggattcagacgaagatgctcagatccaggagatggagagcggagagcaggccgcattcatgcagcagcccttcttagagcccactcacactagggctctgtctgtgagacaggcgccactggcagcagtgggaatggacggtcttgagaagcatcggcttgtcagccgaacccactcatctccggctgccagcgtgttgcctcaccctgctatggatagaccactgcaaccagggtctgcaacggggatcgcctatgatcctctaatgctcaagcatcagtgcgtctgcggcaactcaacgacacatcccgagcacgccggtcgaattcagtccatatggtctagactgcaggaaacagggctcctgaacaagtgtgaaaggatccaaggtcgtaaagccagcctggaagaaatccagctggtacacagcgaacaccactccctgctgtacggaactaacccccttgacgggcagaaattggaccctagaatcctccttggggatgattcccagaagttcttttcatctctgccatgtggcggactaggagttgatagtgacaccatttggaacgaacttcacagttctggcgcagctcgcatggccgtcggatgtgtgatcgaactcgcctccaaagtcgctagcggtgagctcaagaacggattcgcagtcgtgaggcctcctggacatcacgcagaggaaagcacggctatggggttctgtttcttcaacagtgttgccataaccgccaagtatttgcgcgatcagctgaacatcagtaaaatacttattgtggatctagatgtccatcatggcaacggcacccagcaggcattctatgctgacccaagcatcctgtatatatcattgcatcgctacgacgagggcaattttttccccggaagcggcgctccaaacgaagtaggtacaggcctgggcgaaggttacaacatcaatatcgcgtggaccggcggactggacccgccaatgggcgatgtagagtatctggaagcttttcgaaccattgtcaaacccgttgctaaagagtttgacccggacatggtattggtgtccgccggattcgatgctcttgaaggacacactccccctttggggggttacaaagtgaccgcaaaatgcttcggtcatctgacaaagcaacttatgactctcgccgatgggagagttgtgcttgccctcgagggagggcacgatttgacagcaatttgtgacgcctcagaagcctgcgtaaatgcacttttagggaacgagcttgagccgcttgccgaggacattctgcatcagtctcccaacatgaatgcagtcatcagccttcaaaagatcatcgagatccagtcgatgtctttaaagttcagctag

SEQ ID NO: 230860 - DNA, 2772 bp, Artificial Sequence
  derived and/or modified sequence
ctgcacaagctgagcagcctggtggacgtgaagagcgaggtgcccgtgggcctggagcccatcagccccctggacctgagaaccgacctgagaatgatgatgcccgtggtggaccccgtggtgagagagaagcagctgcagcaggagctgctgctgatccagcagcagcagcagatccagaagcagctgctgatcgccgagttccagaagcagcacgagaacctgaccagacagcaccaggcccagctgcaggagcacatcaaggagctgctggccatcaagcagcagcaggagctgctggagaaggagcagaagctggagcagcagagacaggagcaggaggtggagagacacagaagagagcagcagctgccccccctgagaggcaaggacagaggcagagagagagccgtggccagcaccgaggtgaagcagaagctgcaggagttcctgctgagcaagagcgccaccaaggacacccccaccaacggcaagaaccacagcgtgagcagacaccccaagctgtggtacaccgccgcccaccacaccagcctggaccagagcagcccccccctgagcggcaccagccccagctacaagtacaccctgcccggcgcccaggacgccaaggacgacttccccctgagaaagaccgccagcgagcccaacctgaaggtgagaagcagactgaagcagaaggtggccgagagaagaagcagccccctgctgagaagaaaggacggcaacgtggtgaccagcttcaagaagagaatgttcgaggtgaccgagagcagcgtgagcagcagcagccccggcagcggccccagcagccccaacaacggccccaccggcagcgtgaccgagaacgagaccagcgtgctgccccccaccccccacgccgagcagatggtgagccagcagagaatcctgatccacgaggacagcatgaacctgctgagcctgtacaccagccccagcctgcccaacatcaccctgggcctgcccgccgtgcccagccagctgaacgccagcaacagcctgaaggagaagcagaagtgcgagacccagaccctgagacagggcgtgcccctgcccggccagtacggcggcagcatccccgccagcagcagccacccccacgtgaccctggagggcaagccccccaacagcagccaccaggccctgctgcagcacctgctgctgaaggagcagatgagacagcagaagctgctggtggccggcggcgtgcccctgcacccccagagccccctggccaccaaggagagaatcagccccggcatcagaggcacccacaagctgcccagacacagacccctgaacagaacccagagcgcccccctgccccagagcaccctggcccagctggtgatccagcagcagcaccagcagttcctggagaagcagaagcagtaccagcagcagatccacatgaacaagcccttcctggagcccacccacaccagagccctgagcgtgagacaggcccccctggccgccgtgggcatggacggcctggagaagcacagactggtgagcagaacccacagcagccccgccgccagcgtgctgccccaccccgccatggacagacccctgcagcccggcagcgccaccggcatcgcctacgaccccctgatgctgaagcaccagtgcgtgtgcggcaacagcaccacccaccccgagcacgccggcagaatccagagcatctggagcagactgcaggagaccggcctgctgaacaagtgcgagagaatccagggcagaaaggccagcctggaggagatccagctggtgcacagcgagcaccacagcctgctgtacggcaccaaccccctggacggccagaagctggaccccagaatcctgctgggcgacgacagccagaagttcttcagcagcctgccctgcggcggcctgggcgtggacagcgacaccatctggaacgagctgcacagcagcggcgccgccagaatggccgtgggctgcgtgatcgagctggccagcaaggtggccagcggcgagctgaagaacggcttcgccgtggtgagaccccccggccaccacgccgaggagagcaccgccatgggcttctgcttcttcaacagcgtggccatcaccgccaagtacctgagagaccagctgaacatcagcaagatcctgatcgtggacctggacgtgcaccacggcaacggcacccagcaggccttctacgccgaccccagcatcctgtacatcagcctgcacagatacgacgagggcaacttcttccccggcagcggcgcccccaacgaggtgggcaccggcctgggcgagggctacaacatcaacatcgcctggaccggcggcctggacccccccatgggcgacgtggagtacctggaggccttcagaaccatcgtgaagcccgtggccaaggagttcgaccccgacatggtgctggtgagcgccggcttcgacgccctggagggccacaccccccccctgggcggctacaaggtgaccgccaagtgcttcggccacctgaccaagcagctgatgaccctggccgacggcagagtggtgctggccctggagggcggccacgacctgaccgccatctgcgacgccagcgaggcctgcgtgaacgccctgctgggcaacgagctggagcccctggccgaggacatcctgcaccagagccccaacatgaacgccgtgatcagcctgcagaagatcatcgagatccagagcatgagcctgaagttcagctag

SEQ ID NO: 230861 - DNA, 3036 bp, Artificial Sequence
  derived and/or modified sequence
atgcacagcatgatcagcagcgtggacgtgaagagcgaggtgcccgtgggcctggagcccatcagccccctggacctgagaaccgacctgagaatgatgatgcccgtggtggaccccgtggtgagagagaagcagctgcagcaggagctgctgctgatccagcagcagcagcagatccagaagcagctgctgatcgccgagttccagaagcagcacgagaacctgaccagacagcaccaggcccagctgcaggagcacatcaaggagctgctggccatcaagcagcagcaggagctgctggagaaggagcagaagctggagcagcagagacaggagcaggaggtggagagacacagaagagagcagcagctgccccccctgagaggcaaggacagaggcagagagagagccgtggccagcaccgaggtgaagcagaagctgcaggagttcctgctgagcaagagcgccaccaaggacacccccaccaacggcaagaaccacagcgtgagcagacaccccaagctgtggtacaccgccgcccaccacaccagcctggaccagagcagcccccccctgagcggcaccagccccagctacaagtacaccctgcccggcgcccaggacgccaaggacgacttccccctgagaaagaccgccagcgagcccaacctgaaggtgagaagcagactgaagcagaaggtggccgagagaagaagcagccccctgctgagaagaaaggacggcaacgtggtgaccagcttcaagaagagaatgttcgaggtgaccgagagcagcgtgagcagcagcagccccggcagcggccccagcagccccaacaacggccccaccggcagcgtgaccgagaacgagaccagcgtgctgccccccaccccccacgccgagcagatggtgagccagcagagaatcctgatccacgaggacagcatgaacctgctgagcctgtacaccagccccagcctgcccaacatcaccctgggcctgcccgccgtgcccagccagctgaacgccagcaacagcctgaaggagaagcagaagtgcgagacccagaccctgagacagggcgtgcccctgcccggccagtacggcggcagcatccccgccagcagcagccacccccacgtgaccctggagggcaagccccccaacagcagccaccaggccctgctgcagcacctgctgctgaaggagcagatgagacagcagaagctgctggtggccggcggcgtgcccctgcacccccagagccccctggccaccaaggagagaatcagccccggcatcagaggcacccacaagctgcccagacacagacccctgaacagaacccagagcgcccccctgccccagagcaccctggcccagctggtgatccagcagcagcaccagcagttcctggagaagcagaagcagtaccagcagcagatccacatgaacaagctgctgagcaagagcatcgagcagctgaagcagcccggcagccacctggaggaggccgaggaggagctgcagggcgaccaggccatgcaggaggacagagcccccagcagcggcaacagcaccagaagcgacagcagcgcctgcgtggacgacaccctgggccaggtgggcgccgtgaaggtgaaggaggagcccgtggacagcgacgaggacgcccagatccaggagatggagagcggcgagcaggccgccttcatgcagcagcccttcctggagcccacccacaccagagccctgagcgtgagacaggcccccctggccgccgtgggcatggacggcctggagaagcacagactggtgagcagaacccacagcagccccgccgccagcgtgctgccccaccccgccatggacagacccctgcagcccggcagcgccaccggcatcgcctacgaccccctgatgctgaagcaccagtgcgtgtgcggcaacagcaccacccaccccgagcacgccggcagaatccagagcatctggagcagactgcaggagaccggcctgctgaacaagtgcgagagaatccagggcagaaaggccagcctggaggagatccagctggtgcacagcgagcaccacagcctgctgtacggcaccaaccccctggacggccagaagctggaccccagaatcctgctgggcgacgacagccagaagttcttcagcagcctgccctgcggcggcctgggcgtggacagcgacaccatctggaacgagctgcacagcagcggcgccgccagaatggccgtgggctgcgtgatcgagctggccagcaaggtggccagcggcgagctgaagaacggcttcgccgtggtgagaccccccggccaccacgccgaggagagcaccgccatgggcttctgcttcttcaacagcgtggccatcaccgccaagtacctgagagaccagctgaacatcagcaagatcctgatcgtggacctggacgtgcaccacggcaacggcacccagcaggccttctacgccgaccccagcatcctgtacatcagcctgcacagatacgacgagggcaacttcttccccggcagcggcgcccccaacgaggtgggcaccggcctgggcgagggctacaacatcaacatcgcctggaccggcggcctggacccccccatgggcgacgtggagtacctggaggccttcagaaccatcgtgaagcccgtggccaaggagttcgaccccgacatggtgctggtgagcgccggcttcgacgccctggagggccacaccccccccctgggcggctacaaggtgaccgccaagtgcttcggccacctgaccaagcagctgatgaccctggccgacggcagagtggtgctggccctggagggcggccacgacctgaccgccatctgcgacgccagcgaggcctgcgtgaacgccctgctgggcaacgagctggagcccctggccgaggacatcctgcaccagagccccaacatgaacgccgtgatcagcctgcagaagatcatcgagatccagagcatgagcctgaagttcagctag
